United States Patent Application Publication US 2004/0123343 A1 - sequence listing, part 6

SEQ ID NO: 14771 - DNA, 506 bp, Oryza sativa
  Clone ID: PAT_MRT4530_20677C.1
cccacgcgtccgctcgccgccggcggctggggctccgccctagcgagcgtggcatcggcaacgcagctccggctcgagccgccccgccgccatcgccggctggctctgccgggtgcgcgcgctttcggtccacgcgccggttggggattgccccgtcgtgctctagcttaaccgcgatcctggcgcagggaagggttgtggggctaggaggttgcaaggtcgtcttcttccccctcttggcggcggcggccggtgattcgaggggaaggctgaatgctggggttctccaccggccagttggtggtcattcttggggcttgctcccttatgatgaagcgcagcgacatgatcaagatcgcaagggtggcggggaggatgaccgggagggcggtcgggcgcctcatgttgttccgcaagcagatggatgagatcctggagcattctgcagctaagcaggttaacaaggtgcttatttgatgctttgacacagctagatttaatttaat

SEQ ID NO: 14772 - DNA, 594 bp, Oryza sativa
  Clone ID: PAT_MRT4530_20678C.1
atgtccgtaggacagtctcagcgctcggtcgcctcgagcgcgcggctccggcaggaggccgagctcgccgcggtaggggaacacgagcgagcggcggcagagacttctgcgatggtagcgagagcatcaaggctggtggcggcggaattggcggcggcaagggtagaagtggaagcagcggcagcggcagatgcagcgcgtgcggcggcggcagagctcaaggctttgcgcgacagtagcaccaatagctctgtctccgcctccgacaacaccgatgatgagctgacgagggaggcagctcggacgacagggaggattgaacctgaggagtacggagcgggagtaatggttgatgttgtttgcatcaccatccttgggagtcagagtccgcctcaagatgcggtcatggcatctcttcagtacaggagggggcttccatatgctcctcacctgatgcggatgattgagcacgtctctcagattcagtttgtatgtgaggagccacatacatctctctccctgcgcttacccaagcgttgttctgtgcctcaggacatcccctccacatcctctcagcctcctactacctcgtga

SEQ ID NO: 14773 - DNA, 636 bp, Oryza sativa
  unsure (1)..(636): unsure at all n locations
  Clone ID: PAT_MRT4530_20679C.1
aaaggctgggagacccacccggagttgggactcctgtttgtgggtggccccctgaagaagtgcccacagtnatgagaaaggttagcttctccgcccnaacacggagccggctgaggagattccccactggtgtgtaccgggttgtgaggcccattgatttgcatgtagggaaacacggtgaatggaacactgatgaaaatnttggtgtgctgcctgtgtgtggtggcgactggctggtggatgaaaatgcgtgctgttgtgctgtgtggggtgcaatgggtgaatgtgctgccctggtggatgtgctgaggacatgttgtgcaaccgtgtgggtgtggatggcactgacctgaccctggagcatgctgctgggaaagatgcatgtgtgcatggtgcctgatgtgtgcctgatgacgccaggaatgaactggaagtggtgaggaggatggatggcctgtctgaggagcggctgtggtgctgattggatgacgtggtaccccccgctggttatgtnattggtgccaaatgattggaaatgactggaacccttgctgtgtgttntgtgttgcactgtgttggagaatgcatggatgccctgttggattggatagtgccgaaaaaaaaaaaaaaaaaaaa

SEQ ID NO: 14774 - DNA, 1224 bp, Oryza sativa
  Clone ID: PAT_MRT4530_2067C.1
atgcaacaaaaggaagccggcgaggaagccgtcgtcgtcgtgggcgccgggatcgccggcctcgccgtggctctcgggctgcacaggaaaggggtgaagtgctcggtgctggagtcgtcgccggagctccgggcgtcggggttcgccttcgcgacgtggacgaacgcgtggcaagcgcttgacaaccttggggtgggcgacaagatcaggaagcttcatctgcatcttcaggagttgcatgtcttctcttcgtctacgggagagataacacgaagagcggatctcacggtgcaggggaaacgaggacccaatgaactgcgctgcgtcaggcgggactggctgctccgagcactagaggaagagctaccaaaaggcaccatccgttactcctccaagatcgttgcaatcgaagaggatggcaacgccaagatcatacaccttgccgacgccgcaattctcagagcaaaggtgctgatcggctgcgacggggtgaattccgttgtggcaaaatggctggggctcacaaagccgtcgtcctcggggcgcttggcgacgagaggcctcgcgcattaccctgatggccatggattggacccaaggttcaagatgttcgtcggccatggcttccgtgctggcgtgatcccctgcaacgagactgatgcctactggttcttcacctggtctccttccgaacacgaaagtaatggcgtcgaggagagcgcggaaaagatgaagcagttcgtgctgaccaagctgaggagctccaagatcccaaccgaggtgctcgaggtcgtcgagaggagcaacataaacgacgtggtcgcgtcgccgctgcgtttccggcccccgctgtcgctcctgctcgcgagcatcagcaaggggaacgcgtgcgtcgccggtgacgcgctgcacccgatgacgcctgaccttggccagggcggctgcgcggcgctcgaggacggcgtcgtgctggcgagatgcctcggcgacgcccttctcggcggcggcggcgccgccgagagcgagaggatcgaggcgagtctacgtgagtacgctagaatccggcggtggaggagcgtcgagctcgtcgggacagcctacgtcgtcggcatcgtgcagcagagtaacaatgcggtcatcagctttctgcgggacaagtggttggccggagtgctcgccggaaggcttctgaaaatggcggactatgactgtggcaagctctaa

SEQ ID NO: 14775 - DNA, 1620 bp, Oryza sativa
  Clone ID: PAT_MRT4530_20680C.1
atggacgaatcgaacattccatcgttcacgttaggtgatttcgaccctaactacgtgtcgaggtcattcccaactggtaagtatgatgccaccggatcggctccaacaccaccagttatggagccaccggcgggttcagaagcatccggcactatgagtgggagtgtatcgacgaacaccggctcaaagagatcaagaacttccggtgtttggcaacatttcgatgaggtggccatgacaggccctgatggaaggcaggtaacattcgcgagatgtagaatatgcaaaaataagttatctgcgaaatcatctggtggaacaggacatttgaagcggcatgccgaggcttgtgcaaagaagcaaggaatccaactacgacagcaacaactactactaaatcctgatggtacggtacgtacgtgggagtatgatcctatggtagctcgagaaaatcttgcccgtttaattgctagacaagatttacccttgaactttggtgagagtcctgcatttgaaaattacataaaaaattctcataatcctaggtttcaagctgttagtagacaaaccacaacccgtgatttgaaaaatgtctatgacaaaggttatgaatcactgaaggaattatttagtacatgcaccttttctgtcagtgtcacctcagacatatggagtagtagggctaaagaggattaccttagtgtagttatacatttcattgatgatgattggcaaatgcaaaaaagagttcttggcttaaggttaattgatgtttcacatactggtgaaaatatagcagagagaattcgagaggttattgatgagtttaaccttgcagataaaatttttgctgtaacaatggataatgcatctgcaaattctagggccatggaaattctacaaccattattttgtatttatgctcaatcatttcttctgcatcagcgttgtgcatgccatatcattaatctaattgttaaatgtgggtttaagagagttaatgtacacatcgacgctgttcgtcaagcaatcacgtggttaactgcttcaaacccacggattgcacagtggaaaaggggaaaattacggggattcctcaatattctttcacttattggagatattattaatgttgattattctacctattatgctgatgtcaaaactaaattctatgagtggagcagaatttggggcggttcatcttctagccatggtggtggtaccagttcatcagcagcaagtggggacgctagatcgcatggtcctgccgaagagttgtccaactatttggatagtgatgccatcaggcatgaaacgtcagacttcaacgtactcgggtggtggaatgatcataagatgtcatatcctgtgctatcaaaactagcacgggatgtgttgacggtgcccgtatcttcggtatcctccgaatcagccttcagtctatgcggaagaattatcgaggataggagaacaagtctgagcagcgatcatgtggaaatactattaagcgtcaaagactgggaacttgctgcagaacatgcccaatacactgctgacaaccaagaattggccgcacagttcgaaaacctttatttagatgacgaacaattagggtag

SEQ ID NO: 14776 - DNA, 1899 bp, Oryza sativa
  Clone ID: PAT_MRT4530_20681C.1
ttactgtagagggctggcacggcacggcacggcacgggagcggcctagggtaggcacaccgcgcacgtggcgccaagcggccgagccgccgagggcagccgcggggccaagcggcgggaagcgcgcgtcgatgtcgaggtcattcccaactggtgagtatgatgccaccggatcggctccaacaccaccagttatggagccaccggcgggttcagaagcatccggcactatgagtgggagtgcatcgacgaacaccggctcaaagagatcaagaacttccggtgtttggcaacatttcgatgaggtggccatgacaggccctgatggaaggcaggtaacattcgcgagatgtagaatatgcaaaaataagttatctgcaaaatcatctggtggaacaggacatttgaagcggcatgccgaggcttgtgcaaagaagcaaggaatccaactacgacagcaacaactactactaaatcctgatggtacggtacgtacgtgggagtatgatcctatggtagctcgagaaaatcttgcccgtttaattgctagacaagatttacccttgaactttggtgagagtcctgcatttgaaaattacataaaaaattctcataatcctaggtttcaagctgttagtagacaaaccacaacccgtgatttgaaaaatgtctatgacaaaggttatgaatcactgaaggaattatttagtacatgcaccttttctgtcagtgtcacctcagacatatggagtagtagggctaaagaggattaccttagtgtagttgtacatttcattgatgatgatcggcaaatgcaaaaaagagttcttggcttaaggttaattgatgtttcacataccggtgaaaatatagcagagagaattcgagaggttattgatgagtttaaccttgcagataaaatttttgctgtaacaatggataatgcatctgcaaattctagggccatggaaattctacaaccattattttgtatttatgctcaatcatttcttctgcatcagcgttgtgcatgccatatcattaatctaattgttaaatgtgggtttaagagagttaatgtacacatcgacgctgttcgtcaagcaatcacgtggttaactgcttcaaacccacggattgcacagtggaaaaggggaaaattacggggattcctcaatattctttcacttattggagatattattaatgttgattattctacctattatgctgatgtcaaaactaaattctatgagggagatcgcttgcaaagacccccacctgtccctgcagcaggtaagaaaaaattacagtggagcagaatttggggcggttcatcttctagccatggtggtggtaccagttcatcagcagcaagtggggacgctagatcgcatggtcctgccgaagagttgtccaactatttggatagcgatgccatcaggcatgaaacgtcagacttcaacgtactcgggtggtggaatgatcataagatgtcatatcctgtgctatcaaaactagcacgggatgtgttgacggtgcccgtatcttcggtatcctccgaatcagccttcagtctatgcggaagaattatcgaggataggagaacaagtctgagcagcgatcatgtggaaatactattaagcgtcaaagactgggaacttgctgcagaacatgcccaatacactgctgacaaccaagaattggccgcacagttcgaaaacctttatttagatgacgaacaattagggtagctagtttatattttttaagtattgacctgttggctgtactcttttctttgtcatggttttctcaaatatgagtttttacatgacaaagtttttaacgaggcagcatgtatcatgtaaacatcaataaaggtcattactcttttttc

SEQ ID NO: 14777 - DNA, 441 bp, Oryza sativa
  Clone ID: PAT_MRT4530_20682C.1
cgaacgcgccgctgttttatggaggctccgcccacgccactgtcggggagggtctttttagaagaggagggagaaggccaccatacgcaagcccaaacgacttaagcagccaggggagaggcaccgaatcctgggacgccgaccgacaggaccgattcgtgaggagactcgccgactagcttggacacccaaaggacagccaggagcttaggttcctctggatagacctcctcgccaagtgcgacgcgtcgctggggatgaagattgccacccggctcaacatgaagccacacatgtgatgcattatgcctgcgctgaaaaaaaaagaagacgcatacatgtcgcagccaggaacaaagattctgtcatatataccagacccgcacgcatgggcatacttccatatattgttccgcccgggcccgtgtacgcctttgtacc

SEQ ID NO: 14778 - DNA, 1209 bp, Oryza sativa
  Clone ID: PAT_MRT4530_20683C.1
atggacgaatcgaacattccatcgttcacgttaggtgatttcgaccctaactacatgtcgaggtcattcccaactggtgagtatgatgccaccggatcggctccaacaccaccagttatggagccaccggcgggttcagaagcatctggcactatgagtgggagtgcatcgacgaacaccggctcaaagagatcaagaacttccggtgtttggcaacatttcgatgaggtggccatgacaggccctgatggaaggcaggtaacattcgcgagatgtagaatatgcaaaaataagttatctgcaaaatcatctggtggaacaggacatttgaagcggcatgccgaggcttgtgcaaagaagcaaggaatccaactacgacagcaacaactactactaaatcgtgatggtacggtacgtacgtgggagtatgatcctatggtagctcgagaaaatcttgcccgtttaattgctagacaagatttacccttgaactttggtgagagtcctgcatttgaaaattacataaaaaattctcataatcctaggtttcaagctgttagtagacaaaccacaacccgtgatttgaaaaatgtctatgacaaagttcttggcttaaggttaattgatgtttcacatactggtgaaaatatagcagagagaattcgagaggttattgatgagtttaaccttgcagataaaatttttgctgtaacaatggataatgcatctgcaaattctagggccatggaaattctacaaccattattttgtatttatgctcaatcatttcttctacatcagcgttgtgcatgccatatcattaatctaattgttaaatgtgggtttaggagagttaatgtacacatcgacgctgttcgtcaagcaatcacgtggttaactgcttcaaacccacggattgcacagtggaaaaggtattgttgtgcatcgggtgagcccccacagtatgaaaatgatgaccttttaatgcccgttgtctttaatatgaaacaaaaatatcttaaatattggaaagacatccccatgttgtattcttttgcatttattcttgatcctaggggaaaattacagggattcctcaatattctttcacttattggagatattattaatgttgattattctacctattatgctgatgtcaaaactaaattctatgaggtatttcgaaagtatgaattaaagttttag

SEQ ID NO: 14779 - DNA, 1884 bp, Oryza sativa
  unsure (1)..(1884): unsure at all n locations
  Clone ID: PAT_MRT4530_20684C.1
ctcccccattcgttgcttctcctctccgctcccccgaacaatctagggtttcggatcggaatcctccaccgccgccggcgttactaccggcgataatgtcggccagcggcgagcccgagaaggtccccgccgccgccgagggagaggagaaggcggacggcgcgaaggatgccgcgggctccgggggagagctgctgtactgcggcgcgaccaacttcgagaccatggggcggaaggtggtgggcggggcgcagggtaacctagtgtcgccgacgcggatgcggtcgctcatgggcgtcgacatacgattcgttgcctccgggtgcagtgcactggttgagatgaattatttatgggtgctaaatgttttcaggtacaaagtcattaaagcaagtgttggaagaaatcacacagtggttgtaaccgatgacgggaagtcattctcatttggtcacaataaacacggacagttgggtacaggctccctaaggaatgaaattgagacatcaccaatgccctgtcttgttactgaagcaactaatgctgtttgtggtgctgattttactgtctggctgtcatcagtggagggctctactatacttacagcaggtcttccccagtacggtcagcttggtcatggaaccgacaatgagtacaatattaaagactcatctgtaaagctggcatatgatccccagccccgtcccagggcaatagcttcattatctgggaaaactatcgtcaaagctgcatgtggaacaaatcatacagttgcagttgattcaagtggctatgtttacacatggggctttggtggatatggaaggttgggccatagagaacaaaaggatgagtggcagcctcgccttgttgaagtcttccagaagcataatgttctgccacccaatgctattatatcagctggtgcggcaagttctgcatgcactgccggtggaggacagttgtacatgtggggaaagttaaagaatacaggcgacgactggatgtatccaaagccattattggatttaagtggttggaacattcgttgcatggcttctggtaacatgcaccacgttgttggtgcagatgattcttgcataagctggggaacagcccaaaatggagagcttggctatggccctaatgggcaaaagtcatctgctaatcctaaaaaggttgacatccttgaaggaatgcatgttataagtgttggttgtggatatgggttgtctgcgattgttgtagacagatcaattgctagtgaccggcttaatcagctggatatttatgacggtgatacctccactgaagtagaagacagagtggaggtccaggttgccaagaaggcatctgctagcaccaatgcacgatctaacaagcgcaagaaaaccaaggatgtttccgaatcagaagaggatgatgatgaggaagatgatagcgacgacgatgaaaatggtgaaataaaaggtggtaagggtagacgtggccgcaaaccttcaaacagagggagaggcaggggagctaaaaaggcaactcctgagccaaagccatctgcaaggggcagaggccgcccgaagaaaaccgagtctcctgctcagaaaactgggagcttggggcgaggcgggaagagggggaagcgaggaagagctcggaagtgagtttaaaccaagtagggcattgttgaactcagatcgtgtgattgtctaactcctgatgcgatccaacccagccattcaagggcatttgttttcttagcaatggtttcttactcttgcccgccttacattgttgagcctgttttttgagtggaattacctctggtattgaagacttgtctgatttgaacctgaaaagctctgtttngttaaaaaaaaaaaaaaa

SEQ ID NO: 14780 - DNA, 1641 bp, Oryza sativa
  Clone ID: PAT_MRT4530_20685C.1
atggacgaatcgaacattccatcgttcacgttaggtgatttcgaccctaactacgtgtcgaggtcattcccaactggtgagtatgatgccaccggatcggctccaacaccaccagttatggagccaccagcgggttcagaagcatccggcgctatgagtgggagtgcatcgacgaacaccggctcaaagagatcaagaacttccggtgtttggcaacatttcgatgaggtggccgtgacaggccctgatggaaggcaggtaacattcgcgagatgtagaatatgcaaaaataagttatctgcaaaatcatctggtggaataggacatttgaagcggcatgccgaggcttgtgcaaagaagcaaggaatccaactacgacagcaacaactactactaaatcctgatggtacggaattattaagtacatgcaccttttctgtcagtgtcacctcagacatatggagtagtagggctaaagaggattaccttagtgtagttgtacatttcattgatgatgattggcaaatgcaaaaaagagttcttggcttaaggttaattgatgtttcacatactggtgaaaatatagcagagagaattcgagaggttattgatgagtttaaccttgcagataaaatttttgctgtaacaatggataatgcatctgcaaattctagggccatggaaattctacaaccattattttgtatttatgctcaatcatttcttctgcatcagcgttgtgcatgccatatcattaatctaattgttaaatgtgggtttaagagagttaatgtacagatcgacgctgttcgtcaagcaatcacgtggttaactgcttcaaacccacggattgcacagtggaaaaggtattgttgtgcatcgggtgagcccccacagtatgaaaatgatgaccttttaatgcccgttgtctttaatatgaaacaaaaatatcttaaatattggaaagatatcctcatgttgtattcttttgcatttattcttgatcctaggggaaaattacggggattcctcaatattctttcacttattggagatattattaatgttgattattctacctattatgctgatgtcaaaactaaattctatgaggtatttcgaaagtatgaattaaagtttcagggagatcgcttgcaaagacccccacctgtccttgcagcaggtaagaaaaaattacagtggagcagaatttggggcggttcatcttctagccatggtggtggtaccagttcatcagcagcaagtggagatgctagatcgcatggtcctgccgaagagttgtccaactatttggatagcgatgccatcaggcatgaaacgtcagacttcaacgtactcgggtggtggaatgatcataagatgtcatatcctgtgctatcaaaactagcacgggatgtgttgacggtgcccgtatcttcggtatcctccgaatcagccttcagtctatgcggaagaattatcgaggataggagaacaagtctgagcagcgatcatgtggaaatactattaagcgtcaaagactgggaacttgctgcagaacatgcccaatacactgctgacaaccaagaattggccgcacagttcgaaaacctttatttagatgacgaacaattagggtag

SEQ ID NO: 14781 - DNA, 3012 bp, Oryza sativa
  Clone ID: PAT_MRT4530_20686C.1
atggccgtgccgtcgagggttggccaacgccgtcgcggcaccggcggagacagaggccaacgccggagacggaggcagtcgcagctataccgggccaaacgggcggcccggctcagcccggcccgcggaaaatggaggcgggagtggctcagcgcctcagcgggcgggcgcgcgggggaccgcgagacgcacggtctcatggaggacagcgattgcacaggatactacccccaccagggagttgattcggaggataccgaagatacgggcaccgtcaacacatcccgtgctagttttgatagcacaggatatgacatcttgtgatcattccaccacccgagtacgttgaagtctgacgtttcatgcctgatggcatcgctatccaaatagttggacaactcttcggcaggaccatgcgatctagcatccccacttgctgctgatgaactggtaccaccaccatggctagaagatgaaccgccccaaattctgctccactgtaatttgttcttacctgctgcagggacaggtgggggtctttgcaagcgatctccctgaaactttaattcatactttcgaaatacctcatagaatttagttttgacatcagcataataggtagaataatcaacattaataatatctccaataagtgaaagaatattgaggaatccccgtaattttcccctaggatcaagaataaatgcaaaagaatacaacatggggatgtctttccaatatttaagatatttttgtttcatattaaagacaacgggcattaaaaggtcatcattttcatactgtgggggctcacccgatgcacaacaataccttttccactgtgcaatccgtgggtttgaagcagttaaccacgtgattgcttgacgaacagcgtcgatgtgtacattaactctcttaaacccacatttaacaattagattaatgatatggcatgcacaacgctgatgcagaagaaatgattgagcataaatacaaaataatggttgtagaatttccatggccctagaatttgcagatgcattatccattgttacagcaaaaattttatctgcaaggttaaactcatcaataacctctcgaattctctctgctatattttcaccagtatgtgaaacatcaattaaccttaagccaagaactcttttttgcatttgccaatcatcatcaatgaaatgtacaactacactaaggtaatcctctttagccctactactccatatgtctgaggtgacactgacagaaaaggtgcatgtactaaataattccttcagtgattcataacctttgtcatagacatttttcaaatcacgggttgtggtttgtctactaacagcttgaaacctaggattatgagaattttttatgtaattttcaaatgcaggactctcaccaaagttcaagggtaaatcttgtctagcaattaaacgggcaagattttctcgagctaccataggatcatactcccacgtacgtaccgtaccatcaggatttagtagtagttgttgctgtcgtagttggattccttgcttctttgcacaagcctcggcatgccgcttcaaatgtcctgttccaccagatgattttgcagataacttatttttgcatattctacatctcgcgaatgttacatgccttccatcagggcctgtcatggccacctcatcgaaatgttgccaaacaccggaagttcttgatctctttgagccggtgttcgtcgatgcactcccactcatagtgccggatgcttctgaacccgccggtggctccataactggtggtgttggagccgatccggtggcatcatactcactagttgggaatgacctcgacacgcagcgagagcgagtgagcgaccgacccagcgtgaggcagcgtcccagcctcccagctggccagccccagcgacacgccgacacgtcgcgacgccgcttgccacgcgccacgcgcgaacgaagcgacgcgcgcttcccgccgcctggccccgcggctgccctcggcggctcggccgcttggcgccacgtgcgcggtgccgcggtgtgcgcggccgagccgatcccgtgccgtgccgtgctcgcgggccgtgccgggccgtgccagccctctacagtaaacgtgccgtgccgtgctggcccacgggctatggcgtcggcccagacacggcacggcgccgccgccgccacccgctctcctcgctgcgtcgccgtcgcctgctcctctcacacccagctggatcgccgtgccttcttctcgccgtcgtgcggcaccgggctcgtcgatgacagatcgggcggcgctgaggaggatgaagttcccgtccactcccgcgtcctctgctggaagccttcttcgccgggaggattcctggtgacggagggcgacgtctgcggcttcccggtgtgccgcccctgctatgagtacgagcgaaaggatggcgcccaggcttgcccccagtgcaagaccaagtacaagcgccacaaaggggctgataactggagaatgcaaatcttcatcccttggtacatacaggtggtatcagataagcaattggtgaagcaccttcagatagaagttgctagacttgaaactgaactgagaatccctgatcgtgcctcctcttctgagatcattataatggaaaggaacaggaagattagacaggtggaaaaagaaatggaggaactcaagaagcaacgagacaatgcacagtcgaaacttgaattacagaagaagatgggtgataatcagccaggggcgacggaggtagcaagcaccctgactggccagcggaaaacgaggaacatatatagcagtggcagcgggagatgtgggagggccagcgccgaagaggatcgtgaagccgacgagccgccccgaagactccgggaagctctctcgggtgcccagaggaccatttctaggggccccaaggccaagctctacgccttccacttgcaagcccaaaaactcaggagactccgtcaaacctcctag

SEQ ID NO: 14782 - DNA, 222 bp, Oryza sativa
  Clone ID: PAT_MRT4530_20687C.1
atgtggaagggccaaattgaggcccaaactagccatcagggcagcgcaaattctacaacgctgcagaagagcacacctaccaggctaccaccgaccaccgtaccacgtttgtatctgatcaacgctgatgcaaagacgacggtcactcgttcttcgctgtcgccgttttgtcagccatcaatattttccgctgggggacagcggaacgacgccaaccgctag

SEQ ID NO: 14783 - DNA, 253 bp, Oryza sativa
  Clone ID: PAT_MRT4530_20688C.1
atatcctaggcgccagccagggttaaggggtactcttgacgtgtggccagctgtgccaacctcaataggccacgataactgacttggtctaagatgagctaaatttgatcagaaatttactaatgaacaaatcgttaaaagcttgtttgattacgatttataatactagtacgaacccagtaagcgtgaaatatggatcctttagatcttattagtatatagcgcaatttaaagtgtgttaagaatgatctat

SEQ ID NO: 14784 - DNA, 459 bp, Oryza sativa
  Clone ID: PAT_MRT4530_20689C.1
atggcgacaagtacaagtcggcggcaggggcgcgtcgccatcgccgtcgccgccgccagcggacgtggcgaggtgatcttcaccggtggcacagttgcacagagggacaaggcggaggcgggaggaccggagagaattgacactgcctatgagctaagcagcgaagacatcattgtccttgacaacgaactggacctcggcggcatcatgcccaactgggacgatgaaattctgcgtccaaaaggggttctcattgttgggaacgacgcggcagcacggagggggacgacgccgcgggcacggccgccggcgacggcgatggcggcggcggcggcggcgcggaggagtaaccgtggaacgaatgggacggtgagaggtaggcggagggcggcggctgctcagtctccggcggtggaggatactggtattggtactggccgtatgagtaaggctgtgtaa

SEQ ID NO: 14785 - DNA, 464 bp, Oryza sativa
  Clone ID: PAT_MRT4530_2068C.1
cagacgcgtgggcgcaccctaactccctcctatatactctcctacctcccaaggctgcggcggcacgctgcggcagcaggatggcatattcaacagctaggacgagcaaagacgtgaaccctcatgagttcatcaaggcctacttcagacacctgaagcagctccggcaagatggatctgcctgagtgagtcgacatccagaagactgcgaggctcaaggagctccctccttatgatccggactgctactacactagggctgcctatattgcatggaagatctacctgaagcatgctatagttgtaggtggctaccaaaatatctatggaggccggcagaggaatggctcacgtaccccgcacttctgtaagagcatatgatctatctcacgcatcatccttcaacagatggacaagatggtcatgatctatgtcaaccccaaaggcagtagactcatcatctc

SEQ ID NO: 14786 - DNA, 375 bp, Oryza sativa
  Clone ID: PAT_MRT4530_20690C.1
atgtccctcacctgtgcgcttctgctgccgccgctgccgaaggccatggctatggggatggaggtggacttcgcggaggaagaggaggagcctggaggaggcgacgacgagcggcgggagggcggctggtgtcaaggcggcgctgcttgccgtcggccggtgtcaaggcgtacaggggtgtggatgcggtggtgctgggcggtcgtggacgctaggtggcaggtcgtcaccgacgacaaggggctctcgccggggccgtacaagtacctgaggtccttcagctctgtcgaagacgccggaagtaggaaattgatcgttgcttgtgccgcaaattatggaaactggttacactacactggccaaggtcacctgtga

SEQ ID NO: 14787 - DNA, 424 bp, Oryza sativa
  Clone ID: PAT_MRT4530_20691C.1
ttttgtgtttttttttttttttttgttttttttttttttttttttttttttttttttttttttttttttaggggaaggggaaaaaagggtgaaaattttgggtttggccaacccttgggggacctttttttttttgggggggtattaccggacaacggaggcgggggcatcctggtcctttttaagcaaacccctcacggcctttggtccaaggaaaaacccatcacgaattcctcctaacctcctccttggccaaaaaacaccaaatgccctagtttttttttccgggggggaccctacccgggacttttttttccaatggcccataacaaaaaaaaggggcctgaagaaaagaaaaagaaaggaaaagaacccgggaaaaagggggggaaaaaaaggcgggaggaaccttacttcaaacggg

SEQ ID NO: 14788 - DNA, 562 bp, Oryza sativa
  Clone ID: PAT_MRT4530_20692C.1
acgagggctaagcactgatcatgttcaagttgtgggatatcctttgacagaacaccatgctttctgctaataaaaatcactgtagcacaaagctcaacaagttcaggtacagcattggacaatacttgcacagcaaatgcatttggaggacacctttgcaaagtgacaattacatacacacccacatttactaccttttctagtagtataacagactggtataaactgtccccaagatatcatacaccacccttcaacatcaatatatatgctcatcataagaaattgccccatgcttgcaacaatgcaaccctgctggtaccacatcactgagctcacctgctggctggctgaaagggtctctttctgattctctgaaggcatacacaacatacatcatcgacagctggacatctgaaacaatatgtgtgtccttcacttgcagagcagagggtgtggctttacaggctttaagcaacatttgggagcagtgacagcaggcaagaaaaatataacaagggagatgctgctttctaggattggtggtactatcaagcaagta

SEQ ID NO: 14789 - DNA, 680 bp, Oryza sativa
  Clone ID: PAT_MRT4530_20693C.1
gtccggaattcccgcgtcgacccacgcgtccgccaatgcttgttaggatgatcatagcaaaagctctcttcttgtcctagttcttttggaaaagggaaatgacttgttgagtcatttctgcctttgctcaccatttatattcatgatgaatctctgcctcagcttccttcttgttttgtcctccttcagaatcatgacatttgacactttctgctttctagctatattatgaattgtcatttctttcacacaaaagaacaaggaaaaaagaagaagaagatatggtatgcctccactcaaaatgaaaaaggctagaaattaggaaacaatgagcttgcgtccttcttcctggatataaattgtttcatatgacatgatttgtctgctgagtgctgacctgaacttcgcggcattatctagtactacaagcttttggacctaaccacttatcagaaaattccagagtccatttatgtcttgatcagttctacttcaataactatatggtatgtgcaaactttttctcttttttgacctttttctgctgacctgtttttgtctcatgggaccaaaccaaactgaatattcagaatgttttcattctagttttcaaaaaagagctgaattttgactgcgcctacattcgttgatcggcgatcgctgtcccgacaccgttttat

SEQ ID NO: 14790 - DNA, 911 bp, Oryza sativa
  Clone ID: PAT_MRT4530_20694C.1
gacctgagagcagccactgagataatatgttccaggacaccatcgcagctgcaaataatgaaacagacttatcatgcaaaatttggtacttatcttgagcacgacattggtcagcgcacatcaggcgaccatcagaagctcttgcttgcttatgtggggattccacgctatgaaggtcctgaggttgatcctactatagtgacacacgatgcaaaggacctctataaagctggtgagaaaaggctgggcactgatgagaagacctttcaatccgcattttcactgaacgcagctgggcacacatggcatctgttgcctctgcttaccatcatatgtatgatcggtcactggagaaggttgtgaagagcgaaacatctggaaactttgaacttgctctgctaactatcctcagatgcgctgagaatccagccaagtgttttgcaaaggtcttgcgggaagtccatgaaaggtatgggcactcatcatagtacacttataagggttgtagtaacaaggactgagatcgccatgcaatatatcaaggctgagtactacaagaaatacaaaaaatcattagctgaagctatccattccgagacctcaggaaattatcgaacattcctcctttctctagttggtagccattaggctacatttcgtcgaccctgtggcacttgacgttccatgactatcctaaatgcagtggttctacctggaaactgtaaaatttcgccatcattgtgctctctattcgtgtgtgcttgcttaaaaatgtgtgtatatatataacctgggcattaaatagttggtgcttaatatggtttggtggttccatctgacaagtcactcgttactcggtgcatttattcgaataagtgatggtatttggtcataaaaaaaaaaaaaaaaaa

SEQ ID NO: 14791 - DNA, 328 bp, Oryza sativa
  Clone ID: PAT_MRT4530_20695C.1
aattgggtagggaaataattggggcttaactaataattccattcttctattctttgtggaattttaaaaggaaccaccaaaagatttagagcctcccagttttgctgtccaaaaaaaaaaaaaaaaaaaaaaaaaaaaaaaagagaaaaaaaaaaaaaaaaagggggggccctttttgggacccaaattttgttccacgtggggggggccgccttaaagaatcaaagtttactcaagcgggaatccaaagtcattttttttttttaagggaaccaaaaaaaaaaaaaggggcgccccttttaaaaccttggaataggaaaaaccctgg

SEQ ID NO: 14792 - DNA, 291 bp, Oryza sativa
  Clone ID: PAT_MRT4530_20696C.1
atgccgaacctactgtttctctatagatcccttgatttcacatccattattcagagttgcacaaaccactatcacatatcttcacctttaccgttcgggagcactcccatggtaacaagagaatactcaagcttggcagtgcacaatggtgcaagactgcaggataatctgtatacactcattccaaggaccaaaacccattctcctcctgttcatgtgtcttgcgcccacactcgtaaagccctaaactgcacttcgccagtgtcctcgtcagtcgtcagctgcatgcaa

SEQ ID NO: 14793 - DNA, 369 bp, Oryza sativa
  Clone ID: PAT_MRT4530_20697C.1
cgtgttcttggttggtgatgctgcatctgtgggttgggtcttggaaccgagtgggaggtacgtaggaggtaggcccttcgtgaggcatgaacacgtcgagggcggaggataaggccatcgactactggttccccatcagctccttccgcaacgccaagtggtggtacttcgctttccacaacgtcaccgccatggtcggcgccggcgttctcagcctacccttcgccatgtccgagctcggctggggtcctggggtggcggtgatcatcatgttgagggtgatcactctgtccacgctgaggcagatggtttaagtgttgaagtgcttaacaaggttttttttttcctctattcaacttttctttatcc

SEQ ID NO: 14794 - DNA, 348 bp, Oryza sativa
  Clone ID: PAT_MRT4530_20698C.1
gtggaaatcgaacacggcggcctgggagatttgcttaactccagtgcaggtccaaaactcgccttcgggtgtatgagcgtgccagttgatttgatcctgcaatcaacaagaaataaagacaaagaaaccgcagttaatcctataaacgatagccgatcggctaggactctatccttacgtagcaatcaccgtaaagcacaccaacttaactcgatgacgtataccgagtcatattgtcagaatcggctgcatcggctatccttatctaactcgaactcagtcgatctgaacataaccgatttggactctagccgattcttgctctgtttctgaaataatcttcgtctt

SEQ ID NO: 14795 - DNA, 288 bp, Oryza sativa
  Clone ID: PAT_MRT4530_20699C.1
atggaattcagcgatagagaggcagcggacggcgccagggcagcctcaaccgcgtcggcggccccgaatatcgccgtgactctgatctgccgctgccgcctggttcacctcgccaacaccggtgccatcccagctcgatggagaacccaggtcgtcgtccccctccaaccttcaatgacggcggtgaacttcgcagacgaccggcagcggcgacgacgaacctcacagatgaccgcagcggcgacgacgaacctcacagaccgcacgatcctcatggatgatcgatag

SEQ ID NO: 14796 - DNA, 408 bp, Oryza sativa
  Clone ID: PAT_MRT4530_2069C.1
atgaataccaactttactatatatccgagttatatttattatgatgctagcttatctgggaaatgcaatggtgtgggtataatgagcgtgtatacgatgactctatgtcatgacgatgatattagagtagtatttggtaatttaagcgtggtgtttagattaccggatatcattatttggcgttatatgctgcggaagcgatgtgggccgctaatggtgacagctcagtatgggtatttctccgcgcgtgtatatagtccaaagttaatttcctgtggagggtactcctccgtatttagcccccgttggatggtcatgacggattgtcgcaaggaactcgacaatcagggggtggcttctcgaagcaccaggccatgctagtccgactgatctcgggcctaagcccaa

SEQ ID NO: 14797 - DNA, 1011 bp, Oryza sativa
  Clone ID: PAT_MRT4530_206C.1
atgccttcctccgccgcagccgccgccgacggcggcgacatcgaggaggtggaccgcctcaagaagaggatcaggaccctcgagatggaggagacgaagttgaaccagcatatggaacgcgtcatccagggaatcgaagcgaacgaggcgtacctcgtcggcatggtcctcaggattatggaaaagggcccagaggatgagactgctgaggatgattgtgatgttggctttcatttgcagcgaaaaattatattccgtcctattgctggggtagtgtaccctagcaaacttaagcctggagatttaattggtgttgacagtacatcaaatgaacactactgtggcattggtggtctcgaaaaacaaattgaggagcttgtggaagcagttgtgttgccaataatccacaagaactgcttccagaggttgggaattcaccctccaaaaggtgtacttctgtatggaccacctggaactgggaagacactcgttgcccatgcatttgcttcccagacaaatgcaacatttcttaagctaactggtccacaacttgccgtgaagcttattggtgagggagcaagacttgttcgtgatgcctttcagcttgctaaagagaaagccccatgcattattttcattgatgaaattgatgcaattggaagcaagcactttgatagtggtgatagggaagtgcaacaaacaattgtggagcttcttaatcagttggatggcgtcgggagctatgagagtataaaggtaatagctgcaactaatcggccagaagttcttgatcctgcttttctgcgatctggccgtttagatcaaaagattgaattccctcatccatctgaacaggctagaatccactcccgaaaaatggacaaaaaccctgatgtaaactttgaagagttggcttgctgtacagatgattttaatggtgcacagctaaaggctgttcggcatgaggactttgtcagagcaattgcgcaagtaaaagacgggaattactga

SEQ ID NO: 14798 - DNA, 609 bp, Oryza sativa
  Clone ID: PAT_MRT4530_20700C.1
acacacgccaaaacgatgagacacatggcatttcgcagggttctcttatggaaatgactagccccaaacgaggaatcgcaatgggttatcctgccctgattgaggatgacatgaggatcaagtcagcaggaaagcaagaagacgatcagcagctgatcgatggagtactaggcatccatgagctagctacgcagaaaatgctgcagaagattcacgggtcgcatcgatggacattgtggcgcagtcgacatgtccatagaattcttcccaacgcagtggaagccacggttgagctcgatcatcatatcagatgttcgcagctgcttcgatctgtacatcagctcttatgccagtggattagctgaagagtttgagctgtttcatggcgacattggtgagccatgtgggttgagaaggtttgtggtcgctgtgacgctggatcgcttgttgcacttgagattttcgttgctgaaacgaggctccgagaggtctgaagaagtcgcgtgttcgttgacagcgcagaaatacgggtgtaaaacaaatgaaatatatgttggtccggcctcattctcgtgaagattacttggtcaaactgtgtccctaaattgt

SEQ ID NO: 14799 - DNA, 173 bp, Oryza sativa
  Clone ID: PAT_MRT4530_20701C.1
gaaatgcactatcgaagaagctaaatgcaatagcaggtggtggcatggtggatctggttggcaacgacggctttgagcaggagtggctgctggcgatatatgaggaggtggagaaagacacaggaaaacagggagaaatagagagaacgagagagagagagagtggtgtgtaa

SEQ ID NO: 14800 - DNA, 389 bp, Oryza sativa
  Clone ID: PAT_MRT4530_20702C.1
tgagctgatcagcctgacaattactagtttgtattccatttattaagaaaaaaatatcatcattgaatcatacaatcctcgactgtgtgttcgctcggcaggtcaggttccgtgtgttgtcgcctcctggctagaccgctctctcttcctcttgtggcagtcggcttcaggattggtggccaacctctagggcctgctttatctgagcatctccgtgccggtttcgactctctgatacttctggtctcttggcactatggaaggaacggaactccagagttttcgattctacgctctcttcggtctcagtggttctagagtatatctgcttggaagatcatctgtggtctttagcgtgcattgctacttttggagatttattgaaaatg

SEQ ID NO: 14801 - DNA, 261 bp, Oryza sativa
  Clone ID: PAT_MRT4530_20703C.1
atggcggccgcgcgctctcccttctcttccgccattggacgcacgctccgcctccgcctccgcctccgtcatcggccgttcgagcgagctccgccagggagtagcatatgttcctcctacaattggatcttccgaaagaattgttatgagaggaaatacccagacctttctcagctttctaatggctatttcattgcggcagcccactactcttccagctctgccgacagccacacctacgagctacagctgaagcattag

SEQ ID NO: 14802 - DNA, 159 bp, Oryza sativa
  Clone ID: PAT_MRT4530_20704C.1
cagcccatatcccaaggggcgatttattattcaagatattgtcaatccatccaaatgaggaacttagatttttttccagtcgtactctaactattatggattaaacacctttcagttatgccaaattgttctatatctcctttatttagtaggtccttt

SEQ ID NO: 14803 - DNA, 279 bp, Oryza sativa
  Clone ID: PAT_MRT4530_20705C.1
atggcttcggctgaattggcgtatgaattggctgttttgaagagcttcatgacggtaagtggcgtgacaacggtgttgttcaatcctgaggtcttcgccttcccggtgcccgtggtcgtcttcctgtctacggtcgctttcatggtggtcatcttcacgatgattgttatcacggagtcatcgagcgaacgaatcaagatgcccaccttcctgggcccatgtggcgttgactccccagaccagtttgaggccaagccatggaaatccgacctggagtag

SEQ ID NO: 14804 - DNA, 522 bp, Oryza sativa
  Clone ID: PAT_MRT4530_20706C.1
atggctgccatttttaatagtgttaagcactccttgattatgagtctgtccaagtttcaaacagccaaggctatatggggttctctgaagcaacgttatgttcaagatagtggtgctcttttgcatactctcatgcagcagactcatgccattgagcaaaatgcacaccaatttcttgaaaagtttcttacatattgctttgttatgggagtaagagaagattttgactttatccgtactcggctgcttcacagttcctctactctaaccatggcacaggcattgtctgatttacttgctgaggagacacgcctcaaatctctacctgcaccatctgtgtcagtttctcatggtgtgttagcagcttctcagaggtttggcgcatccagaggtacctcttcaatgccttgtaagcattgtggaaagacaggacatagtgcagagaattgttttgctcaacacccagagaagttggctgagtataactacaacaaaaccactgttataagacatttgacttaa

SEQ ID NO: 14805 - DNA, 173 bp, Oryza sativa
  Clone ID: PAT_MRT4530_20707C.1
gcacgagggtccgtggttacctgctgcttcccctatcaccgtcgtccagctacgtcggcctcgccggtaccggcacgtcatcgcggcacagggggcacgtcctccgcaggcaagcgcagcgcaccgtctccccttcctcgacggcccgcaggcacaccgcgcactccgccgcc

SEQ ID NO: 14806 - DNA, 1092 bp, Oryza sativa
  Clone ID: PAT_MRT4530_20708C.1
atgccgccagttgcggtgcctatcccgcagccgtcgctgcgcctcacgctgccaagtcgcgacgtctattcacgccgccgatcgcggcgaccatcccgccgcaaatcacagcgccatctcaccactgtcaagcctccttccgagactgctttgaggggtcatggtttagcttttcatttcaccgacgatccacctatgcctaaaactggtgataaaactaatgatactaatgcatctgaaattaaaagttggaaaattaatgatggtaaagtgatggctgccattgttaatagtgttaagcactccttgattgtgagtctgtccaagtttcaaacagccaaggctatatggggttctctgaagcaacgttatgttcaagatagtggtgctcttttgcatactctcatgcagcagactcatgccattgagcaaaatgatatgtccattgatgagtactactctgcatttgatcgtcttatgggatcattgacttcaatggtgcctgcctgtacaactgctgcatgtccagcacaccaatttcttgaaaagtttcttacatatcgctttgttatgggagtaagagaagattttgactctatccgtactcggctgcttcacagttcctctactctaaccatggcactagcattgtctgatttacttgctgaggagacacgcctcaaatctctacctgcaccagctaaaacaattgctctccagtatgtgtcctcagaactgaaagtcgcagactttttcactaaagcacaaactcgtgagcagcatcgtttcacttgctcaaactcagtgcttcagatcctccacttctgccttgagtttgaagaggggtgttatgtatatctatatcaaggcctagcccatatagtccatgaggattctatatatattgtcatccaaagagagaagatttgtattgattctaatccaaggtacgtaataattgagacggagatgggaggaggggaggaggagagggacagggagataagtgtgggaggatgggggaggagggagaatggaggatggcaaggaagcaagcgtgggatcgaggaggacagtgcgggcagcgcgtga

SEQ ID NO: 14807 - DNA, 288 bp, Oryza sativa
  Clone ID: PAT_MRT4530_20709C.1
atggacagatcactgtctacttcactgcttcttgtcctcgcccatttcatcatcatctttgctcatcttttggatgcacgaacactaggagacgcataccaaccacacgtacatgcgtcgtcgtcgtcggcggcggcgttgcggctgtggagcagcgcggatgccgacggtggcgcgctggcgaagtcgtcgccgcgcgctccgccgccgccgaggagatgtcgttggccaacctgtgctctccccaagccgcccggcagtgtacacggcttagttacgaggtcgtaa

SEQ ID NO: 14808 - DNA, 432 bp, Oryza sativa
  Clone ID: PAT_MRT4530_2070C.1
atggacaaaaatggagggctcaccggcgaggcgagggaatcggagctccgacggcgattagcgacagccgagcggtggccgagggggcgcagaaggaagcggcaagagcggaaaacgggagagggggctcgggggagacgttttatgggcacaggatgggcggacgtggccgggaggcggccctattacgccggcgacgtggggggggggatagaggggtgggattcgaaatcgaatcccgcccatttgcggtgcgcgcgcgagcgggaaaagcgaggcgtgggcggcaacgtgggcgtggggcgtggggatgcggagtggggcgtgggagagagcgagcggcggcggttggggcggttgccgccggccgggcgcgggcagctggagcttggggacgacccaacaggtgggccccacctatcggcgtcctag

SEQ ID NO: 14809 - DNA, 173 bp, Oryza sativa
  unsure (1)..(173): unsure at all n locations
  Clone ID: PAT_MRT4530_20710C.1
acacaacacacgtaccaccagccatcactactttcaggcatcctcatgctggtcaccagcacaccaggtttttaggctaggtcttngcattcccttggcatcagcatatctagccatcagtctatggcagcccctcgcaacacacggctgcacacccagctaaccaaataggc

SEQ ID NO: 14810 - DNA, 864 bp, Oryza sativa
  Clone ID: PAT_MRT4530_20711C.1
atgacgccgtgcgggggcgcggccggcgagcggtgcgacggcgccgtgcgggggcacaatcggcccgcggcagcgtgcagcggcaccgtacggggcgcgaccgaccgtggctcgcggcggcttgcggcgcggtggcgcgcactgctcctcgccacctcgccgtcggccacggacccacccgccgacgccgccaacaccgccatcgccgccggatcaggggcaagagggaggcgagaggggaggagggagctgccgccggcccgcgaccgccaccaccacatccggttccacccgcggctaccgccgccgtcgacaccaccggcggatctaccgagagagtggtgcagcggccaccacccgacgaggagagaaggagccggcggtggggggagggagcggcgtcaccatcgccgcgtcgccgcagccgcctgccgcgagggagtgtgccgccgctgccgctcgtgggagggcagggcgccgctgccgccatcgtcgccgctcgcgggaggaagggcgccgccgctgtccgcttgtgggggagaagggtgccgtcgccgctgctcggtaggtaaagccaccgccggtggggaggggggcaagaggtgtcggcggtgggggaggggcgttgagaggcgtcgccggttggggaggggcgcggagaggtgcgccggtgggggtgtggcgcggccggcggcggggagaaaggcgacctgcgtggaggggaggaaggggaagaatgaaattaggagcgtgacgtggccaactcaccgatggctcgaacgacgacggacggtgacgatcgacaatggcggcgaggtcgagacggcggtggtcttcgggtcgacggtggtggcggcactctag

SEQ ID NO: 14811 - DNA, 324 bp, Oryza sativa
  Clone ID: PAT_MRT4530_20712C.1
atgccggaccagatgttgcagatacatgaattggtattggtattgggaaggtactcgtttcaaaggttgtgcgtattggccataagctcggtgaggacattgaaacaggggaaggtgacaagacgatcgatgcaggatggtgaggaccttgtgcgagacgcgggttcgagcgaggagtgtgaggaggggtggaggagcgtgagggagtggtcggctaggaggagatggaggagcgacaagaactacagtttgatgaaccagccagtaatggaggccgagaagagcaaaagtatattaatcctcctagtgggttttggtgattaa

SEQ ID NO: 14812 - DNA, 267 bp, Oryza sativa
  Clone ID: PAT_MRT4530_20713C.1
atggtcgactgcaaaggactcgggggctactgtggagattatgggtatcccatatctacacggcgatgtagtgggcgagatgctgttgcaattgccttctgcgaagcaaagcttctcgcggtgttgaggcggcagcaatggacacatgaaaatctgaagcgcaaagacatctgtgtccttgttaggaatgcaagatcagcggcataccgacgagcactggcaacaattgtcctggagcagcaagaggatgaccttaagtttctctag

SEQ ID NO: 14813 - DNA, 5091 bp, Oryza sativa
  Clone ID: PAT_MRT4530_20714C.1
atgccgcgttacaagcctgagtacctgtttggtgttgagggttttgtccaggagttgcgtacgatgtcctttgtcattggatttgggactgcccctttttatgcccagattcgtcatgatcgtcatgaagagaagtgccgagtcaaagtcaccttgaacagcaatagtgaagaggtcccctcagtgatgtttgaagctggaggaagaaactacatccatgcatgtcaggaagtggcaaggatcgccacaggagaactccgtgatagctacagtgatcagttggccgacactgagtatcgctatcatcctcgccaacctcagggaagtgaccgtggcagttaccttgagactgaaggaattgagaatgatgttaccacaagacatttggttgagatgttgtgggctatggatgaaagtcgtgcggagactgtgttagcagctcaagatcgtgaagatcggaatcgtggtaagatttgcaagttagaagacaaggtggatcgcttggagaaggaattagccgcattgaagggagaagcaccgccgcagaaggccaggattcgtctcaccgcaaggaagagagctttgtttgtccctcgttatcaattggcgccaaagatccgcgtggtggagaaagaagttgccccagcaaatcctcccgtcatcatcataagtagtgatgaagaagaagaacccaagcgcaacaattccaagtttgagtggatggtgaacactcgtagcaatgggaatggtcccaacaaccccaatagcaacaacaatggagagaatcccactctggcccaagttcttgctcaacagacacagcttatgaacatgatgatgcagcaatttcagaatcagcaaaaccaagggaataatcatgcacctccacagaacaagttagcagaatttcttcgtgtgaggccgcctgttttctctagtaccactaatcctgttgaagctagtgattggctgcatgccatagagaagaagttggatttacttcagtgtactgatcaggagaaggtctcatttgcatcacatcagttgcatggccctgcctctgaatggtgggatcacttccgccttaacaggactactgctgaacctatcacttggcttgaattcaccgctgctttccggaagacgcatataccatcgggagtagtgtctctcaagaagaaggagttcaggtcgctttcccagggatctcgctctgttacggagtatctgcacgagttcaatcgtcttgctcgttatgctccggaagatgtgcgcaatgatgaagagcgccaggagaagtttttgggaggacttaatgatgagctttcttacctactcatggttggagattatcctgatttccagaaattagtggataaggccattcgtcaggaggacaagtacaatcgcatggagcagaagaaacgtcggattgctcaattcaagacacaacagggaaataatcagaagccgcgtcttactttaggaccccagcccatgccacagggaggttcttcgtctgttgttcgtccgcaacgtcagttcttcaacaacaatgctggcaacaacatccgtaatcaagctccacgtcctgttgcagttccagcacagcaacagcctgccaagagggagcaaggcaacaagcccgtggtgtgtttcaactgtggagatccaggacattatgctgacaagtgtccgaagccccgacgcgtgaaggttgttcctgctcagaataactctgctgtaccagcatcaaaggcccgtgtcaatcatgttgctgctgcagaagctcaagatgctccagatgtgattttgggtacgttccttgttaactcagttcctgcaacagtacttttcgattctggtgctacacattcattcttatctatgagttttgcgggaaatcatgggatggaagtagaagatcttagacgtcctttgatggttagtaccccaagtaatcaagcactctctttgcaacgtagcccctctgtcagaatagaaattcaaggagtaccatttctggccaatcttatcttgttagaatccaaagaccttgatgtcatcctagggatggactggttagccagacataaaggtgtgatagactgtgccaacagaaaagtaactctcaacagctatgatggtcgagttgtaactgttcatgcattgtcatctgagtctttaaggtcaagactgaaccagataactttggaagagattcctatagtccgggagtatcctgatgtgttcccagatgatttacctggtatgccgcctaaaagggatatagagttcagaatagatttggtacctggaacaactccgatccataagagaccttatcgaatggcagccaatgagttggcagaagttaagaggcaagtagatgaattgctacagaaaggatacatcagaccgagttcatcaccatggggagctccggttatttttgtggaaaagaaagaccatactcagagaatgtgtgtggactatcgtgcactaaacgatgtgactattaagaataagtatccattacccaggattgatgatttgtttgatcagcttaaaggagccactgttttctccaagatagatcttcgatcagggtatcatcagttgagaatcaaagaggaagatatacctaagacagcttttaccactaggtatgggttgttcgaatgtactgttatgtcttttggacttaccaatgcccctgctttcttcatgaacttgatgaataaggtgtttatggaatacttagacaagttcgtggtggtctttatagatgatattcctatctactctcgaatcaaagaagagcatgaggaacatcttcgccttgcattggagaagctacgagaacatcaactgtatgctaagtttagcaagtgtgaattttggttgtctgaagtgaaattccttggtcacgtcatctcagccggaggagttgccgtcgatcctagtaacgtggaatccgtaaccaattggaagcaaccaaagacagtttcagagattcgcagtttcctaggccttgcaggatattatcggaggtttatagagaatttttccaagattgctaagcccatgacacgactgcttcagaaagatgtgaagtacaagtggtcggaagaatgtgaacagagttttcaagagttgaaaagtcgcttaatatcagctcctattttgattttgcctgatccaaagaagggttttcaagtgtattgtgatgcatccaaacttgggttaggttgtgttctgatgcaagatgggaaggtggttgcctatgcctctcgacagttacgtccgcatgagaagaactaccctactcatgatattgagttagctgcagtcgttcatgcgttgaagatttggcgtcattatcttttcggtactcgtacagaagtgtacaccgatcacaagagtttaaagtatatctttactcagccggatctgaacatgagacaacggagatggttggaattaattaaggattatgacatgggaattcattatcatccgggaaaggctaatgttgtagcagacgctcttagcagaaaaggctattgcaatgctacagaaggacgacagttgccattggaattatgcaaggaatttgaaagattaaatttgggaattgtcggtagaggtttcgttgcagccttagaagcgaagcccactctaattgatcaagttagagaagcccaaattaatgatcctgatattcaagagatcaagaagaatatgagaagaggaaaagctattggtttcttggaggatgagcacggaactgtatggttgggtgagagaatctgtgtccccgacaacaaagatttaaaggatgcaattctgaaagaagctcatgatactttatactccattcaccctggtagtactaagatgtaccaggatcttaaggaaagattttggtggcaacgagtcaaggcagaacatcagaaacccgccggtttgttgcaacctttgaagattcctgaatggaaatgggaagaaattggtatggattttattactggtttacccagaacatcatcaggccatgactctatttgggtgatagtcgacagacttaccaaagtggctcattttattccggtaaagacaacttattccggaagtcgcttagcagaattgtatatggcaaggattgtgtgtttgcatggcgtccctaagaaaatagtgtctgatcgaggcagtcagtttacttcaaacttttggaagaaacttcaggaagagatgggttctaagctgaactttagtactgcttatcatccgcagacagacggacaaaccgaaagggtgaatcaaattttggaagacatgttgagagcttgtgctctagatttcggtggaagttgggataagaatctaccttatgcagaattttcgtacaacaacagttatcaagctagtcttcagatggctccttacgaagcactgtatggtcggaagtgccgcactccgcttttgtgggatcaaacgggagaacgtcaggttttcgggacggatatcctaagggaagcggaagaaaaggtaaagatcattcaagaaagattgcgtgtggctcagtctcgtcataagagttatgccgacaatcgccgcagagatttgagttttgaagagggagattatgtgtatcttcgtgtcacgcctttacgaggagttcatcgttttcataccaagggaaaattggcaccgcgttttgtgggaccttataagattgtcagtagaagaggagaggtcgcttatcagttggagttacctcaatctttggcaggagtacataatgtgttccatgtgtcgcaattgaaaaagtgtttaagggtacctaccgaagaagctaatattgagcagatagaagtccaagaggatttgacctatgtggagaaaccgatccgtatcttggaaacaagtgagagaagaaccaggaatcgagttatccgattttgcaaagtccagtggagtaatcactcggaagaagaatcaacttgggaacgagaagatgaattgaagtcagctcatccgcacctgtttgccagttcttccgaatctcgaggacgagattctgtttaa

SEQ ID NO: 14814 - DNA, 153 bp, Oryza sativa
  unsure (1)..(153): unsure at all n locations
  Clone ID: PAT_MRT4530_20715C.1
ggccggaaacccgcggcgaccacgcgaccgcgactttgtagcgcgggctagaancagcgagcgcgagaagaagctngcatcngagcgccaaagagggcgcaaagacccaaaagcaggaaagccagcagcaganagcgacacgaggacacaaga

SEQ ID NO: 14815 - DNA, 6136 bp, Oryza sativa
  Clone ID: PAT_MRT4530_20716C.1
ttattgcgtcataattcaattttaaccgatttaagtgttttaatccgatttaatcttcaaaaattcataactaattcatcttagctccgatttagttggttcaagtctctaaatttttctaaaattgagatctacacattaaaaattccgtcgtttccgaagagtccgttttcgccggagaagagtttgaagagttccaaggccagcaaggcaactcctggtttggaatggtacattcctggtttggagatagaactgtgcagccgatgccgcgttacaagcctgagtacctgtttggtgttgagggttttgtccaggagttgcgcacgatgtcctttgtcattggatttgggactgcccctttttatgcccagattcctcatgatcgtcatgaagagaagtgccgagtcagagtcaccttgaacagcaatagtgaagaggtcccctcagtgatgtttgaagctggaggaagaaactacatccatgcatgtcaggaggtggcaaggatcgccataggagagctccgtgatcgctacagtgatcaattggccgacactgagtatcgctaccatcctcgccaacctcagggaagtgaccgtggcagttaccttgagactgaaggaattgagaatgatgctaccacaaggcatttggttgagatgttgtgggctatggatgaaagtcgtgcggagactgtgttagcggctcaagatcgtgaagaccggaatcgtggtaagatttgcaagttagaggacaaggtggatcgtttggagaaggaactcgccgcattgaagggagaagcaccgccgcagaaggccaggattcgtctcaccgcaaggaagagagctctatttgtccctcgctatcaattggcgccaaaggttcgtgtggtggagaaagaagttgccccagctcaagcggatcctccggtcatcatcataagtagtgatgaagaagaagaatccaagcgcacccgttccaagattgagtgggtagcaactcaagatgatgaagacgagccgaacgagcctacaatcgacctccgatgcttggaagaactagacaatgggaatggtcccaacaaccccaataacaacaacaatggagagaatcccactctggcccaagttcttgctcaacagacacagcttatgaacatgatgatgcagcaatttcagaatcagcaaaaccaagggaataatcatgcacctccccaaaacaagttagcagaatttcttcgtgtgaggccgcctgttttctctagtaccactaatcctgttgaagctagtgattggctgcatgccatagagaagaagttggatttacttcagtgtactgatcaggagaaggtctcatttgcatcacatcagttgcatggccctgcctctgaatggtgggatcacttccgccttaacaggactactgctgaacctatcacttggcttgaattcaccgctgctttccggaagacgcatataccatcgggagtagtgtctctcaagaagaaggagttcaggtcgctttcccagggatctcgctctgttacggagtatctgcacgagttcaatcgtcttgctcgttatgctccggaagatgtgcgcaatgatgaagagcgccaggagaagtttttgggaggacttaatgatgagctttcttacccactcatggttggagattatcctgatttccagaaattagtggataaggctattcgtcaggaggacaagtacaatcgcatggagcagaagaaacgtcggattgctcaattcaagacacaacagggaaataatcagaagccgcgtcttactttaggaccccagcccatgccacagggaggttcttcgtctgttgttcgtccgcaacgtcagttcttcaacaacaatgctggcaacaacatccgtaatcaagctccacgtcctgttgcagctccagcacagcaacaacctgccaagagggagcaaggcaacaagcccgtggtgtgtttcaactgtggagatccaggacattatgctgacaagtgtccgaagccccgacgtgtgaaggttgtccctgcccagaataactctgctgtaccagcatccaaggctcgtgtaaatcatgtcgctgctgcagaagctcaagatgctccagatgtgattttgggtacgttccttgttaactcagttcctgcaacagtacttttcgattctggtgctacacattcattcttatctacgagttttgcgggaaatcatgggatggaagtagaagatcttagacgtcctttgatggttagtaccccaagtaatcaagcactctctttgcaacgtagcccctctgtcagaatagaaattcaaggagtaccatttctggccaatcttatcttgttaaaatccaaagaccttgatgtcatcctagggatggactggttagccagacataaaggtgtgatagactgtgccaacagaaaagtaactctcaacagctatgatggtcgagttgtaactgttcatgcattgtcatctgagtctttaaggtcaagactgaaccagataactttggaagagattcctatagtccgggagtatcctgatgtgttcccagatgatttacctggtatgccgcctaaaagggatatagagttcagaatagatttggtacctggaacaactccgatccataagagaccttatcgaatggcagccaatgagttggcagaagttaagaggcaagtagatgatttgctacagaaaggatacatcagaccgagttcatcaccatggggagctccggttatttttgtggaaaagaaagaccatactcagagaatgtgtgtggactatcgtgcactaaacgatgtgactattaagaataagtatccactacccaggattgatgatttgtttgatcaacttaaaggtgccactgttttctccaagatagatcttcgatcagggtatcatcagttgagaatcaaagagtatgggttgtttgaatgtactgttatgtcttttggacttaccaatgcccctgctttcttcatgaacttgatgaataaggtgtttatggaatacctagacaagttcgtggtggtctttattgatgatattcttatctactctcgaaccaaagaagagcatgaagaacatcttcgccttgcattggagaagctacgagaacatcaactgtatgctaagtttagcaagtgtgaattttggttgtctgaagtgaaattccttggtcacgtcatctcagccggaggagttgccgtcgatcctagtaacgtggaatccgtaaccaattggaagcaaccaaagacagtttcagagattcgcagtttcctaggccttgcaggatattatcggaggtttatagagaatttttccaagattgctaagcccatgacacgactgcttcagaaagatgtgaagtacaagtggtcggaagaatgtgaacagagttttcaagaattgaaaagtcgcttaatatcagctcctattttgattttgcctgatccaaagaagggttttcaagtgcattgtgatgcatccaaacttgggttaggttgtgttctgatgcaagatgggaaggtggttgcctatgcctctcgacagttacgtccgcatgagaagaactaccctactcatgatattgagttagctgcagtcgttcatgcattgaagatttggcatcattatcttttcggtactcgtacagaagaatttgaaagattaaatttgggaattgtcgatagaggtttcgttgcagccttagaagcgaaccccactctaattgatcaagttagagaagcccaaattaatgatcctgatattcaagagatcaagaagaatatgagaagaggaaaagctattggtttcttggaggatgagcacggaactgtatggttgggtgagagaatctgtgtccccgacaacaaagatttaaaggatgcaattctgaaagaagctcatgatactttatactccattcaccctggtagtactaagatgtaccaggatcttaaggaaagattttggtgggcaagtatgaagcgtgaaatcgcagaatacgtagcagtatgtgatgtttgtcagcgagtcaaggcagaacatcaaaaacccgccggtttgttgcaacctttgaagattcctgaatggaaatgggaagaaattggtatggattttattactggtttacccagaacgtcatcaggccatgactctatttgggtgatagtcgacagacttaccaaagtggctcatttcattccggtaaagacaacttattccggaagtcgcttagcggaattgtatatggcaaggattgtgtgtttgcatggcgtccctaagaagatagtgtctgatcgaggcagtcagtttacttcaaatttttggaagaaacttcaggaagagatgggttctaagctgaactttagtactgcttatcatccgcagacagacggacaaaccgaaagggtgaatcaaattttggaagacatgttgagagcttgtgctctagatttcggtggaagttgggataagaatctaccctatgcagaattttcgtacaacaacagttatcaagctagtcttcagatggctccttacgaagcactgtatggtcggaagtgtcgcactccgcttttgtgggatcaaacgggagaacgtcaggttttcggaacggatatcctaagggaagcagaagaaaaggtaaagatcattcaagaaagattgcgtgtggctcagtctcgtcataagagttatgccgacaatcgccgcagagatttgagttttgaagagggagattatgtgtatcttcgtgtcacgcctctacgaggagttcatcgttttcataccaagggaaaattggcaccgcgttttgtgggaccttataagattgtcagtagaagaggagaggttgcttatcagttggagttacctcaatctttggcaggagtacataatgtgttccatgtgtcgcaattgaaaaagtgtttaagggtacctaccgaagaagctaatattgagcagatagaagtccaagaggatttgacttatgttgagaaaccaatccgtatcctggaaacaagtgagagaagaaccaggaatcgagttatccgtttttgcaaagtccagtggagtaatcactcggaagaagaatcaacttgggaacgagaagatgaattgaactttggaatcgagttcgattcggatcggttttccctctctccaagccgcgagtttccttcgccgttgccgtcgccgtgggccttcgccgccgcctccgagcccctttaaaaggacccccggtgtctcctctacccgtcgccaccttcgccttcgcctctcgtcgtcggaaaagccctagcgccccgtgcgccgccgtcgtttcagccgtcgccgtcgctcgggaagaccgccgtcgtgctcgccaagtcgtcgccgtcctcgtccgccccttcgccgtcgccggagatcaccggagcagcttcgccgccgtcgacccgaagagcttcgccgcttcctcctcgtcgccgtcgccgtccgttggtcttccgccgccgtttaggtcaccgtgccgccgttcgccggcgagcgtgcgccgttcgagccgtcttctccgccgagccgccgccgctgtcggtgacgtcaccgctgacgtcatcggggtcgtccgccattccgtcgtttccggagagtccgttttcgcggaagaagagtttgaagagttccaaggccagcaaggcaagtcaccagaatatgtggctctatgtgatgtatgtcagcgggtcaaggcagaacatcagaaaccagccggtctgttacaaccgttgaagattccagagtggaagtgggaagaaataggaatggattttataaccggtctacccagaacgtcggcaggacatgattctatttgggtagtggttgatagattgactaaagtcgctcactttataccggttaaaacaacctatacgggacataagcttgcagagttatacatggccagagtgacagatggtcagacggaaagagtaaaccaaattttagaagatatgttgagagcctgtgttctagattttggtggaagttgggataagaatttgccgtacgcggaattctcatataacaacagttatcaagctagtttgcaa

SEQ ID NO: 14816 - DNA, 4911 bp, Oryza sativa
  Clone ID: PAT_MRT4530_20717C.1
atgccgcgctacaagcctgagtacttgtttggttttgagggatttgtccaggagttgcgtaccataggatttgggactgcccctttgtatgcccagattcctcatgatcgtcacgaagagaagtgccgagtcaaagtcaccttgaacagtaatagtgaagatatcccatcagtgatgttcgaagctggaggaggaaactacatccatgcatgtcaggaggtggcaaggatcgccataggagagctccgcgatcgctacagtgatcagttggctgacactgagtatcgctaccatcctcgccaaccccagggaagtgaccgtggcagctaccttgagactgaggggattgagaatgatgctaccacaaggcatttggttgagatgctgtgggctatggatgaaacccgcgcggaggttgtgctagcagctcaagatcgtgaagaccggaatcgtggtaagatttgcaggctagaggacaaggtggatcgtttgaagaaggaactagccgcgttgaagggagaagcaccaccgcagaaggccaggattcatcttaccgcaaggaagagagctctatttgtccctcgctaccaattggcgccaaaggtccgtgtggtggagaaagaagttaccccagccctagcggatcctccggtcgtcaataacaagttagcagaatttattcgtgtgaggccgcccactttctctagcaccactaatcctgttgaagctggcgattggttgcatgccatagagaagaagttggatttgcttcagtgcactgatcaggagaaggtctcatttgcatcacatcagctgcatggccctgcctctaagtggtgggatcacttccgccttaacagaactactgctgaacctatcacttggcttgaattcaccgctgctttccggaagacgcatataccatcgggagcggtgtctctcaagaagaaggaattcaggtcgctcacccagggatctcgcacggtcaccgagtatctgcacgagttcaaccgtctggctcgttatgctccggaagatgtgcgcactgatgaagagcgccaggagaggttcttggaaggacttaatgatgagctttcttacccactcatgactggggattatcatgatttccagaagttagtggataaggctattcgccaggaggacaagtacaaccgcatggagcagaagaaacgccggattgctcacttcaaggcacaacaggggaatagtcagaggccgcgtcttactttaggaccccagtccatgccacagggaggttcttcgtctgttgttcgtccgcagtgtcagttcttcaacaacaatgctggcaacaacatccgcaatcaagctccacgccctgttgcagctccaacacagcaacagcctgccaagagggagcaaggtagcaagcccggggtgtgcttcaactgtggagacccaggacattactctgacaagtgttcgaagccccgacgcgtgaaggttgtcccggcccagagcaactctaccgcaccagcatcaaaggctcgtgtcaatcatgttgctgctacagaagctcaaggtgctccagatgtgattttgggtacgttccttgtcaactcagttcctacaacagtgcttttcgattctggtgctacacattcatttttatctatgagttttgcgggaaatcatgggatggaagtagaagatcttatacgtcctttgatggttagtaccccaagtaatcaagcactctctttgcaacgtagcccctctgtcagaatagaaattcaagaagtaccatttctggccaatcttatcctgttagaatccaaagaccttgatgtcatcctagggatggactggttagccagatataaaggtgtgatagactgtgccaacagaaaagtaactctcaccagcaatgatggtcgagttgtaactgttcatgcattgtcttctgagtctttaaggtcaagactgaaccaaatgactttggaagagattcctatagtccgggagtatcccgatgtgttcccagacgatttacctggtatgccgcctaaaagggatatagagttcagaatagatttggtaccaggaacaactccgatccataagagaccttatagaatggcggccaatgaattagcagaagtcaagagacaagtagatgatttgcttcagaaaggatacatcagaccgagttcatctccatggggagctccggttatttttgtggaaaagaaagatcatacccagaggatgtgtgtggactatcgtgcactaaatgatgtgactatcaagaataagtacccgctgcccagaattgatgatttgtttgatcagcttaaaggtgccaccgttttctccaagatagatcttcgatcagggtatcaccagttgagaatcaaagaggaagatatacctaagacagcttttatcactaggtatgggttgtttgaatgtactgttatgtcttttggacttaccaatgcccccgctttcttcatgaacttgatgaataaggtgtttatggaatacctagacaagttcgtggtggtctttattgatgacattcttatctactctcgaacaaaagaagagcatgaagaacatcttcgccttgcactagagaagctacgagaacatcaactgtatgccaagtttagcaaatgtgaattttggttgtttgaagtgaagttccttggtcacgtcatctcagccggaggagttgccgtcgatcctagtaatgtggaatccgtaaccaactggaaacaaccaaagacagtttcagagattcgtagtttcctaggcctcgcaggatattatcggaggtttatagagaatttttccaagattgctaagcccatgacacgattacttcaaaaggatgtaaagtacaagtggtcagaagaatgtgagcagagttttcaagagttgaagaatcgcttaatatcagctcctattttgattttgcctgatccaaagaagggttttcaagtgtattgtgatgcatccaagcttgggttaggttgtgttctgatgcaagatgggaaggtggttgcctatgcatctcgtcagttacgtccgcatgagaagaacaaccctactcatgatcttgagttagctgcagttgttcatgcgttgaagatttggcgtcattatcttttcggtactcgtacagaggtatacaccgatcacaagagtttaaagtacatctttactcagccagatctgaacatgagacaacggagatggttggaattaattaaggattatgacatgggaattcattatcacccgggaaaggctaatgttgtagcaaatgctcttagcaggaaaggctattgcaatgctacggaaggacgacagttgccattggagttatgcaaggaatttgaaagattaaatttgggaattgtcagtagaggttttgttgcagccttagaagcaaagcccactctaattgatcaagttagagaagcccaaattaatgatcctgatattcaagaaatcaagaagaatatgagaagaggaaaagctatcagtttcttggaagatgagcaaggaactgtatggttgggcaagagaatctgcgtccccgacaacaaagatttaaaagatgcaattctgaaagaagctcatgatactttatactccattcaccctggtagtaccaagatgtaccaggatctcaaggaaagattttggtgggcaagtatgaagcgtgaaatcgcagaatatgtagcagtatgtgatgtttgtcagcgagtcaaggcagaacatcagaaacccgcaggtttgctgcagcctttgaagattcctgaatggaagtgggaggaaatcggtatggatttcatcactggtctacccagaacatcattaggccatgactctatttgggtgatagtcgacagacttaccaaagtggctcatttcattccggtaaagacaacttattccggaagtcgcttagcggaattgtatatggcaaggattgtgtgtttgcatggcgtccctaagaagatagtgtctgatcgaggcagtcagtttacttcaaatttttggaagaaacttcaggaagagatgggttctaagctgaactttagtactgcttatcatccgcagacagacggacaaaccgaaagggtgaatcaaattttggaagacatgttgagagcttgtgctctagatttcggtggaagttgggataagaatctaccctatgcagaattttcgtacaacaacagttatcaagctagtcttcagatggctccttacgaagcactgtatggtcggaagtgtcgcactccgcttttgtgggatcaaacgggagaacgtcaggttttcggaacggatatcctaagggaagcagaagaaaaagtaaagattatccaagagaggttgcgcgttgctcagtctcgtcagaagagttatgccgacaatcgtcgcagagatttggctttcgaagaaggagattatgtatacctgcgggttacgccgttacgaggtgttcatcgtttccaaaccaaagggaaattggcaccgcgttttgtgggaccttttaagattgtgagtcgaagaggtgaagtagcttatcagttagagttgcctccgtcaatggcgggaatacacgacgtgttccatgtgtctcagctgaagaaatgtttacgtgtacctacagaggaagcagatcctgatcgtatagagcttcaagaagatttaacttatgttgagaagccagtcagaattttggaagtaagcgagaggaataccaggaatcgcgttatacggttctgcaaggttcagtggagtaatcattcagaagaagaagccacttgggagcgagaagatgaattgaagtcagctcatcctcatctgttcgccagttcttctgaatctcgaggacgagattccgtttaa

SEQ ID NO: 14817 - DNA, 243 bp, Oryza sativa
  Clone ID: PAT_MRT4530_20718C.1
tcagatcccgacctcccgtgctccgcctgccgacgccggccagagtgctccaggagcaaaccaaccagaggccagagccactggcctgccagggaatggtaatacgccggctccggcctgagaagcgcatcctgaaatatgattgatgatagtagtttcttcctcagctgcacttcttccacctcctccaatctgcacttgtgcagcctgtgacgcctgagaatacatcaagtgaggctccat

SEQ ID NO: 14818 - DNA, 311 bp, Oryza sativa
  Clone ID: PAT_MRT4530_20719C.1
atttctctctctttttcttcttcttcctcctggggtaaattctttctccactgccgcaagaaaaggcacctcaccgtcaccggggtgtgccggaaagctcccatctttgtctccatttgcttgccctcaattccttccttctttcctccctctgggttcttgtccccggaggcccggtttcatctctccactcctcgatgtgatgcgtgtgactcccagacaggcgattgaagctcacgtcgaggcggtgatttgccctctgacaagcactgttctcggggtctgaattgctgattactactgagcgtctc

SEQ ID NO: 14819 - DNA, 437 bp, Oryza sativa
  unsure (1)..(437): unsure at all n locations
  Clone ID: PAT_MRT4530_2071C.1
tcgtccattaagcagtgcattgtattgggctcccatgccacctattctcctgcaacaaaaaaaagcgatggttcttatccagaagaggtcttaccatcacttattactggtgacatgtcactgcctttcacagaccattttantttgcctgggggggttccttttcttttattttatgaaaaacactactacacccaatcatgttctgattcctactgggaaacttatcactccttactttgtacttaatctaaaactgaaccattccaaagatctgctcttcataaattcatataaacatgcaaatgggtccaatgatatttttcttgttccttccaaagcttatcactttcactcttctttacgtacaataaacctcaaaaccccaacccttaaatttcaacaataactccatatttaattaaaactttttcctt

SEQ ID NO: 14820 - DNA, 8279 bp, Oryza sativa
  Clone ID: PAT_MRT4530_20720C.1
gtggatccccgggctgcaggcagcaaagtttacaatactgttttatttaatcttgctgcaataaaataaattagtatgttgattttatgactttcttttgaaaccagttattcaaaattacaaaattgtgatctcgtttccaactgttttaatttatttcgcaaagcttggtttactttatttacttccctttttactttgattttctaactttattcaaattaatccaaaaacttgtgctattaattggataaaggtcttaactccctcctttcacttgtctttagatgccgcgttacaagcctgagtacctgtttggtgttgagggttttgtccaggagttgcgcacgatgtcctttgtcattggatttgggactgcccctttttatgcccagattcctcatgatcgtcatgaagagaagtgccgagtcaaagtcaccttgaacagcaatagtgaagaggtcccctcagtgatgtttgaagctggaggaagaaactacatccatgcatgtcaggaggtggcaaggatcgccataggagagctccgtgatcgctacagtgatcaattggccgacactgagtatcgctaccatcctcgccaacctcagggaagtgaccgtggcagttaccttgagactgaaggaattgagaatgatgttaccacgaaacatttggttgagatgttgtgggctatggatgaaagtcgtgcggagactgtgttagcagctcaagatcgtgaagatcggaatcgtggtaagatttgcaagctagaagacaaggtggatcgtttggagaaggaattagccgcattgaagggagaagcaccgccgcagaaggccaggattcgtcttaccgcaaggaagagagctttatttgtccctcgctatcaactggcgccaaaggttcgtgtggtggagaaagaagttgccccagctcaagcggatcctccggtcatcatcataagtagtgatgaagaagaagaatccaagcgcaaccattccaagattgagtgggtagcaactcaagatgatgaagatgagccttcaattgacctccgatgcttggaagaactagataccactaatcctgttgaagctagtgattggctgcatgccatagagaagaagttggatttacttcagtgtactgatcaggagaaggtctcatttgcatcacatcagttgcatggccctgcctctgaatggtgggatcacttccgccttaacaggactactgctgaacctatcacttggcttgaattcaccgctgctttccggaagacgcatataccatcgggagtagtgtctctcaagaagaaggagttcaggtcgctttcccagggatctcgctctgttacggagtatctgcacgagttcaatcgtcttgctcgttatgctccggaagatgtgcgcaatgatgaagagcgccaggagaagtttttgggaggacttaatgatgagctttcttacccactcatggttggagattaccctgatttccagaaattagtggataaggctattcgtcaggaggacaagtacaatcgcatggagcagaagaaacgtcggattgctcaattcaagacacaacagggaaataatcagaagccgcgtcttactttaggaccccagtccatgccacagggaggttcttcgtctgttgttcgtccgcaacgtcagttcttcaacaacaatgctggcaacaacattcgtaatcaagctccacgtcctgttgcagctccagcacagcaacaacctgccaagagggagcaaggcaacaagcccgtggtgtgtttcaactgtggagacccaggacattatgctgacaagtgtccgaagccccgacgcgtgaaggttgtccctgcccagaataactctgctgtaccagcatccaaggctcgtgtaaatcatgtcgctgctgcagaagctcaagatgctccagatgtgattttggtccgggagtatcctgatgtgttcccagatgatttacctgccaatgagttggcagaagttaagaggcaagtagatgatttgctacagaaaggatacatcagaccgagttcatcaccatggggagctccggttatctttgtggaaaagaaagaccatactcagagaatgtgtgtggactatcgtgcactaaacgatgtgactatcaagaataagtatccactacccaggattgatgatttgtttgatcagcttaaaggtgccactgttttctccaagatagatcttcgatcagggtatcatcagttgagaatcaaagaggaagatatacctaagacagcttttaccactaggtatgggttgttcgaatgtactgttatgtcttttggacttaccaatgcccctgctttcttcatgaacttgatgaataaggtgtttatggaatacttagacaagttcgtggtggtctttattgatgatattcttatctactctcgaaccaaagaagagcatgaggaacatcttcgccttgcattggagaagctacgagaacatcaactgtatgctaagtttagcaagtgtgaattttggttgtccgaagtgaaattccttggtcacgtcatctcagccggaggagttgccgtcgatcctagtaacgtggaatccgtaaccaattggaagcaaccaaagacagtttcagagattcgcagtttcctaggccttgcaggatattatcggaggtttatagagaatttttccaagattgctaagcccatgacacgactgcttcagaaagatgtgaagtacaagtggtcggaagaatccttagaagcgaagcccactctaattgatcaagttagagaagcccaaattaatgatcctgatattcaagagatcaagaagaatatgagaagaggaaaagctattggtttcttggaggatgagcaaggaacaccgtgctccgccgtcgctccagctgtcgccgccgctcgggaagaccgccgtcgtcatcgccaagtcgccgccgtcctcgtccgccccttcgcagccgtcggaacccgccggagcttcgtcgccgtcgacaacccgaaggtagccgccgcttccttctcgtcgccgtcgtcgtccaagattccgtcgtttccggagagtccgttttcgcagaagaagagtttgaagagttccaaggccagcaaggcaactcctggtttggaatggtacattcctggtttggagatagaactgtgcagccggggtggttgttcagaatggttgggcctatacaacaggatgccgcgctacaagcctgagtacctgtttggtgttgaagggtttgtccaggagttgcgtactatgtcctttgtcattggatttggaactgcccctttttatgcccagattcgtcatgatcgtcatgaagagaggtgccgtgtcaaagtcaccttaaacagtaatagtgaagatattccatcagtgatgttcgaagctggaggaagaaattatatccatgcatgtcaggaagtggcaaggatcgccataggagagctccgtgaccgctacagtgatcagttggccgatactgagtatcgctaccatcctcgccaaccacagggaagtgaccgtggcagttaccttgagactgaaggaattgagaatgatgctaccacaaggcatttggttgagatgctgtgggctatggatgaaagtcgtgcggagactgtgttagcggctcaagatcgtgaagaccggaatcgtggtaagatttgcaagctagaagacaaggtggatcgcttggagaaggaattagccgcattgaagggagaagcaccgccgcagaaggccaggattcgtctcaccgcaaggaagagaactttgtttgtccctcgttatcaattggcgccaaagatggtgaacactcgcagcaacgggaatggtcctaacctcaacaaccccaataacaacaacaatggagagaatcccactcttgctcaagttcttgctcaacagacacagcttatgaacatgatgatgcagcaatttcagaatcagcagaaccaaggaaataaccatgtacctcctcagaataagttagcagaatttcttcgtgtgaggccgcctgttttctctagtaccactaatcctgttgaagctagtgattggctgcatgccatagagaagaagttggatttacttcagtgtactgatcaggagaaggtctcatttgcatcacatcagttgcatggccctgcctctgaatggtgggatcacttccgccttaacaggactactgctgaacctatcacttggcttgaattcaccgctgctttccgaaagacgcatataccatcgggagtagtgtctctcaagaagaaggagttcaggtcgctttcccagggatctcgctctgttacggagtatctgcacgagttcaatcgtcttgctcgttatgctccggaagatgtgcgcaatgatgaagagcgccaggagaagtttttgggaggacttaatgatgagctttcttacccactcatggttggagattatcctgatttccagaaattagtggataaggctattcgtcaggaggacaagtacaatcgcatggagcagaagaaacgtcggattgctcaattcaagacacaacagggaaataatcagaagccgcgtcttactttaggaccccagcccatgccacagggaggttcttcgtctgttgttcgtccgcaacgtcagttcttcaacaacaatgctggcaacaacatccgtaatctagctccacgtcctgttgcagttccagcacagcaacaacctgccaagagggagcaaggcaacaagcccgtggtgtgtttcaactgtggagatccaggacattatgctgacaaatgtccgaagccccgacgcgtgaaggttgtccctgcccagaataactctgctgtaccaacatccaaggctcgtgtaaatcatgtcgctgctgcagaagctcaagatgctccagatgtgattttgggtatgttccttgttaactcagttcctgcaacagtgcttttcgattctggtgctacacattcattcttatctatgagttttgcgggaaatcatgggatggaagtagaagaccttagatgtcctttgatggttagtaccccaagtaatcaagcactctctttgcaacgtagcccctctgtcagaatagaaattcaaggagtaccatttctggccaatcttatcttgttagaatccaaagaccttgatgtcatcctagggatggactggttagccagacataaaggtgtgatagactgtgccaacagaaaagtaactctcaacagctatgatggtcgagttgtaactgttcatgcattgtcatctgagtctttaaggtcaagactgaaccagataactttggaagagattcctatagtccgggagtatcctgatgtgttcccagatgatttacctggtatgccgcctaaaagggatatagagttcagaatagatttggtacctggaacaactccgatccataagagaccttatcgaatggcagccaatgagttggcagaagttaagaggcaagtagatgatttgctacagaaaggatacatcagaccgagttcatcaccatggggagctccggttatttttgtggaaaagaaagaccatactcagagaatgtgtgtggactatcgtgcactaaacgatgtgactattaagaataagtatccactacccaggattgatgatttgtttgatcaacttaaaggtgccactgttttctccaagatagatcttcgatcagggtatcatcagttgagaatcaaagaggaagatatacctaagacagcttttaccactaggtatgggttgttcgaatgtactgttatgtcttttggacttaccaatgcccctgctttcttcatgaacttgatgaataaggtgtttatggaatacttagacaagttcgtggtggtctttatagatgatattcttatctactctcgaaccaaagaagagcatgaagaacatcttcgccttgcattggagaagctacgagaacatcaactgtatgctaagtttagcaagtgtgaattttggttgtccgaagtgaaattccttggtcacatcatctcagccggaggagttgccgtcgatcctagtaacgtggaatccgtaaccaattggaagcaaccaaagacagtttcagagattcgcagtttcctaggccttgcaggatattatcggaggtttatagagaatttttccaagattgctaagcccatgacacgactgcttcagaaagatgtgaagtacaagtggtcggaagaatgtgagcagagttttcaagagttgaaaagtcgcttaatatcagctcctattttgattttgcctgatccaaagaagggttttcaagtgtattgtgatgcatccaaacttgggttaggttgtgttctgatgcaagatgggaaggtggttgcctatgcctctcgacagttacgtccgcatgagaagaactaccctactcatgatattgagttagctgcagtcgttcatgcattgaagatttggcgtcattatcttttcggtactcgtacagaagtgtacaccgatcacaagagtttaaagtatatctttactcagtcggatctgaacatgagacaacggagatggttggaattaattaaggattatgacatgggaattcattatcatccgggaaaggctaatgttgtagcagacgctcttagcagaaaaggctattgcaatgctacagaaggacgacagttgccattggaattatgcaaggaatttgaaagattaaatttgggaattgtcggtagaggtttcgttgcagccttagaagcgaagcccactctaattgatcaagttagagaagcccaaattaatgatcctgatattcaagagatcaagaagaatatgagaagaggaaaagctattggtttcttggaggatgagcacggaactgtatggttgggtgagagaatctgtgtccccgacaacaaagatttaaaggatgcaattctgaaagaagctcatgatactttatactccattcaccctggtagtactaagatgtaccaggatctcaaggaaagattttggtgggcaagtatgaagcgtgaaatcgcagaatatgtagcagtatgtgatgtttgtcagcgagtcaaggcagaacatcagaaacccgccggtttgttgcagcctttgaagattcctgaatggaaatgggaagaaataggtatggattttattactggtttacccagaacgtcatcaggccatgactctatttgggtgatagtcgacagacttaccaaagtggctcatttcattccggtaaagacaacttattccggaagtcgcttagcggaattgtatatggcaaggattgtgtgtttgcatggcgtccctaagaagatagtgtctgatcgaggcagtcagtttacttcaaatttttggaagaaacttcaggaagagatgggttctaagctgaactttagtactgcttatcatccgcagacagacggacaaaccgaaagggtgaatcaaattttggaagacatgttgagagcttgtgctctagatttcggtggaagttgggataagaatctaccctatgcagaattttcgtacaacaacagttatcaagctagtctacagatggctccgtatgaagcactgtatggtcggaagtgccgcactccgcttttgtgggatcaaacgggagaacgtcaggttttcggaacggatatcctaagggaagcagaagaaaaggtaaagatcattcaagaaagattgcgtgtggctcagtctcgtcataagagttatgccgacaatcgccgtagggatttgagttttgaagaaggagattatgtgtatcttcgtgtcacgcctctacgaggagttcatcgttttcataccaagggaaaattggcaccgcgttttgtgggaccttataagattgtcagtagaagaggagaggttgcttatcagttggagttacctcaatctttggcaggagtacataatgtgttccatgtgtcgcaattgaaaaagtgtttaagggtacctactgaagaagctaatattgagcagatagaagtccaagaggatttgacttatgttgagaaaccaatccgtatcctggaaacaaatgagagaagaaccaggaatcgagttatccgtttttgtaaagtccagtggagtaatcactcggaagaagaatcaacttgggaacgagaagatgaattgaagtcagctcatccgcacctgttcgccagttcttccgaatctcgaggacgagattctgtt

SEQ ID NO: 14821 - DNA, 558 bp, Oryza sativa
  Clone ID: PAT_MRT4530_20721C.1
gggggctcttgctccgctcccccctcgaccagggcctcctcttaccttccgaggctgtctgcatcccatcagatcccgacctcccgtgctccgcctgccgacgccggccagagtgctccaggagcaaaccaaccagaggccagagccactggcctgccagggaatggtaatacgccggctccggcctgagaagcgcatcctgttgatgaagaagaagaagaataggaagaatacaaggcaggccttccaggaatttgaagatgcagatatagttgaccttcacacggacgaccttgcaaccgcttctacctacctgaaatatgattgatgatagtagtttcttcctcagctgcacttcttccacctcctccaatctgcacttgtgcagcctgtgacgcctgagaatacatcaagtgaggctccatttcgtaactgctcgtcgctcgtccgtgcaggagcctattaacctacaggcacaatataactatatcttctgttcactcttatgggagattggtatgaacaattttcacaatcttttaaggatgctgctaagga

SEQ ID NO: 14822 - DNA, 114 bp, Oryza sativa
  Clone ID: PAT_MRT4530_20722C.1
attcattgactcgtgaacagactcatatgctccaacgtcttatctgatgaagacgttgatattcgtcaaaggcatatcttattaacctcacattctatgtcaaaagatcaaact

SEQ ID NO: 14823 - DNA, 2031 bp, Oryza sativa
  Clone ID: PAT_MRT4530_20723C.1
atggagtcctccctcctcctcaagcccttcgtcctcctcccctccgccccgcgccgccgccaccatcaccacctctccctccccacgccgccgcatcggcgcctcccctcctcctcgtcctcgtcccgccacgcatcgcccgcgtcctactcgttcgccgtgacccgcgccgcgcgcgagctgttcgacggcagcgcggacaggccccccgggggggtcggccgcgggggcgcgcgccggagggagtaccgcgtggagcagggggaggcaccaccggcggcggcggcggcggcggcggtcaggggcgtctcgccgtacgtcgtcccggccgcggcggtcctcgccctgagctttgaggacagtcatatggagggtggttcagaatttgcttcccgggaagacaaaggaccagagttctggagaatctaccccttctgggatcatgtgagtgcagaagaggtagacttttctggcaatgggataacagctgtggggatagaagcctttgatggcattcttcagataaatacagccttaaaatctctcaacttatctggaaatgccattggagacgaaggagctaagtgtctttcagatatattggtagagaatgtaggtatccagaagctcctattgaacagtacaaatattggagacgagggggcaaaagcaatttcggatatgttgaaaaagaacaagacgatacgtactttacaactcagcaacaacacaatagaatacagcggttttgcaagtattgcagaagcactccttgagaataatgtgctacggagcttatttgtcaatggcaactatggtggtcctcttggtgcatccagcctagcaaaaggaattctagggaacaaaactttgaggataggtgtatcaggtgcagaatttgttgctgattgtttgaagtacaacacaacattatctacattggatttgagggcaaatggacttggagatgatggtgctatctgcttggctcgaagtttcaagatcatcaatgaatctttgacttcacttgacctgggctttaatgagattagagatgatggagcatttgcattggcacaagcacttaaagctaatgaagatcttgcagtcacatcattaaatcttgcaaacaacttcttcactaaatttggacagccgccatggctgctcctcctccacctcatcgccatcgccgtcctcctcctggccgtggatagtgtgccgccggcgccggcgccgccgccggcggtggcgacggtgttcgacgacaactacgtggcaacatatggtggagacggctaccacctggtcaaccagggcacgcagattagcctcaccctggacaagagctctggtgctggattcaggtccaagttgatgtacggctcagggttcttccacatgaggatcaaggttcctgccggctacactgccggcgttgtgacagcctactatgacgaggtggacttcgagttccttggcgacaaggatggcaaccccatcacccttcaaaccaacgtcttcgtcggcggccacggcgaccgcgagcagcgcctccgcctctggttcgaccccgctgccgacttccatgactactccatcctctggaaccccttccacctcgtgatattcgtggacgagacgccggtgagggtgctgaagaacctgacgagccggggcccggagttcgagttcccggcgaagcctatgcggccgcgggggagcgtgtgggacgcctccgactgggcgacggacggcggccggaccaaggtcgactgggcccgcgcgccattcaccgcggccttccagggcttcgccgtcgacgcctgcgccgccgccgccggcggcggcgtcagctcggacgactgcgggtcgccggacacgtggtggtggaacggcggcgagtacaggaggctgacggcggcgcagcaggcggcgtacgatggcgtgagggggaacctgacctatgactactgcaccgacaatagcaagaagcgcccagtgccgccacccgagtgcagcttcacctaa

SEQ ID NO: 14824 - DNA, 5164 bp, Oryza sativa
  Clone ID: PAT_MRT4530_20724C.1
acctctcttctctctcctcggcccaaattccgtcgtttccggagagtccgttttcgcagaagaagagtttgaagagttccaaggccagcaaggcaactcctggtttggaatggtacattcctggtttggagatagaactgtgcagccggggtggttgttcagaatggttggcctatacaacaggatgccgcgttacaagcctgagtacctgtttggtgttgagggttttgtccaggagttgcgtacaatgtcctttgtcattggatttgggactgcccctttttatgcccagattcctcatgatcgtcatgaagagaagtgccgagtcaaagtcactttgaacagtaatagtgaagatatcccctcagtgatgtttgaagctggaggaagaaactacatccatgcatgtcaggaggtggcaaggatcgccataggagagctccgtgatcgctacagtgatcaattggccgacactgagtatcgttcccatcctcgtcaaccccagggaagtgaccgtggtagttaccttgagactgaaggaattgagaatgatgctaccacgaagcatttggttgagatgttgtgggctatggatgaaagtcgtgcggagattgtgttagcagctcaagatcgtgaagaccggaatcgtggtaagatttgcaagttagaagacaaggtggatcgtttggaaaaggaattagccgcattgaagggagaagcaccgccgcagaaggccaggattcgtctcaccgcaaggaagagagctctatttgtccctcgctatcaactggcgccaaagatggtgaatactcgcagcaacgggattggtcccaacaaccccaataacaacaacaatggagagaatcccactctagctcaagttcttgctcaacagacacaacttatgaacatgatgatgcaacaacttcagaatcagcaaaaccaaggaaataatcatgcacctccccagaacaagttagcagaatttcttcgtgtgaggccgcctgttttctctagtaccactaatcctgttgaagctagtgattggctgcatgccatagagaagaagttggatttacttcagtgcactgatcaggagaaggtatcatttgcatcacatcagttgcatggccctgcctctgaatggtgggatcatttccgccttaacaggactactgctgaacctatcacttggcttgaattcaccgctgctttccggaagacgcatataccatcaggagtagtgtctctcaagaagaaggagttcaggtcgcttactcagggatctcgctctgttacggagtatctgcacgagttcaatcgtcttgctcgttatgctccggaagatgtgcgcaatgatgaagagcgccaggagaagtttttgggaggacttaatgatgagctttcttacccactcatggttggagattatcctgatttccagaaattagtggataaggctatacgtcaggaggacaagtacaattgcatggagcagaggaaacgtcggattgctcacttcaaggcacaacagggaaataatcagaagccgcgtcttactttaggaccccagtccatgccacatggaggttcttcgtctgttgttcgtccgcagcgtcagttcttcaacaacaatgctggcaacaacatccgtaatcaagctccacgtcctgttgcagctccagcacagcaacaacctgccaagagggagcaaggcaacaagcccgtggtgtgtttcaactgtggagacccaggacattatgctgacaagtgtccgaagccccgtcgcgtgaaggttgtccctgcccagaataactctgctgtaccagcatcaaaggcccgtgtcaatcatgttgcggctgcagaagctcaagatgctccagatgtgattttgggtatgttccctgttaactcagttcctgcaacagtgcttttcgattctggtgctacacattcattcctatctatgagttttgcgggaaatcatgggatggaagtagaagaccttagacgtcctttgatggttagtaccctaagtgatcaagcactttctttgcaacgtagcccctctgtcagaatagaaattcaaggagtaccatttctggccaatcttatcttgttagaatccaaagaccttgatgtcatcctagggatggactggttaaccagacataaaggtgtgatagactgtgccaacaaaaaagtaactctcaccagcaatgttggtcgagttgtaactgttcatgcattgtcatctgagtctttaaggtcaagactgaaccagataactttggaagagattcctatagtccgggagtatcctgatgtgttcccagatgatttacctggtatgccgcctaaaagggatatagagttcagaatagatttggtacctggaacaactccgatccataagagaccttatcgaatggcagccaatgagttggcagaagttaagaggaaagtagatgatttgctacagaaaggatacatcagaccgagttcatcaccatggggagctccggttatttttgtggaaaagaaagaccatactcagagaatgtgtgtggactatcgtgcactaaacgatgtgactatcaagaataagtatccactacccaggattgatgatttgtttgatcaacttaaaggtgccactgttttttccaagatagatcttcgatcagggtatcatcagttgagaatcaaagaggaagatatacctaagacagcttttaccactaggtatgggttgttcgaatgtactgttatgtcttttggacttaccaatgcccctgctttcttcatgaacttgatgaataaggtgtttatggaatacctagacaagttcgtggtggtctttatagatgatattcttatctactctcgaaccaaagaagagcatgaggaacatcttcgccttgcattggagaagctacgagaacatcaactgtatgctaagtttagcaagtgtgaattttggttgtctgaagtgaagttccttggtcacgtcatctcagccggaggagttgccgtcgatcctagtaacgtggaatccgtaaccaattggaagcaaccaaagacagtttcagagattcgcagtttcctaggcctcgcaggatattaccggaggtttatagagaatttttccaagattgctaagcccatgacacaactgcttcagaaagatgtaaagtacaagtggtcgaaagaatgtgagcggagttttcaagagttaaaaagtcgcttaatatcagctcctattttgattttgcctgatccaaagaagggttttcaagtgtattgcgatgcgtccaaacttgggttaggttgtgttctgatgcaagatgggaaggtggttgcctatgcatctcgtcagttacgtccgcatgagaagaactaccctactcatgatattgagttagctgcagtcgttcatgcattgaagatttggcgtcattatcttttcggtactcgtacagaagtgtataccgatcacaagagtttaaagtatatctttactcagccagatctgaacatgagacaacggagatggttggaattaattaaggattatgacatgggaattcattatcatccgggaaagactaatgtagtagcagacgctcttagcagaaaaggctattgcaatgctacagaaggacgacagttgccattggatttatgcaaggaatttgaaagattaaatttgggaattgtcggtagaggtttcgttgcagccttagaagcgaagcccactctaattgatcaagttagagaagcccaaattaatgatcctgatattcaagagatcaagaagaatatgagaagaggaaaagctattggtttcttggaagatgagcaaggaactgtatggttgggtgagagaatctgtgtccccgacaacaaagatttaaaagatgcaattctgaaagaagctcacgatactttatactccattcaccctggtagtactaagatataccaggatctcaaggaaagattttggtgggcaagtatgaagcgtgaaatcgcagagtacgtagcagtatgtgatgtttgtcagcgagtcaaggcggaacatcagaaacccgccggtttgctgcaacctttgaagattcctggatggaaatgggaagaaatcggtatggattttatcactggtttgcctagaacgtcatcaggccatgactctatttgggtaatagtcgacagacttaccaaagtggctcattttattccggtaaagacaacctattccggaagtcgcttggcggaattgtatatggcaaggattgtgtgtttgcatggcgtccctaagaagatagtgtctgatcgaggcagtcagtttacttcaaatttttggaagaaacttcaggaagagatgggttctaagctgaactttagcactgcttatcatccgcagacagacggacaaaccgaaagggtgaatcaaattttggaagacatgttgagagcttgtgctttagatttcggtggaagttgggataagaatctaccttatgcagaattttcgtacaacaacagttatcaagctagtcttcagatggctccttacgaagcactgtatggtcggaagtgtcgcactccgcttttgtgggatcaaacgggagaacgtcaggttttcgggacggatatcctaagagaagcagaagaaaaggtaaagatcattcaagaaagattgcgtgtggctcagtctcgacataagagttatgccgacaatcgccgcagagatttgagttttgaagaaggagactatgtgtatcttcgtgtcacgcctcttcgaggagttcatcgttttcacaccaagggaaaattggcaccgcgttttgtgggaccttataagattgtcagtagaagaggagaggtcgcttatcagttggagttacctcaatctttggcaggagtccataatgtgttccatgtgtcgcaattgaagaagtgtttaagagtacctaccgaagaagctaatcttgaccagataagtgagagaagaaccaggaatcgagttatccgtttttgcaaagtccagtggagtaatcactcggaagaagagtcaacttgggaacgagaagatgaattgaagtcagctcatccgcatctgttcgccagttcttccgaatctcgaggacgagattctgtt

SEQ ID NO: 14825 - DNA, 2532 bp, Oryza sativa
  Clone ID: PAT_MRT4530_20725C.1
atggacactcacctcgtcgtcgtcctggcattgctcgccgccgccgccgcggcggaggccaagatgtcggcggactactacagcaagacgtgcccgcgcgcggaccggatcatcgccgacgtgctggcgcagaagcagatctccaaccctacgacggcggcgggcgtcctccgcctcttcttccacgactgcttcgtcggcggctgcgacgcgtccgtgctggtcgcgtccaccgccgcggcgcgctccgagcgcgacgccgacgtgaacctgtcgctcccgggtgacgccttcgacgccctggcgcgcgccaaggcggcgctggaggtggagtgcccgggcgtcgtctcctgcgccgacctcctcgccgtcgcggcgcgcgacctcgtcaccatgacgggggggccctactacccgctccgcctcggccgcaaggacgggctctcctcctcgccgtcggcgcccgacgccgagatcccgcacgccaacctcaccgtctcccgcctcgtcgccgtgttcgccgccaagggcttcaccgtccaggacctcgtcgcgctctccggcgcacacaccctcggcttctcccattgcaaggagttcgccgcccgcatctacggcggcggcggtggcggcgccgacccgaccatgaacccggcgctcgcgaagcggctgcaggaggcgtgcagggactaccggaggggcccgaccatcgcggcgttcaacgacgtgatgacgccggggaggttcgacaacatgtacttcgtcaacctccggcgaggcctcggcctcctcgccaccgaccaggagctctacggcgacgcgcggacgcggccgcacgtggagcggtacgccgccaacgagacggcgttcttcgccgacttcgcgcgcgccgcccggaggctcagccaccacggcgtcaagaacggcgccaacggcgagattgggggcggcgtgaacttgcctgatctgtgggtgatgtggctaggcttggcagctagagggacaacgcgatggtctggtgacgatgttgtgcagaggacagtcatatggagggtggttcagaatttgcttcccgggaagacaaaggaccagagttctggagaatctaccccttctgggatcatgtggtcctttgccgctggttccaatttgtcaacatctgcaagctttaatgctgaaaaggaatcaaggaagaatttaaataagttctataaggaaatcaggactctgaaaaatgttaacatggcaggtcgtcaatttggggatgagggtctgttttttctagcagaaagcttagcctataacaagagtgcagaagaggtagacttttctggcaatgggataacagctgtggggatagaagcctttgatggcattcttcagataaatacagccttaaaatctctcaacttatctggaaatgccattggagacgaaggagctaagtgtctttcagatatattggtagagaatgtaggtatccagaagctcctattgaacagtacaaatattggagacgagggggcaaaagcaatttcggatatgttgaaaaagaacaagacgatacgtactttacaactcagcaacaacacaatagaatacagcggttttgcaagtattgcagaagcactccttgagaataatgtgctacggagcttatttgtcaatggcaactatggtggtcctcttggtgcatccagcctagcaaaaggaattctagggaacaaaactttgagggaacttcatttgcatggcaatggttttgggaatgagggagtacgtgcattgatgtcagcgttgtctgctcacaaagggaagatcactgttttggatattggtaacaacaacattacctctgaaggttctcttcatgttgctgagttcatcaaaaggacaaagtctttactatggctcagtctatacatgaacgatataagtgatgagggagctgaaaaggttgcagatgctctgaaacagaataaaacaatttctactgtagacttgggtggtaataacattcactctaaaggggtaagtgcaatagctgaaactctgaaggataattcagtggtgacaacattggagttgagctataatccgattgggccagagggggtaaaggctctttgtgatgttctcaagttcaatgggaaaatccaaacccttaaacttggttggtgccagataggtgtatcaggtgcagaatttgttgctgattgtttgaagtacaacacaacattatctacattggatttgagggcaaatggacttggagatgatggtgctatctgcttggctcgaagtttcaagatcatcaatgaatctttgacttcacttgacctgggctttaatgagattagagatgatggagcatttgcattggcacaagcacttaaagctaatgaagatcttgcagtcacatcattaaatcttgcaaacaacttcttcactaaatttggacaggttgctctgtctgaggcacgggatcatgtatatgagatgagcgaaaaggaaatagacattttcttttag

SEQ ID NO: 14826 - DNA, 9778 bp, Oryza sativa
  Clone ID: PAT_MRT4530_20726C.1
atggcgatgcggcggaggcgcgcggtcgccggcgacgacaaccagcggcaggcgatgccgcgctacaagcctgagtacttgtttggtgttgagggttttgtccaggagttgcgtacgatgtcctttgtcataggatttgggactgtccttttttatgcccagattcctcatgatcgtcatgaagagaagtgccgagtcaaagtcaccttgaacagtaatagtgaagatatcccctcagtgatgttcgaagctggaggaagaaactacatccatgcatgtcaggaggtggcaaggatcgccataggagagctccgcgatcgctacagtgatcagttggccgacactgagtatcgctaccatcctcgccaaccacagggaagtgatcgtggcagctaccttgagactgagggaattgagaatgatgctaccacaaggcatttggttgagatgctgtgggctatggatgaaacccgtgcggagacagtgttagcggctcaagatcgtgaagaccggaatcgtggtaagatttgcaagttggaggacaaggtggatcgtttggagaaggaactagccgcgttgaagggagaagcaccaccgcagaaggccaggattcgtcttaccgcaaggaagagagctctatttgtccctcgttaccaattggcgctaaagatggtgaacactcgcgccagtggaagtggaaacaataacaatgaagggaacccaactcttgcccaagtcctggctcaacaggcacagcttatgaacatgatgatgcagcaactccagaaccagcagaaccaaggaaataaccatgcacctccccagaacaagttagcagaatttcttcgtgtgaggccgcctactttctctagcaccactaatcctgttgaagctggtgattggttgcatgctatagagaagaagttggatttgcttcaatgcaccgatcaggagaaggtctcatttgcatcacatcagctgcatggccctgcctctgaatggtgggatcacttccgcctgaataggactactgctgaacctatcacttggcttgaattcaccgctgctttccggaagacgcatataccatcgggagtggtgtctctcaagaagaaggaattcaggtcgctcactcaggggtctcgctctgttacggagtatctgcacgagttcaatcgtcttactcgttatgctccagaagatgtgcgcactgatgaagagcgccaggagaagttcttggaaggacttaatgatgagctttcttacccactcatgactggggattatcctgatttccagaagttggtggataaggctattcgccaggaagacaagtacaatcgcatggagcaaaagaaacgccggattgctcaattcaagacacaacagggaaataatcagaagccgcgtcttactttaggaccccagtctatgccacagggaggttcttcgtctgttgttcgtccgcagcgtcagttcttcaacaacaatgctggcaacaacatccgcaatcaagctccacgccctgttgcagtttcgacacagcaacaacctgccaagagggagcaaggcagcatgcccgtggtgtgtttcaactgtggagacccaggacattatgctgacaagtgtccgaagccccgacgcgtgaaggttgtccctgcccagagcaactctaccgcacctgcgtcaaaggcccgtgtcaatcatgttgcggctgcagaagctcaaggtgctccagatgtgattttgggtacgttccttgttaactcagtttctgcaacagtgcttttcgattctggtgctacacattcattcttatctatgagttttgcgggaaatcatgggatggaagtagaagatcttagacgtcctttgatggttagtaccccaagtaatcaagcactctctttgcaacgtagcccctctgtcagaatagaaattaaaggagtaccatttttggccaatcttatcctgttagaatccaaagaccttgatgtcatcctatggatggactggttagccagacataaaggtgtgatagactgtgctaacagaaaagtaactctcaccagcaatgatggtcgagttgtaactgttcatgcattgtcttctgagtctttaaggccaagtctaaaccaaataactttggaagagattcctatagtccgggagtatcctgatgtgttcccagatgatttacctggtatgccgcctaaaagggatatagagttcagaatagatttggtaccaggaacaactccgatccataagagaccttatagaatggcagccaatgagttggcagaagtcaagaggcaagtagatgatttgcttcagaaaggatacatcagaccgagttcatctccatggggagctccaattatttttgtggaaaagaaagaccatacccagaggatgtgtgtggactatcgtgcactaaatgatgtgactatcaagaataagtatccgctacccagaattgatgatttgtttgatcagcttaaaggtgccactgttttctccaagatagatcttcgatcagggtatcaccagttgagaattaaagaggaagatatacctaagacagcttttaccactaggtatgggttgtttgaatgtactgttatgtcttttggacttaccaatgcccccgctttcttcatgaacttgatgaataaggtgtttatggaatacctagacaagttcgtggtggtctttattgatgacattcttatctactcccgaaccaaagaagagcatgaagaacatcttcgccttgcactagagaagctacgagaacatcaactgtatgctaagtttagcaagtttgaattttggttgtctgaagtgaagttccttggtcacgtcatctcagccggaggagttgccgtcgatcctagtaatgtggaatccgtaaccaattggaaacaaccaaagacagtttcagagattcgcagtttcttaggcctcgcaggatattatcggaggtttatagagaatttttccaagattgctaagcccatgacacgattgcttcagaaagatgtgaagtacaagtggtcggaagaatgtgagcagagttttcaagagttgaagaatcgcttgatatcagctcctattttgattttgcctgatccaaagaagggtttccaagtgtattgcgatgcatccaaacttggggtaggttgtgttctgatgcaagatgggaaggtggttgcctatgcatctcgtcagttacgtccgcatgagaagaactaccctactcatgatcttgagttagctgcagtagttcatgcgttgaaaatttggcatcattatcttttcggtactcgtacagaagtatataccgatcacaagagtttaaagtatatctttactcagccggatctgaacatgagacaacggagatggttggaattaattaaggattatgacatgggaatacattatcacccgggaaaggctaatgttgtagcagacgctcttagcaggaaaggctattgcaatgctacggaaggacgacagttgccattggaattatgcaaggaatttgaaagattaaatttgggaattgtcagtagaggtttcgttgcagccttagaagcgaagcccactctaattgatcaagttagagaagcccaaattaatgatcctgatattcaagaaatcaagaagaatatgagaagaggaaaagctattggtttcttggaagatgagcaaggaactgtgtggttgggtgagagaatctgcgtccccgacaacaaagatttaaaagatgcaattctgaaagaagctcatgatactttatactccattcaccctggtagtactaaaatgtaccaggatctcaaggaaaggttttggtgggcaagtatgaagcatgaaatcgcagaatacgtagcagtatgtgatgtttgtcagcgcgtcaaggcagaacatcagaaacccgcagtcgacagacttaccaaagtggctcatttcatcccagtaaagacaacctattccggaagtcggttagcggaattgtatatggcaaggattgtgtgtttgcatggcgtccctaagaaaatagtgtctgatcgaggcagtcagtttacttcaaatttttggaagaagcttcaggaagagacagacgaacaaaccgaaagggtgaatcagattttggaagacatgttgagagcttgtgctttagacttcggtggaagttgggataagaatctaccctatgcagaattttcatacaacaacagttatcaagctagtcttcagatggctccttacgaagcactgtatggtcgaaagtgtcgcactccgcttttgtgggatcaaacgggagaacgtcaggttttcgggacggatatcctaagggaagcagaagaaaagccgtgcgccgccgccgttccagtcgtcgccgtcgctcgggaaggtcgtcatcgtggtcgccaagtcgtcgccgtcctcgtccgccccttcgccgtcgctgtagaccgccggagcaccgtcgccgccgtcgacccgatcttctccgccgcttcgacctcgacgccgtcgccgtccgttgatcttccgccgcttctttggtcaccgattccgacgtttccggagagtccgttttcgcaggagaagaatttgaagagttccaaggccagcaaggcaactcctggtttggaatggtatattcctggtttggagatagaactgtgcagccgggatggttgttcagaatggttggtcctatacaacaggatgccgcgctacaagcttgagtatttgtttggtgttgagggatttgtccaggatttgcgtacgatgtcctttgccataggatttgggactgcccctttttatgcccagattcctcatgatcgtcacgaagagaagtgccgagtcaaagtcaccttgaacagtaatagtgaagatatcccctcagtgatgttcgaagctggaggaagaaactacatccatgcatgtcaggaggtagcaaggatcgccataggagagttccgcgatcgttacagtgatcagttggccgacactgagtatcgctaccatcctcgtcaaccacagggaagtgaccgtggcagctaccttgagactgaaggaattgagaatgatgctaccacaaggcatttggttgagatgttgtgggctatggatgaaacccgtgcggagactgtgttagcagctcaagatcgggaagatcggaatcgtggtaagatttgcaagctagaagacaaggtggatcgtttagagaaggaactagccgcgttgaagggagaagcaccaccgcagaaggccaggattcgtcttaccgcaaggaagagagctctatttgtccctcgctaccaattggtgccaaagatggtgctcactcgcagcaacgggaatggccctaacaacaataacaacaacaatggagagaatcccccacttgcccaagtcctggctcaacaggcacagcttatgaacatgatgatgcagcaactccagaaccagcagaaccagggaaataaccatgcacctccccagaacaagttagcagaatttcttcgtgtgaggccgcctaccttctctagcaccactaatcctgttgaagcaggtgattggctgcatgccatagagaagaaattggatttgctccagtgcactgatcaggagaaggtctcatttgcatcacatcagctgcatggccctgcctctgaatggtgggatcacttccgccttaacaggactactgctgaacctatcacttggcttgaattcaccgctgctttccggaagacgcatataccatcgggagtggtgtctctcaagaagagggaattcaggtcgctcactcaggggtctcgctctgttacggagtatctgcactagttcaatcgtctggctcgttatgctccggaagatgtacgcactgatgaagagcgtcaggagaagttcttggaaggacttaatgatgagctttcttatccactcatgactggagattatcctgatttccagaagttagtagataaggctattcgccaggaggacaagtacaaccgcatggagcaaaagaaacgccggattgctcaattcaagacacaacaggggaataatcagaggccgcgtcttactttaggaccccagtccatgccacagggaggttcttcgtctgttgttcatccgcagcgtcagttcttcaacaacaatgctggcaacaacatccgcaatcaagctccacgccctgttgcagttttgacacagcaacaacctgccaagaaggagcaaggcagcaagcccgtagtgtgtttcaactgtggagaaccaggacattacgctgacaagtgtccgaagccccgacgcatgaaggttgtccctgcccagagcaactctactgtaccagcatcaaaggcccgtgtcaatcatgttgcggctgcagaagctcaagatgctccagatgtgattttgggtacgtttcttgttaacttagttcctgcaacagtgcttttcgattctggtgctacacattcattcttatctatgagttttgcgggaaatcatgggatggaagtagaagatcttagacgtcctttgatggttagtaccccaagtaatcaagcactctctatgcaacgtagcccctctgtcagaatagaaattcaaggagtaccatttctggccaatcttatcctgttagaatccaaagaccttgatgtcatcctagggatggactggttagccaggcataagggtgtgatagactgtgccaacagaaaagtaactctcaccagcaatgatggtcgagttgtaactgttcatgcattgtcttctgagtctttaaggtcaagactgaaccaaataactttggaagagattcctgtagtccgggagtatcctgatgtgttcctagatgatttacctggtattcctcctaaaagggatatagaattcagaatagatttggtaccaggaacaactccgatccataagagaccttatagaatggcagccaatgagttggcagaagttaagaggcaagtagacgatttgcttcagaaaggatacatcagaccgagttcatctccatggggagctccggttatttttgtggaaaagaaagatcatacccagaggatgtgtgtggactatcgtgcactaaatgatgtgactatcaagaataagtatctgctgcccagaattgatgatttgtttgatcagcttaaaggtgccaccgttttctccaagatagatcttcgatcagggtatcatcaattgagaatcaaagaggaagatatacctaagacagcttttaccactaggtatggattgttcgaatgtactgttatgtcttttggacttaccaatgcccccgctttcttcatgaacttgatgaataaggtgtttatggaatacctagacaagttcgtggtggtctttattgatgacattcttatctactcccgaaccaaagaagagcatgaagaacatcttcgccttgcactagagaagctacgagaacatcaactgtatgctaagtttagtaagtgtgaattttggttgtctgaagtgaagttccttggtcacgttatctcagcaggaggagttgccgtcgatcctagtaatgtggaatccgtaaccaactggaaacaaccaaagacagtttcagagattcgcagtttcctaggcctcgcaggatattatcagaggtttatagagaatttttccaagattgctaagcccatgacacgactgcttcagaaagatgtgaagtacaagtggtcagaagcatgtgagcagagttttcaagaattgaagaatcacttaatatcagctcctattttgattttacctgatccaaagaagggtttccaagtgtattgcgatgcatccaaacttgggttaggttgtgttctgatgcaagatgggaaggtggttgcctatgcatctcgtcagttacgtccgcatgaaaagaactaccctactcatgatcttgagttagctgcagtagttcatgcgttgaagatttggcgtcattatcttttcggcactcgtacagaggtgtataccgatcacaagagtttaaagtatatctttactcagccggatctgaacatgagacaaaggagatggttggaattaattaaggattatgacatgggaattcattaccacccgggaaaggctaatgttgtagcagacgctcttagcaggaaaggctattgcaatgctacggaaggacgacagttgccattggaattatacaaggaatttgaaagattaaatttgggaattgtcagtagaggtttcgttgcagccttagaagcgaagcccactctaattgatcaagttagagaagcccaaattaatgatcctgatattcaagaaatcaaaaagaatatgagaagaggaaaagctatcggtttcttggaggatgagcaaggaactgtatggttgggcgagagaatctgtgtccccgacaacaaagatttaaaagatgcaattctgaaagaagcccatgatactttatactccattcaccctggtagtactaagatgtaccaggatctcaaggaaagattttggtgggcaagtatgaagcgtgaaatcgcagaatacgtagcagtatgtgatgtttgtcagcgagtcaaggcagaacatcagaaactcgccggtttgttgcagcctttgaagattcctgaatggaaatgggaggaaatcggtatggatttcattactggtttacccagaacgtcatcaggccatgactctatttgggtgatagtcgacagacttaccaaagtggctcatttcattccggtaaagacaacatattctggaagtcgattggcggaattgtatatggccaggattgtgtgtttgcatggcgtccctaagaaaatagtgtctgatcgaggcagtcagtttacttcaaatttttggaagaagcttcaggaagagatgggttctaagctgaactttagtactgcttatcatccgcagacagacggacaaactgaaagggtaaatcaaattttggaagacatgttgagagcttgtgctttagatttcagtggaagttgggataagaatctaccttatgcagaattttcatacaacaacagttatcaagctagtgttcagatggctccttacaaagcactatatggtcggaaatgccgcactccgcttttgtgggatcaaacgggagaacgtcaggttttcgggacggatatcctgagggaagcagaagaaaaggtgaaaatcattcaagaaagattacgtgtggcccagtctcgtcataagagttatgccgacaatcgtcgtagggatctaagttttgacgaaggagattatgtgtaccttcgtgtcacgccttttcgaggagttcatcgttttcacaccaaaggaaaattggcaccgcgtttttgtgggaccttataagattatcagtagaagaggagaggttgcttatcagttggaattacctcaatctttggcaggagtccataatgtgttccatgtgtcacaattgaaaaagtgattaagggtacctaccgaagaagctaatcttgaacagatagaagtccaagaggatctgacctatgttgagaaaccaatccgtattttggaaatagatgagagaagaaccagaaatcgagttatccgtttttgcaaagttcaatggagtaatcactcggaagaagaatcaactggggaacgagaagatgaattgaagtcagctcatccgcatctgttcgccggttcttccgaatctcgaggacgagattctgtt

SEQ ID NO: 14827 - DNA, 412 bp, Oryza sativa
  Clone ID: PAT_MRT4530_20727C.1
attgattgatagattgtttttcggatgcttatcgtcgctggattaaagggcagcacaggctaggcacatgagacgtcccttgattgaacatcagattacaaacacatggaggtttacttcacacacacgacaagcagtgagtgggagcagctgctgaaacaaagctaccggctgcgaacttaatttttttgaaaaatggagaatcatagcacggtacaactcacgataatggccaattgtttaattagcgccttccagccattattccccaacaatggctggtcgaacttctctgatatcgcccctttgctcctgaaggagcctagtgctttgatgcccccctcccgcaggatgaacttggtggtagaacgcttttatggcggtactgacgaacggcccgacccataaaatc

SEQ ID NO: 14828 - DNA, 3964 bp, Oryza sativa
  Clone ID: PAT_MRT4530_20728C.1
atgtctttcgtgattagtctcacacctctcatcattgtaaaagatgcttaaactggtaataatttgattagctcctggtttggaatggtatattcctggtttggagatagaactgtgcagccggggtggttgttcagaatggttgggcctatacaacaggatgccgtgttacaagcctgagtacctgtttggcgttgagggttttgtccaggagttgcgtacgatgtcctttgtcattggatttgggaatgctcctttttatgcccagattcgtcatgatcgtcatgaagaaaagtgccgagtcaaagtcaccttgaacagcaatagtgaagatatcccctcagtaatgtttgaagctggaggaagaaactacatccatgcatgtcaggaggtggcaaggatcgccataggagagctccgtgatcgctacagtgatcagttggtcgacactgagtatcgctatcatcctcgccaaccccagggaagtgaccgtggcagttaccttgagactgaaggaattgagaatgatgttaccacaagacatttggttgagatgttgtgggctatggatgaaagtcgtgcggagactgtgttagcagctcaagatcgtgaagatcggaatcgtggtaagatttgcaagctagaagacaaggtggatcgtttggagaaggaattagccgcattgaagggagaagcaccgccgcagaaggccaggattcgtcttaccgcaaggaagagagctttatttgtccctcgctatcaactggcgccaaaggttcgtgtggtggagaaagaagttgccccagctcaagcggatcctccggtcatcatcataagtagtgatgaagaagaagaatccaagcgcatcaattccaagattgagtgggtagcaactcaagatgatgaagatgagccttcaatcgacctcctatgctcggaagaactagagaagttggagagtttagtggtgtgggagtcttcagtttgtaataatgaaactcagttaagatcaataaaagttaaaatggtgaacactcgtagcaatgggaatggtcccaacaaccccaataataacatcaatggagagaatcccactctggcccaagttcttgctcagcagacacagcttatgaacatgatgatgcaacaatttcagaatcagcaaaaccaagggaataatcatgcacctccacagaacaagttagcagaatttcttcgtgtgaggccgcctgttttctctagtaccactaatcctgttgaagctagtgattggctacatgccatagagaagaagttggatttacttcagtgtactgatcaggagaaggtctcatttgcatcacatcagttgcatggccctgcctctgaatggtgggatcacttccgtcttaacaggactactgctgaacctatcacttggcttgaattcaccgctgctttccggaagacgcatataccatcgggggtagtgtctctcaagaagaaggagttcaggtcgcttacccagggatctcgctctgttacggagtatctgcacgagttcaatcgtcttgctcgttatgctccggaagatgtgcgcaatgatgaagagcgccaggagaagtttttgggaggacttaatgatgagctttcttacccacttatggttggagattaccctgatttccagaaattagtggataaggctattcgtcaggaagacaagtacaatcgcatggagcagaagaaacgtcggattgctcaattcaagacacaacagggaaataatcagaagccgcgtcttactttaggaccccagtccatgccacagggaggttcttcgtctgttgttcgtccgcaacgtcagttcttcaacaacaatgctggcaacaacatccgtaatcaagctccacgtcctgttgcagctccagcacagcaacaacctgccaagagggagcaaggcagcaagcccgtggtgtgtttcaactgtggagatccaggacattatgctgacaagtgtccgaagccccaacgcgtgaaggttgtccctgcccagagtaactctgctgtaccagcatcaaaggcccgtgtcaatcatattgctgctgcagaagctcaaggtgctccagatgtgattttgggtacgttccttgttaactcagttcctgcaacagtacttttcgattctggtgctacacattcattcttatctatgagttttgcgggaaatcatgggatggaagtagaagatcttagacgtcctttgatggttagtaccccaagtaatcaagcactctctttgcaacgtagcccctctgtcagaatagaaattcaaggagtaccatttctggccaatcttatcttgttagaatccaaagaccttgatgtcatcctagggatggactggttagccagacataaaggtgtgatagactgtgccaacagaaaagtaactctcaacagctatgatggtcgagttgtaaccgttcatgcattgtcttctgagtctttaaggtcaagactgaatcaaataactttggaagagattcctatagtccgggagtatcctgatgtgttcccagatgatttaccgggtatgccgcctaaaagggatatagagttcagaatagatttggtacctggaacaactccgatccataagagaccttatcgaatggcagccaatgagttggcagaagttaagaggcaagtagatgatttgctacagaaaggatacatcagaccgagttcatcaccatggggagctccggtaatttttgtggaaaagaaagaccatactcagagaatgtgtgtggactatcgtgcactaaacgatgtgactatcaagaataagtatccactacccaggattgatgatttgtttgatcagcttaaagacaagttcgtggtggtctttattgatgatattcttatctactctcgaaccaaagaagagcatgaggaacatcttcgccttgcattggagaagctacgagaacatcaactgtatgctaagtttagcaagtgtgaattttggttgtccgaagtgaaattccttggtcacgtcatctcagccggaggagttgccgttgatcctagtaacgtggaatccgtaaccaattggaagcaaccaaagacagtttcagagattcgcagtttcctaggccttgcaggatattatcggaggtttatagagaatttttctaagattgctaagcccatgacacgactgcttcagaaagatgtgaagtacaaatggtcggaagaatgtgagcggagttttcaagagttgaaaagtcgcttaatatcagctcctattttgattttgcctgatccaaagaagggtttccaagtatattgcgatgcatccaaacttgggttaggttgtgttctgatgcaagatgggaaggtggttgcctatgcatctcgtcagttacgtccgcatgagaagaactaccctactcatgatattgagttagctgcagtcgttcatgcattaaagatttggcgtcattatcttttcggtactcgtacagaagtgtacaccgatcacaagagtttaaagtatatctttactcagccggatctgaatatgagacaacggagatggttggaattaattaaggattatgacatgggaattcattatcatccgggaaaggctaatgttgtagcagacgctcttagcagaaaaggttattgcaatgctacagaaggacgacagttgccattggaattatgcaaggaatttgaaagattaaatttgggaattgtcggtagaggtttcgttgcagctttagaagcgaagcccactctaattgatcaagttagagaagcccaaattaatgatcctgatattcaagagatcaagaagaatatgagaagaggaaaagctattggtttcttggaagatgagcacggaactgtatggttgggtgaaagaatctgtgtctgtcacgtcctgataaattcatcccaaaattaa

SEQ ID NO: 14829 - DNA, 321 bp, Oryza sativa
  Clone ID: PAT_MRT4530_20729C.1
atggagttggtgagccaacctggagaagtcaatgctgcgatgtgggcggaggcggcgcctcggctgccggtggcagagaaagtggacgttgcggctgatgaggaacacgtggagagcagcgacgcaccagaaatcatgggggcgaggcagcgccctcgatccgacggtgacgtcgccctcgattcaacgaccgcgtgccggcagcagggcgggctgttggctcgggatcggcagccgcccggcgacagcgaggcgacggccgcggtgtggaacgagcggagattggagccttggcggcggatgggaacgggtgacgaatga

SEQ ID NO: 14830 - DNA, 239 bp, Oryza sativa
  Clone ID: PAT_MRT4530_2072C.1
caaccatggcctcctccatggccatgtccctccgctccctggccgccaccgacgccttcctccccagagccctccccctcctccgcccaattcctccttctgctctccgcgtgcaccccgcgcctccgactacacctccacctgcgctacacgcgccgactcccggtggcgccgatcgccgcgtacgactccttagaatgcgcttcgacctcctccgccgacgcgccagacttgactga

SEQ ID NO: 14831 - DNA, 192 bp, Oryza sativa
  Clone ID: PAT_MRT4530_20730C.1
atgggcgggttaatcattttcaacatctcccgacgacccgacctgagtggaggcgctgaggggagttgggcaccgaaggatgaggaagggtcgccgctgcgatttccccctgctcgggaggctgttgcatctaccgcgctgaactcatcgcccagaccgatggggattcgctcgattcgctacctgcactag

SEQ ID NO: 14832 - DNA, 5043 bp, Oryza sativa
  Clone ID: PAT_MRT4530_20731C.1
atggtgggttctcctggtttggaatggtatattcctggtttggagatagaactgtacagccgggatggttgtccagaatggttgggcttatacaacaggatgccgcgctacaagcctgagtatctttttggtgttgagggttttgtccaggagttgcgtacgatgtcctttgtcattggatttgggactgtccctttttatgcccagattcgtcatgatcgtcatgaagagaagtgccgagtcaaagtcaccttgaacagtaatagtgaagatattccctcagtgatgttcgaagctggaggaagaaactacatccatgcatgtcaggaggtggcaaggatcgccataggagagctccgtgatcgctacagtgatcagttggccgacactgagtatcgctaccatcctcgccaaccccagggaaagactgtgttagcagctcaagatcgtgaagatcggaatcgtggtaagatttgcaagttagaagacaaggtggatcgtttggagaaggaattagccgcattgaagggagaagcaccacctcagaaggccaggattcgtcttaccgcaaggaagagagctttatttgtccctcgctatcaattggcgccaaagatggtgaacactcgcagcaacaggaatggtcccaatctcaacaaccccaataacaataacaatggagagaatccaacccttgctcaagttcttgctcaacagactcagcttatgaacatgatgatgcagcaacttcagaaccagcagaaccaaggaaataaccatgcaccccctcagaataagttagcagaatttcttcgtgtaaggccgcctgttttctctagtaccactaatcctgttgaagctggtgattggttgcatgccatagagaagaagttggatttgcttcagtgcactgatcaggagaaggtctcatttgcatcacaccagttgcatggccctgcctctgaatggtgggatcacttccgcctgaataggactactgctgaacctatcacttggcttgaattcaccgctgctttccggaagacgcatataccatcgggagtggtgtctctcaagaagaaggaattcaggtcactcactcaaggatctcgctctgttacggagtatttgcacgaattcaatcgtcttgcccgttatgctccggaagatgtacgcaatgatgaagagcgtcaggagaagttcttggaaggacttaatgatgagctttcttacccactcatgactgaagattattctgatttccagaaattagtggataaggctattcatcaggaggacaagtacaatcgcatggagcagaagaaacgccggattgctcacttcaaggcacaacaggggaataatcagaagccgcgtcttactttaggaccccagtctatgccacatggaggttcttcgtctgttgttcgtccgcagcatcagttcttcaacaacaatgctggcaacaacatccgtaatcaagctccacgtcctgttgcagcttcgacacagcaacaacctgccaagagggagcaaggcagcaagcctgtggtatgtttcaactgtggagacccaggacattatgctgacaagtgtccaaagccccgacacgtgaaggttgtccctgcccagagcaactctgctgtaccagcatcaaaggcccgtgtcaatcatgttgcagctgcagaagctcaagatgctccagatgtgattttgggtacgttccttgttaactcagttcctgcaacagtgcttttcgattctggtgctacacattcattcttatctatgagttttgcgggaaatcatgggatggaagtagaagatcttagatgtcctttgatggttagtaccccaagtaatcaagcactctctttgcaacgtagcccctctgtcagaatagaaattcaaggggtaccatttctggccaatcttatattgttagaatccaaagaccttgacgtcattctagggatggactggttagccagacataaaggtgtgatagactgtgctaacagaaaagtaactctcaccagcaatgatggtcgagttgtgactgttcatgcattgtcttctgagtttttaaggtcaagactgaaccagataactttggaagagattcctatagtccgggggtatcctgatgtgttcccagatgatttacctggtatgccacctaaaagggatatagagttcagaaaagatttggtacctggaacaactccgatccataagagaccttatagaatggcagccaatgagttggcagaagttaagaggcaagtagatgatttgcttcagaaaggatacatcagaccgagttcatcaccatggggagctccggttatttttgtggaaaagaaagaccatacccagaggatgtgtgtggactatcgtgcattaaatgatgtgactatcaagaataagtacccgctacccagaattgatgatttgtttgatcagcttaaaggtgccaccgttttctccaagatagatcttcgatcagggtatcaccagttgagaatcaaagaggaagatatacctaagacagcttttaccactaggtacgggttgttcgaatgtactgttatgtcttttggacttaccaatgcccccgctttcttcatgaacttgatgaataaggtgtttatggaatatctagacaagttcgtggtggtctttattgatgacattcttatctactctaagaccaaagaagagcatgaagaacatcttcgccttgcattggagaagctacgagaacatcaattgtatgccaagttcagcaagtgtgaattctggttgtctgaagtaaagttccttggtcacgtcatctcagcaggaggagttgccgtcgatcctagtaatgtggaatccgtaaccaactggaaacaaccaaagacagtttcagagatccgcagtttcctaggcctcgcaggatattatcggaagtttatagagaatttttccaagattgctaagcccatgacacgactgtttcagaaagatgtgaagtacaagtggtcagaagaatgtgagcagagttttcaagagttgaagaatcgcttgatatcagctcctattttgattttgcctgatccaaagaagggtttccaggtgtattgcgatgcatccaaacttgggttaggttgtgttttgatgcaagatgggaaggtggttgcctatgcatctcgtcagttacgtccgcatgaaaagaactaccctactcatgatcttgagttagctgcagtagttcatgcgttgaaaatttggcgtcattatcttttcggtactcgtacagaggtgtacaccgatcacaagagtttaaagtatatctttactcagccggatctgaacatgagacaaaggagatggttggaattaattaaggattatgacatgggaattcattatcacccaggaaaggctaatgtagtagcagacgctcttagcaggaaaggctattgcaatgctacagaaggacgacagttgccactggaattatgcaaggaatttgaaagattgaatttgggaattgtcagtataggtttcgttgcagccttagaagcgaagcccactctaattgatcaagttagagaagctcaaactaatgatccggatatccaagaaattaagaagaatatgagaagaggaaaagctattggtttcttggaggatgagcacggaactgtatggttgggtgagagaatctgtgtccccgacaacaaagatttaaaagatgcaattctgaaagaagctcatgatactttatactccattcaccctggtagtactaagatgtaccaggatctcaaggaaaggttttggtgggcaagtatgaagcgtgaaattgcagaatacgtagcagtatgtgatgtttgtcagcgagtcaaggcagaacatcagaaacccgccggtttgttgcagcctttgaagattcctgaatggaaatgggaagaaatcggtatggattttatcactggtttgcccaaaacgtcattaggccatgactctatttgggtgatagtcgacagacttaccaaagtggcacatttcattccggtaaaaacaacctattccggaagtcgcttagcagaattgtatatggcaaggattgtgtgtttgcatggcgtccctaagaagatagtgtctgatcgaggcagtcagtttacttcaaatttttggaagaaacttcaggaagagatgggttctaagttgaactttagtactgcttatcatccgcagacagacggacaaactgaaagggtgaatcagattttggaagacatgttgagagcttgtgctttagatttcggtggaagttgggataagaatctaccttatgcagaattttcatacaacaacagttatcaagctagtcttcagatggctccttacgaagcactgtatggtcggaagtgccgcactccgcttttgtgggatcaaacgggagaacgtcaggttttcgggacggatatcctaagggaagcagaagaaaaggtgaaaatcattcaagaaagattgcgagtggctcagtctcgacataagagttatgccgacaatcgccgcagagatttgagttttgaagaaggagattacgtgtatcttcgtgtcacgcctcttagaggagttcatcgtttccataccaaaggaaaattggtaccgcgttttgtgggaccttataagattgtcagtagaagaggagaggttgcttatcagttagagttacctcaatctttggcagaagtccataatgtgttccatgtgtcgcaattgaagaagtgtttaagagtacctaccgaagaagctaatcttgaacaaatagaagtccaagaggatctgacctatgtggagaaaccaatccgtatcttggaaacaaatgagagaagaaccaggaatcgagttatccgtttttgcaaagtccagtggagtaatcactcggaagaagaatcaacttgggaacgagaagatgaattgaagtcagctcatccgtatctgttcgccagttcttccgaatctcggggacgagattctgtttaa

SEQ ID NO: 14833 - DNA, 645 bp, Oryza sativa
  Clone ID: PAT_MRT4530_20732C.1
atggagttggtgagccaacctggagaagtcaatgctgcgatgtgggcggaggcggcgcctcggctgccggtggcggagaaagtggacgttgcggctgatgaggaacacgtggagagcggcgacgcaccagaaaatcatgggggcgaggcagcgccctcgattcaacgaccgcgtgccggcagcagggcgggctgttggctcgggatcggcagccgcccggcgacagcgaggcgacggccgcggcgaccagatcggccggcggcgagggggaccgcatcgccgtgcttctccgtcgccgccgcaccacttcgccgaagctggaggcgttggcccccgcgcggtggcgccgggggagggcgacggcggcggaacgccggcgagaagcgcgccgctgagccgtcgatcgaggcgcccccgcgcagcagtaagtactacgccctgtgcgttgcgggaggcgggagaacatggctgcggccgtggaaggcaccgggcgtcgacgtctgctgcgccaaccccggcggccgcatccttctccggcgggccggcgcaccgcgcgccgcaggcagccggttggtggggaaaagtgcatcgtacttggcattagcggccgacagagaatccgccagccacactccccacctctag

SEQ ID NO: 14834 - DNA, 9213 bp, Oryza sativa
  Clone ID: PAT_MRT4530_20733C.1
taaaaagaaaagccctaaaaagtctttttttcaacccctccccctcttgggccggctcggcccatctctctccctctctctcctctcccccgcggcccattcggcctcctccccgcgcacgcgccgctgacgggagggcccgcccgccaccctcgctgacgggtggggcccacccgtcatccccttcctcccgccgctcccgccgcccgcgccctagcgccgccgccgccgccgtgaatcccgccgcccccgtccgccccgcgtgcaatcaagaggggggaattattccccgtgattccctccccctttccccccatttttccctctctctctctccctcggattcgtttggaaactttccccctaacctcgccggcgccattaatggcggccgggactcccgcgcccgtttccccctcctccggccaccccctccctctcttaaccctatataaaccctccccgtgcctccctccaccggtttcgcggcactcgccggcctctctctctcgccggaatcgagctcgcgccgtcgctctctctctccgccgtcgccgccgagctccggtccgccgccgtcgtcgccccggaccaccttccccctcggggccgcctccttcagcttcgccgcatcctcaccgacctcgtccacccctccgtttcgcacgccgaccgccggagcaccgtcgaccccgtccacccaagccgcgccgccgccttcctccgctccgatgtaagttggcccggcctgggggaggcgggacgttacacgcgccgcctcccgtcggctgtgccggcgtggccgccttcgggcgcgccccgcggctgccgtgtggggcccggctgtcagccgcccacgcccttaggtgcggctgacgcgtgggacccacggcgtcggccggtgcgagcccgggtgcgcccggtccaccgtggaccgtggggctgccgcgtgggccccacccccgtggacccggcaaatgaaggctacacgagctgcggcccggtagtcgacatgtcatggcacagggctggtgtcctgctgctaggggctcagtcctgcctacctgtcccggaggttccggccgtagcgtcgtgtgccctagcttcgccgtcgccgccgccgctccagccgtgctccgccgccgttccagacgtcgccgtcgctcgggaagaccgtcgtcgtggtcgccaagtcgtcgccgtcctcgtccgccccttcgccgtcgccggagatcgtcggagcttcgtcgccgtcgacaacccgaaggtttccgccgtttcctcctcgtcgccgtcgtcgttcgttgtttttccgccgccgttttggtcaccggtgtgttcgccgcgtcgtcctctacgtgctggtgccctccgtttgcgtcctcgcgccgccgttcgccggcgagcgtgcgccgcccgagccgtccgctccgccgagccgccgccgctgtcggtgacgtcattgccgacgtcatcggggtcgtccgccgtgagccggcctgagtacctgtttggtgttgagggttttgtccaggagttgcgtacgatgtcctttgccattggatttgggactgcccctttttatgcccagattcctcatgatcgtcatgaagaaaagtgccgagtcaaagtcaccttaaacagcaatagtgaagaggtcccctcagtgatgttcgaagctggaggaagaaactacgtccatgcatgtcaggaagtggcaaggatcgccataggagaactccgtgatagctacagtgatcagttggccgacactgagtatcgctaccatcctcgccaaccccagggaagtgaccgtggcagctaccttgaaactgaaggaattgagaatgatgctaccacaaggcatttggttgagatgctgtgggctatggatgaaagtcgtgcggagactgtgttagcggctcaagatcgtgaagaccggaatcgtggtaagatttgcaagctagaagacaaggtggatcgtttggagaaggaactagctgcattaaagggagaagcaccgccgcagaaggccaggattcgcctcaccgcaaggaagagagctctattcgtccctcgctatcaattggcgccaaaggttcgtgtggtggagaaagaagttgccccatcccaagcggatcctccggtcatcatcataagtgatgaagaagaagaatccaagcgcaacaattccaagattgagtgggtagcaacccaagatgatgaagacgagccgaacgagccttcaatcgacctccgatgcttggaagaactagattttcccccggtttctcttcttgtgccatgttcctgccagatggtgaatactcgcagcaacgggaatggtcccaacaaccccaataacaataacaatggagagaacccaactctggcccaagttcttgctcaacagacacagcttatgaacatgatgatgcagcaacttcagaatcagcagaaccaaggaaataaccatgcacctcctcagaataagttagcagaatttcttcgtgtgaggccgcctgttttctctagtaccactaatcctgttgaagctggtgattggctgcatgccatagagaagaagttggatttacttcagtgcactgatcaggagaaggtatcttttgcatcacatcagttgcatggctctgcctttgaatggtgggatcacttccgcctgaataggactactgctgaacctatcacttggcttgaattcaccgctgctttccggaagacgcatataccatcaggagtagtgtctctcaagaagaaggagttcaggtcgcttactcagggatctcgctctgttacggagtatctgcacgagttcaatcgtcttgctcgttatgctccggaagatgtgcgcaatgatgaagagcaccaggagaagtttttgggaggacttaatgacgagctttcttacccactcatggttggagattatcctgatttccagaaattagtggataaggctatacgtcaggaggacaagtacaattgcatggagcagaggaaacgtcggattgctcacttcaaggcacaacaagggagtaatcagaagccgcgttttactttaggaccccagtctatgccacagggaggttcttcgtctgttgttcgtccgcagcgtcagttcttcaacaacaatgctggcaacaacatccgcaatcaagctccacgtcctgttgcagctccaacacagcaacagcctgccaagagggagcaaggcagcaagcccgtggtgtgtttcaactgtggagacccaggacattatgctgacaagtgtccgaagccccgtcgcgtgaaggttgtacctgcccagagtaactctgctgtaccagcatcaaaggcccgtgtcaatcatgtcgctgctgcagaagctcaagatgctccagatgtgattttggatgatattcttatctattctcgaaccaaagaagagcatgaagaacatcttcgccttgcattggagaagctacgagagcatcaactgtatgctaagttcagcaagtgtgaattttggttgtctgaagtgaagttccttggtcacgtcatctcagcaggaggagttgccgttgatcctagatattaccggaggtttatagagaatttttccaagattgctaagcccatgacacgactgcttcagaaagatgtgaagtacaagtggtctgaagaatcgccgtgtgccctagcttcgccgtcgccgccgccgctccagccgtgctccgccgccgttccagacgtcgccgtcgctcgggaagaccgtcgtcgtggtcgccaagtcgtcgccgtcctcgtccgccccttcgccgtcgccggagatcgtcggagcttcgttgccgtcgacaacccgaaggtttccgccgtttcctcctcgtcgccgtcgtcgttcgttgtttttccgccgccgttttggtcaccggtgtgttcgccgcgtcgtcctctacgtgctggtgccctccgtttgcgtcctcgcgccgccgttcgccggcgagcgtgcgccgcccgagccgtccgctccgccgagccgccgccgctgtcggtgacgtcattgccgacgtcatcggggtcgtccgccctcctggtttggaatggtacattcctggtttggagatagaactgtgcagccgggatggttgttcagaatggttgggcctatacaacaggatgccgcgctacaagcctgagtacctgtttggtgttgagggttttgtccaggagttgcgtacgatgtcctttgccattggatttgggactgcccctttttatgcccagattcctcatgatcgtcatgaagagaagtgccgagtcaaagtcaccttaaacagcaatagtgaagaggtcccctcagtgatgttcgaagctggaggaagaaactacgtccatgcatgtcaggaagtggcaaggatcgccataggagaactccgtgatagctacagtgatcagttggccgacactgagtatcgctaccatcctcgtcaaccccagggaagtgaccgtggcagctaccttgagactgaaggaattgagaatgatgctaccacaaggcatttggttgagatgctgtgggctatggatgaaagtcgtgcggagactgtgttagcagctcaagatcgtgaagaccggaatcgtggtaagatttgcaagctagaagacaaggtggatcgtttggagaaggagctagccgcattgaagggagaagcaccaccgcagaaggccaggattcgtcttaccgcaaggaagagagctctattcgtccctcgctatcaattggcgccaaagatggtgaatactcgcagcaacgggaatggtcccaacaaccccaataacaataacaatggagagaacccaactctggcccaagttcttgctcaacagacacagcttatgaacatgatgatgcagcaacttcagaatcagcagaaccaaggaaataaccatgcacctccccagaacaagttagcagaatttcttcgtgtgaggccgcctattttctctagtaccactaatcctgttgaagctggtgattggctgcatgccatagagaagaagttggatttacttcagtgcactgatcaggagaaggtatcttttgcatcacatcagttgcatggctctgcctctgaatggtgggatcacttccgcctgaataggactactgctgaacctatcacttggcttgaattcactgctgctttccggaagacgcatataccatcaagagtagtgtctctcaagaagaaggagttcaggtcgcttactcagggatctcgctctgttacggagtatctgcacgagttcaatcgtcttgctcgttatgctccggaagatgtgcgcaatgatgaagagcgccaggagaagtttttgggaggacttaatgacgagctttcttacccactcatggttggagattatcctgatttccagaaattagtggataaggctatacgtcaggaggacaagtacaattgcatggagcagaggaaacgtcggattgctcacttcaaggcacaacaggggagtaatcagaagccgcgctttactttaggaccccagtctatgccacagggaggttcttcgtctgttgttcgtccgcagcgtcagttcttcaacaacaatgctggcaacaacatccgcaatcaagctccacgtcctgttgcagctccaacacagcaacagcctgccaagagggagcaaggcagcaagcccgtggtgtgtttcaactgtggagacccaggacattatgctgacaagtgtccgaagccccgtcgcgtgaaggttgtccctgcccagagtaactctgctgtaccagcatcaaaggcccgtgtcaatcatgtcgctgctgcagaagctcaagatgctccagatgtgattttgggtacgttccctgttaactcagttcctgcaacagtacttttcgattcaggtgctacacattcattcttatctatgagttttgcgggaaatcatgggatggaagtagaagatcttagacatcctttgatggttagtaccccaagtaatcaagcactctctttgcagcgtagcccctcggtcagaatagaaattaaaggagtaccatttgtggccaatcttatcttgttagaatccaaagaccttgatgtcatcctagggatggactggttagccagacatagaggtgtgatagactgtgccaacagaaaagtaactctcaccagtaatgatggtcgagtggtaactgttcatgcattgtcttctgagtctttaaggtcaagactgaatcaaataactttggaagagattcctatagtccgggagtatcccgatgtgttcccagatgatttacctggaatgccgcccaaaagggatatagagttcagaatagatctggtaccaggaacaactccaatccataagagaccttatcgaatggcagccaatgagttggcagaagtcaagaggcaagtggacgatttgcttcagaaaggatacatcagaccgagttcatcaccatggggagctccggttatttttgtggaaaagaaagatcatacccagaggatgtgtgtggactatcgtgcattaaatgatgtgactatcaagaataagtacccgttacccagaattgatgatttgtttgatcagcttaaaggtgctaccgttttctccaagatagatcttcgatcagggtatcaccagttgagaatcaaagaggaagatatacctaagacagcttttaccactaggtatggattgttcgaatgtacggttatgtcttttggacttaccaatgcccccgctttcttcatgaacttgatgaataaggtgtttatggaatacctagacaagttcgtggtggtctttattgatgacattcttatctactctcgaaccaaagaagaacatgaagaacatcttcgccttgcattggagaagctacgagagcatcaactgtatgctaagttcagcaagtgtgaattttggttgtctgaagtgaagttccttggtcacgtcatctcagcaggaggagttgccgttgatcctagtaatgtggaatccgtaaccaactggaaacaaccgaagacagtttcagagattcgcagtttcctaggcctcgcaggatattaccggaggtttatagagaatttttccaagattgctaagcccatgacacgactgcttcagaaagatgtgaagtacaagtggtcggaagaatgtgagcagagttttcaagagttgaaaagtcgcttaatatcagctcctattttgattttacctgatccaaagaagggtttccaagtgtattgcgatgcatccaaacttgggttaggttgtgttttgatgcaagatgggaaggtggttgcctatgcatctcgtcagttacgtccgcatgagaagaactaccctactcatgatcttgagttagccgcagtagttcatgcgttgaagatttggtgtcattatcttttcggtactcgtacagaggtatataccgatcacaagagtttaaagtatatctttactcagccggatctgaacatgagacaaaggagatggttggaattaattaaggattatgacatgggaattcattatcacccgggaaaggctaatgttgtagcagacgctcttagcaggaaaggctattgcaatgctaccgaaggacgacagttgccattggagttatgcaaggaatttgaaagattaaatttgggaattgtcagtagaggtttcgttgcagccttagaagcgaagcccactctaattgatcaagttagagaagcccaaattaatgatcctgatattcaagaaatcaagaagaatatgagaagaggaaaagctatcggtttcttggaggatgagcaaggaactgtatggttgggtgaaagaatctgcgtccccgacaacaaagatttaaaagatgcaattctgaaagaagctcatgatactttatactccattcaccctggtagtactaaggtgtaccaggatctcaaggaaagattttggtgggcaagtatgaagcgtgaaatcgcagaatacgtagcagtatgtgatgtttgtcagcgagtcaaggcagaacatcagaaacctgccggtttgctgcagcctttgaagattcctgaatggaagtgggaagaaatcggtatggattttatcactggtttacccagaacgtcatcaggccatgactctatttgggtaatagtcgacagacttaccaaagtggctcatttcattccggtaaagacaacttattctggaagtcgattggcggaattgtatatggcaaggattgtgtgtttgcatggcgtccctaagaagatagtgtctgatcgaggcagtcagtttacttcaaacttttggaagaagcttcaggaagagatggtttctaagctgaattttagtactgcttatcatccgcagacagacggacaaaccgaaagggtaaatcagattttggaagacatgttgagagcttgtgctctagatttcggtggaagttgggataagaatctaccctatgcagaattttcgtacaacaacagttatcaagctagtcttcagatggctccttacgaagcactgtatggtcggaagtgccgcactccgcttttgtgggatcaaacgggagaacgtcaggttttcgggacagatatcctaagggaagcagaagaaaaggtgaaaataattcaggaaagattgcgagtggctcaatctcgtcataagagttatgccgacaatcgccgtagagatttgagttttgaagaaggagattatgtgtatcttcgtgtcacgccttttcgaggagttcatcgttttcataccaaaggaaaattggcaccgcgttttgtgggaccctataagattgtcagtagaagaggagaggttgcttatcagttggagttacctcaatctttggcaggagtccataatgtgttccatgtgtcgcaattgaaaaagtgtttaagggtacctaccgaagaagctaatcttgaacagatagaagtccaagaggatttgacctatgttgagaaaccaatccgtatcttggcaacaagtgagagaagaaccagaaatcgagttatccgtttttgcaaagtccagtggagtaatcactcggaagaagaatcaacttgggaacgagaagatgaattgaagtcagctcatccgcatctgttcgccagttcttctgaatctcgaggacgagattctgtttag

SEQ ID NO: 14835 - DNA, 339 bp, Oryza sativa
  Clone ID: PAT_MRT4530_20734C.1
atggctttggctggtaggctacttgtcctcttcgccattgctctccttgccatctccatagccgagcacaaggcgctagccaagggatcaaccagtgagcatgatgataacgtttaccaagtaagcaagggaggacagggcagcctgaagagctatcagtgctcgccgcagtgcgcgtaccggtgcagccagacgcagtacaagaagccgtgcctcttcttctgcaacaagtgctgcaacgcctgcctctgcgtgccgtcgggcctctacggcaacaagggcgagtgcccctgctacaacaactggaagaccaagcgcggcggccccaagtgcccgtga

SEQ ID NO: 14836 - DNA, 258 bp, Oryza sativa
  Clone ID: PAT_MRT4530_20735C.1
atggcattggcatgcagagggcaatcgccggcgacctcggcaaggagagagaccttggcaaccggcaacagctacctccacaccgctcctccgatggcgacacatattgccaacgatggcgggaccggggagaaggggcgtgggcggagggaggcggaggccagcgcgtggatggcgggcagtgacagcatgcgcgcggaggaagggagcggtgccctgtgcggcatgggagctcgccggcgtgtgaagtctgggtag

SEQ ID NO: 14837 - DNA, 267 bp, Oryza sativa
  unsure (1)..(267): unsure at all n locations
  Clone ID: PAT_MRT4530_20736C.1
caaagcaaaaanatagtattctcccgacgagacccatatcgatcatatccattcccagtatccaacttcgaattaatctcgagcgattatatttntcctgtggctccactaattatctagtactacgtatttttnagcttgataattagctcaatcaatcaagaaagcgatcgattcagagagctagcgcgaantgaccaagatctccaaagcagcaaactaattaaggtggngcatcggnggcatgggagggnggcctctacctga

SEQ ID NO: 14838 - DNA, 687 bp, Oryza sativa
  Clone ID: PAT_MRT4530_20737C.1
gaagtccagtgcagctcaagtttttggctttttttttttttttttttttttgacaaaatatatcatttattattcttcaattccattgaatccctcccaagatatcaattacaccatggaatcaaaggaacacacagaaagagtcttggaaacccctccacaaaagcaacaacaaaaaaaacagatcgattcccatactaggagctcacttgagaagaactcccgtcatcgtcctcttccacctttggtggctccgatttctccacctcctccacagtggcgttctccacgtcttcttccttcttcttctcagggagggcatcatcataggcagctttgttccctcctatgctcttcttcacaaaggctcccataccttgcccaggcttgatgggtgtgccacgtcccacgcaaagctgaccaacggcaatagaagcaaccgtgagggtagcgatgatcgccagagccacgatcaccggcccataggaaccaccaatgcccatggcggtgcctccactatgcgacgcaccgcgtgtcatcgtcaacggtggtggaggtgacaagagggacatctatatcttcctacctatccccctgcaagctaacaaggggaattacttgcacatctaatgatggactggtgttgttatgcggttgtgttggggtgagatggaggatcgcggccgg

SEQ ID NO: 14839 - DNA, 1102 bp, Oryza sativa
  Clone ID: PAT_MRT4530_20738C.1
gcgggaggaatgcgtcggcgttggctcaggggagcaaggcggcggtggcggcggtgaggggagcaaggcggcggcgtcagcttcctctccgtgctcgccgggctacgacgacaccttgctgctaatcatcttcgactacgcgtctacgccatcaagcttcgggctgccgctgcgtcgcccccctcgggccgcagttccgctgcctgtggtccacacctccactggttgttgcagtgctgacaggcgccctccttagcatggctacatcaccggtggacttctcgccgctgcatcgacatggaactgcagttgtgttgtcttctcgaaccacaactttgccgctttcgtcgttttcatcgtcgttagcgcttcgacaccctcgtcgtccgcattggtcatcgtcagccactcgggctacctctacatggctactgacgttgccgtccaggccgttggttccgctacttcgccttctttttcgtccatcatgattcatcgccagtgtcgccgtatcttcctcgactacactttgctcttctccgacaactacgtgctgctccggcaattctccctctacgtcgttctcgcttgtcccggggtctggcaaaccctgtgtgacgtctcgtccttcacggttcgactacattggcttttcggcgtcatcttcctcaacgattgccgtgattgtgtcaccgtcttcgtctccagtgcatcctcacgcaccttggtccatgacgcccctcccatgtgtccatgaccactctacggcgccctatgcgcgtcctgcggctcggctacctcgacatcagcttcctgacttcggctacaacgaccacggctactctacacacggcttcatcgactacggctcccttgcacccttcgctttggctacattgactacggcacacagggctatcatccgtattgagtactcttgccggtttcttctccagtccaagtgtccacgctgctcacgcttggactgtgggggatatctcctctccatgtactcctatgtatatcagccctctgaggctcaatacagtcaatccacgattcgcaatatcctctctccctgtactatccaacattatatact

SEQ ID NO: 14840 - DNA, 328 bp, Oryza sativa
  Clone ID: PAT_MRT4530_20739C.1
aatggaagaaagaccaacacttggagcaaggttttatttagagtaaagtctatcaccggtctctaaacttgtaccattgtgttatcccggttcctaaactcgcaaatcgaccgttcaggttctcaaacttgtttgattgtgtcatcgcggtccctaaacttgcagatcacccgtttagatcctccaacttgttcagttatgtcaccccggtttctaaacttggatttgaatattatctgggtcaaataggacggtctaaagactttatatttaaaaacatgttttgtcccaaaaatgtaattttaaaattaaaatttcaaaatctata

SEQ ID NO: 14841 - DNA, 1239 bp, Oryza sativa
  Clone ID: PAT_MRT4530_20740C.1
atggcggactcggctccggcgccggaggccagagtaagcggtggcgacgttccggcgaggctgcagcaggctctcgcgctgctgttccctaccaacctcgccgcgaaggccgtgctgttcgccgtcgtcgtggcgctgctgccgctcctgccgacgagccaggcgcccaggatctgggagctgcctcacatcctcctcctcggcctcatcatctcctacggcgtgttcggccagaggaacgccgactccgaggtggccgccgtggccgccaccaagaccgtcgacgacgagtcggtggagtcctacgtcacccagatgatgcacggcccgctggtctttgaggagaacgatggcggcggtgaagctgacgccgccggcaagaagggcgtccaggcgtggagctctcagtacttcccagacgatcccctcgtcgtcgttgccgatgccggtgcagggagcaacaccggcaagggcgatgaaagagagaagccgctcctcctgccggtgaggaagctcaagccggcgaccgaagaatccgcgacactaacggagagcttcagtgacggcgccattgaagaagaagaagaagaagaagaagaagaaacggagttcctcctccgcaaggcgagatacggcggcgtacgagagcatgccatcccttcgccgtcctcagtcctcgatgccgacctgaccctctccccgtgctctccgcctctgctcccgccgcccccgccgccgccgcctccgcctccgtttcttgatcacgaccggcccgccctccggaaggccaaagcaagaagcttcaacgattacggaagggtgggcttgcagaccgcagccggctgcggcggcggcggccacaatttccggtccaaatcagcgatccaagcgtcgaggagtactttcccgacatcgccattcgacgatcacgatttggaagagaaggttgcagcgtcagacatcagttcgttcagcagcgatgatgtggtcaccgacgacggcgaagatggtgacaaccacaaggagatatacaactacgaggaggaggaaggtgacgtggatagattggacgacgacgatggctcatgcgacgaagagctcttcgagttggccacgaggctggcgccggaggaggaggaggtggtggaggacgaggtggacaggaaagccgacgagttcatagccaaatttagggagcagattaggatgcagagggtggtcgagccgggcaggagatga

SEQ ID NO: 14842 - DNA, 172 bp, Oryza sativa
  Clone ID: PAT_MRT4530_20741C.1
gcgattagtctgcttgagagggaggaccgctttccggacggtcttaacttcaacaaggggcccgtcctcaaacggggcgccgctaaggatgttaattttgttttacttacactatactcctcttactttctttttttttcttcatccttatcctatcttttcttatactccc

SEQ ID NO: 14843 - DNA, 1988 bp, Oryza sativa
  Clone ID: PAT_MRT4530_20742C.1
ctatgtctcctcgtgtaagcccaatttcagagagccagaggcccatgggccaaattttctcttgggctgggcctctctactccggcccataaagcaaatgaaactcaaaaggttaccaagtagtcactctaatattctggtagttcagagattacacatatggtgctccaaatcaggaaatacaccaaaaaaagaggaaggggtgatatactaggctagagatatacataaacattctcatagactcatacttgatacttgatcataagacatcatataaccgtacgccatagttatacagaaatcattagtatagctgatttcaggtagttgcatagctcatatgagcagtgcatcattcttgcttcactttggtgttgatccttcgcccaacttggacgatcgggtctcaccggtccttgggctgcctcttcctcctagagggctgcggtcatgcctcaactcggtgatacaagggctgtatgccctctcagagatacaagggctgcggattcctttaagttctgccactggtgtgccaccggagctggtgatcttaggactgttcaggcgcttgatttcaccacggcttctagtgacaatgtcatcaaggatttctgcactctgggtgcgcgccaatgcaacatcaatatcttgcgcggcaatgaacggtatagctggtgactcctcatactctgctgcatccagatcagtcagatgtgcacctttgaagagctttgggaggatgtactgcctgactggaaccagcagcatgatcatgagggggaaaagaaccccagcaatcgggatccatgtgatcccgaagcagacgagtagatacattgtctggaagagtgtgaacatggctatcgtcttgaatggcacggtctcgacaaacgtggtgtggtactcttctaacaccttgtatcttctgctgggagcagtgaagagcagcaagatcctctcccagaactggttaccaggcaagctctcaatggccatgaaggcgaagtagccccagaggacagaagtcgggatcttcttgagcaatggcatagcagcaacacaacccccaaccattgtggcctggagcaagttgctcaacctctgctccttgacctcgataggcagcaggtcatcgatttctttctcgatgtcaaagactgtctcatcaactggcgcatcgatgttgcccatgcttgaagccatttggactgttgagtccttgagctcattcaatcccttgactgacggttgctggtaaatcagtggtgtctgcatctgctggtaagcttcctgcatgctgccatacagctggctcaagctcgcattctggctcatgctttgtcgggctgtggctactagtcggttacggagtagttgatgtttgagagtagccaaactcttcgtatgcattggagactgtggaatgacaccattcgccggagggataccaataaggccacacaataatgtcaggaaacccaggagaagcaaatcataatggaaagatgggggcttcctcaaattgaactccttctgctgagcaagctgagaagcaacactgtgatcgaagtagtacaggacggctatcatcgttgctggtatgaaggcaccaataatgtagaggagtggcacatttggcatgtccctgatgactgtccaattatcatatgcaccaggggaccatgggttggggctgaaaaggcgccgtggaattccttttggaacactaccatatggaatgtaggaaactcctgtccatactagcaccatcagtgggacaccatagtcggcgatgaagccacggagccaacctgttccatagcgccatgatcgagccttcctgctccgcagtgcagtgagcaaaaggccaaacgacaagacgatagcaaacattccgttggcgaacctccatgatgaaacaaactctaatgcctttctgttctccctctcagggatgcggaactcgtcaacaagcaaatgaa

SEQ ID NO: 14844 - DNA, 1503 bp, Oryza sativa
  unsure (1)..(1503): unsure at all n locations
  Clone ID: PAT_MRT4530_20743C.1
aagaaaaaagaaaaaaaaaaacagagatcccccacaacttccgaatccgatcggcggtcgcggcggcggcggcggcgtcggcgacggcgacggcggggagcttcttcccgatcccctcctgatcgcccgcaggatcgatcgagctctccccccctctcactcacctcggggggcgcggcggtggggggctagggatttgagccggatcgcggcgagcttgaaggggcgcggactgaggcggcgagaggagcgggtttccggttcgggggaaggaggggaggagtagtaggaggaggaggaggagatggtgctggtgctcgcgctcggggatctgcacgtgccgcaccgggcggccgacctgccggccaagttcaagtccatgctcgtcccgggcaagatccagcacatcatctgcacggggaacctctgcatcaaggaagttcatgactacctgaaaagcctttgtcctgatctccatataaccagaggtgaatatgatgaggatgctcgttacccagagactaagacacttactattggtcagttcaagctagggctgtgccatggtcatcaggttgttccatggggcgatttggactccctggcgatgctccaacggcagctggacgtggacatcctcgtcacagggcacacccaccagttcaaggcgtacaagcacgaggggggagtggtcatcaaccccggctccgccacgggcgcctacagcagcatcacctacgacgtgaacccgagcttcgtgctcatggacatcgacggcctccgcgtggtcgtctacgtgtacgagctgatcgacggcgaggtcaaggtcgacaagatcgacttcaagaagacggcgacgatgcacgcctgaccaaaaaacacatcagaaaacccttccccgtcctgcccagccctgcccttgtttttagttaccctttacccttcttgcttgattcagagatcatcccattttctcaagcttccttttcttcctcgctctcgtccttgtgcaaaagcttgagccgtgtattcagattagttaataataaaagatcgtcaagagttgtcatggtaaaaagaactgaagccggtgtattgagatctagtgaatcaagatcatcagagtgattaagctgaggtgaaaaaaaaaaaagtaatccgggggggggacaggctgggaaggggcaacatgggggcctgcacatacataactttggggtagacacaggaactggaggttggggtgagagaaagaggtgggaggagacggaaaaggcttggggggggggcgcggggccgaaggggctagggagganttaatagcgncccgtcatgggcgtgggggacggggggggactgtggaaaccgctgtggggcggggtggatggggggaggggagaggcggttgggtagtagtcgtatggggggagaggggccgagaggcgggctgggggtgggggcaggggggaagggggcgggcgtgggtggagtgggggagggagg

SEQ ID NO: 14845 - DNA, 654 bp, Oryza sativa
  Clone ID: PAT_MRT4530_20744C.1
gcaggaggaggaggaggaggggaaggggagaccagggaggacgtgttcctccggaagctgaacgtctgctgcgtcgtgttcgacttctcctccgccgccgccgctgccgccgcagagcgcgggagggactcgccggagagggagaggaagcggcaggtgctcgtgtccctcgtcgactgcgtcggcgccgccgaggagcccctcaccgaggcgatgatctccggctgcgtccgcatgttcgccatcaacctcttcagggtgttcccgcccaaggtccggtccggcgccgccggggcggcggaggccgacgaagacgagcccttcttcgatccctcatggtaccacctgcaggccgtttatgagctgctcctccgcttcgtcatgtccccggtcgtcgacgtcaagattgctcgcaagtacatggacaattcttttgtgtctaggttgctcgacttgttcgattccgatgatccgagagaaagggaatgcttgaagacagtcttgcataggatatacggcaaattcatgggcaaccggcctttcatccgcaaggcggtgagcaatatcttctataggttcgtgttcgagaccgatcgccacaatgggattgctgagctgttggaggtgtttgggagtgtgattagtgggttcgcg

SEQ ID NO: 14846 - DNA, 333 bp, Oryza sativa
  Clone ID: PAT_MRT4530_20745C.1
gcgcagtggaagaaagcgctaagaaggcgaaggaaccctcgcgatgtagcgcgcgtcgatgtagaggaagtagtcgatcacaccggctcgaccttctcctcctcgtgcgttctcctcgccgtgctcccacgctgatcagcaccgcaaagcagcggcgtctctaccagtatccacacaggatccgtgaaggtccgtaggactccaactcggatccctattcgaagttcatgtacactcagctgtaacccgaaaactccttttcggtccacgtgtcaacggtggcccctagcagaatgtattgacccaccgggcatacataaagatcatatcggc

SEQ ID NO: 14847 - DNA, 287 bp, Oryza sativa
  Clone ID: PAT_MRT4530_20746C.1
cgcattggaatttggactccacaacgtctcagtgtgttttgttgcatttagtattaagggtaaaaaaaaaatgatgggacatgggttaaattgcaaatgtgggcagtttttgtgttcaatgcacacacatgctgctggcatggtgaaaattaagcagctcacgtgggaaaatgttgcacccagtggtgcactgcattgtgggtgcattgcacagggtcaaaggaaaagcttacaagttgtaaaaaaaaaagtcaggcatctgattgtaaaaattgaatgcatggccc

SEQ ID NO: 14848 - DNA, 1718 bp, Oryza sativa
  Clone ID: PAT_MRT4530_20747C.1
tccccggcccccgctccctccatctgcgtattttccaacacatctctcttgcagttcgtttcaagtctttcattaagtaaaactttctgaacattgaagtgcaacggagctggcgttttatggcttttcctatgaagcaatccacatctctgatatagatgtgtactcgttctgaacatgacaagttctcaggtatttctctgtagatgaactgcctccacacctgcagtgacaagaagacactgaagaagtggtttttcatcgacaagacagttggctaaattcagcagtgcactcgtccttaaagcgatcgatcatacttctttcttgatctcatcatcctaaattttcccaaatggatttgagcaatagctcacctgtcatcaccgatccggtggcgatcagccagcagttgttgggcgctctgccttcaaatctgatgcagttttcagtcatgcccggtggctactccagctctggcatgaacgttggtgtcagtaggctcaaaatcgaggaagtccttgtcaatggactgcttgatgccatgaaatcctccgcggaagtccggaggctgaatgtagcatttggcgaggactattcatctgaagaagaagaccctgcttacagcgctggcgtggccaattctcctgctgctttggcttccttcaagcaaattgtagccagtgcacaagggaagaagattgctgtgtttctagactatgacggcacacgactgtctgcctatggtcgatgagcctgacaaagcagtgatgtctcccgtgatgagagctgctgtgagaaatgttgccaagtccctccccactgcaagttgtcagcggaaggtcccgcaataaggtgtttgaaggtgcaaaactgttggagctttattatgctggaatctcttccaacctgcacacgactttctgccaatgatcgatgaggttaccaagtccctcttgcaagttgtcagtggaattgaaggtgcaactgttgagaacaacaaattctgcgtttctgtacatcatacgcgtgggcggacgcaggattggaaactggtcgcacggctcgtaaacgaagtgctggaggcttttcctcgtctcaaagtaaccaatggacgaatggttttagaggttcgtccggtgatcgactgggacaagggaaaggctgtggagtttctgctccagtcactcgggctaaatgactctgaaaatgtgatccccatctacattggagacgacagaactgacgaagacgctttcaaggtacttcgacagcgaaattgcggttatggaatactagtttcacaggttcccaaggaaactgaagccttctactcgctgagagatccatctgaagtgatggagttcctcaatttcttggtgagatggaagaagcactcagtgtgaaaaaaagaagacagtctgagcaggttttactaatactactccggcagaaataactgtagtttccgaggcgacaattttgaagcattggacgctgtagatagatgtaataactctctagatatgtggttccaattcattcttattgatcgatgttattgtattgttcatgttctccaccgctgagaaaaattaatcagtgatggttgatccggtctcttgccattgtaagttgtaagcaagaaggccctcttcttagtatccatgctgatgaacgaaattaaaaccttcatttttcgtgtaataaaaaaaaaa

SEQ ID NO: 14849 - DNA, 573 bp, Oryza sativa
  Clone ID: PAT_MRT4530_20748C.1
cccacgcgtccggctgaatgtagcatttggcgaggacaattcatctgaagaagaagaccctgcttacagcgcttggatggcgaaatgtccttctgctttggcttccttcaagcaaattgtagccagtgcacaagggaagaagattgctgtgtttctagactatgacggcacactgtcgcctattgtggatgatcctgacaaagcagtgatgtctcccgtgatgagagctgctgtgagaaatgttgcgaagtacttccccactgcaattgtcagcggaaggtcccgcaataaggtgtttgaatttgtaaaactgaaggagctttattatgctggaagccatggtatggacataatggcaccttcagcaaatcatgagcacagtgctgaaaagagcaaacaggccaatctcttccaacctgcacacgactttctgccaatgatcgatgaggttaccaagtccctcttgcaagttgtcagtggaattgaaggtgcaactgttgagaacaacaaattctgcgtttctgtacattatcgtaacagtgcagagaatgattggaaactggtcgtacggct

SEQ ID NO: 14850 - DNA, 2160 bp, Oryza sativa
  Clone ID: PAT_MRT4530_20749C.1
atgacgatccacacgaaaacggctctgctatgcctcctaggcgccgtagcaactacggcatggctctccttcgccgtcgcgcaaccacagccgccgccggcctgccggagaagatgcggcgacgtcgacatcccttacccgttcggcctcaacggcgatgcccccggctgcgccctgggccacggcacctacggcttcaacatcagctgcaacgacaccggcaacggcgtgtacaagcccttcatctgggacgtcgagctgctcggcgtcttgctgccggaaggccaggccaggatcctgatgagcatctcctcctactgctacaacccggccaccggcgccatggacggtcccgaaaacaacacctgggcgctcgacttcacctcgtcgccgtacaggttctcccacaccggcaacgtgttcaccgccatcgggtgccgcacgctcgcctacatcggcggcgacaacgtggacgccgacgtcggcagcctgaccaccgggtgcgtggccacgtgccggctgcaggccggcaacctcaccgtcaccgacgacgacgtcggcgcctgctccggcatcggatgctgccggacgtccatccccgtggggctccagtactactacgtctggttcgacgaccgcttcaacacgacggccatccacaacgtgagccgctgcagctacgcggcgctcatggagaagtcgtcggcgtcgtggttcaggttcaccccggcgtacgtcacctcgtcggcgttcaacgacaccttcaacgggcaggtccccttgctgcttgattgggccatcggaaacgagacctgcgagcaggcgaggcgagcgagtcccgagtcctatgcgtgcaggagcagaaacagtgagtgctttgactcgccaagcgggctaggctacatctgcaattgttccaagggattccgtggaaatccttacctgcacccagaagatcccagcagttgccaaggaatttgttcctcaacggttgttggccttctaattttccttggcatagaatggatcaagtataaacgtcgattggttagacaagatctcatgaataaaagggatgcatattttcgtcaacatggaggccaattattacttgatatgatgaaattagagaatcaagtttcatttaagttgtatgacagagaagaaattgagttagcaacaaacaacttcagggagagcgcaatcctcggtcagggcggtcagggtactgtttacaaaggttttgatctagatccagaaaacaatcctgtggcaataaagagatgcaagggaatcgatgcgaataggaggatggaattcggacaagagttgctcatactctcccgagtgagacatgagtacattgtcaaacttcttggttgttgtctgcagtttgaagttcctgttctagtatatgaatttgtgccgaataagaccctacactatttgattcatggccaaagcgatgcatccactagaacactagatatccgactggaaatcgctgcccagtctgctgaagcacttgcatacctacattcacttgatcatcctatttttcatggggatgtgaaatctgccaacatacttattggtgacaaatttactgcaaaagtttctgattttgggtgctcaatatttagggcagcggctgatgaaaatattaatgtagtgaagggaacaattggttatctagatccagaatacctcatgacgttccagttgactgataagagtgatgtctacagctttggcattcttcttctagagctcttgacacgtaggaagcctctatccaatgaggtgagcctcgcctctctcttccaagatgctatgaagaagggaaacattgatcatcacatagataaagaaatactacatgaggataacatggaactgctatacgaattcgcatgtctagcaagccagtgcttagttatggacagtgagaacaggccagcaatgagccatgtggcagacatacttcggcaattggcagatacggcgtcacaacaacacactggcacacttcagggtattcgctcactcagattattgggaaactcaagtggtagcatctcagagccgtgttattctcctgttaaaacaatggagtatgacagcaggaagacatctatgggcattgaatttgcaagataa

SEQ ID NO: 14851 - DNA, 493 bp, Oryza sativa
  Clone ID: PAT_MRT4530_2074C.1
aagaacactaagtattcatttatctgttcatataaccaaagcaaactagacgagctttcttcttgcgatcaaaaacacagatgggcaaccgcacagttaacacaaactagatagttccacacaaaactagggatgataacgatcggatgatgatgatggaacctcaattaaatagatagataacttggccatgagggccccaccgctagttccttcaattgccattggaattgccgacatcacggttgccgaaacctacgccgtactcaacgacaccaaggtctcaaccgtagacatcgaaaccaccatttccaccttgacggttcttgccggaggcaccgcctgcgccactaccaccgtagccgggcgccaccttatcctcgcgcctccatgacggctggccgtgaccactcgctcggctccgactgcgaaactggccaaatgggcctcgttgacagtgatgttgaggccgtagagctccttgcctcgagcc

SEQ ID NO: 14852 - DNA, 246 bp, Oryza sativa
  Clone ID: PAT_MRT4530_20750C.1
atgaagagatctagagggcgggcgtcgggaccctgggaggggaggaggagggcgaaaaagaaaagaaaaaagggaggagaggagggcatcgggacgacctccgtatgtgccggcgacgccgccacttgcaagcttctcgtcctgtccgccacatcctcttcccccttccacatcgcgctgtcgcatccaagcaacgccgtcgccgattccgaccagcgtcgtgccgcagtggttgaaaccaagtag

SEQ ID NO: 14853 - DNA, 431 bp, Oryza sativa
  Clone ID: PAT_MRT4530_20751C.1
agccgccaccacaccttccgtcctgcgcccttgccgctgccgctgtcgacccggttgctgtcgccgtctttgcgccgccgccacggccatagctggaggccgcagccgtcgtcatccatcacaaccggcgtttcctttccgttttccttcttcccgagagaagggtaccgagagggtgtacaggaggaagaaggaaaggaaaagcagagcaacgttgaggaatttcagcgatttcgcaaattagggaaatttgtcgcaaggtagtgctcctccactgcaaaggaaatttctctttagtccctagaagtataagattcaaatagaatttgattcgatagctgctcgtgcaatttttgaggtgcttgaatataggctgaaaccgtatattcaaatctggtattaaaccatcaggaatcagcttagttgtcctg

SEQ ID NO: 14854 - DNA, 762 bp, Oryza sativa
  Clone ID: PAT_MRT4530_20752C.1
atggagagatcaacatctcatgatgtgtacatgtcagtgccacgctttttctgcatattgtctcatatacgtgactttgatatagcattgtgcggcgtcaacgttgtcgtcgactcttcccagcctcacgaagactctttgctattggctggttgcctgacgttcttctgcccgtgcgttgccttcggccttatcgccgagaccctcgacaggggcagcatctcttgcgccatagcaggcatcacctactgctggatgcggccgagcacggtgctcccaggcatgcacaccatgtactcttggtcctaccgccagaagctccgcgccacgttcggcatggcgccggagccctgcgccgactgctgtctgcagctcttctgtgacagatgttccctcagccagatgtaccgcgagctcaagaaccgtggcgtcaaccctgccaatgtatatgctggtgaggctgagtattctccatggttcgatagcttccaaagccatcttagtcgtagggccctcatgaacttctgcatattgagaactcccagtcctcctggtgtggttgggatgcacgtctttttccagccatgtctaatgctggaaacacataaggatgtcaatgaaggtcaggacatccttcctgatgggattgatgaagaccacttcatcatcggggttgttggtcgagttgaagactgcaacaatattttctactttgatgatgtcctagcagaccttgaagaagttttcagtgtagccgtctag

SEQ ID NO: 14855 - DNA, 476 bp, Oryza sativa
  Clone ID: PAT_MRT4530_20753C.1
tggcggcgctctaaactagtggatccccgggctgcagggtcttcagctccgaatcgtcgccgcggcagatcccgccgccaagaaagacgccggcggacggagcgggagcgacgacctcgccgggccgcacgcacgcccgcacgcaccaccacctgctgaaatccctgcgtcgtctcgccgtggtgctaggtacgtggctggcgctcgctctcgccgactctccgtgcgtgtgtgcagtgcaggcgagaaagatcggtgggagaccacgcagatagcccggatgctctcaggttgggggaatgaggtttccctgggtttcttcagattgtggatctcttcccctcctcggctcacccgatcccctcgcgccgcatgcgcacgaagcccttgcgtgattggcgacgcctctcctccctcctcctccgtccatcccggattttcccactcctctggcctttgaaccttcaaatgtgcca

SEQ ID NO: 14856 - DNA, 471 bp, Oryza sativa
  Clone ID: PAT_MRT4530_20754C.1
cgggtgcgttatgccatccgcatgaagtgggtgccgctcccgtgcccggtgatcatcgtcattgctgctccaaaggccccgacaatcgtcagtcgccgctcccatgatgatggccacagattagcccttcccagggccagcggcagcagtgatagatcaatgctcttggaaccatcgggctcctcatcgctgctcatgtgcccgattgagacagattcacacccctcaggctaccgcactcgttgttgtcactcccgtgcttggtggcggcagatccacgccttggaggccgccacgctcgaagtcaccactcctatgaccggaggttgcagatccgtccctcccatccctcccatcacatgggccatggtggttggggccgcccggaatatagaatattctcttaatatgttggatgagtgtatccggcagatttggctggaagaagccatccagttttggtctgaataa

SEQ ID NO: 14857 - DNA, 459 bp, Oryza sativa
  Clone ID: PAT_MRT4530_20755C.1
atgatgccaagagacatgtggattcgccggggtggtgtcggggaggacccctgggcttcctggcatagtatggtctgggacctaatctggtctctagtcgtggctgttctgcacgggctggatgatccgggacggccagcggatagggaggaagtcggtgatagagcaatggctcactttgtcctcgatctcgccagcggcagtgagctgttctccctgtcggcggtggcaggggcaggggcgagagaggatgagctcgaggaggatagagaaggcagtggagcggcgccgcccgtgccgctgcttcccccgccgccggtgcccgcccgtgcaccgctccgccgcccaccgcctgcacagctcctcccccctgccgcccgtcgcccgccgcctgtgcccgcctgcgcactgctcgcctgtgcccgccagccgctgcccgtggagatcgaagagaggtga

SEQ ID NO: 14858 - DNA, 272 bp, Oryza sativa
  unsure (1)..(272): unsure at all n locations
  Clone ID: PAT_MRT4530_20756C.1
tccgcctctctttcactcatgggnaagattangatcggaatcaatgggttcggccgcatcggcagnctngtggccagggtggcgctgnagagcgaggatgtcgagctcgttgccgtcaacgatcccttcatcaccaccgagtacatgacatacatgttcaagtatgacaccgtccacgnccagtggaagcatcatgaggtcaaggtcaaggnctccaagnccctcatctttggcacgnaagaggtttcggtgttcggctcacaggaaccctg

SEQ ID NO: 14859 - DNA, 2663 bp, Oryza sativa
  Clone ID: PAT_MRT4530_20757C.1
atgtcgtcctccgccagcccatccgtcgcgccatcggtcgaatacgcagagcacttgtccaatctggtacgaattccaagtctgtcgcatgagaactactattttcttggtccaattggcgatctcaaccccactgaattcatcatcgccgaaaccaatagaatcccctttagattggtcaaccctaacctaggtcactggaaaaacaccttcaagtcttgcccatctcttgagaaaacctcccctgagaaaagctaggctacgtggtacaagcgcgtatcggctagcaaacagtttcactgggatgaaattggaatcggccaagcactcaccctcactatagcaaattcggctaaggatgaacctttgatggccgttggcacctatttctggtccaacaccatcaacgccttcctgttcaaccaagggccgatgaccccaactctaatcgacatcaccatgataattggattagatgtaacttcatcggctaaccctatgagcttgaacaccaaaaaccaatttgacttcaggaccaagagcataggtggttggtctggttacgtggcggcatatatgggcaaaggacctgtcactcctcgataacatatggcctttctactaatgtggcttgaaaagttccttttctgtggatcaagttgcggctctacaaccaactggtagtttgtagctgaagccctagaatcaaaaaggcaatttcctctaggcaaaatccttcccggctacctatatcaaacactgaacaatgcatcaaccaaaattgttgtcggctcagtcgttagtgcaggaggaccatggtggctactgcaaacttggctaaatctggtagtcatgaaagctgtcaatcggccatctgtgacagaagctgaattcccaagattggaactgattacatacaatgatggagaagaatgcacccatcgcagatgtatgtcttatggagaatatgactccacaccagccgatgctggagcaaaattatcagccgaattgctcaaagactagttctgtaggttctatgaaggctttcaaagagatgctcgggtttggttcccttatggagactcagtacatcttgatctcccatcggacattagatttgaagacatcaatcatgagagataccaaaaatctagagaggtcttctcagctgcaattagcccatgcatccttcctgtcggcattcatcaaggacgaaacatccaagtctcctatgaattctatcatccgatgagctcggctaggcaatttggaatgggccaactcccaatcggcttgttcttcgctgaaaaaatccaatgccgaggagaaatttcatcaaccctaatgatggacctgctactcaacattccaggacctcctttgggcagcaatgagaacatagagctggcaagatttaggagcagaaacttcgacagatggtggggagaatgaaagcaatatatattccatcagtcggctactatgtatatgacagacctttttcctgatgttgtccctcagacaacagaatcttctcctccacacaagagcaacagtggcagagacatagagtatgctccaggccttttaccatgcccccaagacatcgagtctgcttcaagggcagatgagagaactagccgatgtcggctagaagagaaaggtcaaggcatcggcaatcgatccaccggctctggctcccaagaagaaggccaagatgcaaaaacccaagccagccaatgacctgcctaccttagatccatccatcgagcaagccctggatgaggaagagattgaagaggatggtgatcgagctgcagccgaagtaagtgacacagaaaaaactccatcgggtttacccaagcgaactcctccaacttcttttggcccagcttattttttaagaaaaaagaaaactgctgtgaggaagaaatcggcagcaacaacacttaaaccagctccatcgcctcctcctcctcctttacctcctgtacaacaaacatcaagcgatcgaactccatcggctgcaggaagtcatgatgtcgaggaagacaaacaaccagccgctcctgctatcccagccatagccgatctgttttcttttgatatcaaagattactttgatgagacaagaagaaaccacaagcaaggctctagccccctgtaacatacaaatccaagccctaatcccagacgatctggcaaacaccattactccagcagtattcctcgagcaataccaattcaagctacagaaggctaagcaacggatagccgatcagcgagagcggaaggacattgaagccactatccaagccaatcggcagcttgtgcatgaagagaaagccaagttagatcaactctctgttgggctgattcagttgaatatagatcggcttgaagctcgcaagattgacctaatagctcaactcgaagaatgcaacgccgagctggatctggagaagcaaaagttagccaatcttccaaatgctgtcgaagaacagaagtccagattgagatcggctatcaaaaacgtggctgacaagactaagtccctcaaggtcatctctggaaccgatgctgaagacatccaagtcatcgaagaagtagatcaaattaggcaacgggctgtgtcggctatccagcactacttgtctaga

SEQ ID NO: 14860 - DNA, 131 bp, Oryza sativa
  Clone ID: PAT_MRT4530_20758C.1
ttttgttagactagcacatgtgaaccagaacggaggaacgattcgcagcaaagcaaggatgaccacgtcccccctaatgagaaatccagttctgaccagtactataagaccaacgacgagaatgggtgatc

SEQ ID NO: 14861 - DNA, 369 bp, Oryza sativa
  unsure (1)..(369): unsure at all n locations
  Clone ID: PAT_MRT4530_20759C.1
aacattacagcgaaagattatccacacatgagatcatttcttctttgctctccttgctattgctgcatgtagcgcctctgcgcagttttgatgctgttactcaagttttacaggcaatatcagctgcagccgcatctcatgctgcagcaacagatgcttagcccatgcggtgagttcgtaaggcagcagttcmgcacagtggcaamccccttttttccaawcacccgtgtttcaactgagaaactgccaagtcwtgcagcagyakttytyyhwacagntcaggtatgtthscgccacagtttyywctgccagggcyattagcagtgtttcavgcgattkttgcagcagctacagyttwcaacabttttt

SEQ ID NO: 14862 - DNA, 363 bp, Oryza sativa
  Clone ID: PAT_MRT4530_2075C.1
atggcgattccgggcggtcaaaccggattactaacaccggcgggggacgcgaagctgcggcgggggcgggggacgaggaggcagcggcagccgtggccacgacgagcagccacccctcggcgcagggatggatggaggtgggtgcgggcggcggcgcgggatgcggagacggagaagcgcaccggcggcgtgctccgcctccccgtcattgtcggcgtcctagcgcctgcgccagcccttctacgccgccgacctcctctccgtgccgccgccgagcagaccatcttctgcaacaccgttgccgccctgctcaccatgcaggaggtccgcagcggcagctccacttctccctcccgccgatga

SEQ ID NO: 14863 - DNA, 144 bp, Oryza sativa
  Clone ID: PAT_MRT4530_20760C.1
atggcctctggggcgaagtctgggggctgctcgcctgccgacccgaagaggaggatagatcgcgccacctcagcaggcgcatggcgttgccccggaaactgttcgaagaagatgcgagtgagcaccttcgaaagccgctcgggg

SEQ ID NO: 14864 - DNA, 567 bp, Oryza sativa
  Clone ID: PAT_MRT4530_20761C.1
gcacgagggtccttcacataattgattgcagcgatagcagtgtaatcagagcaaatttcactacttgaagacactaaatgctatatgtgacaaatttcactactttaagatggtactccatatgagtttctcaggcttcctcaaattccagacaatatcttctccaatagaaagtggtttccttgttcaaggctttaaagctttggccctgaagcgcctccctggtaccctgtataattttaaatctgtcaatttatcccactttgttattcacaatatgagtatgccatatgctgggctcatgtgctggtaccctgtatagtatgtacatttttttatcctcatgtgctgggctgctggctctgttatttacccttttgtggtaaaacaaattagacaggacaaaacataatacatttctataatctatagaggatgatcttttgtgtcatcttgcttgggtggtggaactcagcatgtgatgttgtggttcctgaatgtaccctctggtcaatttctgtagtacacactctagtgagatgaattcctgtttcctggtctgatttt

SEQ ID NO: 14865 - DNA, 417 bp, Oryza sativa
  Clone ID: PAT_MRT4530_20762C.1
atgctgctagtggatcacaaggatagtgcaaagaagctaagaggcgtcaggaggaggctcacctcttctcgcgctgattctgcggtcgaagagccgcaccacgtcggcgccctcaaggcaagccgcaaccgcccggaccggtcgaccttggagggcgcgaccgcagcaggagcgggtgtcggcggcagcggcggcggaggagggttcgagacgaggaccgtcgcgcgggaggaggcgacggcccgtggtggcagcgtccgtgcgctgcgccacgccgcggggctcgccaggagacggccgtgtctaggcgccgcgggactcgacgaggacgcggtggagaaggcggatacggcggcgcccgtcgcttccatgttgctctgcgctgcgctgcgcggcgcggcggcgaggctgccgtag

SEQ ID NO: 14866 - DNA, 746 bp, Oryza sativa
  Clone ID: PAT_MRT4530_20763C.1
cagggcaacgacagagaaaattgcaggcgtgattgtacacgggccagaccagaaacttacatcaaccactccaaggagcccactgccattgacaacaccataggtccacagcatgatgcataattgcctatccggctatcccactatcaaaagaaaggcctatatcaaccgagtagactgagcatgccacactccagaacaaaacaagcacaacacatggcacattattggttcagcaacagtaacccgcgaagtcgtcctaatgggatgatgatactggtgaaagatttgaaaacactgaaaatgtgtttattatgaaactcactccgtttgcatctccgccgcaggcaaggggattgaagagcagcagtagtagtaccctctttcatcgaacttgaatcgctgcgaaagatggatctcgggaatgaggtattcgccccagtcatgttccccatattttctgaaaatattccgagcatcgaatgagtcgtttctttggttccatctcttgctcttcctgtgcctcacattcattatggtcacgtgcaacttcaattcttgcctcgcatccctttcaagtactaggcccgacttgacaaaggcatcagttataactttgcaagcacgttgtaggcgtccctcttcaccaacttccagcacaggagcatatactaccctggccctagctggtgagcctttcatgcatgtcagacctctaagttgtatggagattggtcggttttcca

SEQ ID NO: 14867 - DNA, 1742 bp, Oryza sativa
  Clone ID: PAT_MRT4530_20764C.1
cggcacgagggagagaactagtctcgagttttttttttttttttttttttttttttttttttttttgaggtgtttttttttgtctttttgttttttttttttctcctgcaacaaacttattaattaaagcagcaatcattggatcgttaagcaggttacaacccatgctacttacaaagaatttcgtaggaaaagtttgcagccatatacaatacaaatactattagaggtgtaccaaatttatatttgaacagaactcgtgtgcaggtagaattacacaatatatcatatccaaatcttggagaaaatgcatcttccatagtatcagctgcaaactcccaactcccaacttactcagcagctcaagcacgttattgtgaaattgagagatgcaacccttaccttgcaactttacacatacactatgatacaggttctcttgtcccattaagcacaggaatcagcatggcaaaagctgttagaagtagtgtcatttagttcttcaagaagagtgcatcatcagtatatggctcaacatatctagtctaaccaccagctaaatattgaagatacttctagttctccacaagtccagcatgtttgcctcctttcaacttcaccaatcaatctttaaacaaccaaaggagatcagacaaagagagcaggattttctccgtgcttctattctttgaatcatatttgtgatgattcatattttcatatttgcaaaaacttcacgcttttgactcagctggagctggctgactggtgtcaatgttcatgtgatccttcacaaatgtccgaaggcatccattgattacccgaggagcaccaccatcacagaaccgttttgccaaatccacagcctcgttaatgacaattttgtgaggtgttccttttgatgtcatctctgccatggcaatatgaagaatacaaagttcaaggatccttgcaacaggttcgtccttccaattctggggagttattttgttgatgatatcaacatgcttgtcccatccactggcaacagccactaaaatttctcgagccagtcgtaacacaaagttgttgtacaccagctttggaggagctgaaagaacttctgcttcatttgctgaatccttctcgttctgactcatgagcttctcagcctcctcctctgtcccgacctccagaggtcccccaccgaagctcatatggttgtagttcaccacgcacgccttatcgaaaacatagccaggttctcttctcgcgctgattctgcggtcgaagagccgcaccacgtcggcgccctcaaggcaagccgcgtaggaaatcatcagcgcgagctcgcgagcggcgcgggggctacagaaccgcccggaccggtcgaccttggagggcgcgaccgcagcaggagcgggtgtcggcggcagcggcggcggaggagggttcgagacgaggaccgtcgcgcgggaggaggcgacggcccgtggtggcagcgtccgtgcgctgcgccacgccgcggggctcgccaggagacggccgtgtctaggcgccgcgggactcgacgaggacgcggtggagaaggcggatacggcggcgcccgtcgcttccatgttgctctgcgctgcgctgcgcggcgcggcggcgaggctgccgtagagaggcggaggaggaggaggcggcggcggtggcgtcgccggtggaggtgggagaaagagaaatggcccgcgcgtccgcccacgatccgaaaacggtcc

SEQ ID NO: 14868 - DNA, 2025 bp, Oryza sativa
  Clone ID: PAT_MRT4530_20765C.1
atggcgctcgccatccgcgccgccgccgccgccgccggcgacatggcgccgtcatccgcctccgacccgaccctcgggttcctcaccaagcgggacacggaggtgaagctgccccgggcgacgcgcgtgaagaacaagaccccggcctcggtccagatcaccgcggagcagatcctgcgcgaggcccggagcggcaggagcccgaggtccgtccccccaagcagaagatcgccgactccgtcgagctctccgagtaccgcctccgccgccgcaaggagttcgaggacgccatccgccgcgcccggtggaacgtcggcgcgtgggtcaagtacgccaggtgggaggagcggcagggggacttcgcccgcgcgcgctccgtctacgagcgcgccctcgacgtcgcccaccgcgaccacacgctctggcgtggcgtggatatgccgagttcgagatgcggaatcggcatatgaaccgaatgaccagctctggtacaagtacatccatatggagcaagtgcttggagccgtcgccaacgcccgcaaggtgtttgagctgtggatggcatggcgtcctgacgcagctggttggaactcgtacatcaaatttgagctaagatacggtgaaattgagcgtgtgcgggccatctttgagcgttttgtggccgaacacccgcagccacatacattcatcctgtacgcaaagtttgagatgaagcgcggagaggtggagcgggcacgacgggtgtacgagcgtgcagcagacctgctggcagatgatgagcatgctgaggttttgtttgtagcctttgctgagtttgaggaaaggtgccgggaggtcgagcgcgcccgtgcagtgtacaagtatgcacttgacagggtgcccaaaggccaggctgaagagctgtacaggaagttccttgcctttgaaaaacagtttggtgaccgtgaaggaattgaggacgccattgtgggtaagaggagattccagtatgaggacgaggtgaggaaaaaccccctcaattatgattcatggtttgattacattaggcttgaggagagtgttgggaacaaggacaggatcagggaggtgtatgagagagccattgctaatatcccacctgcagaggagaagcgttactggcaacgatacatttatctatggataaattatgctttgtatgaggagcttgatgcaaaggacatggaacggaccagggaagtttacagcgagtgtctcaaattgattccacacaagaaactcactttttctaagatgtggctcatggcagcccagtttgagataaggcagaagaatcttaaggctgcacggcggattcttggaaatgctattgggatggctccaaagggcaagatattcaaaaagtacattgagattgagttgtatctgggtaattttgaacgttgtaggactctctatgagaagtatattgaatggtctccagcaaactgttatgcctggatgaagtatgccgaattagagaagagccttggtgagactgatagagctcgctcgatctatgagcttgctattgcacagtcagcccttgatacgccggaagttctgtggaaggaatacttgcagtttgaaattgataaaaatgaattccacagaacttgtgaactctacgagagattgcttgatagaacaaaggatttgaagatagagcaggttcgaaggtgccgagctgtatttgaacgggcatttgaatacttcagaactagtgctccagagttaaaggaggaaagagcaatgctccttgaagaatggcttaataaggaggtgagctttggtcatctcggtgatgttaccttagtgcagaaaaaggcaccaaggaaagtgaagagaaagagaccagatccttcagaggatggctccactactgcgtatgaggagtacatggattatattttccctgatgaggttgcgctggcaccaaacctcaagatcctcgaagcggcctataagtggaagaagcagaagacagatgatactgatgatgactga

SEQ ID NO: 14869 - DNA, 2037 bp, Oryza sativa
  Clone ID: PAT_MRT4530_20766C.1
atgacgctcctgtgcgtgccgctggtgtcgcgcacggtggaggcgatgcaggccgacgcggcggcggccgcggccgccggcgccgacctcgtcgagatccggctcgacttcatcgaggggttccgcccgcgggagcacctcccgagcctgctccgtggctgccctctccctgccctcgtcacctaccgacccaattgggaaggaggccagtacgatggtgatgatgctacaagatttgaagcactccgtttagcaatggagttaggcgtagactatgttgatattgaattgaaggttgctgacaaatttatcagctttatttctggcagtaagccagagaagtgtaaacttattgtctcatcacacaattatgaaagtactccgtcctgcgaggagcttgcagatcttgtggctagaatacaagcagttggatctgacatagtgaaaatcgcaacaactgctagtgacattgctgatgtgtcacgaatgttccaagtgatggtgcactgccaagtgcctatgattggactagtgatgggcgaaaaaggtttaatgtcaagggtgttatcccccaagtttgggggatatctaacctttgggagtcttgatgctacaaaggtatcagcacctgggcagccaaccgtcgaagagctgatagacatttatgatataaggcgcataggacctgatacaaaggttctcggtgttatagccaacccagtaaaacagagcaagagcccagttttgcacaatacatgtcttcaatctattggatacaatgctgtttatcttccacttttggcagacaacattgctagatttcttagcacatattcgtctccggatttttcaggattcagttgttctcttccttttaaagtggacgccgtacagtgttgccatgaacatgacccagttgctaagtcaatcggtgccataagcaccataattaggaggccagatggcaaactagtgggctacaatactgactacattggagcaatttgtgccattgaggatggcataggaggcccaggatcaaaggatgctgccatcacacctttggctggcaggcttgttgttgttgtaggtgctggtggagctggtaaggcaattgcttatggggcaaaggagaagggtgcaagagttgtagtagcaaatcgtacctacgaaaaagcagtaagtcttgctgctgcagtgggtggtcatgccctgagattagccgagcttgaaactttcaggcctgaagaagggatgatccttgctaatgcgacatcattgggaatgtaccccaatgtggacggcacccctatcccaaagaaagcattaagcttctatgatgttgtatttgatgcggtatatgccccgaaagttacccggcttctacgagaagcagaagaatgtgggattaaagttgtcagcggtgtagagatgtttgtcagacaagccatgggtcagtttgagcatttcacaggtggtattgaagctcctgaaagcctgatgcgtgagatagctgccaaatacacataacaggcgaatggcgaagcgacggttgtgagtaattagcccaaatattcctctgggttaagttaataaaagttttggatgccagcccaattttgtgctaggtggagattagttgttgtaatgttcgatttcgccgacttaacctgtcagagatgtaaacagaaagtgttcaatctcatcatacttgcaataaagaatttgcatgcataactgcgcagatgcttgatgaaaaaaaatgagttttaaggaaacaatacacatcaagctatgatcaggtggtttcatgttcatcattcgtaatggaaccaatatctgtgattggcaatgatacatcattgtaatattcagctgcttatgctctactcctttccattgtacttcatgtcagtctggagaagaaaggtgtacgtgattgctggacgtttgacctatgaatgttcaagtccattcagagaattattatataaagctctggtttatgcctaaaaaaaaaaaaaaaaaaaaaaaaaa

SEQ ID NO: 14870 - DNA, 3000 bp, Oryza sativa
  Clone ID: PAT_MRT4530_20767C.1
atggccagcacgtcgcagccgtccagtagcgagaaccccacctcggcgacggcgaaggaggttgagatgacaggggatcaggcgcgagcctgtattgcagatgacgtgcatagaacttctagcctaccggctggtggtaagatggacaaccctccgccgctgccgaacaatgagaaccctgagttgaacaatgagattgcagaggaggggcaaccaccgcagccagcccctgcgccaggatggtcccgtatgagagatggaatggtttcattttttagaaaggggaaagtgtggcccatatataatgagagaggaagacatgtggcagtgcccatccctgaaccgcgatgcctcctttacaaggtccccaagaaaatttggaagatagacgaagacatgcacaagccgacttatatctctatcggtccttatcgctacggtgaaaacgggttggacaacagatcgcaggtatggaaggaatggtgcgaaaatgaagtggtgaagaagctcacacagcaaggtaggggtacggcgctacaacagatcaacgatgtggtaactgatcaagtgaagaattactatgacaaaagatcgttctcgttaggcgtggacgacgaagctttcaaaaagatgatgataaccgacggatgcttcctactactgacgaccttacatgataccagcagtcagtcggagcctgagccacagcgtcctgcagcatctaatacttggcgaagcttttgctgtcttttcgaaagtaatcctgcagaagttgaacaaactgcagcagttccaccaactgttattgatccgaacagtattccaaacctgtgggataactgcttcctgtggaatgacatcttgctctatgggaaccagctccccttccttgttgtgcgagaaatctacagtcttcttcaccccggcgaagaccccaatcagaaagtcggcaaggtcttcgccgattcaatgctggcacgctacacgaggaggaagttgacccatccgggcaacgccgacagcgtcctccacctgtgccacaaactgctggcgccaacgccggacccgagccggaatggaggcggcgacggcgtcgtcaagacgggacagtggcggcgggcgacagaatacaggaatctgcgggtgaaattcaagaagagagagatcagcagcgatggcaaggcgcagtgcatcttggacgtcaaggtcgtctgctgcaatgtggtaaagataccttcgtttgacctgaacccggagagctggaggctgctgcgaaacctgatgctgctggagaatatgaacaaacacctcggcggccatgtcacctcttactgcaacttcatatcgcagctggcgtgtaccggcgcggacgtcagcctcctcagggaaaagggtatcatcgtgcacggtgaggctagcgacgagagggcggcccagaagctatgcaatctctgtgttgaaaccatttatgatcccacacatgactacctcaagtcagcttgggacaagctggagaagcactgccggcacccggggtggcttgtgtgggcgaaaatgttcggctacaaggattggaagaatccgctggtttggatggctacccttgccgccctcgccctacttctgacaagtggtatcagacctcagacgacgctccaggctcgatgtcgcactcggttgccagcgaggatcgaggacgtcgtctgttcgtctgtctgccgcgaacctgtcatccagcgcgtgatcgagagaagctccgagtcgattgcctactgctcgctcacgcgcacgaactacactgagaggtctatggcgatgcaggccgtcgaccccggaaccgatgatttatgctccaactgcacggttctcaccaccattctatgcgtcgtcccgcaagacgtgctaacgtcgcttgcacagaaggagacgacgcatgaggtctgggaagcgatccgcgcagtttgtgtcggcgtcgagcaggtggaggcgaatgtgcaaaaattgcgccaggatttcgctgccatcgcgttcaagccagagagcacatcgaggacttctcgctccgcatcaccggacaaggaggtcatcaagaagatgttagaggtggtcccggagtaccacaagcaggtggccatctccatcgagaccatcctcgacctaggcacggtgtccatcgaggaactgaccagaaagcttcggggggtggaggagtggaagaagcctgcaagcagtgaggccacggacagcagcggccgactactcctctcggcggaagattggctcatccatcagaaggcccgcgaacaggagaaaaaaaaggcagctgctagggcgacaatgatgccggtgatcgcaatcgctgttgcagaaaaaggaaaggtgctgacctcgatacacgagcaggtgcacctaatcgaggagaaggtgcttgcccagatcggggatgtggcacagaaggaagacaaccattgggtggtcgacactaatgacaccaaccatatgtccgagaccagagccgccttcaccaccctcgacgccggtgtcggcagctccatcaaatttggagacgggtccatggtgcagatcgagcggcgcggcgctactgaagctgctcgagacggcctagtacgaggcctgttggacttggagcagccatgcggcctcctcgaggggtgcttggtggggaaacaacgaagcatcccgttcctggagctctccggagcaggtcaagcaaacactggagctcctccacgggccacgatactacttatggacaccatggattgggactgccctgatactggaagaagcctgctgtccatcacctccagcacattcggctacatcacctacgtcaagaagaaggtgcctcacgtcaagaaacttgatgataggagcatgaagctgatcttcattgggcatgagccaggctctaagggctacagtgcctacaacctaggccatgggacgcatccacatcacgtgggatgtggtgtttga

SEQ ID NO: 14871 - DNA, 243 bp, Oryza sativa
  Clone ID: PAT_MRT4530_20768C.1
aaacagaaaaacatttgagttcattatttattcattatacattctttccaattaaagggaacacaaatttttttattaccaaattacaccccttgaccggccattacttagttccttacaaaaggttattacccatttcccgttagccattaccaaacaccgcttacccctttggggttttccactttgcaaaacgccggaaggttcgccgccggcccttgattttcccttttccggaagccg

SEQ ID NO: 14872 - DNA, 312 bp, Oryza sativa
  Clone ID: PAT_MRT4530_20769C.1
atgccgccgcagctagccgccgtcgccactcgcccatgcccggccaccaccgagcgccgcccccaggtcgccgcccccgagcgccgtgccaccaccccgcggaaggggaggcgccgatgctggtgccgcctccagacgtgcagctcatctggctctaccactgcttccaccattgtttgtgcccaatgtcatttactaattgtgtttgtgcacgggggagctgctcggcctgggcggcggctccaggcacgggggaggcgcttggcctgggcagcggcgccaggcctgggtgatgatgcggcggcggggtga

SEQ ID NO: 14873 - DNA, 1677 bp, Oryza sativa
  Clone ID: PAT_MRT4530_2076C.1
atggcgacggcggcggagtcgcaggggctctccccggggttcaagttcaatccgtccgtcgagcagcttctctgcttcttcctcctgccctacttgcagcaccgacgcctcctcgtcgacggcgtcgtcttcctcgacgacccggcgagcgcgccgccgtgggcgctgctccaccgccacggccggggcggcgaggacgaggcctacttcatcgggccggtgcccgcaggtgacggccatggtggccggcggcagcagcaggtgagccgcaccgtcaccggcggcggcggcggcaagtggataaagcagaggacggagcggccgagaggggaggaggagccggtggtggtgttcggcggcgagacgttccggtgggaggagttcagcctcaacttccacgccgacgagcggtgccggagcggcagcaccgggtgggtgatgcacgagttcgccgtcgtgccccccgccggctcccgcgtcgccgccacccacaccgcctgccgcatcgccttcaccggccacggccagaagcgcaagcgcgtgcccgacggctacgtcttcgtcgacgtccatgtccagaccgccgccgccgccgccgccgtcgctcctccgttgccgatgttgtcctcgtacggcgaaccaccgcacgaacacttctctgacgatcatccgccgccgcattcttacacttattacacccaaggataccagcagttcttgccgccggcggagcagagcgatcaagaacaggaatactgtgcaccggaccagcagaatttccaagattatcacctcgcggcggcggagcagaccgaccaagattacttctatacggaaatgatcaaccaagaacaggattacgcataccagcagcagcaacagcatctcttccatggagatttcctcgcgacttcgcagcagtttcttggtcaggatcacgaggtgatgttcactggcctcggtggtggtctcgtcgtctccgacaacggcgagcacgcctccgccgccgcgccggctacagagccgccggtgcacgacgtgttcttggaaactttggtgcctgagccacctgaaaatgcatatgttgacggagcaggggagtccgccatggcatcggctagctccgctggtggcgcgccattattggaacaaccctttgcgacgccgccgcagcagtttcttgatcaggagccggcgccggctggcctcaacgacggcggcgcgatgatctataacaacaacggtgacggcgagcacgacgccgcgccggctgcgcagccgccggcccggtactacagcgggccagttccggcagtggacagcgtgttcttggacaagatgcgggaatatttgatggctgatgcgaagggattatgccgaattgatgcgcccatcaacaatggcgaacacgccgccgccccagcgccggctgcggatgatccgttggctgctcagcacggccacggcgacgcgccgccgctgccggtgccgcccgacgcggcggagctagagcgggtggtcggacatttgttgagagaagtggaggatataatcaaggttgcggcggccggtggctatggaggctcgtcggacaagccgctctccgaatttgacaaagcacaaaaccaaattctggccaagttgatggcagtatttaatcaagtagccgaaagttaa

SEQ ID NO: 14874 - DNA, 184 bp, Oryza sativa
  Clone ID: PAT_MRT4530_20770C.1
cccacgcgtccgctcacgtggagcccaatcatgtgaagaaactcaggctcaagatgcatcatctctcgctaattacatggagcactaccacccaaataacgccagacacatgtcaaagccacgcatgttgtctacacctctaaccattttgtgtatgcatccgatgcgtgataactaatacatg

SEQ ID NO: 14875 - DNA, 201 bp, Oryza sativa
  Clone ID: PAT_MRT4530_20771C.1
atggcagcgaagactaagacctccagaggtacttgggagtcactcagaaaagcttgggatagcaaggccaagagcaaggattttgacctcctctttctgggagccagcataagcaataccaagaccaaggattgctccaattcgtacttatcaagttgggcaagtcctgaatcagaatcccacagaagaatcattccctga

SEQ ID NO: 14876 - DNA, 2772 bp, Oryza sativa
  Clone ID: PAT_MRT4530_20772C.1
cccgggctgcccacgcgtccgggcaaaggcgccgcgggcttggcttggctggcaccctctccttctcgtcttcggcttcgtcttcccccgtcaaacccacccacgccggccgccgacgccgccgccgttgcggcgggtgcttcccccgctcgcgtcggtgccggggggctgaggggaagagggggagggggagggaaggcacgcggctgacctcgtgggggaggggagggggggaacggggcgacaccacccacccaccgccaccatgtgctcgttgcccgcctggtaagattggaccagctgtgatttggggagcttaaagttttgatcagagacatggaaaaagtgatcttctgggcacatctccttaaatgcaagctttttctttcaaaagaaactcttgattggtgtgttttagctcgtgggaacacccaccacttctctctggtgaactacacatagtggttttatgctcctttatgctcaagaacatttggctgattcaatctttttcctgaagccatatttcaagtctgccaaacatctacatcacgtcatctctaaagaagcttcctttaagttgtagatgctgatcatataagctggggttaatacctttgctcatttgtttgtcatctgttgctccctagttaattaccactagtgttgcattgaggtcagggttcatccttgctatagtatgcaactatatactatggttgctgcttgatcttctgagtgaaccaagatccaagaaaacataaggtgctggggctactgttcaattgactggttgcatatatttgttcgtgctaatcgatagactagtcaattggaagtggtggcaaacacctgtctttgtgacttggctgtccaacaggaaaaggctagcacaaggctgacattgaccggcataatggacagattcaaaatgattaaggaagttggtgacgggactttcgggagtgtatggcgtgctataaataaacaaaatggtgaagttgtggcagttaagaaaatgaagaggaaatattattcttttgaggaatgcatgagtctacgtgaagtaaagtctttgcggcgcatgaatcaccctaacatcgtgaagctcaaggaggttataagggaaaatgacatattatacttcataatggaatacatggagtgcaatctctaccaacttatgaaggatagagtcaagcctttctcagaggcagaagtccggaattggtgctttcagatttttcaggctcttgcatacatgcaccagaggggttactttcatcgtgacctgaaacctgagaatctgttggttagcaaagatgtcataaagctggcggactttggtcttgcaagggaagttacatccgtgccaccatacacagaatatgtgtcaactcgctggtaccgagcacctgaagtattgctccagtcatctatctatgattctgcagttgatatgtgggctatgggtgccataatggccgagctgttgacacttcatcctctttttcctggcacaagtgaggctgatgagattctgaagatttgcaatgttatcggtagcccagatgaacaatcatggccacaaggattgtctcttgcagagaccatgaagtttcagttccctcaggtcagtggcaatcaactggcagaggtaatgacatcagtcagtagtgaggcagtcgacctgatttcatcactgtgctcatgggacccttgcaagagaccaaaggctgcagaagttctccagcatactttctttcagggctgtacatttgttccacctactgtccggtcaaaagctggagtgctccctaaaacgcctccatgtgttggagtaaaaggagtttcggagcacggcatgcctcgaagatactctacaggaactctatcaacaaccaaacctcatagtaatgcatctctgaaatcaagtggcttatctaagaccggtgtacaaagaaaacttcaaatggatcgtcaggcgccacagaagattaaaaaacctactgagagtaataataaactaaccactaatcgagtacctgcaaggaatagcccaggtcaccctgtattaaggcattcacgcagtttacctgaaactggccgggcaacaatgcacaaggtttcaacccttaccgagagattaactcatatgtctgttacctctcgaacgcgtactactcccaagcctgctgccccgttactgaaggctgggctcggcaagtctgacttactgggaaaaacagacgaaatacctcctgcaaagaggttgacaagaaaattagtaagctaacgtagcagcatccatacagtggaagctggttagctggtgcagagaggtgttataagctacagagcaaaatcccggtctgctgaaaatgatggcactgccggagtgtttgccaaatttgctgcatccaagtgccatagtagaataagtcgagcctgccgatccacgtggatctgcttttgccccaagtttgttccatgtttgaatagaacatgagtgtgctatatcgatttgaattgttgtcgaccagtgttcactcgcatatgcggtctgacaaatgatagacccgcgagcaggaggatgtttggcttttgcttgtacagtttatgagcttttgggtggcggtcaagtctttgtcgggtccttggcaaatgatacaatgcatagtctggttttgacttcgtctgtggctctattcaggtctttgtttgaagatgatgtctcatttctcataaaaaaaaaaaaaatggccccccccc

SEQ ID NO: 14877 - DNA, 540 bp, Oryza sativa
  Clone ID: PAT_MRT4530_20773C.1
atggggttggagaggaaggcgaaggtggcggaggtggcgctgcggtgcgcggtgtgcgccctggcggcgctggcggcggcgctggtgggcacgggaagccagacgaggaccttcttctcgctggagaagaaggccaggttcacggacatgaaggcactcgtcctcctcgtcgccgcccacggcgccgccgccgcggtggcgtacgcgctgatggcgcccacggcggcggcgctgcagtcgtcggtggtgggaaagcgcgggcagccggagctgcagtggatgcctgtctgcggcctctacggagcgttctgccgccgcgtcggggagggcctcgccgccgccgtcgccgcgggcctcgccgccgtgctcctcgccgccgtctccgcgttcaactctgttccgcctctacggcggcggcggcggcggccgcaagagcagcgccggtgccgtctccggcaatggcgcgaacacgtggtaggcaaggctagtttagctgcttcgatggagtttaatttctttgtagtttcagaattaaattaa

SEQ ID NO: 14878 - DNA, 261 bp, Oryza sativa
  Clone ID: PAT_MRT4530_20774C.1
atgacctccgagtacgagggttatcggggtatgaagttgctgccgactccatcggtaggcagatccagccgctccaggctcgagcccacccagcctttgactattctgggccggaggacgcgacccggtcgcctgagtcatacactctccctagcccccagccttgttgtcggagaaacattctcggaggataaggctcctggacccttgacctgcctcggccttatccgctctgggcgtccccagccgaagttctcttag

SEQ ID NO: 14879 - DNA, 465 bp, Oryza sativa
  Clone ID: PAT_MRT4530_20775C.1
gaacaacctcgcggtgagcagctaaagctaagctgaggttagccatggcggcggcgatggggttggagaggaaggcgaaggtggcggaggtggcgctgcggtgcgcggtgtgcgccctggcggcgctggcggcggcgctggtgggcacgggaagccagacgaggaccttcttctcgctggagaagaaggccaggttcacggacatgaaggcactcgtgcgcctcgtcgccgcccacggcgccgccgccgtgtacagcctgctccagctggcgcggtgcgccgcggccgcggcgtggaaaggcggcagcaatggcggcgcggcggtggtggcgtggtcggtgttctcgtgcgaccaggcggtggcgtacgcgctgatggcggcgacggcggcggcgctgcagtcgtcggtggtggggaagcgcgggcagccggagctgcagtggatgcctgtctgcggcctctacg

SEQ ID NO: 14880 - DNA, 277 bp, Oryza sativa
  unsure (1)..(277): unsure at all n locations
  Clone ID: PAT_MRT4530_20776C.1
tcgtgtgctccggcgatgtcggcgacggcgacggcggcggccatccgctccggagagctactcgcgtgcccgatggctctgcggagggcggccgcccccgccggggccaccacatggttccggatggggcgagccgcgaccgcgactgcggcgcggatggcgactacgctgagggtgagggtgccacccnngttgtcggcggctgcgtttgatgagacgtcaagtttatgaatgtgtggtctcctcagcgggaccatgagaacccttgcccaggccg

SEQ ID NO: 14881 - DNA, 3372 bp, Oryza sativa
  Clone ID: PAT_MRT4530_20777C.1
ctacctggctacctcaattctggcgaactcgccgcccctgcagacgccaacatcgatggtcatcttccggtccttcccttgcctgggtgacgacaacaccctgcagcaattcctcctcggagaccttttccagaggttggggtcgggcttcttgaggacgatgacgcggtcgagcagcgcggcagggtcagggatgcgccagccgcacttgacgggcgcgacgcggcggcgctcgtactcggtgacggtggtgttgcggcggcggtcgaggcgggactgccgcatgtagtacacctgcggcgtctggcacggctggcgcgccacgggccgcgtgttgaaggcgtacgccgtgtagtcggcgcggcggtaccagttgaggaacgtgcgcatgggcatctccatctcccgcggcgacagcaccccgcgcgtcaccaccaccgcgaacccccacgacaccgacaccgtccactgcttgtcgccgtcgtagcacaccgactgctgcgccacgccagccgagtccagccgcgcgggcccctcgaacagccgcctcagcgccgccgtccgcgacctcgtcgtcgggaacaccggctgcaggaagtccaggtggtgcagcgtcaccaggggcaccaccgggtgcgcgcccaggaggcccagcacgtcgccccacaggtcgcactggtggaaacccaggtggcgcgtcagcggcacgcccagctccgccacgcacgcgtggatgcggtcgtcgctgccgtagagcgccgggtaccggtcgatgcacccgtcctgcatgtgcgccagctgcgcggccagggcgcggctgatggcgaacccgccgccgccgaacgccatgccgtacgagaagatgaggttctggatgtggctctccgacggattcccgatgtagtacggctgcgtgtggtcgtaccgggacagaacgtccacgaggttgtccgggaagaacaccgtgtcgtcgtcgcccatcacgaaccaccgcgcgccggggaggcccagccggaagctctccgacacgatgcgggtgatccgcagcgccgaccggctgccgcggccgtgcgtgtacgggaacttggtcgtgttcccgctgatcttgattccgggaagccccgtggaagcgttcctcgagtagaactcgtacaccggcttgtccagccacacgaacccgctcatctgctccggccgccaccatgttctgatgtactccctccggctcttccagagctccgaagaggcggcaatgccgaacacaatgtgacccagcccggtcggcgcggcgtcatcagacggcggcgacgagtcgttacgcctgttgccagcatcgccggcggccgcgagatgtgcaacgtcgccactggcaaggctctcctccgggcacgagctacccgagtagaacggcgacacggcgagggcaacgacgtacagggcgagcaccgggaggagaaagtagaggaggaggctgcagaggaagaaggaagccttgcacttgggcgccttgccggcggcgtgcatgacaatggcgtccttgtgatgatgccgatcgccgcctcctcctttcatgccaaataaggccttgccgctctccacttgtgcggcaggatatatttttgtaaacatttttgccagtataatatttcgctcttgcgcgtgcgaggcggcgtcgccgtccatggccacgccgaactgtccgccgacgacgtggtggccgtgccccggatgcatggcgtcaggcgccatctgctcgcccgggtacaagaacccggcgccgccgtgcgcggaccccggcgccccgaacgcgatgttcacgccgccaccgccgtgggagccgtgctgctgcagcccgagcgtcagcgacacgccgccgaacccgccgtgctgctgctggtggtggctgtcgtcgtacgcgtcgaagtcgaggtggtccatgatgccgaagttctccgcctggtgcagccgggccacgccgcccgcgccggccgcgacgtcgacgttgacgacggaggccagcgacccggcgtcgtggcgaagctgcgccctcgtcggcttctgttcgccgccgtcgccatcgccgacgaccagctgctggccgccgcgcgcctcggaggcgtggctgcaggtaggcttagggtttaggctcccctgtccaccgctgccgtcgccgccgtcctggcccttcatctcctcgacgtacatctcctccaccattggcttccacagccgaaccctcgcattgatgaaccagttggacacctggctacgtgagaggcccgtctgtcgagccaggatgtgcttatccacgtcgcttggatacgggtgcaggaagtgctcgaagagccaggcacggaggatggtgacggcgcggtcgggaaggccgcgctgggggcgccacgggtggctgtccatggcggcgacgccctgcagcgacttgtggtgcctgatgcactggtcgatcaccctgagccgcggcgtctgcccccgcgtcgtcccggccgcgctcacgtccttctccccgagcgccttcctcgccgcctgcagctgcgccacgatcccatccctcaggctccggaagtgcctcgatatcgtcctcgccgccaccgccgtgtacgcccccgccgccctctccccggccaccgcctcgaaccccccggccaccgccctcatctgctcgcagtacctcctgtacctcctgtccacctcttcgagcatgatgtagagcttgtccttgagcctctgcagctccagggcttccatggcctggatctgcggcgacggggtccacgaggccgacgacgacgacgacccgtcgccgcggccgtcttcttgctgcgtcgctgccttggcgccgttgccgcgcttggtgctgtccacggggaggctgcagaattcttggaggagctgctgcgtcgggaggaggaacctcgagctgcgcaggtgccacgcgccgtgcacttgcggcgccgacgacgacgcgtcgtggtgcgtcatccatggcgccgcgggcgccagttggtgctgcggccgcgccgcgccgccgaggtgcagcacgccgtccgggcggcacagcgacagcgacagcggcgcctggctcggctgttggtgctgctcgctgaggaagcgcatggtggagccgccgccgccgtcgtccccagcgtcggccaccagcgcggcgaccttgcctgccgcgccgggcatcatactcatacccagaccgcgcacgccgagaagctccatcccggcctgcaacccgaacagctccggcgccgcttcgtccatcgccggcatcagcgtcgtgaccgacgacgccgatgcatctgccgccgagaagtaatccgcgaaccccaggttcggatcatgcgccat

SEQ ID NO: 14882 - DNA, 166 bp, Oryza sativa
  Clone ID: PAT_MRT4530_20778C.1
attaattgagtcaaaacttgggtggtattgttattgcataacgcattgtttattgatttgtgccatggaataagcgaaggattgactccaaaccaaaatgtacatttctccaaggctagttctcacttgtttatgggtaaaaaactttaaacctctcaacgcttat

SEQ ID NO: 14883 - DNA, 605 bp, Oryza sativa
  Clone ID: PAT_MRT4530_20779C.1
ataaattataacccatttagtggattgaagtcacaaatatgagtttgactttgacaaaacaaagttatgggctcttcacatatagacacgtatatagatctgaacaaataaccatgagccaaaaaaggatttatggaccatacagacagtcaccattagtacatataacatatcgactgcattctgacacaccattgatgagaagccattatcagacattatgtagctttggagaaaattatttgttagaaggagcatcattttttagagagaaggccagaggcccggcttttgcttgaaagccaaatacggagaaggagcatcattcactcaaaacattgcaattcatcaacgatcccaaaactgaatgcaaccatcacttcaagatggatatgaacttcttgagtgaccatctgtaatttttaccatgacgagcccccacaccagtcttccattctgtgtcttatggccgcatatttagcacgcttttctgcagccacgttggtctgaccttcatgggaccttttacttgtactaccaacatgtacaacctttgaaccccttgaaaggggagttgcacctctcgaaagtgaaaccttcttgag

SEQ ID NO: 14884 - DNA, 1426 bp, Oryza sativa
  Clone ID: PAT_MRT4530_2077C.1
caggcgcaaatacactgcgcatttacgataaactggcggtgctaggctttagctagctttaaccggcaatgagaaaccaaaatacccaagggattttctttagaaaaatgccacttggtagtaacaacttgtagctgaaaattacatcaaaagtgctctatacttggggcataaagccagtactccactgcaattctgactacgtagaacgttgcatgttacaactgaagatcgtataaacatgatttaattatctcaatctcatctcatgaagaagccacagctaaagttccaaccttacagtctagattcatagctctccacaaaagaacgactaacctatagcacatatggcaaaaaatggaggtacacacaatacatttaatgcagcaaaagttgcgctatactcgtatgaatgacaaaatactgacaacggatgcagggtaaggcggcaccatagaaatcacagtacctatctgactttcttcaagagctctaccttctcaaactctggggccgcataactcttctctacttcccacgcatgatgagacatcatgttgaatgatgatttcactcccttctcatcagagacctctctcgtgaaagggatccgggcagcaaaggtaccttccccggaatgaacatgcaagtcaaaacccaacctgtctacccaaatcatcttcacctctgtcgcctggaaatctgattcaacataaatactgtatatcctatgtacatcttcagcatgtttgctgttcatttcctcaacaatgctttccgcaaaatttcgaagagggtcaggttctgcatcactgtattctgatggaattacccacatgccatcctcattgaaatcttcaatgtgcaagattctgtctactgatatcaaatacaaaagatcttgatctatctcctcgccaaatttcttttgccacctagtagaaagcttctttaattcatattcatcgttaggtttagtcaaagcaccaagcaaagtacattgaggtgtcctggccccactctgacgaaactcgacgtggaagctggacggcgcatcgggcgcggcggcggcgggcccggaggcggcgaggcacagagcgggcgcgccggagccgtcggcgacgaagcgggcgccgacgccgagcggccagccgtcggggccgaccacggagagcgtccccgacggcgcaagctccaccaccgtccgcgccacctcggccgccgacggccgggacgcccgctgctgcgcctgcacgggcgtcgcgggcgcgggcgcggacgccgccgccgcagccacggcccgctcggccccgcgcctcccggcggcgagcggcgggaggcgcagggaggaggggttggtggagaggaggatgggcggagatgggagcggggaggggaggagggaggagggaggcggcgacat

SEQ ID NO: 14885 - DNA, 199 bp, Oryza sativa
  unsure (1)..(199): unsure at all n locations
  Clone ID: PAT_MRT4530_20780C.1
acctgaaaaagaaagatttgagtgtcgcgaggcgtgccctgtattcaaattccatgtacttcactgctcgtgtggtcattcttttctcatcctgcttgtgtttaggacaatcatgttcgaagttcgccactttttaagatttcagtactgaataaaggatgggcttctggagccttcncaattaaaaaaaaanaaaana

SEQ ID NO: 14886 - DNA, 827 bp, Oryza sativa
  Clone ID: PAT_MRT4530_20781C.1
gggctgcaggaatcggcacgaggctctcgctctcgccatctcgccgccggcctcctccaccaccaccgacgactccgactccgactccggctcgatctctcgcggcggcggcggcgatggcggcggggaaggggagccacacgcacagggcgttcctgctctgcaactacgcgctcctgggggcggcgtccagctgcatcttcctcacgctctccctccgcctcctcccgtccccgtgcggcctcctcctcctcttcctccacgccctcaccgccgtcttctccgccgcgggctgctcgggctccttcaccgcgcccgccacccccgcgcagtggcacaacgcccacaccgcgggcgccgccctcaccgccatcttccagggcgccgtcgcgctgctcgccttcacccgcacctccgacttcctcgccgagctccagtcctacgtccgcgacgacgacgccgccgtcatcctcaagatggtcggcggcctcggcaccgccatcttcgtcctcgagtgggccgcgctcgccctcgccttctccctccgcctcgacgacgacgacggcgccggcgactacgacaacaagaactgggccgccgcctcctaccatgtctgaaactctgaagccctcatcacctcctccactccactccgccattggtgcgaccgaagagtccattcttcgtgtgttgtttagattattagtagaattactctcatgattcttttgtactagtgatattttcatgtgtactcgaattcttttgtactaagatgcaaagcaaatatatattgctttaaagcgtttgctaaaaaaaaaaaaaaa

SEQ ID NO: 14887 - DNA, 279 bp, Oryza sativa
  Clone ID: PAT_MRT4530_20782C.1
atggcaaagcttgccctgtgcttctgcgtcgtcctcgtcctcgtcctcgtcctcgcttcctcgccggcgccgctctccgatgatcgccgcgccgccggcctgctcggccgccgcggcctgcagcaggacgccattgtcgtcgacggcagcccgacggcggcggccaccgccaccacgacgacgacgacggcgtggccccggccggacacgccgccggataactggtacgacgggacgaagaggctcagccctggtggccctaatccacagcaccactga

SEQ ID NO: 14888 - DNA, 318 bp, Oryza sativa
  Clone ID: PAT_MRT4530_20783C.1
atgggtgtggcgtgcggcgggcgtgacgggggcgcagcggccggcggcgatggcgggggcacagggggcgacggccggaaggccactacgggcggtgagcatggcggatctccaccggcgcctcttctcttgccgctcgccagcggatctctggtcgacgcgagatggcgcgccgcgcgcatgccggcgtggggacgggggagggcggtcagcgtggacggcggtcctcttctccatcctgctccgagtcggagtcaccgagtagggacggaccaggcggaggtggcggaagcggagctcgcccgggcggtcggctga

SEQ ID NO: 14889 - DNA, 375 bp, Oryza sativa
  Clone ID: PAT_MRT4530_20784C.1
atggaatgggatgtgacgaacccacttttagaggtgtttagtttagagcggcggcgaatttggagacggggagggctcggcggtgacagaaaatccggcggtggcggtggtgaatccggaggcggccttggggcgacggcgacggatccggtggtggggagggcagcggtggcgaatccggtggcggggaaggctgcggcagcgatggcgggcgagggtgattgctccagccgccacgtccacatcgtcgttgtctctgatattgacgccggtcctccttccgcctgcgccactggtcgccgctcctccttccgctcacgtcactggtcgccgcttatctttctgtcgctccgctccttttctccctgggagtaa

SEQ ID NO: 14890 - DNA, 741 bp, Oryza sativa
  unsure (1)..(741): unsure at all n locations
  Clone ID: PAT_MRT4530_20785C.1
atggagaacggcagcctcgaccggtggctgcaccgccgcgacgacggcggcgcgccgacggcgccgctccagtggccgacgcggctctgcatcgccatcgacgcggcgagggggctcagctacatgcaccacgagtgcgcgcagccgatcatgcaccgcgacgtcaagtccagcaacatcntgctcgacccggccttccgcgccaagatcgccgacttcggcctcgccaggatcctcgccaagtccggcgagccgaattccatctccgccatcggtggcaccttcggctacatggctccagagtacgggtgcagagcgaaggtgaacgagaaggtggacgtgtacgcgttcggcgtcgtgctgctggagctgacgacggggctgggtggcgaacaccgccggcccggactgctgcccgacgtcgtcgacgaggccatccaggacaggccggcgttcctggaggacgccgtgccggtgttcctgctcggcatgatttgcaccggcgacgacccggcgtcgcggccgacgatgaaggaggtgctcgagcagctggtccagtacgaccgtacgtccagcgtggcggccgcctgccgcgatgactccggcggcgcaccgtcgttatcgaaggggaagaaagacgggaaggggaagagctcgtcggcgggaacgacggccgggaaaatgtggggcgccggcaccggcgacgaggaaagcggcagtttcgtggcgcatccagtttaa

SEQ ID NO: 14891 - DNA, 523 bp, Oryza sativa
  Clone ID: PAT_MRT4530_20786C.1
aatattaatctgttcatgatcaaaatgactcaacaatgactacaaatatctacattggtatacattaggttagcattcttctgggttgcaaaagtttctttcgtcctctgctgtcattacccataacactgaatctggatcaatagctgttatgtcttctatttctgcttcagtagaaacctcacgtatacaaataggagcaatgcctagtttatctccagagatttggattaaatcatgtaatgtcgagggtaatctgatttttttgcctcctcgtcgtccgtaacgtctaataatcacccatgggcgagtagaatcacttgtgatagatacactttttgtaacatgcgcatgtactctttttccagtagtaggaatagagaacagagatttactatagtgtcgggatataaaggggcgatgctctggctcaggaagttgtagaggaggtaaatcaattaaagctttttcaatacacatggcattttcttgatcattgtttgaatctgaatcactcagaaaa

SEQ ID NO: 14892 - DNA, 1779 bp, Oryza sativa
  Clone ID: PAT_MRT4530_20787C.1
atggccgccaccgccgccgccgccgccggagttgccgttgccggcgaccgcgcgcgccggcggcagtggaggtacacgtgggagagcctagcgcacctcccgctcctacgcctctacctcttccgcccggagctctccgccgccgcggccgccgaccacctccgcgccgacctccgcctcgacgactcgctcctcctcctctccttctcgctcgccggggaaccagtcgccctcagggtccccgtcccgagggtgctcgtcgacccctccgcccctcccgagtgccgcgacgcgggggaccatgtcgaggtccgcctcgcgctcgtcctccccgtcgaccaccccgtcgtcgccgccgccttcctaccgccccccggcgaggagccgcccgcgcctctctccctccgcgatgatataaagaatctgtcttctggagatgttcacttgtactgcaaagcatgctcagcaagattgacaaaacagccactaaggaacatcgaggaaatgccatcgttaaactgggaagatgtggctgacaattggtttggtggatgttgcacctcatttggaggtgcaagcgaaaagctagtatcacagtatatcaatgcatatgggcgtctagagggaacaagtctactaaatgctacctccattagcatagaaaaggattatcttgagaaggatttagcatctgggttagttagttcagtgcccagtaacgattgtgatgctctgcaggaagatatatgtgatgttcacataggagaagatcataccacggggaacatggaatttaatagttcagaagagaaagcatatcatgaaaagcagattggttgtaatcatgtgcaatgttctgttgttcctgaagagggtccttgtgtcagtaatagtgaaaaagatggagacactctttggactgatcaatctggcatcattaaagtgaaccccgaggagtctaaaaatgactcttgtgttgatgacatagagaaacctaccaaagagaccgatttgttgtctgtagatccatgcaattgctgttgtgacggtggaaacagcagaaaatctgaagacaatccttcgaacgtgccctctgggaacctggaaatgcaggctaaattggacacccaaagagattacaaattaacaaaaagtatatctcttggttgtagcttcattgtgaaagcatctaaccttgtaaatgatgttgaatggcttgaacttctatgtgctcattgctcatcacctattgggtcatacccttcacaacattcacatgctccagcagatggccgtgtacgactatttaaatgctatgcatcgtcagaccttcatgttgggggacctcatgatgtgttcagggggcatacattagaaagactttttgttaatttgttgcttgaagttgcagaagatgaaatatcttttcgtacattagtcagagatctgaaaaccaaaaggcccatccttcaaatagtcctccttagttcaaaagcgtggctgttttctggctactgctatgaaaatgatatggatggttcacatggggcagcacatctgcagccctctgttaagatcttgtattctaattgcagtaatgctttggaagaagacttaaggacagtagaggagtggtcatccaaatatagggctgaagagttgtacatgatgaggcgtcaaatagatgagcttattctaagcctcaactcagctagggataattttccactttcttgctcttccctccagggaatgtacctctcatccctagagcgttga

SEQ ID NO: 14893 - DNA, 316 bp, Oryza sativa
  unsure (1)..(316): unsure at all n locations
  Clone ID: PAT_MRT4530_20788C.1
ctgccgcgatgactccggcggcgcaccgtcgttatcgaaggggaagaaagacgggaaggggaagagctcgtcggcgggaacgacggccgggaaaatgtggggcgccggcaccggcgacgaggaaagcggcagtttcgtggcgcatccagtttaagctgacgtggcaactacacgagtcgctgtaaattatgtagttggatgtaacgttttctacttctactgtacagcgtagtgaaaaagggggttatgggangaggttgaggggaaggggaaaaaaaaaaaaaaaaaaacaaaaaaaaaaaaaaaaaaaaaaaaa

SEQ ID NO: 14894 - DNA, 3018 bp, Oryza sativa
  Clone ID: PAT_MRT4530_20789C.1
atgtcgaacacccatcgcccgcccctccctgctctcgcgccccgcgccgacggcccccgcgtcccagcggcccgacgcggctcctgcatccgccatcgccgcggcgagggggctcagctacatgcaccacgagtgcgcgcagccgatcatgcaccgcgacgtcaagtccagcaacatcctgctcgacccggccttccgcgccaagatcgccgacttcggcctcgccaggatcctcgccaagtccggcgagccgaattccatctccgccatcggtggcaccttcggctacatggctccagagtacgggtgcagagcgaaggtgaacgagaaggtggacgtgtacgcgttcggcgtcgtgctgctggagctgacgacggggcgggtggccgaacgacggcggccgcggactggtgcctggcggagtgggcgtggcggtggtacaaggccggcggcgagctgcacgacgtcgtcgacgaggccatccaggacagggcggcgttcctggaggacgccgtggcggtgttcctgctcggcatgatctgcaccggcgacgacccggcgtcgcggccgacgatgaaggaggtgctcgagcagctggtccagtacgaccgtacgtccagcgtggcgccgctctagaggatccaagcttacgtacgcgtgcatgcgacgtcatagctcttctatagtgtcacctaattatcggagctgacgctgctcgacatgtcggggaacaagctcaccggcgcgattccggcgtgggtgttcaggcaccagaagctcgagaggctctacctgtacgagaactccctctccggcgagctgccgcgcaacgtcacgacggcgaacctggtcgagatcgacctgtcgtcgaaccagctcgggggcgagatatcggaggacttcggcaacctcaagaacctcagcttgctgttcctctacttcaacaaggtcaccggcgccatcccggcgagcatcgggcggctccccaatctcaccgacctccggctgttcggcaacgagctctccggcgagctcccgccggagctcgggaagaactcgccgctcgccaacttcgaggtctccaacaacaacctctccggcgcgctcccggagacgctctgcgccaacgggaagctgttcgacattgtcgtcttcaacaacagcttctccggcgagctcccggcgaacctcggcgactgcgtgctgctgaacaacctcatgctctacaacaaccgcttcaccggcgacttcccggagaagatttggtcgttccagaagctgaccacggtgatgatccagaacaacggcttcaccggagctctgcccgccgagatatccaccaacatctcccgcatcgagatggggaacaacatgttctccggctctatcccgacctcggcgaccaagctcaccgtgttccgggcggagaacaacctgctcgccggcgagctcccggccgacatgagcaatctcaccgacctcaccgatttttcagtgccgggcaaccgaatatctggctccatacccgcgtcgatcaggctgctggtgaagctcaactcgctcaacctgagcagcaaccggatctccggcgtgataccgccggcgagcttcgggacgctcccggcgctgaccatcctcgatctgtccggcaacgagctcaccggcgacatacctgccgatttggggtacctcaacttcaactcgctcaacgtgtcgtcgaaccggctcaccggcgaggtgccgctcacgctccagggcgcggcgtacgatcgcagcttcctcggcaacagtctctgcgccaggccgggctccggcacgaacctcccgacctgccccggtggaggcggcggcggaggcggccacgacgagctctccaagggcctgatcgtcctcttctcgatgctcgccggcattgtcctcgtcggcagcgccggcatcgcgtggctgctcctccggcggcggaaggacagccaggacgtcaccgactggaagatgacgcagttcaccccgctggacttcgccgagtccgacgtgctcggcaacatccgggaggagaacgtcatcggcagcggcgggtcgggcaaggatggtggccgtgaagagatctggaacgcgaggaagctggacgcgaagctggacaaggagttcaaggcggaggtgacggtgctcggcaacatccggcacaacaacatcgtcaagctgctgtgctgcatctccagccaggacgccaagctgctggtgtacgagtacatggagaacggcagcctcgaccggtggctgcaccaccgcgaccgcgacggcgcgccggcgccgctggactggccgacgaggctggccatcgccgtcgacgccgccagggggctcagctacatgcaccacgactgcgcgcaggcgatcgtgcaccgcgacgtcaagtccagcaacatcctgctcgacccggagttccaggccaagatcgccgactttggcctcgcccggatgctcgtcaagtcaggcgagcctgagtccgtgtcggccatcggcggcacgtttgggtacatggcgccagagtatgggtacagcaagagggtgaatgagaaggtggacgtctacagcttcggcgtcgtgttgctggagctgacgaccggcaaggtcgcgaacgacgccgcagccgacttctgcctggccgagtgggcgtggcggcggtaccagaaaggccctccgttcgatgacgtcatcgacgccgacatccgggagcaggccagtctgccggacatcatgtcggtgttcacgctcggcgtgatctgcacgggggagaacccgccggcgaggccgtccatgaaggaggtcctgcaccacctcatccggtgcgaccggatgtcggcccagggacccgaggcgtgccagctggactatgtcgacggcgccgctccgctgctggaggcgaagaaggggagccggcggaggagctcggagtctggcaggtgggacgacgacgacgacgatgacagcggcaatttcgtggtgcacgttgtttag

SEQ ID NO: 14895 - DNA, 292 bp, Oryza sativa
  Clone ID: PAT_MRT4530_2078C.1
cccacgcgttcgtccacgcgtacgcttggttactgggactctgagaaaatggcaatttatgatataaatatcagttagctatctgcgtcttagattgctacctgtgtgctatgaagcactattagactgctcattgcggtctcagtttggtcaatggtagtggtggactatgttacaacagaagggtttggtatctcacataagctggttctcgctgatgcctatatctttgagacccgttataaagaatatctagaggatctaggaaggtagattctgagattctcactat

SEQ ID NO: 14896 - DNA, 1506 bp, Oryza sativa
  unsure (1)..(1506): unsure at all n locations
  Clone ID: PAT_MRT4530_20790C.1
atggcgggatacgcggcggaggcgggcgcagctgctggcgcggggcgtgggcgcgcagcacggcatccgccgctgacgtcgctggtggtgtccaccatcgccgccttctccgccgtcgtcgtcttcgccatcctccgctcggcgtacgacgcggcggtgtcgaggacgacgacgctgctggggcacaacctggagccgacgccgtggcacctgttcaagcacgacaaggggcggccgccggcgcgcgccgcgttccggtgcgcgccgtccctgacctgccggccgccggtggcgcagccggcgccggggacgacgaacgcgagcgcgaacgcgtcggccgcgccgcggctgtgcccggcgtacttcggcgcgatccggcgcgacctggcgccgtggcggcgcggagggggcggcgtgacgcgcgcgctgctcgacgcggcgcagcggcgggcgtcgatgcgcgtggccatcaccggcggcgggcggcggctgcacgtggagctctactacgcgtgcgtccagagccgggcgctgttcacggcgtggagcctgctgcagctgatgcggcgctaccccggccgcgtccccgacgtcgagctcatgttcgactgcatggaccgcccggccatcaaccgcaccgactacggcggcggcggccacggcgaccacggctcnccgccgccgccgctgttccgctactgcaccacccggaaccacttcgacatccctttccctgattggtccttctggggctggcctgaaacgaacatcgagccgtggagcaaggagttcagggacatcaaggaaggggccaaggcaatcaaatggcaagacagagtggcaacggcgtactggaagggcaaccctgacgtggcgtcgccattgagggtcgcattgcttaactgcaacgacaccaacatgtggcacgccgagatcatgcgccaaaattgggatgaggaggtcaagtccgggtaccataactccaagctctccagccaatgcacccataggtataaaatatacgcggaggggttcgcgtggtcggtgagcctaaagtacatactgtcatgtgggtccatggcgctagtgattgacccgcagtacgaggacttcttcagccgtgggctgcggccggaggtgaacttctggccggtgcacatcgacgtcgccgccggcggcatgtgcgagtcgatcagggacgccgtggagtggggggaggcgcacccggcggaggcggaggcggtggggcggcgcggccagcggctgatggaggagctcgacatggacgccgtctacgactacatgctccacctgctcaccgagtacgcgcggctcatgcggttccggccggcggaggcgccgccgccgcggccgccggcgcaggaggtgtgcgaggcgtcggtgctgtgcctcgccggcgagaagcagaggcggttcctggaggcatcggcggcgagccccgccgtgtcggagccttgcgtgatgccgcccgatgccggcgagtga

SEQ ID NO: 14897 - DNA, 2402 bp, Oryza sativa
  Clone ID: PAT_MRT4530_20791C.1
atggctgtctacaacatcctcatcctctttctactactattgctcttctctctatcgactgcgcagcccagcgccgacgagcaaaaactactcctagcaatcaagcaagattgggacaacccagctccactcagttcatggagcagcaccggcaactggactggtgttatcagtagcagcacaggtcaggtcactggcctctccttgccaagtctccatatagccagaccaatcccagcctccgtttgtagcctcaagaatctgacctacatagacctctcttgcaacaatctcaccggtgatttccccacggtgctctacggttgctcagctttggagttccttgacctatccaacaatcaattatccggcagacttccggaccgcattgacaggctatcgttggggatgcaacacctcaacctgtccagcaatgctttcaccggcgatgtgccgtcggctattgcaaggttctcgaagctcaagtcattggtccttgacactaatagattcaatgggaattacccgggtgccgccattggaggccttgtggagcttgagacgctgacgttggcatccaacccattcgagccgggtccagtcccaaaggagtttggcaagctgacaaagctgaaaatgctgtggctgtcatggatgaaccttactgggaccatccctgatgatctgtcgtcattgatggagctcacattgttggacttgtcacaaaataagatgcagggacaaatccccgagtgggtattgaagcaccagaagctcgagaatctatatctctatgcaagcaatttgagtggcgagattggtcctaacatcacagctctcaacctgcaggagcttgacctgtccatgaacaagttctctggatcaataccagaggacattgcaaacttgaagaagttgagattactatatttgtactacaacaatctcactggacccatcccggctggtgttggtatgatgccggacctcaccgacatccgtctcttcaataacaagctctctgggcccctacccgcggagcttggaaaacattcagaattggggaattttgaggtgtccaacaacaacctctctggtgagctaccggatacactttgcttcaataagaagctctttgacattgtggtgttcaacaatagcttctccggcgtgttcccgacgaaccttggggattgcaaaaccatcaacaacatcatggcatacaacaaccactttgttggggactttcccaagaaaatatggtcattcgagttgctcaccaatgtcatgatttacaacaacaacttcaccggcactctacccagtgagatatcatttaacatctcgaggattgagatggagaacaatcgcttctccggtgccctcccgtcgaccgccgtcggtctgaagagtttcacggcggagaacaaccagttctccggtgaactgccagctgacatgtctaggcttgccaacctcaccgagttgaacctcgccggcaaccagttatccggctcgattccgccgtctatcaaatcattgacaagtctgacctccctcaaccttagcagaaaccagatttccggtgagatccctgccgcagtcgggtggatgggcctctacattcttgacctctccgacaacgggctcaccggcgacatacctcaagatttcagcaatctccatctcaactttctcaacctttcttctaaccagctctccggcgaggtcccggagacgctgcaaaacggcgcctacgatcgtagcttcctcggcaaccatggcctctgtgccacggtgaacacgaacatgaaccttccggcttgcccccaccaaagccacaacaaatcgtcgacgaacctgatcatcgtcttctcggtgctcaccggcgtcgtgttcatcggcgccgtcgccatctggttgctgatcatccgacaccagaagcgtcagcaagacctcgccgggtggaagatgacgccgttccgtaccctgcacttctccgaatgcgacgtgctcggcaatctccacgaggagaacgtgatcggtagcggcggctccggcaaggtgtaccgcatcaacatcggcggcaagggcagcgacggcatggtggtggcggtgaagcggctatggcggacggcggccaagtcggacgcgaagagcgacaaggagttcgacgccgaggtgaggatcctcggggaggtaagccacatcaacatcatcgacctcctctgctgcatctccggcgacgacaccaagctgctcgtctacgagtacatggagaacggcagcctcgaccggtggctgcaccgccgcgacgacggcggcgcgccgacggcgccgctccagtggccgacgcggctctgcatcgccatcgacgcggcgagggggctcagctacatgca

SEQ ID NO: 14898 - DNA, 2524 bp, Oryza sativa
  Clone ID: PAT_MRT4530_20792C.1
cccaaattcgcgttcgccaccgtcgcgtccccctcgcctctgcctcgccggaaccctagggagatcgccggagcacggcgctggctcacgggcggcggcggagatgaactcgcagaagaagcgcagccccaagatcgagcccttccggcaccgcgtggatgcggacccaaagtccttcgacaaatcgtggaagaagctcgaggacgccatccgcgagatttacaaccacaacgccagcggcctctccttcgaggagctgtacaggactgcttataacttggttcttcacaagcatggtctgaagctatatgataaactcacagagaatttaaaaggacacctgaaagaaatgtgcagatcaataggggatgcccaaggtagtttgtttctggaggaactgcagagaagatgggctgatcacaataaggcactacaaatgatcagagatatactcatgtatatggataggacatttattacaactaacaaaaagacacctgtctttgaccttggtctagagttgtggagagatatcgttgtccgcgctcccaaaattcatgggaggttgcttgacacactccttgaactcattcatagagagaggatgggtgagatgataaacagaggtctgatgaggagtaccaccaaaatgttgatggatctagggtcttctgtctatcatgatgactttgagaagccattccttgaggtatccgcaagtttctatagtggtgagtcacaacagttcattgagtgctgtgattgtggcgaatatctcaagaaagctgagagacggcttgctgaagagttggagcgtgtttctcagtatatggatgccaaaaccgcagacaaaataactagtgttgtggacactgagatgcttgcaaatcacatgcagcggttgattcttatggagaattctggtcttgtgaatatgcttgttgatgacaaacatgaagaccttagcaggatgtacaacttgtttaaacgtgttcctgatgggcattcaacaattagatctgtgatggcctctcatgttaaggaaagtggaaaggcattggtatctgacccagagaagataaaggaccctgttgagtttgtccagcgtcttctaaatgagaaagacaagtatgatgagatcataagtatttcattcagcaatgacaaggctttccaaaatgctctgaattcctccttcgagaatttcatcaacttgaacaaccgatctcctgaattcatttcgctgtttgttgatgacaagctccggaaaggggtgaaaggggccaatgaagaggatgttgaaactgtcttggacaaggtgatgatgctcttcagatatttgcaggagaaagatgtttttgagaaatattacaagcaacacttggccaaacgtcttctatctgggaaaactacttctgatgaagctgagaggagtatgcttgtgaagctgaagacggaatgtggctaccagtttacgtcaaaattggaaggcatgttcaatgatctgaagacatcgcatgatactatgcaaagtttttatgctaatctctctggtgatactgatagcccaacaatatcagtccagatactcaccactgggtcttggccaacacagccatgtaccccctgcaaacttccacctgaaattgttgatatatctgagaaattccgggcattctaccttggcacccacaatggcaggagattgacatggcaaacaaacatggggaatgcagatatcaaagcaacgttcggaggccgcaggcatgagttgaatgtctcgacatatcagatgtgtgtcctgatgctgtttaattcagcagatggcttgacttacggtgacattgagcaggccacaggtataccacatgctgatctgaaacgctgcctccagtctcttgcttgtgttaagggtaagaatgtgctgcggaaggaacccatgagcaaggatatatctgaagatgacactttctactacaatgacaagttcacaagcaagttggtcaaggtgaagattggcaccgtggttgctcagaaagaaacagaaccagagaagttggaaactcgccagagagttgaggaagacaggaaacctcaaattgaggctgcaattgtcagaatcatgaagtccagaagagtcttggaccacaatagcataatcacggaggtgacaaagcagcttcaatcgcgctttttgccaaatcctgttgtgataaagaaaagaatagagtccctgatcgagagggagttcttggagagggacaaggtagataggaagatgtaccgttatcttgcatagatgccctccctgtcgaaacacagactgtccataaacgggttgctgctatgtatacctacccatgtttcaattttcttccattcattctctttagatctgctgcagagccaaaggtggcatactaacatttctagcctgttatctttggtacagatatagaaaacgatcttatatctttctggtaataccatagaatgttgctggtcgttaaaaaaaaaaaaaaaa

SEQ ID NO: 14899 - DNA, 249 bp, Oryza sativa
  Clone ID: PAT_MRT4530_20793C.1
atgacgtggcaccacaagaaaaataaaaaatcatgtgggtcccacattgtcatcgtcctcgtcatgttgctgctctcttggggcgagctcctcatccacgtcggatccacgtccccatctcgttcagcatcttcaccgccccctaagcatcatttggctagtgatccagacgatgagcgtggagttcaggccattctcgttgtcctttttcctgctgctcaacgcggctatctggacagagggaagtaa

SEQ ID NO: 14900 - DNA, 549 bp, Oryza sativa
  Clone ID: PAT_MRT4530_20794C.1
gcacaaagccgattgaaggcaactgttttgatgtacaacgtttacaattaattttaagttgtgacagccttgacgtcgttgttcctttcccaatccataaacatcagatgttgatttctcctaatgtactttcacgcacgcgtgaagcaagtagcagcaggacagccgcagctagcagttcacagtggcaacgaaagggaagtggccaaatttgccactctagctgcagtgacacgaaacggaagtacacgccgattttgacacgaggttaagtggtcgttttcttggacgacctccacgtgggtatgctaatccaaatatccaaatacccaccggcgcttaattactgcatgtatgtgtacgtcatatcgcctgtgcatgcatttagacgtttgaagggaagagttcgatgccgaaacaaacacggtacttctgttcctttttctgcttccagcagctccgagatcaggggacacaaacggcatgatcgatgcaggatagcattgatatgcgttatccggatctggtccattggaggaggggcccggt

SEQ ID NO: 14901 - DNA, 585 bp, Oryza sativa
  Clone ID: PAT_MRT4530_20795C.1
atggggccatggcgcatggagaggcggccgcgggatgacgccgacagagggagctacgagcgcggcacgcaggcgagggaaggaggcggcggagtccacacgggggcggaggcctcaagatggcagacgtggcggatggtgacggcgacctcgacgacgacggtggtgccggaggaggaggccgtcgacggtgatgatggaggcaacgcggccggcaccgcagagggatccgccagcggaatcgagcggcttggtggcgggtggatcctcctcgtccagccccgtgatgggcggcgggcggcgcagtcaatggcgaaggcagcggctccctcgccctcccccgcaaagcttcgacggtggcctcgagcgacgatgacgatgaggaggcagtcgggaatggcgccgctggccccgcacgctctcgccggccggaactgtgtcgtcccggccgccgacgatgacgagaaggaggcgggaggtttcccccgccatgaggagggcacaatcaccgtggggaaggtgccgccgccgaggctccatcgtgaggagggcactgtcaatcaaggggagggcgtgccgccttga

SEQ ID NO: 14902 - DNA, 1527 bp, Oryza sativa
  Clone ID: PAT_MRT4530_20796C.1
atgtcgtcaccaccgccggccacgctgtccaccgccgccgccgacgtgtcccatcccgcgcccgacgcgccggcgggctccaccgtcctcgccgcgccgccgtgcgtctccctcgaccccgccgcgccggcgcaccagcagcccgccgacacggtgtccgcgccgccgccgccgtcgtcgacgtgggtcatcctgggcagcatccctcgcgtgagcgccgccgcggacggcgagctccccgtgggcgccgacctctccgtcgcgctcgcggcgcccccgcgcgtcgcgatcctcaccatctccccggacgtgttcccggagccccccacgccccgcttcttcccgttcgtcctcgccgccgacacctcgggcctcctcctcctccaggcgaacctgggcatccccatgagccgcgaggtcgtcgaccgcccgcaccgccagggtctgaggtggcgcgacgccgcctcgcgctacttcgtcctcaacgccaccaccgcctcggcgttccacctcccggaccccgaggaacccatcctgcaccaggccctcctcggcctaatcgcctcacctcgcggcgatggccactacatggtcgccgagctccagcccctcatcggctgcgacaaggccaccctcctctgcttctcgtccgaggttggggaatgggtcgagaagagcgtccgttacccgctcccgccccgtccgttggctcccatctgcgtgttctcgcatcacgggaggctctggtgggtcgatctcacctggggcgtcatcaccagcgaccccttcgccgacgagccggtgctgggcttcatcccgttcccggcgggcaaggtgttgcagtgcagggaagcttggggagtggccgacaagtaccgctacgtgggcgtcagcgccggcaagctgcggttcgtggacacgtacaccgctcctcgccgcggcgttcctccgaaggtcagcgtgtggacgctggcagatccggactccacggagtggacgctcgagcacgaggcgaggttcgacgacatctgggccgacgagagctacaaggcgactggtctgtcgaagaagatccccgtgctcgcgctcatccacccggagaaccccaacgtcgtgtacttcttcctggaggagcacctgttcggtgtcgacgtgcgcgaccgcaaggttgtggagtgcgaggcctacgagctggttgcgccgccgagctgcttcatcgccaaccgcttcactcgcgcttggactctaccacgggcgctctcctcagggatctccaattggtctaatgccatcaacctggctgaaaaggctaaatcccgaccatcccggcgagctgctaagaaaagtagcaggatgatgggatcgcctggagattatcacttggttgttagtaatgaacttaactacttaagttatggagtgggcgtgggacactgggaaatgacaagtactctcatgctggcatgtttttggctatcgcggtgtacggtggccaaatgtcgatggaacattgttagttttatttag

SEQ ID NO: 14903 - DNA, 416 bp, Oryza sativa
  Clone ID: PAT_MRT4530_20797C.1
cggattcgtttgctgagcagtattgaggaagcaattattgggataacttaatatccaagagcggctcctgatgcgcaggttatcttcatgggtgtagagccagaatctgcaaataagtaaacagtgtgattctgatttcctagccatgctgttccatacattcatccaacttctaagatgttctttactacacttgacttaaaaattccttccggttcagtcttttatggacaccctatgtgtttttagtattcttagctgttaatattgtctatagcgtaaattgtattatacatacctaaacttgcttgagtgcgaaattactccctgaacttataagcatttttttactgcacatccaataactcttttttttctcagtgatatgaatggtttactggatttattccgttgag

SEQ ID NO: 14904 - DNA, 210 bp, Oryza sativa
  Clone ID: PAT_MRT4530_20798C.1
cgtaactgcacccggaaaaatgaataggccgtggtgttgattaaagaggaattcacagccatgtcatgaccactctgtatccacacgtgttggattacctacacagccatacaggcaaggatggcatgcacttgcctaatgcatgcacttatgccctggttttcacaggataggttcacaagctgactgctgatctatatcctgggacag

SEQ ID NO: 14905 - DNA, 3984 bp, Oryza sativa
  Clone ID: PAT_MRT4530_20799C.1
ttcaagtctatttatgaacctctatccatggttggcaaaaaagttgcataaccgtcgtctcaagcttacggcatgcaaccttcaagagctctctatcttcatcacacttttgcagctgtgcccaaaatcggagccaatatgttaccctgaaaattgcctttccaactacttagtttttctcaattctttgctcaatgactttccaatctttattactcaattttttttgtgaaaaaaaaaattcaggccagataacttttcaaacacagataaaatcaatttcaaattctttgcttgttgtaagtcatgctccaaaaaaaatgatagtatcatctgcatactacaaaatagacaaaccatcatccaccaagtgagggattaccccctcaagagtcccagcttctttagccctcttgattaataaagcaagcatatccgctactatattaaagaggattggagataaatgatcaccttgcctaagacctttataagtttgaaaattattaccaatttggtcatttactttaacaccaacatgacccccttgaatgaaagaaactatccactcacaccatttaggagagaagcccttcatccttaatgtctgttgtacaaaagaccatttaacgttatcataagctttttcaaaatcaatcttaaaaattacagcacttttgtttttatgatgcaattcatacatagtttcatgtagaataacaaccccttccataatgtttctaccgggtaaaagaacagtttgagtaggactaatcatcttctgagcaacacccattattctatttgtagcaaccttagtaaatattttaaaactaacattaagtaagaatataggcctatattgttgaattttcatggcctcaacgcacttaggcaaaagaataatatagtaccaaagttaagggagaataaaggcaaagtaccattatgaaaatctctgaaaatatccaatatatcatccttaatgacatcccaaaagacctgataaaactcagcagaaaatccatcaggacccggagctttattatgttccatttgaaaaatagcctctttaatttcctttccagtgaattcttgtattaaagcttcattctccaattgagatacttgtgggatgtccacaaaattattttcatcaaactagagatcagaatcatcaggaggaccaaagaggcctttataataagtggtaatatgcgattttagatttgcatcaccatttattatttgatcgccatccatatcaacaaaaccctcacgtaaaagccacccaagttcaaacttaaaacaaggttgagcattactttgagaagatgaatttgtgtttaaaagtaaaggagtgtgattagaaatatctctgttaagtgcaaccaccgaggctaaaggaaaattatgttcccactctgtcgacattaagactctatcaagcttctcataagttgggtttgctaaattatttgcccaagtaaaatttcttccagacatctgcaactccataaggcacaacccatcaataatagcattaaaaagaaagggccatcggtcatcaaaattgctattacttttttcattagggctgcgtaaaatattaaaatcaccaccaataagaattggtaaggtttcacgagagcacatattgactaattcagcaagaaacttatccttattctcgttttgagccagcccataaaccaaaactaaggcccatttaaacttgtcagctctattacataaatgaaatttaacataaaaatcaccctcatcaattaaaccaacatcaaaattaagtaaattgatgcctaacaacaaaccaccagacctaccactaggagccttacaatgccacaagaaatctttaccagcacaaaggtttttaagtgtgcccggagcaaaatctttcttaacagtctcagacaaagcaataaaatccaactgatgttcttttttcccctttttcttggagttagaaggagaatccctagaatctaaggtggtctcctccataatttcactacataaatgttgcagtaagaaattatcatcaaaatgatcatctactaaatcaccatcaacattattggaaaaacctttagtagttgacaaccgtacatgatcacttaatctattttcctccatactccttaaatcattaataacatcatctttaacatgcagattttccaaattcttgtcagccttcgacttctcagctctttgaagaacaagttgatcactatcacttgctcttcttttactcctcctggatggagagactgctgcctcaggaatagcagagagttttgcaaccagactttcctgagattggactctctcaactccaattacatcatcatgtaaaccatcaaactcttcatcagacagattcaagccaccagaatcagcagtcaagcccacctgaatagaatgtaaagaaggaccacccttctcatagaacatacttccagaacccaacttagattgacttgagcccccagggcctggctccttccccgaatcacccttctcattaccatcatttttcttctcaaagtcaccatcaccaatattgtccatatccattggtataggctcctcaggaccattctcaggttccactctaaaggccaactcatacaaataatccccaataaccacatcaaccacctcaggaatcaaagatggatcaaggactaacacttgtaaccgggcaatgtcataccttctagtaaacaccatatcaacagttttagttataccaagaatggaaccaacggcccaaataattaagtactcccttaactctgaagggatacccttacactgcacccacaccttcgggatcacatatttaacctcattacctacccctctctccacaatctgcatctcagcatcaccaaccttagtatgcactttaccccattccaccatgcgttttaattcagcggcagaaggaaaaatagtgcgaaaagaaccattcccattatcatgtactacccacctccatcctccagggattaatctttctaactcagaaatcacagcattcaccgtcatctgtcctttagacaccttaatcaaagctgctctaggctcatgtttaattttctgaccagctgaaagaggaatatggaagaaacccaaaccatctcccgaacctttcacctcgacctttgcttttcccttgctctcatcaatcggacaaaacaccagagcttgctgatcaacaccacgaacaccctctgacccatgagggaccaatgcacctgttgcagcacttgctacacccatccatccaatcatatttgcagctccagacaagtcagtgaagagctcccccggccagtatcccaccaattcctctccaaatagcaacacccagacatcccatatcttaaaaattgaaattattattaagtatttttttccatcgattgtggaaattggcttgagtactgctccagggactattctattgctaagctgaataaagcccgcgcaacgaagattagtacatgacttgtctttattagtccatgcaatctcgaaatgagcgtgattgtcaccgtacatatctggatcaacataccagcctgcacctattcgactttgtccgttttgtattacaacaacagccccagtatatcttggtggtcttcctgtacaaagatatggttcccatactgaaatggatgactgtgaaccataaaaggtagatggttctgtttcaaccgctgccatcgtcccatagggacactcaattttgcacatatcaatactggagatataaattttagatcctttagcatcattcgtactataagggaaagaacctggctgcatctgaaacatcttgacgactgaatggtttacaaactcttcctttcttggctctgcactgaatgttagtgatagcaaagaaagtagtataaatatttttgcagttggtcctctatatcccat

SEQ ID NO: 14906 - DNA, 504 bp, Oryza sativa
  Clone ID: PAT_MRT4530_2079C.1
atggccaactgggctacccggcacaacacggcccaagcccagtcgtgcctgggccgaggtaattagtcaggccggcacggcccgatcgacacgccgggccgtgccgtgccagcccacgggcggcatacacagcgcaagcacggcccaatacgactcgggtcgtgccgggccagctcgaaggcacgatcccccatcgtgcttttccacagaaaaagtctatttttcattcctcaactctgtgggctatcaaaaaaactatcccacccaaggggtgctaattggagctattttgggtggggcccacagcttttatctctcccacagtcgcacgggatcagaaaaaaggtcgcgcatcctctctctccgcacgaccgcgcgcgcaggcgcgtagcattttcgccgccacctccttcactcctcgccgccgcctcctccactcctcgccggcccccaccagcgccaccgcctccccccaccagcgccgccgccgccccacctccagtg

SEQ ID NO: 14907 - DNA, 417 bp, Oryza sativa
  Clone ID: PAT_MRT4530_207C.1
atggcgccaggagtcaacatcttcgctggagtaccggacgcgcacccgtacacgccgttcgacttcatgtcggggacctcgatggccacgccccacgtgagcgggctcgtggcgctcttcaggactcttcacccccactggtcgcccgccgcgatccggtcggcgttcgtgacaaccgccgacgtcgtggacaacacaggaaaacccatccaagatgaaaaccgagctgcggccgctggcgcgtacagcatcagggccgggcacgttcttgttcgtccaagatacgaagctaaggttatgcaaagaatagagatgattcaccgctggcaagagggatctagcaccatctctgatctcgccgattacggattcaaggaggaatactatcctgtcgtcgactacgagttggttatctag

SEQ ID NO: 14908 - DNA, 2667 bp, Oryza sativa
  Clone ID: PAT_MRT4530_20800C.1
atggagaagaacggccgtcaggggtatggggctgcagggcaaggttttgctgcgaggggttttcatccaggtttcggtgggagaggtcgtagccgtggaaggggcaggtttggtcgcggtggccgccatgacttcgcccaaggtggaagatggtatgggattcctggaggtggtcatggcaatgggttcgccgtcgtttgggactgctggccggcctggagggagtgcggggcaggttgtcttccttcttcgttcctgccgtccgggagtgatgtgtctactgtgatgccgccgactggaggaggtgttccacctgcgtttatgccgccggctggaggctttgtgccggctactgctgcaccttttgctgccgtgctgggtggtggtggtgttggtgcaccttttggtgcggttccatctaccgccagtgctccagttagcaaggcaggaggtgaggaagtgttggtaggaggtgatgtgacaaaaggtggagcttctaatgctgctttgtctgctgcaatgacgtcgaggttgggtgtttcctctgcttcccaatctgctgctgttgttgggaccggtcctgctggtgcgggtgcaggaggtgcattggtccctcatgggtcagagggtgttcatggtgttgatcagcaagctctggtgttttgtccagttgatgagagcaagggaaaagcaaaggtcgaggtgaaaggttcgggagatggtttgggtttcttccatattcctctttcagctggtcagaaaattaaacatgagcctagagcagctttgattaaggtgtctaaaggacagatgacggtgaatgctgtgatttctgagttagaaagattaatccctagaggatggaggtgggtagtacatgataatggggatggttcttttcgcactatttttccttttgccgctgaattaaaacgcatggtggaatggggtaaagtgcatactaaggttggtgatgctgagatgcagattgtggagagaggggtaggtaatgaggttaaatatgtgatcccgaatgtgtgggttcagtgtaagggtatcccttcagagttaagggagtacttaattatttgggccgttggttccattcttggtataactaaagctgttgatatggtgtttactagaaggtatgacattgcccggttacaagtgttagtccttgatccatctttgattcctaaggtggttgatgtggttattggggattacttgtatgagttgacctttagagtggaacctgagaatggtcctgaggagcctataccaatggatatggacaatattggtgatggtgacttcgagaagaaaaatgatggtaatgagaagggtgattcggggaaggagccgggccctgggggctcaagtcaatctaagttgggttctggaagtatgttctgtgagaagggtggtccttctttacattctattcaggtgggcttgactgctgattctggtggcttgaatctgtctgatgaagagtttgatggtttacatgatgatgtaattggagttgagagagtccaatctcaggaaagtctggttgcaaaactctctgctattcctgaggcagcagtctctccatccaggaggagtaaaataagagcaagtgatagtgatcaacttgttcttcaaagagctgagaagttgaaggctgacaagaatttggaaaatctgcagatttccgcttctattaaaaaccttggtatcattacttctagtccaaatgtggtgttagatgatgttattaatgatttaaggagtatggaggaaaatagattaagtgatcatgtacggttgtcaactactaaaggtttttccaataatgttgatggtgatttagtagatgatcattttgatgataatttcttactgcaacatttatgtagtgaaattatggaggagaccaccttagattctagggattccccttctaactccaagaaaaaggggaaaaaaggtttatttggtcctcctgaagactcttctctgcaatttgatgagaatagaatagtggatgtcccgcaagtctctcagttggagaatgaagctttaacgcaacctttctctgaaatggagattaaggaggctgtttttcagatggagcataataaagcaccggggccggatggttttccggcagagttttaccaagttttttggaatgttattaaaaatgacttgttggagctttttaatgatttccataggggtactctacctttgttttctcttaattttggcacaattattctgctgcctaagtgtgttgacgctattaagattcaacaatatagacctatatgtttactaaatatacccaaaggggttcttcaaaagattgattattatagatcacggttcttttggcaaggtgatgatcataagaaaaagtacagactcactagatgggatattatttgccaacctaaggatcagggaggccttgggattcataatttggaattacaaaataaatgtcttttgagtaagtggttgtacaagctaataaatgaggaaagggtttggcagaacttattgaaaaggaaatatctttataacaagtctataacccaagtggacaagaaacaaggtaattttcagggcaacgcactggctccggttttgggcacagctacaaaggtgtga

SEQ ID NO: 14909 - DNA, 3207 bp, Oryza sativa
  Clone ID: PAT_MRT4530_20801C.1
atggcccagatactctttagttctttaaaaactttttggcaatgtgcaactacttccgaacatccactacaccatgtaccaaaattggtgacaaacatcgtcaaaaaaattcatttttcgttcattagaaacttggaacaacaaggggaggtaaacaaaggaaaggcaaaggttgaggtcaaaggatcaggcaaaccttattgttatagatgttatactaaagggcatacaatgcaggaatgttcttctaggttttactatgagatttgtgaaagtgaggatcatgttgcttctcgttgcccaatttttaggtcatctgttaaacctgttgctcagttatgtggttatgctggagatggtttgggtttcttccatatacctctttcagctggaatgagggttaagcatgagcctaaagcggctatggttaaggtcactaaaggacagatgtctgtaagttctattatttctgagttggagaggttcatacctgctgaattaagtcgtatggtcgaatggggcaaggtacacactaaagttggtgaggctgaaatggagattgtggaaaggggagttgggaatgagctaaatctgatacctgaatctgatggcttgactgtttctgatgaagaatttgatggtttagatgaggagactataatggttgacaaggcccagattcaggaaagtcttgtggcaaagctctctgttatccctgaggcagtaatctctccatcaaggaagaaaaataataggataagcgaatatgcttgttcttctattaatcaagtttgtacccctaatgttgatactgagtcattagatgaccagttggaggataattttttactacaacatttatgtagtgaaattatggaagagatcatggattttagtgaggactcattgtctgagacggttaagaaagaatttactccagctgcacttaaaaatctttgtgctggtaaggagtttttgtggcattgtaaacctcccagaggtgatttttatattaagttccatttatgtaacaaagttgataagttcaagtgggctttagttttagtttacggaccggcacaaaatgaacttaaggatcagtttcttgctgaattagttaatttgtgcagtcatgaatccctaccaattctcattgatggtgattttaatattttacgtagccctgatgaaaaaaataatgacagttacgatgatagatggccctttctttttaatgctattattgatggactgtgtcttagggagttgcaaatgtcaggtaatgcacaacatagttttaaattcgaacttggttggttattacgtgatggctttgtagatatggaaattgattttagatggttttgtaggaatagattatctactcttatgagagaagaagaaattaagtggtatcaaagggctaaaactaaggatattttggagggtgattcaaatacaaagtattttcatttggttgctaacggcaaacatagaaaaactagaatttttcaacttcaagacggggatcaattgataaatggtgatgcaaatctaaaatcgcatattaccacttattataaagacctctttggtcctcctgatgattctgatctccagtttgatgaaaataattttgtggacatcccacaagtatctcaattagagaatgaagctttaatacaagaattcactgaaaaggaaattaaagaggctattttccaaatggaacataataaagctccgggtcctgatggatttcctgctgagttttatcaggtcttttgggatgtcattaaggatgatatgttggatcttttcagagattttcataatggtactttgcctttattctcccttaactttggtactattattcttttgcctaagtgtgctgaggccatgaaaattcaacaatataggcctatctgcttacttaatgttagttttaagatctttaccaaagttgctacgaatagaataatgagtgttgctcaaaaggtgattagccctactcaaactgcttttatacctgggaaaaatattatggaaggtgttgttattttgcatgaaactatgtatgaattacatcgcaaaaataaaagtgatgtgatttttaagatcgattttgaaaaagcctatgacaaggttaaatggtcttttgtacaacagacgctcggaatgaaaggtttctctcctaaatggtgtgagtggataacttcttttattcaagggggacatgttggtattagagtaaatgatcagaccggtaataattttcaaacttacaaaggtctaaggcaagaagatcatttatctctaattctttttaatatagtagcagatatgcttactttattaattaagagggctaaagatgctagttcattgaatggggtagtccctcacctagtggatgatggtttatctattttacagtatgcagatggtaccatcatttttgtggaacatgacttacaacaagcgaagaatcttaaattgattttatctgtgtttgaaaagttgtctggcttgaaaataaattttcataagagtgaattattttgttttggtcaggcaaaggaatattatgatgagtattctaacatctttggttgtaagtttgatcaggaaggtttaggggttcataacttggaaatacaaaacaagtgtctcttgagtaagtggttgtttaagttgattaacgaggaaagtgtatggcaaaatctattgaagagaaagtatctctacaatcagtctataacccaagtgaataagaaacagggcggttctcatttttggtcaggtctcatgaaagtcaaagataccttcttagatatgggttcttggattgtaaataatgagaaacaaataaggttctgggaagataaatggctaggaaacctggcttttaaagacaaatatccatctttatactctattgtccgaaggaaaagttctactattgctaatgttatgagatctgttccactcaatgtttcctttaggagatcattagttggtcagaatcttgcatattggcatgaattgtgtgcttctattgtacatattcaattgaatcaatcctctgatagctttagatggaattatcatcagaatggaatattttctattaggtcgatgtatctagctttaattaataatgcggctccccgagcgcgacggaggcgagcgcgacgcgggcct

SEQ ID NO: 14910 - DNA, 513 bp, Oryza sativa
  unsure (1)..(513): unsure at all n locations
  Clone ID: PAT_MRT4530_20802C.1
gccatnccaagggggctcaagtccaccnccgcggctcccccgtcagccgccgcctccaccaactcgggcttcggcaacgtcagcaaatgagcgagaaagggatcaaagttgcattgcagggtgttggccaattgaagggcatcacagaaagttccgaagacccttatcnttacctggccaccaactccaccggttgggaagggatctttttgaaagccaggatcgnagttaccttgctttccgaatcccaaggtgggggtgcctttgccctccgaagtttccagccaaagggttgggattccgtcctacccgtgaagaaaccaacaagggtctccccggggttacttaccgaatagggccagggtaattgggaaccaattgttggaaaaacttgcccccaatgtttccggcttgccacccgaaatgcccaccccaagggttgcctccaaagggaaacttccgaaggnaaaggcccaaagaaaagggccctaaccccccgaaatggcccttttt

SEQ ID NO: 14911 - DNA, 2187 bp, Oryza sativa
  Clone ID: PAT_MRT4530_20803C.1
atggcagcgaaggctcgtgcaaggtcgccggactttgcacggcaattctggcctgtgctgtgccatgccttcagcgaatgcagcctgatcataatgctctttgtgaccgccgtggtgtcattcacggccacaaggtttgcacgcatctggagcctacgaccaccgtgcatcctgtgctcaaggttggatcgcctcctgcatggaaacacctggttctctgaagatctgatctgtgctgcacacaagttggaaatctcgcaattggagtattgccagagtcacaacaagctcgcacactctgatgatctgtgtgaaaggtgcctactttcatgtgctggtttggatgagacgtttaagaagacacggcatacacacaagctacctgagcttgcaaatggcatagttccagatgatgtgagcacagtgaaggagagaagcatagacatgactagtgtagggcattcttcagatgaaggttctgaggacttgtcttatggaggctacagtaagctgaatgtccgccatgattcagagtctgagaaccgcatctcggatgatgatgaagatgaagatggtaattcaatgattcacaaagctacgcagagaagcagagacttcttatttcatgattcgcaactacaacctatgatcagtgacaccaacagcttgtccatgcatccttctgagaatgttgttcttgcagagccgatgaataccgctcctgtgccagtgagtactgcagcaaaaactgacaatgtggccactggcaccaaccttgttagtgcagcgaaatcttcagagcatattgcgcaaggttcaagggaaattagcttgagcaatgtcaatgtaagtggaaacaatcatgacgtgcaaccgaagattgtgcctgaacaagtttgcgcagagcttccgaaagagaaaacttttctggttggtattgaggaagttgacgattcagcgggtatttcaggaagccctgacgaggaagttgctaagggttttgttgcttctgcaaatgcaggaatgagttcagttttagatgcctgtatcaaccgcaaaaacagtatgaagagtgcttctcgtcgtagaagcaaccttcaatctcctcgatggtctgaaataatctctgctaaggataacagttcaagaactaaccaagaagtcaagacattcctgtcccagatgtcttctgcgcgaggctttgatggtccttggagtgaggtggccgctagtcctagaatcacacagattgatgataaacaatatgatgccactgggagcagacaatttcttgagactaactactcaaatatggaaccatttgatgtccatgctactagtgaagatgaaggtgatacctcactcgaaggcctgaagcagaaggttgagcttggcaagaaaaaaatgagtatcctttataaggagtttgaggcagagcggagtgcttcagcggtggctgcgagtgaagcaatggctatgatcaatagattgcaggaagaaaaggcttcaatgcacatggaggcacttcagtacctcaggatgatggaagagcaggctgatcatgaccaagaagcaattgaaaggctaaatgacttgcttacagaaagggagaaagaaatgcttgacctggaagctgaacttgacaattatcggaggcttcatgaaccatttggttgcaagtttgattttactgatggagatatggcatctggagtcttggatagctcagatttcatgagggataccatgtttgattttgaggatgaaaaggcaaatattttgaaatccttgagcaaattggaggaaacactgggcatgtcttccacagataggcataattttggtggcacatatgatagtctacagaacatgtcagtattgcatccggaacactggagcggtgagccggtttcttctcaacaaattgatgaaaatcaaagtgttgattccggctcatgttctcacctagatgatggcagaatcagttctatgacgagcgttaaacatgagatttcacttctaaatactagattcacggcacttgaaacagatcaaaagtttctcaaacagatattaagctctctaaaatgtagtgatgatggcgtacaatgtgttcaagagataactgcacatttgagagagttgcgaagaatcatgactgagcaaagagagagggcagttttatga

SEQ ID NO: 14912 - DNA, 1659 bp, Oryza sativa
  Clone ID: PAT_MRT4530_20804C.1
atgactaggctcaccgagaagggtgttccttttgtatgggataatgattgcgaggctagtttccagaagttgaaggatagattggtgaatgctcctattctagttttgaccgagagtggtaaacgattcatagtctatactgatgcctcacgtatttgcctggggtgtgtgctgatgcaggatggcaaggtaattgcgtatgcttctaggcagttgaagaaacatgagaggaattatccgacccatgacttggagctagcagcggtggtttttgctttgaagatttggagacattatttgtatggggaatcatgtgatgtcttcacggatcataagagcctcaagtacatattcacgcaaaaggatctgaatttgaggcagcggagggaggctcatcgtactccttacactattcatcctggagagaccaagatgtatacagatcttaagcagagtttctggtggaaaaggatgaaggtagacattgctaagtatgtgtcagcttgtggagtttgccagcaagttaaggctgaacataagaggcctgcaggtttattatggccattagagatcccagagtggaaatgggagcatatcactatggactttgtaattgggttaccacgttctcctcgagggaaagatgctatatgggttgtcgtggacaggcttactaagtccgcacacttcattccagtaaggacgactaatacagctcatgatttggctcccttgtatatcaaggaagtggtgaggttgcatggtgtgcctaagtcgattgtgtccgatcgagactcaaaatttgtgtctatgttgtggcagagcttacaaagggcaatgggcaccaagatttcacttagtacagctttccatcctcaaacagatgggcagtcagagcggacgattcagaccttggaggatatgctccgtgcttgtgtcctttcatggaagggaaattgggaggatcatctcgctttagtggagttcgcttataataacagttatcaggctagcataaagatggccccgtttgaggccttgtatggccggaagtgtgtttcaccgttgtgttgggaatctctaggtgagagggctttgcttggacctgagatagttgagcaaacatcgaagaaggtacaggaaattggacaaaatatgttggctgcacagagtaggcaaaagagctatgctgacacaagaaggcgagacttggagtttgcagtaggtgatcaggttctacttagggtctcaccgaccaaaggaattgtgaggtttggtactacagggaagcttagcccgaggtacattggtccatttgttatcactgcccgagttggcagtttggcttatcgccttcagttaccggaatctatgaatggggtacatgatgtttttcatgtatccatgttgaggaagtatctacgggatcctgaacacaagattgacctagaaccaattatggttgagcaagatttgactatcgaatgtcgaccagtgcgtatctttgactggtcagagcgagttatgagaaggaggactataaaatatgtgaaggttctatggaccaatcagtcagagcgagaagcaacatgggagcttgaggaggaaatgaagaagaaatacccggagctcttcgtagatggtatgtttatggtatag

SEQ ID NO: 14913 - DNA, 1571 bp, Oryza sativa
  Clone ID: PAT_MRT4530_20805C.1
gcagtgaccacaacctgacagatttaattaggagatgacacgcacaattacagctgaacacaacagtaacaaaatcacacctttggcaagcacagcacaaacccccagtgtgtcatctgattctgatccctagaaagatttgcacacgaaaagggacggacaagagttccaaaagcttaggagtagcttcttctaccgtgggcaatgtcagtagcaagttgagttgatcatgccatggcggcggcggcgttgtcggtggcgagcgaccagcagtaggtggtggtggcggcggtgagcacggtgctcgtcgacccgcactcgctgtcgtggtccggcagcctcgacccccacgggcacgacgccggcgcgctcgcctgcgacgggcaccgctgcacgcgcgccatcatggcggcgccgcacttgttgggtggcgccgacgccgcctgcgcctccagcgacgccctgcgccgggcgctcgcctgcctctcccaccgcaccgacgacgcctcgctggcggacgacgacaccgacgcgcgctgccgcggcgcgctctgcgaccgcgccttggcgcgcgacgactccgtgttcgccatgtagttggggaagaagagcgggtggtcgccgttgccgtggtgcgggtgatgcggcttgcacggcgcgtcggaggcgtggtggtggtgccacgggctgttccgcgccgtggagaaggagaagtcgtcgtaccggccgctgtacgtccgcgcgctggcgtccgtcagcgccgacggcgtcggcgacaccttctggtacagctccaccttggacggcgtgcggcacagcggcgtcgcgtagcagctgctccgccgggacgacgtcctcggcgtgcagtgcgcctcgccgctgccgccgccgccgccaaatccggtgtccacctccacgatcttcacgttctcctccgcctcctgttgctgctgctgatgacggaagcgggggtggtgcggcgagcggcgggtgggcatcatcctcggggtgtggaggagaggcttctccttgtcgtcgtcgaggaggcggaggcgcgcggcgcgcgcccggtgctgggcggcgacgagcgcctgcatgcagcggagcgtgttgctcgcctgccgccgcacgaggtggccgcgcaccagcgcctgcagcttcacgagccccctcagcgcgcacagcgccttcctcgccaggtaggacctgaagacgcactggatcttgatcgccgccgcctcctcaatgccgacgacgacgacgccccgcctcgacgacccggcgagccggactacggccgccgccgcctgcttggccgccaccgccgcctccgccgccgccgccgtggctatggccaccgcgacggcgtgctggtcggggtccacccgcggctccaagaaaccaccaccaccatccttcaccgccggcctccggaagctccaccgcctcttctccttcgcccccggcgtcgtcaccaccgccaccgcctgctccttctccggcgccggcgccctcgccctgtccttcttccccggcaagaagcttcgcagccacctacccgccctgcccat

SEQ ID NO: 14914 - DNA, 565 bp, Oryza sativa
  Clone ID: PAT_MRT4530_20806C.1
ggcattttcaggaggcaagagcattgctaggaaaggtagaaaaccaacatggacacgctgaagaagcactacgagtgttcagtggaataaatatgcctgcattaattcctaaggtgaaaatgtctatcattagaaaagtggacctgcaaaaggcccagttacattccagctctccttcattgccttttcatgctgctattctgctactggagattatatatttcaaagctacagcacttcgcaatcttggaaaaatcgaagaagctacaaaagagtgcagtagcatattggatgttgtggaatctgcactacctgagggtttgccagacatctttggtgatgactgcaacctgaaaccaacactatgcagagctgttgaattgcttccagagctatataaattagggggttttcattttgaagctatctcttcatacaggagggctctttggagtaactggaatcttgatgaaaagacaattggtaggatacaaaaggaatttgcggttcttctcctatatagtggctgtgaaacttgctctccgaatcttctatctcagttgga

SEQ ID NO: 14915 - DNA, 199 bp, Oryza sativa
  Clone ID: PAT_MRT4530_20807C.1
tctctcgctttcgtcgttgcagccgatactggagattggatcggaagcttctagaagcgggcgtgggcgatggcgaatcgcgcgaggtcctcctcctacgccgccgcggcggtcgtgctggcgctcgcgctggcgtccgtcgtcgctgtctgcggcgaggtcttctttcaggagatggttcgtatgatggatgggaaag

SEQ ID NO: 14916 - DNA, 321 bp, Oryza sativa
  Clone ID: PAT_MRT4530_20808C.1
atgggcactgtagcccgtctgacaaagtattgggaaaaccagaagaggggttgtcaagattatgaaacaaagggagttcaacaggttggtccatggagtgatgattcaaaatctcaaagccattttgatggacttccaggatttgaacctgcgatagatctcccacccgtcggactcaacggcacaacggaccttgaccgtgcccagcccattggctggtgggcccctgtcaccctgcgccatataaaacagagggtggagaccggggcggcacaagacacgaggttcgctgccgccgccaactccacccacaaaccctaa

SEQ ID NO: 14917 - DNA, 272 bp, Oryza sativa
  unsure (1)..(272): unsure at all n locations
  Clone ID: PAT_MRT4530_20809C.1
cgggtggttannnagtgagcttcagtctaattcctgcagccttcctcatcgtctacgtccaggcacttaccgtcagcgtccgcgtccaggcgcagctccctggcatcctcgtcctcgaggcactcaccgtcggtgtccccgtccaggcacagctccccggcgtcctcgtcctcgaggtcatccctggctccgccgccaccggccggccgtgtcggaagaagacgaggggagtgaatgacaaacacatgtggacctacatgtcattgagatag

SEQ ID NO: 14918 - DNA, 382 bp, Oryza sativa
  unsure (1)..(382): unsure at all n locations
  Clone ID: PAT_MRT4530_2080C.1
cgatgccgccacccctcgcagtgactcctccccgaccccgacgccgacgncgacgccgtatcccccgccaccaacgccaccgncgtcgacggctactcctntggcagtntggaggactgctgcttccctgtntccatcagacagaggaataccggacagttgtttttctttctnttcttctgttagggtgggntcatttcagacatacccaatttgttaggttgaccacgtccccattttgatccgcgacgtnacagacanttctcttgtaatgtatatgtgcattgtttatcagaaacctgtcgaacgggaggcaccatcatacttgctagatcttttctctttagagcattngcaggggcctattancttcataatcttg

SEQ ID NO: 14919 - DNA, 206 bp, Oryza sativa
  Clone ID: PAT_MRT4530_20810C.1
catataaagcagggatcatatgctgagtcagtaacccctgtttactggcagcagcagcagtgtatgcttggcgaggacatcgccaagagcagatttggtcaacgtgtagtacttctccgcctcttcggggctcttgatcttggctgcatggtcaagctgcacaaatcacaaagggggattcttgtcaacaactcagctgagcaaca

SEQ ID NO: 14920 - DNA, 552 bp, Oryza sativa
  Clone ID: PAT_MRT4530_20811C.1
aaggatcggcggcggcgggagacactgaggggtgggcgggcggacggcggtgcacgggggcgggcggcggcgcgcgtcgcggcgatggccgagcggaggcggctgcaagcacggcgcacagggcgggcggcggacggtggcgtcgcggcaacggctgagcggaggcgactgtggcggcggctgccggcgctactgggtgagtggcggcgggcacggctgggcgagcggaggtggcagcagcgacgggctcgattgggcgccaacgtcgcctcgcgtcgcaccatgcccgtggtgcccgtggtgcgcgtggagctgaagctgctcccagtggtgcgtgggggcgacggcgcccgccgcccgcagtggatttccggccgccagccgccggacgcggcccaactctccaccacgcccgccgtgcctagcactggccaccaactcgcgggccacatccgcccccgcgccgtggccgctagcgcgcgcgccccgggccaggtggccgcctcgccggctcgccgcgaacacctggcgcccatccacgcatgcatccat

SEQ ID NO: 14921 - DNA, 354 bp, Oryza sativa
  Clone ID: PAT_MRT4530_20812C.1
attttagaaggcaagcatgaatctatgcagacggggacacaggagaataggaggccgggcggcgaggacgaggtggacctccacgactatctcttgtattggtctcctctggatcgccatgcttccttacatccatgggtccccgccccctcaccattgttgtcgtcgtctggatgcaggcgaggatctgcaggaacagaggaggaagcaacatgcgtagctgttaatgctgcagagcggatgatgcggccacgacgacgaaccgcgacgatgcttacgccccgatccctgctccaagcatcatctacaagcgccccaaggcggaccccccagcccctaggagttctgccagca

SEQ ID NO: 14922 - DNA, 1170 bp, Oryza sativa
  Clone ID: PAT_MRT4530_20813C.1
atggcgctcagcacggccttcagtgcgctcccgacctcgccggccgacgtgcgggtcgtcaccgccgacgggagcggcatccgcgcgcactcgtctgttcttgcctcggcgtcgccggtgctggagcggatgatcgagcaggcgccgcgcggcggcgtcgtcccgatcgccggcgcctccaccggcgccgtcgtcgtcttcctccgcttcctctacgccgcatccgccaggtttgtactagtaggcaaccgcacgtacgcgcgcgatcacgcgaaagggaagttaacatgtgcggcggtgtggtggcgcgcaggggggcgccgcccgcaggcggcggcggcggagtgggaggaggcggcgctggcggagcacggggcggcgctgatggcgctggcgcacgcgtaccgtgtggcgggcccgctgaagcggcgcgcggaggatgcggtggcggcgcgggtggcggccgagggcgcggtggacgcgatgaagctggcggcgctctgcgacgcgccgcgcctgtacctgtggtgcgcgcggctcgccggcagggagctcgcggcggtccgggagtccgagggctggcgcttcgccgcgcgccacgacgccgcgctccgggccgacctgctccagctgatccgcgacgccgaccagaggaaggagaggtgggggagggagcggggctcccagggcgtgtacctgcagctcagcgacgccatggccgccctggagcgcgtcttcgcccgcgccgcccacggatcgccaccgccgctgccgccgccgcgcaccggccagtgctgcaggatggcctccccctgcgcgcaccggcggggcctcctgcagctcgcgaggcacttcttcgccggctgcggcaggagagtcgccggaggctgcacgccctgccggcgcttcttcctgctcctccggctacactcctccgtctgcgacaagtccgacgacgattcttgcggagttcccctttgcagcaacttcaagactaacatggaaaaagggaaagtggacaagacatggaagctccttgtgaagaaggtgatgagagctagggtgatgtctgcatgggccaagaggccggtgccagcgccggagatagtgcagaagtcatgggcaaagtacaacagcagcagtaggagtagagcagccagattcagatag

SEQ ID NO: 14923 - DNA, 435 bp, Oryza sativa
  Clone ID: PAT_MRT4530_20814C.1
ttggtttttttaagaaagcaggcgtatttcacattgtaagaagaaagatatgatcttccaaagaagcagaagaacatacaagaggatgagctcctactatacttacaaggaggcaatagatgatcagagacgtttttcgttattccttaggaaaagtaaaaaaaaatgaaaaaaaaagttttgacttgaaagggctcaatgctaattgagctcattcccaggccaaatacttgtctaatctctatagagtagtataggtttacaagagtagtcatcaccagaaaataacttttggtgggaaactctcttgtactaaaagttactaaccattttgcgttcacactgcacgctatgcaagccattcaatccgaccatctctgctccatggttaccccgggaagctcttccggccgccgttgcggcgccgccttcttg

SEQ ID NO: 14924 - DNA, 337 bp, Oryza sativa
  Clone ID: PAT_MRT4530_20815C.1
gaagcaaaacaaacaactgatgactgaagggctaggactcattcaagctagcacaccaacagacatgcagcgtactaaccctgaagcacactgaggcaaccgtcacacagacggatcgttgatatatgaaaagcatgtccaaaacatacacggctactgggccccaccacactgaacaccagccaaactcaggatcatcatgctactaacatgcactttaggaaggacttggcgctcacaaccttgtaggatgcaccgaatgacacctccaccattcgaaggaacagtagatgcgagggtctagctcctcatatacacctataggaagctacaaaca

SEQ ID NO: 14925 - DNA, 256 bp, Oryza sativa
  Clone ID: PAT_MRT4530_20816C.1
aattattggatccgcaacaactcagatgtaaatgaaacattgctgaatttccacttaagttaacaatacaaaatacactcgcatgactgccttaaaaaccaccatatactttcaaagttaaatgggtattaatgatctttgccccaaagactgactaaacctaaccacagaacggggattcactggaccaatattattcaaaaacagaagggcttatgatggcattccttcttcaaaaatggaagggcaactttgc

SEQ ID NO: 14926 - DNA, 1764 bp, Oryza sativa
  unsure (1)..(1764): unsure at all n locations
  Clone ID: PAT_MRT4530_20817C.1
atggactgcatcgacgagatgccagacctccgatcttggaatcctgacgatgaggaggaggaggaggagaaggaggagatgcccgccgtcgtcgattactccccgcaccaccgccgccggccgtccaccttcacccgctgcggcgtcatattcgatacggacctcatcgtccgcaagcccgtggaaggcgccgccaccggtggccgggccagccaccggacgagcacggggttccccttctccgtgtcgctgaacctcgccgtgccgccggcgctctcctccatctacctgcactgcgcggaggccgtgatgccccccaccctcgagcacgggtatttcggccggtcctcgctcgtcgccgcggacgccacccacctcctccttcttgtcgtcgtccccgtcaagattcaaggcatgtacgaccacgagtacccggaggagtacttcgtctacacggccgacgccctcaggccttcgctggccgacgccctctgtcctacgctgacgcgcctccccagattccccgacaaccgccagcgcttggccggcgacattggcatcttgaaccacgccgccgccgcgggtgatggtttcagcttcgccgttgcatctttgcagacgttcatggagtggcaatctggtgaaggatccgcggccatcctgcacctccaggagatggccaagctctccgtgctccaatgttcagttggcagtgatctagatgaggacaacaccaagaacaacgacagcagatgggttgtcaagaacctggccatgccttttgactcgcaaggggattttgggccgcgccaatggaagagcaacatcgccttcgcctatgccggcaaattatattgggctgactacgacgttggccttatctactgtgatgtcctggaatcttcacccaagctccagttgatcaagttccctgttccggtgagaaaatttgagcttggtgtcagtggtccagatgacaactgcgggaactctgagtccttcaggacagccggtgtttctaatgggaagatcaagttcgtcgatgttgacaattgccgcgcccaatccttcgccgtcatcatcaggacatggacactgcaaatgccacagatggtatggaagttggatgatgtgctcaatgtcaaacaactgtgggggtcagcatccttcaagaaatacggtttgcatcagtgggtgccagagtatcctgtggtgagcttgctagacccacacattgtgcactttgtgctgcacaaacatatgtaccatgatcaggtctggatgatcgcagttgacatgagggccaagtcagttaaatcatgcaagaactatccaaagggtgagaaggaggatggatacaaggggctgtcgttcaacattgatttcatatgcagcatgctctcgaagtaattacaatcaggtcgtgatggtaggaaatatgttgaatgaagcaggagcatccaccgatgttacgcctgaccgatcgtccgtccattatcaacacaagattggcctcggtttatgatgttgtggactttggcggggtgtttttggtatagacataaggttttgcatatctttgtgttaaaatggagggtcgttagtttcttgtttgtttggagatgtcttaggtttactgctgattgtgccttctgcttcgataatcatcacaaagctaaacatgttcctagttgcttcgttctccagacaacgttttagaagaaaaattgggatgttgtggccgccgatattggaactagcnna

SEQ ID NO: 14927 - DNA, 1972 bp, Oryza sativa
  Clone ID: PAT_MRT4530_20818C.1
ttcacgtttccggaaagccaataattacgggccgcaggtcagccaaatcagttactcctccttgcatgtctcgtgaaccagttaggcggttaacttgtatatcaaacagacgccgtgcgcgcgagcagttcgtcgtcgtcttcgctcgatcgtagtagttgccggccggcatcggcatggatggggagccgaggacgacgcggcggcggggagagagagacggagacggaggaggatgagacgtggcagctgagggtgggcgacgacttcaccgtcccggagcggttccaccgcaagccccccttcttctccaggatcgtcaccgccggctcccacggaaagcatcggaaaattgcaaaatactacaagaagcaggaaaatctcctgaaggatttcagcgagatggaaaccaggaatgagattcgttccttagatcagaatgctccaactgaggaaccatggcaccaagtgttcgaccacaggaaggagctgtggatgatcggcagcatgtcctcagtcgcagtggtgaagttcttcctgatgctctactgccggtcgttcaagaacgagatcgtgagagcctacgcgcaggaccatttcttcgacgtgatcaccaactcggtcggcctcgtcagcgcgctcctcgccgtccggtacaaatggtggatggatccggtcggagccatactgatcgcggtgtacacgatcacgacgtgggctcggacggtggtggagaacgtggggacgctgatcggcaggtcggcgccggcggagtacctgacgaagctgacgtacctgatatggaaccaccacgaggagatccggcacatcgacacggtgagggcctacaccttcgggactcactacttcgtggaggtggacatcgtcctccccggcgacatgccgctcagccacgcgcacgacatcggggagtcgctccaggagaagctggagcaactccccgaagtcgagcgcgcctttgtgcacgtcgacttcgagttcacccatcgccccgagcacaaggccgaggtctgaattctcatttatgcaaattttctcttcacttcacttcacttctgtttctgtttggcttgtacaagtcatcgtttccctgtgaaacccacaaggatgtcagttttactaccactgtctctgtagtctttaagtagctgtgggtgaaactgaattcttgttgttcttgttttattgagaagagaaaactgatcgaattcttctagtggattatatacgctgtcttttgctggaaaaaaaaattcacaactcagaaggtggaggcggagccatactgctcttccaacaagcctctaaagacaacggcgtgttcacaactcagaaggtggaggcggagccatactactcttccaataagcctctaaagacaacggcaagttcatcacgtgcaaaggagaaaggtagcaacaaggcaacctatacgatggatggattgagatggaggccggccgtggcgcatgtgagctatccgtcgtcgtcgtcgtcgtcgtcgtcgctgggtccgggcaaatggaccccgggcgaggcggggagccgtacaccagcctcgatgccgccaccgccggcgacgacgccgctgcctcgccgtcgcctcgcgctcatcctgtgcctggcgtgggcgctctggctccacggcggcggcggaggcatcagcctggcagacgcgttccaggcgccgacgccggcgagactctcgtcggggtcgtcgtacgccgtcggctcgcggccggtccccgcggcggcgccgaggtggagctcgtcgtcggcttctgaagctgccgcccggttcgccgacgacaagcggcggattccaagctgccccgatgccctccacaacaggttcctgcagggaaccctaactcaaccacaatcagagccgaatttaggggatggttattctcaccccgtaggtattggcaaagcttctgaaaatagataa

SEQ ID NO: 14928 - DNA, 1125 bp, Oryza sativa
  Clone ID: PAT_MRT4530_20819C.1
tcacctcttccagctccggctccgcgcgagggggtcaacgccgccgacgatccacgtctccttggcgatgtctatggacagcttcaggaaatccggcgccgtccgcatgaacaccagctcgtctctctcctcctctgcgccgtcgtcccccgcggcggcggcggccgcgcttccctcgtcgtgcaccgcctcgccgaccggtggcggtggctcctctgttcgtctccttgctagtcctttcgccggcgccgaccggcaccgcatgagcagcagcgcgttcgccggtggggcggacggcggcgcattggagcactcgtcgtcgtcttctcgctcgggctcctcctcgtcgtcgccggagtcctgctccggtgtctcttcgctgccttccagcaccatgagccacttcgagaacacgctcgaggcggcgctgccgccgcatccggcggacacggcttcgtgctcctccgcgccgcggccgtcgtcgtcgtcgtcgtcttcgtcgtcggtggaggactccaccgcgccgtggagcgacccgaagcagcgcaccttgagccggaggctccggagcgcgccgccgaggaacgggagcgcgtccctcctgatcccgacggcctccagccagctcaccttcttcctctgctcgtgcagccgctcgatctcctccaccacggtgatccagctcctcccaccttctcctcctcctccgccgccgccgccattacctggcttcccggccaccttcctctgcttcttggggcgcgccaccttgatctgcccgacgcacgtcaccttgggcgactgcggctcgtcgtcgacctcgacggcggcctgcttcgccttggacccgcggaacagcgggctgctagtgctaccacgcccacgccctcctcctcctcctccagacctcgccgccgggagctgctgctgctgctgccgccgccgccgcgcggccaccgccttgtccacggtggtcctcgacgggctgcagatcggcttgggcatcagcgccaggtgctgcctcggcgggaagcagacgagcaggtcggtcggcgccgtcgtcgtcgccaccacgcccttccctccgccgccacctccgccgccggccgccgccttcttcctcat

SEQ ID NO: 14929 - DNA, 515 bp, Oryza sativa
  unsure (1)..(515): unsure at all n locations
  Clone ID: PAT_MRT4530_2081C.1
gcacgagggggacgaggatcaggtggaggcggccatggcggtgctgcgggagacgcgggagagcgaggagaggaggcgagcgctctgcgtgccgcggctactcgccgcgcttcgccgcgtgctgcactccaagcggcacacacccaaggcgcacgccgacgccgccgcggcgctggccaacctcaccaacgagccggagaacaggatccccatcgtccgcgcgggcgccgttacggcgctcgtcgaggtgctctccttgggcaccgcatcaccgngaggcctgcgagcacgcggccggcgcgctcttcggcctcgcgctggacgaggagaaccgcgccgccatcggcgttctcggcgccgtccagccactactcgacctcttcacagcccgagaccacgccccgcgcgcgcgccgcgacgccggcatggcgctgtatcacctctccctctccgccgtgaaccagtccaagctcgcccgcgccccggccgcggccaagaacctgctctccatcgcg

SEQ ID NO: 14930 - DNA, 1660 bp, Oryza sativa
  unsure (1)..(1660): unsure at all n locations
  Clone ID: PAT_MRT4530_20820C.1
ggcgtgcccccngacgantangtcggcctcacgcccgcgcgcgccatggatatattctctccagctcggcccagttggacatttcgatcggatgagtcggaattccctgcgtgctcctggcgtccgcgctgcctctgcaccggcctagccaccagcagcaagcaggccatggggagccgaggacgacgcggcggcggggagagagagacggagacggaggaggatgagacgtggaagctgcgggtgggcgacgacttcaccgtcccggagcgcttccaccgcaagccccccttcttctccaggatcttccccgccggctcccatggaaagcatcggaaaattgcaaaatactacaagaagcaggaaaatctcctgaaggatttcagcgagatggaaaccatgaatgagattggttccttagatcagaatgctcctactgaggaagagttgaggcaaatggcaaagggcgaacgattggccatcaacctgtcgaatatcatcaatctgattcttttcattgggaaagttcttgcatcagttgaaagtttatcgatggcagtaatagcatcgacactggactccctactggatcttttgtcaggtttcatactctggtttactgcacatgctatgaaaaagcccaacaagtatagctatccaattgggaagagacgaatgcagccagtggagcaccaagtgttcgaccacaggaaggagctgtggatgatcggcagcatgtcctcagtcgcagtggtgaagttcttcctgatgctctactgccggtcgttcaagaacgagatcgtgagagcctacgcgcaggaccatttcttcgacgtgatcaccaactcggtcggcctcgtcagcgcgctcctcgccgtccggtacaaatggtggatggatccggtcggagccatactgatcgcggtgtacacgatcacgacgtgggctcggacggtggtggagaacgtggggacgctgatcggcaggtcggcgccggcggagtacctgacgaagctgacgtacctgatatggaaccaccacgaggagatccggcacatcgacacggtgagggcctacaccttcgggactcactacttcgtggaggtggacatcgtcctccccggcgacatgccgctcagccacgcgcacgacatcggggagtcgctccaggagaagctggagcaactccccgaagtcgagcgcgcctttgtgcacgtcgacttcgagttcacccatcgccccgagcacaaggccgaggtctgaattctcatttatgcaaattttctcttcacttcacttcacttctgtttctgtttggcttgtacaagtcatcgtttccctgtgaaacccacaaggatgtcagttttactaccactgtctctgtagtctttaagtagctgtgggtgaaactgaattcttgttgttcttgttttattgagaagagaaaactgatcgaattcttctagtggattatatacgctgtcttttgctggaaaatggccaaaatggctgggcatgtgtacatgttgtacccatctgaattgtcatatctgtgatcagaagtactactatatatatatttccatttccggtggtcatgtcactggggcagtagtgatgaaccggactagtttgtcattagccccaggcatgtccattc

SEQ ID NO: 14931 - DNA, 851 bp, Oryza sativa
  Clone ID: PAT_MRT4530_20821C.1
tactcctccttgcatgtctcgtgaaccagttaggcggttaacttgtatatcaaacagacgccgcgcgcgcgagcagttcgtcgtcgtcttcgctcgatcgtagtagttgccggccggcatcggcatgggcgacggcggggagaagcaggcggcggcggcggaggggtggcggctgagcgtcaacgacttccagttgccggagcggcccaaggacccgcacttcgtcaagagggtcatcaagcgatgccacggaaagcatcggaaaattgcaaaatactacaagaagcaggaaaatctcctgaaggatttcagcgagatggaaaccatgaatgagattggttccttagatcagaatgctcctactgaggaagagttgaggcaaatggcaaagggcgaacgattggccatcaacctgtcgaatatcatcaatctgattcttttcattgggaaagttcttgcatcagttgaaagtttatcgatggcagtaatagcatcgacactggactccctactggatcttttgtcaggtttcatactctggtttactgcacatgctattgaaaaagcccaacaagtatagctatccaattgggaagagacgaatgcagccagtgggcataatagtatttgcatctgtaatgggtacacttggcttccaagtgctaattgaatccgggcgtcagcttatcacaaatgagcaccaagtgttcgaccacaggaaggagctgtggatgatcggcagcatgtcctcagtcgcagtggtgaagttcttcctgatgctctactgccggtcgttcaagaacgagatcgtgagagcctacgcgcaggaccatttcttcgacgtgatcacc

SEQ ID NO: 14932 - DNA, 576 bp, Oryza sativa
  Clone ID: PAT_MRT4530_20822C.1
cacgaggctttctagtatcgcccgcatcatatagatattaatgaatctagattcatatgtgtgtctagattcattaacgtctatatgaatgtggacaacgctagaaagtcttacattgtgaaacggagggagtactttgttgttttttactgaaacggagctaattctaacagtctggtctccattttttatccatgccatgttttatatgtattacttacctactttcttttcactacaaatgtattcaagttcatactgatgcttatctttcatgctacatgctattcagccgacaggggctaaaatggactcaaatcgtccaaactgtaaaatttgggccaccgactgtttctgcttgttagtacttgctatcttctttttagtagtagcgcttgctaaccgattcagattttttcctatataatgctgcagccctgccaatgatttgtaggatcaaacagactaatgcacgattatgatggaacatgatgtgccagctctctgtggaaaaagatgtgagcatatcttgacaccctgtccatgaaaaatccgcattttattatgaggatatac

SEQ ID NO: 14933 - DNA, 727 bp, Oryza sativa
  Clone ID: PAT_MRT4530_20823C.1
cggacgcgtgggcggccccggccccccccgcgccgcccgcccgcgatcatcgatcgcttaactaattatatatatatccagccagccgcatcaggagagatcgatcatatacatcgatcgaagagagagagagagagagagtaattaacatggcgacgagcaagaaggaggtgaggcacggcacggcccaggcgaaggtgaacggtgacgacgagatgctacggactggcttcatcaacggcaccccgctcgaggccggcaaggtcgctgactcccagcccgtcgatctcttcgaccaggctcccctcgactcaggctcgcgtctgtccggaggaggaagaagatgaggccggctgcaggaagatcgcagagtcggagcccgtggacctcttctccgacgccggccgcgtcgcgcatcagcagcagcacaaggtggtgggccgccaagcgtaatcgcgccctgccccgccttcaagcatatgcacatgcgtgctagaaccgtctcctctcctctcctctcctgctaattaagccaggccgtatacgtatgtgtgtatgtaatactagtacgaataatgcatagtactactatgcgacaagctgctagctagtagctagcctttttttttcaaatagaactatataatccatgatcatcgcctcggtcgatatataaaaaaaaaaaaaaaatcttctcttcctctttctaaattaatcatcacaaccc

SEQ ID NO: 14934 - DNA, 438 bp, Oryza sativa
  Clone ID: PAT_MRT4530_20824C.1
atggagcgctgcttcctcctcctcctcctcctggccaccggcatcgccgccggggagcagccgcctcggcgcaccgccgtggcagaccacccggccatcgtcggcaccaccacggcggcgccgtgcgatcccctctgcatatctggagcggcggccggcggcgcgactccggaggccatggcggcggcgtcggcggcggtggcgatggccggcaatgagtctgaatctgcactgctgcccactcctcgtcagcttgatcgtccggacagcagtggcttgcctactactcaccaatcatggatttactatggacccctgcccaccacgccgtacccgtactccaaggcgccgccggcgagcgagctcgtccgtgccaccaccgccgccgcggccgtcgtcttctccacagtgctactcgtcgcggcggcggcgcgctag

SEQ ID NO: 14935 - DNA, 107 bp, Oryza sativa
  Clone ID: PAT_MRT4530_20825C.1
cagaaatcatttttccatagaaagagaaccaggccatcttatgtgtctgaaggtcaaaacgaatcagactcatgcgattgctctgaaacagttctttatatatgcta

SEQ ID NO: 14936 - DNA, 298 bp, Oryza sativa
  Clone ID: PAT_MRT4530_20826C.1
atggctggtgctggtcaaaatagcttccaccagaacttgaaccaccattgttttgacctgggctgtttggacggtttggtggaggtggagctgaatacggtggaggtggtggtgctgatcatcaagggggagattagcaaggacattgatataaccagtaaattgattgttctgcagatatctgagaagaacgagtatgggattacaggcatgtcactccaaaaagacatatctatgagagaaaaacaatcattttcttacaatttcttcaggcttgacaatgatgtgaacccttgtg

SEQ ID NO: 14937 - DNA, 224 bp, Oryza sativa
  Clone ID: PAT_MRT4530_20827C.1
ggaatcaagataccaggttgctattctttaccaggcatggggtcaaaagtacatgcaactgttcaaaactaagactacacagtggtactgacacaaggtgagactcaaaaaacggtgtgaaacagaggcaaaagcatcagttataaaatttgcaagttctggtgtatgtttttccagtcccagagttaatcttgacaaccattcatggctttatgattgcacac

SEQ ID NO: 14938 - DNA, 654 bp, Oryza sativa
  Clone ID: PAT_MRT4530_20828C.1
ataaagtaagtctaacaaggtcaaagatctaaagtaacatgaaaacaaaaatgcaacattatgtccataaaaatctttcttgttttgaatcttctatggaaacaggaagtgcttctgtattgaaatatcagactgcagtgacaccaaaattttacagatgcacggcacaatttttttggtggaagccaaagggcttcatttgctgtttagtgggacgctgatgcaatataaaagaatggttcatagttggtcgacagacacaaaatcccttaaactttactgaattttgccccaagtagtttaattataacaatatttatttagctattgttcaatgtaatggatcatattttgtctttttagatttagtccagtctaatgatttaacttttgcacatttgcagctgaaggtgtcaattcttgcttaattcatctctctgaaccaaatgaaaagatggtcaaagccaccagtgcagtagaacctgccagttcaaataatgccaaacgacatggagggagcccgcaaaaaaaaaatttaagcacattactgacatcactttagattgtgccaagagttcaaataaggagtcagagcatattgttacagcaaagaaattgggtattggaggtggagaacaagtgggcaaacgaaaa

SEQ ID NO: 14939 - DNA, 237 bp, Oryza sativa
  Clone ID: PAT_MRT4530_20829C.1
aaaaagccattatttttccgaccaggagcttgaaaattacattagctgggcgaacgagtttactactccggggaacatttgaagatttggaattgccgggcgctcattgggttacatggcggatgcatccttcggggcgaaaagcatccatatttcggtgaccctgccggtgaactcgaacggggaggtgtactgggccaccgggtaccacgacgttgggtcggccctgggcccgtc

SEQ ID NO: 14940 - DNA, 579 bp, Oryza sativa
  Clone ID: PAT_MRT4530_2082C.1
atggtgaaggagggcatcttgagaacatcaaacctaattctcctctacagcagctccttccaaggctccggcgcggcgccaccacaccagcaactacaaaccctccgcctctccggcgagctcatgaactccggcaaacaagctaggctacgagccgagagagaattcccccccccccaagctagcaacacccaacccacgcatgcagccaacaatccaaacgggatcacccacggaattgggaacagagagatcgaggaaaggtggcgggaggcggggcttaccgagagacgacgcccggatctcccgcgccggcgggagcgggagcggcggcggcggagagcgctccctccggcgaagggccgcgccgcccacctccctctcgtggagccctcggcgtcggcggcggagagagagagagagagggagacgcggtcgcccttgggtcagaaggacgcgaggaggaggaggagaagagtcagcgcgaggaagacgaggagagaggcagcggcggccgcgggcgggggtggtgggctcggtgggccggaggtttctctatgtgggctccaggcctggtaa

SEQ ID NO: 14941 - DNA, 525 bp, Oryza sativa
  Clone ID: PAT_MRT4530_20830C.1
cacgaggggcatagtttccactcggttgcaccccctacttctctgctgtaaaagagcttgagtggtggtggttgtgttatcagttctagtatttttatctgtttttcaacaattagtttgttagttctcagatacgttgttaggcttatctgttggagatatagtttgtgagctgatgcattggctgaacttatctgtttatgtggctatgaaaaaggatctctacaacccttagttggcagcaaggaataaacaagtttatttacctctacttctatttctccctgttttatctgatccatccagactcctgtcttccttctaatctgttatcatccaccaaacctcagcttattcatcccaagtccatgtggcagtacaatagaaattggtatctgttgccattaaccttttcttatgccgctgcatggtttcttatactgcgaggcagaaggaatacaatgcattaaagaataagagaaggaatgaattcattctctaggtaccttcaaggttcttaaaatt

SEQ ID NO: 14942 - DNA, 273 bp, Oryza sativa
  Clone ID: PAT_MRT4530_20831C.1
caacccttgcccaaccccccaggaggagatctttaaaaaggactccccaacttctcacgacgcggcatacccggacacggatgaagggaagaccaagcagcttgaaaggatcgtgacgcatcaggaggacacctcctgctccctggacgtcggcggaaggaccctgcatgacgatgcacaagccaggggcgacggttgcctgatcaagccatgacctgtggagccgcacgtggacacctacggaggagcagtcctcctcatgaactacgaacg

SEQ ID NO: 14943 - DNA, 738 bp, Oryza sativa
  Clone ID: PAT_MRT4530_20832C.1
tttttttttttttggtgaaaaagaaagaaacaattgaatgaattaatatctgatgatgtacaatggatctgatggtacagattctacaactatgctgcaacaaattacacaatgtaacaaattttcaagaatgtgaattgaacaaagatacacaagccgccaccttacaacacatggtggaggccagaggtaacaactgtaacgatcaatttgtgtgacacatatgtaccaattttcctgatcgtgtgggcatacaaaaggtcgctgtcaataagttttactgtgcttgctgttgtctctcttgagttgtactttcagttttttaccacctaattggtatccgttcatcatactaatggctgtctgtgcagaagcaggagaatcatagcttataaaaccgaagcatttactaagaccagttgctttgtctacaaaaactttagcactcagtactctaccaaaaccctgaaaggcaccggcaagatcttggtcgccaaattcttgagggatgtggtagataaataaattggctccaggaggaccctctatctgaggaccggggttgctgctagtacttgaagaagtgggagaactagcattcgcatttggaactttcattgaattgtgagaattcacaaaaggacgactattgatagcattaccaggatatgatcccggatactgcatactaggcacaggcgaataaggactgcctaactgcattgagttaaacgatct

SEQ ID NO: 14944 - DNA, 1703 bp, Oryza sativa
  unsure (1)..(1703): unsure at all n locations
  Clone ID: PAT_MRT4530_20833C.1
ctgatctgcgctcgatcctttctcgaatcggtgcatgcaacaccggcgacatgtctacaattaagatctctcaccgggggcccggccgggtcgattttggcttctgctctctcttcttctggatcttgttgatgtgggtgtttcttggtcgatccttcttgtttaatctgcctgtgccttgatcttggcgcttgcttttcctctgatctatgcacggatcggccatattcttctcgctctgtgtgtatgtgggggctagggctagtgaagcccatggaagagatgctgatgggtgcaaatccaaatcctaatgggagctcaaatcagccaccgccaccgccgtcctcggcggccagcgcccagcggcctatcgccccaccggcggctggagcggccgccggcgcgggcgccgccggagctggggctggcacggagcgccgcgcgcggccgcagaaggagaaggcgctcaactgcccgcggtgcaactcgacgaacaccaagttctgctactacaacaactacagcctccagcagccgcgctacttctgcaagacgtgccgccgctactggacggagggcggctcgctccgcaacgtccccgtcggcggcggctcacggaagaacaagcgctcgtcgtcctcggtggtgccgtcggcggccgcgtcggcctccacctccgcggcggtgtccggctcggtccccgtggggctggcggccaagaacccgaagctgatgcacgagggagcgcaggacctcaacctagcgttcccgcaccaccacggccgcgccctgcagccgccggagttcacggcgttcccgagcttggagagcagcagcgtgtgcaaccccggaggcaacctggcggcggcgaacggcgccggtggcaggggcagcgtgggcgcgttctcggcgatggagttgctgaggagcaccggctgctacgttccgctgccgcagatggcgccgctagggatgccggcggagtacgcagctgcggggttccatctcggcgagttccgcatgccaccgccgccacagcagcagcagcagcaacaagctcagaccgtgctcggtttctccctggacacgcacggcgcgggtgcaggcggcggctccggggtgttcggcgcgtgcagcgctgggttgcaagagagcgcggcgggcaggttgctgttccccttcgaggacctgaagccggtggtgagcgccgcggctggcgacgcgaacagcggcggcgatcatcagtacgaccacggcaagaaccaaggtggtggcggcggcgtcatcggtggccatgaggccccagggttctggaatagcagcatgatcggcaacggcagcagcaatggcggcggcggcggcggttcttggtaaggtggtgcgagctgctactgcttgcccgccgccgccatgcatggctcatgcatgcacgcgtggtggtcagcagctagcagcatgtggagatagagaaacgagatagagacaaggggggttaataagcctgtggtgattagtgttacatatggcgttttgtttctcaaaaaaaaaaaaaaannnncggnntcangnnnnnnnnnnnnnnnngnnngnncaagngtgtgtggttaattatcggcttgggggctggctaactacagcaggatacacagagttttnaagggtggtgaacttggtgatattatacagctgctgatctattcacc

SEQ ID NO: 14945 - DNA, 239 bp, Oryza sativa
  Clone ID: PAT_MRT4530_20834C.1
ccatctttccatctgtggctctgcagctttccaaaaggaaccatgactatatacgatatgctaatggtaaggggaccggggttatagcagaatggagggtggagcagctagattctttccagtctggttagaaatactttgtaccttgcattaaattacatttttcttgctgaactgaaattcagttactttcttttagtgaacagctatgcatacatttctacttgggtaattattgg

SEQ ID NO: 14946 - DNA, 2571 bp, Oryza sativa
  Clone ID: PAT_MRT4530_20835C.1
atggcagagcacttagcttcaatatttggtacagagaaagataaggtcaactgcccattttacttcaagattggggcttgccgtcatggggatcggtgctcttgtcttcataacaggcccaccatatcaccaactgttgtgtttgcgaacatgtatcagcgccctgatatgatcacgcccggggttgatgctcaaggccagccgatagatccccgccagatgcaggagcattttgaggatttctatgaggacatctttgaggaactaagcaagtttggtgagattgagaacctcaacgtctgcgataaccttgcggatcacatgataggcaatgtttatgtccagttcagggaggaagatcaggcagctgcagctcatactgctctccagggccgcttctactctgggcgcccgataattgttgacttttctcctgtgaccgacttccgtgaagcgacctgcaggcagtatgaggagaatagctgcaaccgtgaaagccacaacgaggcaggagccgcagcccaagcccaagcccacgccataggagggagcgacatgatcgtgatgactatcgaggacgtgacgattactctggtggtggtggaaggaggggtggaagcagcagacatgaaaggcatgatgatggaggaaggcgtaggcacggtggtagccctccaaggcgtgcgaggagtccagtcagggagagcagcgaggagcgcagggccaagatcgaacagtggaatcgtgaaagggacgaaaagcaggggtgaccggctttgtccctcgctcgcgcgcgcgtgcgatcgaacggccatgcgacgactgacgaagcgtcttttgccatcattccgtggcgctggtcgagcatgccaccggcggatggcgcgctaccgtcaagccgggacggggacccccgggggggggggggggttccttttaatctgcagcaccggggatgcactttttgatgagaccgaatttacttttggaaaagtcgaaatattcaatactatgcatagttgctttaaatttagtaatgatctgggaaaccaattaaaaacaatatttttcaagaaagaaaataaaggtgggatgcaaggaaaatccaaaagtatgtacaacccctgcatgtcgacaacatctatgaaccaatatgtttctcacactcagagcttcggattgccatcaaaccaagttgttctaggaagcatggatgaagaatcagcacagcatggtaattatgcatttccaactagtcacatcagccagtgctttcaacctactagcaatacatggatttcccagtctgcaaatggtattgctgatggaataccacagtgggaatatgtcaatggaatgaataatgctccaggtatgacagaaacagtgaatggaagcttccgtgaatatcagaatggcccttcaaccttatgtcgagggcctttaccctattttcatcagcatgctggcatgcatgctcataatctgcttgatcatacacaagtgcaagctccttaccaacaatgccacaataatcctgtcttacatggtgtaaatcattctggcaaccggttccatttgggtccaaggattccagttcttttctctaattctgaacgtacttttgggcctccacatcatccactcttggcaaatccagtgaaccacagaaatatacgaatcctgccacctgagcatgctacaataatggatttttcaagattgtatgaagtgtcaaatgttgtagatgagcatagagatatgcggctagatatagacagcatgacatatgaggagcttttagcattagaagagcagattggagatgtaaatactggtctggcaaaaagctacattgtagagaaattgaagactagcttatttgtgccaggatcatcctgcatgtctaataagtcttctgaatcttccatggagaatgatgcttgcataatatgccaggaagagtatcaggttaaagaatgcattggaacccttgactgtggccacaggtaccacgaagattgcataaaacaatggttgatggtaaagaatttatgccccatctgcaagacgacagctttgtcaaccggaagaagaagtggataacgaacaggaataatcttattagttatttacttccgacaaatattcagctcaattttgtatataagaaacggtagaccattctgctacctgtatttgttgctcactttgttgtgatccgggagtaactcagcttcctaaactgtacagccataacattgatcattttcttcggtgtagaatattttaaattactcagttcgcccccatctgtatcataaggcggaccgacaaaaaaactcacaatgtcatttctaggcaaacattgtatctaccatcagattaaaaatcagaacagaacatgtgctcttctgtacaaaaaaaaaaaaactaattccgtaactcgggaggaccaaaaagattcttatggtcgtcggagcgtgattgcatcgattcgccttttgtttgtttatgcattgttcgccccaaattatctgtcgcacgtccatttgattgccttgattcgtc

SEQ ID NO: 14947 - DNA, 1651 bp, Oryza sativa
  Clone ID: PAT_MRT4530_20836C.1
cttcgatccccttcctccacctccaccccccacccgccgatcgccccccgcgagctcgtcccgtcgcggcgggcgatcgctccacccacccatccacctccaccttcccgcgcgattccccgagaggcgaggcgaggcgaggccgctatagctccgctccgctccccgaccaccacgacgcggctggcggcggatcctccactccacccacccaccccgcttccgccgatcggatcgcgtgctccccccgaggtagaggtgatgataaatcatagttagtgacttagcttgcagcagttctttcttgcagctaagacaaataataattggcgttatggcatatagaaatacggtatgcactccccaagtaattgatctagaaactgaacaagggcactctcatattcattctgaaagttttaatcgcactgggaatgattcatctgaccaaggtgcacaacatgctgtcagaggggtaggaaatgctacaaacattggtctatctgatatgcgaagttactatgatgcgggcatgaaccatccacatcaacctgttcataacttgcctccaaatttaggagttgattcaggttttgtcttcccatccagtatgtacaacccctgcatgtcgacaacatctatgaaccaatatgtttctcacactcagagcttcggattgccatcaaaccaagttgttctaggaagcatggatgaaggtagcagaaatgaaaatgctggtgaaagtgctagaggattcattaaaaggaaaaatgctgcagttgcaggaagttaccactgtgctaatggatttgcaagttcaagctcttctcatgcatctctgaatcctacacataggccatgggatccttcttttgagtcaaatgttttgcctaacactgcatcatataacccatcagagtaccatagccagaccagttggccatctatggaaggatcttccattcccagtaatggctttaatttgatgggtgctcacccagaatcagcacagcatggtaattatgcatttccaactagtcacatcagccagtgctttcaacctactagcaatacatggatttcccagtctgcaaatggtattgctgatggaataccacagtgggaatatgtcaatggaatgaataatgctccaggcagattttcccgttcaggtatgacagaaacagtgaatggaagcttccgtgaatatcagaatggcccttcaaccttatgtcgagggcctttaccctattttcatcagcatgctggcatgcatgctcataatctgcttgatcatacacaagtgcaagctccttaccaacaatgccacaataatcctgtcttacatggtgtaaatcattctggcaaccggttccatttgggtccaaggattccagttcttttctctaattctgaacgtacttttgggcctccacatcatccactcttggcaaatccagtgaaccacagaaatatacgaatcctgccacctgagcatgctacaataatggatttttcaagattgtatgaagtgtcaaatgttgtagatgagcatagagatatgcggctagatatagacagcatgacatatgaggagcttttagcattataagagcagattggagatgtaaatactggtctggcaaaaagc

SEQ ID NO: 14948 - DNA, 144 bp, Oryza sativa
  Clone ID: PAT_MRT4530_20837C.1
atgtcgggttacaccgccaccggcatctgcacacggtgcatggaggaacacgaggtattgggccgacacaccgggatgacagccattggtcttgatctcagtcggcatgcaaaaacaagagaaagccctctcaatgagaggtaa

SEQ ID NO: 14949 - DNA, 698 bp, Oryza sativa
  Clone ID: PAT_MRT4530_20838C.1
aggtcgtcgtctacctccggccgcccgccgcccgagccctagcgccacgccgccgcaatctccttccaaatccggccgcccctttctgtttccgatgaaattaatagaggggaaatgatccccgggatcccctctatcttttctcttatggaatcgtcggctaatttcgtttggaaatccgtggattcgatctcgaatcggattcatctctctccccaaaccctagaccttccttcgccgtcgccagtcgctgtgggcctccgacgccgcctccttgcccctataaaaggacccccggtgtctccgctacctaccgccaccctcgccttcgcctctcgtcgcctagcgtcaccgtcccgtcgccgccgtcgctccagccgtgcgccgccgtcgcttcggtcgtcgccgtcgctcggggaggtcaccattgtggtcgccaagtcgtcgcagtccttgtccgcccctccgccgtcgctgtcgaccgacggatccccgtcgccgtcgtcaagccgaagagcgccgccgcttcttcctcgtcgccgacgtcgtccggtcaccgtccgtcgccgtttaggtcatcaattccgacgtttccggagtgtccgttttcgcaggagaagaatttgaagagttctaaggccagcaagacaagtcacacagatcccaaacaaccctttgagcatgttgatcccatttaa

SEQ ID NO: 14950 - DNA, 354 bp, Oryza sativa
  Clone ID: PAT_MRT4530_20839C.1
ctttgttacgcctgcacttcgttccatcttcaatgtacgcctgccaccctgccccagtcgtaaaatggttggaatgctgaatctccttcagcccagatgtagtggtttattatctgaaaagtaaatatcgagtcaatacgtaatcatgaacatatgtaatggttcagtaagtatccgactatctgattcgtaattatgaacagatgtattggttcactacctgattcgtactagtaatgaacctggtgcaggtacaaagaaaaaaaaaaaaaaaaaaaaaaaaaaaaaaaaaaaaaaaaaaaaaaaaaaaaaaaaaaaaaaaaaaaaaaaaaaaaaaaaaaaaaaaaaaaaaaa

SEQ ID NO: 14951 - DNA, 493 bp, Oryza sativa
  Clone ID: PAT_MRT4530_2083C.1
tcgcgatctagagttctagatcgcgagcgctctgcagttgcagcctacatcggctctagagttcgacgatttgtaatttaattgatgggatgattgagtatggtggttcattaatttatgatgagatttatctgtcgactgggcgccttggatttgcaggtttaagattgcaatgtcggtatagtctctactcatgcaggtttcagctaatacagacaaatttggaggtggccaggcctgggctgattgaacatatagctctagagttttgagtttttatcttgtgaacaagttcgaggacagttctagtttgtggcatcagattgatatgtacgattcgactgaaatggtttcagcttccggctaaactacttggattgacaagaagcgggtatgcaacttagcaaatgtgatgcattgcaacgtgctcaataaatctcagcaaactttgttatttcttgacaagcttttctaaactcaacttataataaag

SEQ ID NO: 14952 - DNA, 1461 bp, Oryza sativa
  Clone ID: PAT_MRT4530_20840C.1
atggccaaccggcggccggtgctggtgctcttgctcatggccgccgtgtgggtggccggcgtcgtcgtcgacgctcggcatgaccctgcggtggcgtgggtatggaggcagagcatggtggggggcgagggctgcggcgacaaacatagtacagccaccatcagtggtggcggtgtcggtgtaggaggtggcgagggtggcggtgttggtgtaggtggcggcgtgggtggtggcactggcggtggggctgcaggtggtttgggtggaggtggaggtggaggcggaggcttaggagggagtggtggtcttggtggaggaggcatgggtggcagtggcgggtttggaggtggaggtggaggtggagttggcggtggtgttggtgctggattcggaagcggagggggtgtaggtgccggtggtggtctcaggggtggaggtggagtaggggcgggtggtggcggtggatttggtggtggtgccgggggtggtggtggcattggtgctggtggcggtttcggaggaggtgctggtgcaggaggtggagttggtggtgggggcagattcggaggaggtggaatgggtggtggcggtgggtttggaggtggtgcaggaggtggagttggtggtgggggcgaactcggaggaggtggaatgggtggtggcagtgggtttggaggtggtgcaggtggtgggtttggtgccggagggggtgtgggtggtggcataggagttggcggaggcatgggaggtggtgccagtggtggcattggaggtggtgctggaggtggcatggggggcgacataggaggaggtgctggaggcggcgttggaggtggcggtgggggtgggatgggaggtggaggaggttttggaggcggtggcggtgttggtggtaatacaggtagagatttcgacgggggcaagggcaatggcctcaatggtggtgatggtgctagtggaggcattggtggaggtgccagtggtggctttggaggtggtgcaggaatcggtgaaggagtcggcaatggctttggggttggagctggtgctggcacaggattgggcagcggcttcggatggagtggtggtgctggaggcgggttcggaactggtggtggaagcgggttcggcggaggccttggaggcggtggtggtataggtggaggacttggagtgggcggtggcactgggggtgggtctggagcaaacgaaggtgctgggatggggggcggtattagtagcggagctggagcaggcggcggacttggagttggtggcggtggtggtgcaggaggaggaattggtgcaagcaggggtgctagaggtgggtccggagcaggtggaggtgccgggatgggtggtggcgttggtgccagagctggaggaggcggagaacacaaaagaggtggcgggaagcaccatggcggaagtggcagtggggtcctaggtcgtttcatttga

SEQ ID NO: 14953 - DNA, 369 bp, Oryza sativa
  Clone ID: PAT_MRT4530_20841C.1
ggacacaaataaaggacatttttttcggattttttaaataaactaaggggggggagcaaaaacccgaacccataaaggggggtcaacctttatataggaacaacaaaaacaaaagggggggccccaagccagtaatcccggggggaactttttggacccctctagcttcaaaccccgaagggtaaagggaacgaagggccaccctttcccgggtcgaattcggccgggaaataaaaatcaaacgagcttttaccctttgggtccacacaaaaattcggttttgggggggctcatcttaagacaccggcggtattttttaaaaaaggggccgccccagccaaaccccccccctgaaaaggtcttccgccc

SEQ ID NO: 14954 - DNA, 1326 bp, Oryza sativa
  Clone ID: PAT_MRT4530_20842C.1
atggagatgcacgagtgctgctactacggcggcagcatcggcggcgactggctcaacccactcgccgccatcccgccgccgtgttcttcctcttcttcttcgtggtcgtcgcagcttctcctcctcagtgatcacgatgacgtactcttgcactccgccggcgatcatggcggcgcggtggccggaataggcggcgcctgcatgaccgccgatctcgttgtcagggacgaggagatggagatggccgccggctacctgccggtggccgcgtcggccgccgccgccgccgacgtcgaccactacatgtaccagcagtttcagctcgagcctgatcagttcgtctcgacgttgcccgcggtggcggtggcggtggcggcgacggcgggcggcggcagccacgacgacgagctcctgaggatgcccttcaccgacatcgacctcgacgcgttcgccgacgcgcgcgacgtcgtcgtcggcgtcggcgagcccaagcccagtccccagcacactctcgacgcggcgatcgcgctcccggcggtcggcggcggcggcgcccaccacttcggcacgcaggacgacgacgtcaagttcgacgtgaccaagcaacgcaacgacgccgccctcgccggcgacgactccctgtccatggtgatcgtcgagagctacgagatgggcatgcgacgtcacgccgccgagcaggagcaggagcagaagccaaagatcatcacatcagccgcaacgacattgacgcctcttcctcttcctccaccgccgccgccgccgccgcgcgtgacgaggagccgccgcgacggatcatcggcggcgacggcgggcgggaagactcggctggaccacatcggattcgaggacctgaggcggtacttctacatgccaatcaccaaggcggcgagggagatgaacgtggggctgaccgtgctcaagaagcgctgccgcgagctcggcgtcgcccggtggcctcaccggaagatgaagagcctcaagtccctcatcctcaacgagatggggagcaaggggatgtcggcggcggcgatgcggcgggagctggaggcgctggagaattgctgcgcgctgatggagaggaacccggcggtggagctgacggagaggaccaagaagctgaggcaggcgtgcttcaaggagaattacaagcggaggagggcggctgccgtcgacgtgctcgacctcgaccactgcttcagcttcgccgccggtcattgccaccgccaccaccaccagcagctggctctgccgccgccgccagctgccgccgccgaccaccgtaggagagatttcttcggctactga

SEQ ID NO: 14955 - DNA, 499 bp, Oryza sativa
  Clone ID: PAT_MRT4530_20843C.1
cccacgcgtccgaaaaaaaaaaaaaaaaaaaaaaaaaaaaaaaaaaaaaaaaaaaaaaaaaaaaaaaaaaaaaaaaaaaaaaaaaaaaaaaaaaaaaaaaaaaaaaaaaaaaaaaaaaaagaaaaaaaaaaaaaaaaaaaagggggggccctttttaaaaattcaatttttatttcccgttttttgaaagttattattttttttttggggcccctaaatttaatttaatgggccggtttttaaaaagttgggaatgggaaaaacttggggtttcccaattttattgtttttgaaaaaattccctttttgccaagttgggtaaaaagaaaaaagccccaaccgaatcttttttccaaaaatttgccacccttaatgggaaatgggaacccccttttaccgggcctttaaagccggggggggggggggtttaccccaaggtgaaccttttattttgcaagggttttaggccccgttttttgggttttttccctttcttttt

SEQ ID NO: 14956 - DNA, 1518 bp, Oryza sativa
  Clone ID: PAT_MRT4530_20844C.1
atggagttgacgacgatctcgccagtgttcctgatctcacttcttggcgttccattgctgtacctgctatggagcaaggcaagcaagtccccctccggcgcgcctgctgcaccgccgcctccgccgggcccgacgccgttcccggtcatcggcaacatccccgacctcctccgtggcggcgagctgcaccgcgcgctcaccggcttagcggcgtcgtacggccccgtcatgtcgctgaggctcggcatggcgagcaccgtcgtgctctcgtccccggacgtggcgcacgaggcgctccacaagaaggacggcgccatctcctcccggtgggtgccggacaacgccaacgtgctcggccaccaggacgtctccatggcgtggctgccgagctccagcccgctgtggaagcacatgcgcaccttggcgagcaccctgctgttcacctcccggcgtctcggcgccagccgcggcatccgggagcgcaaggcccgggagctcgtcgactacctcggcgcgcgctcggggcgccccgtccgcgtcggcctcgccgtgttcggctccgtgctcaacttcatgtccaacgtcttcttctccgaggacgtcgtcgagctggggtcggagaccgggcaggagttccagcagctcatcgccgactccgtggcggagacggccaagcccaacatctccgacttcttcccattcctcagcgcgctcgacctcagccgtcgccgccgcgcggcggccaagaacctcaagaagttctacgatttcttcgacgatgtcattgaccggcggctgagcagcggcgagaaacccggcgacctgctcgactcgcttctggagctccacgccaagtcacagctcgagcgcccactgattcgagctctcatgacggatttgttcatcgctgggagccacacgacgacgaccacggtggagtgggcgatggccgagctgctccgcaacccgagcaagatggcgaaggcgcgcgccgagctcggggaggcgttcgggcgcggcgccgtcgaggaaggcgagctcgcgaggctcccctacctcaacgccgtgatcaaggagacgctgcggctgcacccgccggcgccgctgctgctgccgcaccgggtgtcgtcggactcggagccggccggcggcgtgacgctcggcggctactcggtgcccagcggcgcccgcgtgctgatcaacgcgtgggcgatcgggagggaccccgcggcgtggtcgccggagccggatgcgttctcgccggagaggttcttgggcagggaggcggactactgggggaggacgctcgagttcatcccgttcgggtccggccggagggcgtgccccgggataccgctggccgtggcggtggtgcccatggtggtggcggcgatggtgcactcgctggagtggaggctgccggaggggatggcgcctggcgacgtcgacgtcggcgaccggttcggcgccgtgcttgagctcgctacccctctttgggccgtgccggttaaggtttag

SEQ ID NO: 14957 - DNA, 504 bp, Oryza sativa
  Clone ID: PAT_MRT4530_20845C.1
atgctgtacctcgccggagcacgctgggtgctcctgctcctcgccgcggtcacggtcctcctctgcctccagctatcggccagggacaacgccgtcgatggcgccgccgccgccgccgctgccgcaggcccagctcaaacagctgatctcccgctgcaacagccggcggcgctcccgcgcgaggcgcccgcagaaggtgatctgcgtgggcttggcgcgtcgtcgtcgccggtcttcgtcgtcgccgtcctgccggcgtacgcgtggaggaagaaggccgccgtcgacggcgacgacggggacggcgagtgcgcgatctgcctcggcgaggtgcggcgagggcaggtggtgaagcagctgccggcgtgcacgcacctgttccacgcgaggtgcatcgacaagtggctgatcacgtcgcaggggacttgcccggtgtgccggactccggtggactccgccgccgccgccctgcaagccgtgagagttgccgatcagccaccgtag

SEQ ID NO: 14958 - DNA, 501 bp, Oryza sativa
  Clone ID: PAT_MRT4530_20846C.1
cccacgcgtccgcttctgaattatttctaatttgttcctgtggtgatgtacttgttttttaggatatgataaagttaatgtaaacttattgtttttgtctataaccattcatcatctgtacacacttttttctcgaaaatgcaagaggcttgcgcttcatttcattaagaagaagcagaaataccaaatatgtacaacagagccttctacaaagaaggaaccctctagaaagaaaaaaacatcacaaaaaacgacatgcaacacaaaaatctcctaggagcagctaaccatccaaaggaagtgacataaacaggaactcattgagagccttggcaccagccatacaccaaataacactctctcttgctactgcttgcaagacaaccgcaacattttgggtgtggcattgtggaatatgcaatttcccatgccactaggataattaaggagttcaatcctttctttgtcttcttagtaacatccttgactagcttggaccac

SEQ ID NO: 14959 - DNA, 318 bp, Oryza sativa
  Clone ID: PAT_MRT4530_20847C.1
atggattttactccatctaaagccgagcagttgcggagccgcaggcccgatgggaaggtgactcgcagccgtgacgggacagctatgggatggcggcgcgcgcgaagggaggatggtagccagcgacgcccgcgacggagggccgtggacgcgatgggagggcggtggccggcggcgcccgcaacgggaggggcgtggtcggcggcgcgagcgacaggagggcggtggccggtggccggtggcgagcgcgaagggaggcgatgggatggcggcgtgcgcgattggaggccggcggcgcgcttcgtgtggagaggatag

SEQ ID NO: 14960 - DNA, 255 bp, Oryza sativa
  Clone ID: PAT_MRT4530_20848C.1
tcgtgatcgccaacaagcccaaacccagatagagccggaggagaggcgccgtgtaacaatacgtgaccggcgacttgtatggtacattggctcaggatctagcccgccgcttggccgtggagctccactacgactcttacatatactactcttactccttcatcccggacctttctggcttaacccaatccccctcttacacgtactaaaactttaatagcgcgctaactgaaggatatcaaggatctcgtggaa

SEQ ID NO: 14961 - DNA, 813 bp, Oryza sativa
  Clone ID: PAT_MRT4530_20849C.1
tctttactcccggttgttctcattaactgggactaaagatctagaggtatatatattcccgatgtgcgccctcgtcttctctaccaacacttagaaatttttgccccgatcgatctctctcggcttctccttcgcagccactgcctagggcatccccgcaccgacgccgccgtcgtatctcgacgccgtcttgcgcgtgtcgtcatcgccgcctccgctgccgcctccgaccccgacctcgatgcggccggcaccggcgacaacgtcgccctggcagtgccgacgaagccgcgccacaataccgcggcgacacgacacgccgggacgccacgacgccgccgcggcacggcaccgccgcgccgccccgccgccgccgcacccaaagccgcggccgcgctgccccgccgctgctccgctgccgccccgtgaacgaacgaacgtgaacgagaacgtgaacgtgaacgaacgaacgaacgtgaacgtgaacgaatgaacgaacgtgaacgagaacgtgaacgaacgaaacgtacgtgaacgagaacgtgaacgaacgaacaaacgtgaatgaacgttaacgaacgtgaacgtgaacgaacgtgaacgaacgaacgttaatgaacgtgaacgtgaacgaacgtgaacgtgaacgaacgtgaacttaatgttgtatttgaacatacgtaaacgaacgaacgtgcgtgaacgaactttacttaacgtacgttaacgtggacgcacgtgaacgaacgaacgtaggtgaatgaaacgtgaacttaacgagaacgcgaacgtgaacgatcgtgaacgaaacgt

SEQ ID NO: 14962 - DNA, 223 bp, Oryza sativa
  Clone ID: PAT_MRT4530_2084C.1
cttgttttcaaacgagtgagaaatggacggagccgaaggagacatacagacctggggccggccgccctcctgaggttggcccctctgtccgtcgtgctctcgagcatgatcctgtccacaacaatctacgccacgcgaccctagaagttcctctgcggtggctcggcatccatcgcccccgtcaacaacaagaacaacaatatcgacataaacgcagaggatg

SEQ ID NO: 14963 - DNA, 213 bp, Oryza sativa
  Clone ID: PAT_MRT4530_20850C.1
atggcgagcttgaagcttagggcgtgcgtgcttctgtccaccgtgttcttcttctccgggctcatgcagctgtccatggcgcaagctggctcgccggcggcggcgacggcgacggcgacgacggcgcgggtgatcgacgtgaaggcggtggatcaggcggtcgcctacctgctcatgctcgcggcgctgttcgtcacctacctagcgcactaa

SEQ ID NO: 14964 - DNA, 313 bp, Oryza sativa
  unsure (1)..(313): unsure at all n locations
  Clone ID: PAT_MRT4530_20851C.1
aatcagaggatggcaaggattctgatgattagaagcatgatnagctctaagatggtgaggatnaagaatggaggcccgccttncgcggacgatgcccaggatttggtaggtctncccatgntaataagtttcccttttncgtgatccaaaacctngccaagaaaagtcttctgtagattgagccattnttgaggaacctttaattggntcttggtgcctctcttctggaaggtcatttttcccacccccaaaaaaaaagaacttgataacttttttgaccaagagaaatctttgcacaaaaaaaaaaaaaaaa

SEQ ID NO: 14965 - DNA, 531 bp, Oryza sativa
  unsure (1)..(531): unsure at all n locations
  Clone ID: PAT_MRT4530_20852C.1
atgaggcaaatgttgcagaggtttatcggcgtcaaatgtcaccacgcgaccgttgtttatatggaacgtgagcgtggatccgccattttcgagccaaggggcccnggccccaccctttttgagcccgccggcgacagatctgtcactcccgagcccacacgcgcagccatcgtgatcatggtcgctgctcctggtgccgtggtcacatgctgtccttcggcctcctttccgccacatgcgaggacggatcagccgctcccgagccaggcagcggattcgtccttcccgagtctgctagcagcagatttgtccttcccgagcccgctggcagcatatccatccttcctgagcctgccaacagtggatccaccgcacgctgccactgtgatcgtggttaccgctcatggtgacgtggtcaccaccgctgcacgaagccaacactactgctcctgtggctgtccgaggccgttgctgctccaagctcgaatcccgccactgccgctcggagaggcgaggaggccggccggctga

SEQ ID NO: 14966 - DNA, 500 bp, Oryza sativa
  Clone ID: PAT_MRT4530_20853C.1
gggctcactcggtgttcggacgggaagtggagcgccaagccatagtcagccgctgctctgatcgacgtgtctcgagctggaattcgtcgtcggacctgccccgcggaggctccgcgccggccaacctctgagaggcagcagtagcatcccaacaagcaaggtctcgggttgccttaccaggcaaagttcatgaacatctccaatgtttctcaggcatacagatttgtcaggcatggtgctctggcctctgggcaccaaccaacagggccatagttttgtcgcttcaaactgtagtgtggtcttccttctattgcccttcaaccgataactctgcaactaacattatacatggaccttttgttttttctgttgcttccttcaatatattcagagtgaatttgtaaatatgctgtttttctcattaagaaacttagcatataacaaagaccggtcacatccttttaagggttcgtgacagcctgcttaacataaaaaaaaaa

SEQ ID NO: 14967 - DNA, 179 bp, Oryza sativa
  Clone ID: PAT_MRT4530_20854C.1
aaagaaccagatttataaatcccgccaaggaatccctccttaggtcgcttccggatatatagtaataccttaaatagaagtaaatgtggccaaaccaattggtttgcggctatgtacggcccagtctttcgactaatgatgataaaccctcttctttacccttaaaaaaaaaaaaaaaa

SEQ ID NO: 14968 - DNA, 1187 bp, Oryza sativa
  Clone ID: PAT_MRT4530_20855C.1
gcagccgcggcaaaggccaccatgagagccgccgccatccagacccacgccctcgtatgcgcgccaccgggggccgccgccgccgcgcctggccccatggcccgcggcgcgctgccggcggcggcgggggaggacccctcctccaccaccaccggctgagtgagcgacctgccccacacgcgctcccccccctgccgggctcgctcgccgtcgtcctcctcgtcgtcgaatgtgaattctgggagaggggacgacgcggacaacctgctcgaggatttgctcagcaagcatggcgaggtggtgtacaacgccggtggggctccgggcattgatgccgacgatgacgccgagtgcttgtcctttgctgtctccctagctaaagttgcaagcgaggtgaaggctgcggatattcgtgtactatttgtgaagccgctcgtttactggacgaggttcttcatcatcctcactgctttctcaaatgcacagattgatgctatcagctccaagatgagagacatcggtgagaagcagtttagcatagttgcatctggtgatacaaaaccaaattcatggaccttgctggacttcggcgatgttgttgtccatatatttcttccgcaacagcgagcattctacaacttggaagagttctatggcaacgcaacctccattgaactcccttttgagaagcagttgcagtgactgctgttttcatcttctcctggagaaattgcaggtttccacaaaaaccgagcagcattgcgccatggattctccacgtcttcctgctcatatgtgacgaactgctcggagctatagatttgcatggtctaactcgccaatgtcacctggtgactgctcgccaagttcagaagtggggcaccatgatgccaacattctccttatctgttgttagactacgtgaatcattgtattaactatcacattagagacgataattattggtgccaagaggaatagaggccaagatgtaacacattgtgccagttcagatttcagacgcgaggatgcagtgtgcaagttcaacttaggcatcctttggaatgaaggaatttcaagggatctttgtagtatttggactaaattctatcaaaatccagtaaaattactccgcgctcaaattacttggtcgaatcctgaataaatctacgcgttagatacgtgcc

SEQ ID NO: 14969 - DNA, 292 bp, Oryza sativa
  Clone ID: PAT_MRT4530_20856C.1
ccgacgcgtgcgtccacgcgtgcgatccaatctgcagctatcttgcatcacgtgtccagtgttatctaatgagcttcttgtcgagatgggccgcatgttcttcgctgtgggcaactggaaatgcactgggaccactgctcaggcggacacaactaggataattctgaatgagggacagattgcttctacagatgtcgctgaagtggttagcagcccgccttatgtgttacttgctgtgctcaagagtcacctgcacccagagatccaagttgctgctcagaattgttgggtg

SEQ ID NO: 14970 - DNA, 1885 bp, Oryza sativa
  Clone ID: PAT_MRT4530_20857C.1
atgttcgccggcggcgcggatggcggcaacggccacctgccgcggccgcggagggcgcggcgcggcggcggaggcggaggaggaatggggtctcctcctctggggccgccaccgccgccctgcaccgactacgacatggcctacttcaaggcgtactcccacatcggcgtccacgaggagatgctcaagatagtaaacgaaaactgtgaccgtaaacgtggatggatgtgtcccctgttccttgtcgaggttgtgttggatgtgggctgtggcactggtgtactttctatattttgtgcttttgctggtgccgctcgggtctatgcagttgatgcaagtgatattgccttacaggctatggaaattgtgagagaaaatgagttatctgacaaagtcattgttctgcacggtcgaattgagtattattatattagaatatttgaaaatcaggatgtcgaaattgaagaaaaagtcgatgtcatcatatctgaatggatgggctacatgcttctgtatgagagtatgctggggagtgtaatctttgctagagataaatggcttaaaccagggggtcttattcttccatcgcatgcatcgctttacctggcacctattacaaattcccacagatatcaggatagtgtttacttctggcaagacgtgtatggtataaaaatgtcttctatgatgcctcttgcaaaacaatgtgcattcatggagccatctgttgagacgattagtggagagaatgttctgacctggccatcagtggtggcgcaggtggattgttataccatacaagctccggagcttgaaactatcactgctacatttaactatacgtcgatgttgcaagctccattgcatggttttgcattttggttcgatgtcgagtttaatggaccagtgcgccagagatccaagaagcaagcaaaccaatgcttggatgggaacacacaagatgccagcccaagtaataaaaagaaaaaggcagatgccccaattgttctgtcgactgcaccggaggatgcacctacccactggcagcagaccctattgtacttgtttgaacctatcgagctaaagaaagatcaaaatattgagggttctgttaccatatctcaaagccagcaacatgctcgcttcctcaacatctgcctgaaatattttactagagatcaatggtatgttaaagaatcggtgatgaaataagacgggggtagcttcaagagtggactgcaggatctcatatttgtttttcctgtgcacgttgaagcttacttgcaattttggagaatctttgacaagcgtcacgtactgacatcctgatgacaagcgtcttttggttcctatttggaaagctggattttttttttttaggaattgagtgcaactccgctagaattcgtacagaaatcctttttttcttgaaaagggcctgattagattaacagcctgatgatcatgtgcattcagctgatgaaaggagcagtgagaaactcataattacatgccgaccaagggtgggataggttttcctgttaagtttgtcttagctcatgtcatttggttacgctttgttattttttcctatagactaagatagcaatgttcttttctttgtaagaacaaattgtcaacattcatgcggcccttgtggtaggctatatcagcggcgtgattttctgattttcccggacgccgctgccctgggaagaagaagaagaaggagaagctagggcttatgggttgcgtcgtgttcgtttcgaggttttgcctgtcctgaagagactatcagtagctgtgtgtatcttggagcatcataattttgctgattaaagaaccaatttcttatcctgcctaaagttgtctgaattttatctca

SEQ ID NO: 14971 - DNA, 291 bp, Oryza sativa
  Clone ID: PAT_MRT4530_20858C.1
gttcactaccgctatgtctgtgtcatggccagcggtccccatggaggctgccgcgaaggtcgtcccaaagggacgcacaaccttgcgcacgtttgcatggagcgcaaagccagagccttcatgtacccagcagtacgtaacgactcttgagctgtacctgatgccgctctactctatgacatcgtactacctgatcaaaaagtttcgaagggactacggattgatacacgagttgggcatgttcaactgcctggtcactgataaccaagagacacgttagtctggaggtga

SEQ ID NO: 14972 - DNA, 954 bp, Oryza sativa
  Clone ID: PAT_MRT4530_20859C.1
atgtcgtcgacggcggcgggcggcgcgccggggccggcggcgcagcgtcatggcggcggcggcggtggaggggggtgctgcagctcaggcgtgacgctggagctcgtcggcgcgttcacggcggtgtgcctggtgctgtacggggtgatactctacttcaactacctgtacgtgcggtggagcggccgcgacggcgtgcaccggacttcgggcggcggcggcggcggagggcgtggagcggcggcgaggaagaggggcggcggcggcggcctcgacaaggcggcgctggcggccattccggtgttcaggttcaaggcgtcggcgtcggcggcggcgctcggcggcggcgaggcggagtgcgcggtgtgcctgagcggcatgcaggacggcgacgcggtgcgcgcgctgcccgggtgcggccacgccttccacgccggctgcgtcgacgcctggctccgcgcccacggcacctgccccgtttgccgcgcgcgccccgccgtgccgcctcctccgccggcgaaaccaccctgcctgaaggcgccggagcccgccgccgccgccgccggccggcagccggtcgacctggagagccatgtatagcactaagctaatcaagacggttagttaattttagccatgtataaaatctagttagctcctactcctactactacatgttccttaattagttttttttttttttttttgcgttcttgaaatccaacgccattttcgtcaataatccagcaacgccattgttcccattgagatgaacaatgcctatgtccaatgtcttggcactctgtaaatcactttttgttattttgctgtaatttttttcccctggtttttgccaactttgaagcacaacgactgtgcaaaaaaaaaaaaaaaaaaaaaaaaaaaaaaaaaaaaaaaagggggggggcctcgtccgaattcctgcagcccggg

SEQ ID NO: 14973 - DNA, 186 bp, Oryza sativa
  unsure (1)..(186): unsure at all n locations
  Clone ID: PAT_MRT4530_2085C.1
ccggaaccggcaatcccgggtcgaaccagtcgtcgttgncgcgttttatcaagctcacaattcatggcataagnttaagacaagctcgttctttcggacatcgtgctcgccgtcctcgccgtcgtggtggcagtggtgttgggctacggagacgtnggcgagtactgaagtgtggggaaggtggtg

SEQ ID NO: 14974 - DNA, 732 bp, Oryza sativa
  Clone ID: PAT_MRT4530_20860C.1
aagagtacctcatttccaatttcattaacatgaactctttgttaaataagtgaaagagcaaggaaacagagatatatatatacaacaactgtttaaaagagaaacagcgggacatgctacacaagcctacaacactagtcttattcgatattccacattttggtatcaggtatagaaatatggtcgttctatttcacgtcttttcacttgctcttggttgtccgaattcggcagctcttggtcttgacaagagatcctgaagagcctgcaagcttcaatctttcttttatcagaaacccaacaaaatcataagaccttgaggattcatggatatagatagaaatgtgatttgctcaatccatcaagggcataactttagttttgccaaataactcacccaaacaagcaggggcatttttacacttcctcgtcctcagagtgagactcggaatttgaagttgtctcggtcttggtctccatcaattgaggttgaacacctaaacccaataaacaaaaaccatatgtcaacgaatgaccaacaatcaaacaattctcatacaccacaactagttaagaacctgttccaccaaagacgctagtactgcctatatgattaaagattctcaaaaatgttaatcacatattaatgatctcccattcagaacctgtaacagcatcgagcaatgactaactttacgattgacatagcattatcaacatatcaaaaacctg

SEQ ID NO: 14975 - DNA, 114 bp, Oryza sativa
  Clone ID: PAT_MRT4530_20861C.1
gttaaactaacccaaattaagctgtaaaaatccctacatgcaatgcccggtgttctcttcttttggagattaacaaaggtcttaaagagccaggaaccaccagcaagtcatcac

SEQ ID NO: 14976 - DNA, 507 bp, Oryza sativa
  Clone ID: PAT_MRT4530_20862C.1
atggagaaatttcttaagcggaaagcaccagattgtacaagcaatgtggggagttcatatcccttcgactagatgatgccagttgggaaaagacgatcgaatatgatccaggctcaaggaaaggaattgatgattatcatcccaaccaaagagccaaggtgagaagaaagtactcagagaatgggccttgccaacctggtgatcatgcttttcccatatcagttatttctaacaaagatagaaaattcaatccggcatggtttgatgagtttggtggatggcttgagtacaacaagtccaaagatagagcatattatttcttttgcttcttgtttagggaccggaataaaaaggaggaaggatacaaagcatttgttaacgttggttggaatggctattatagaaaggataggcttaaagagcatgtacgtggagttggtagcttgcacaatcaagccatatatttttgccggcccaaaatgggctttatccacaatatgtgtgtgg

SEQ ID NO: 14977 - DNA, 750 bp, Oryza sativa
  Clone ID: PAT_MRT4530_20863C.1
atgtgcagtgaggttcttagtgtcgatcaaagcgatcgcctcagccgtacggcgcggcgtcgtgcatgccacgtcgcatatgacggcgagccgcctagcccggttaaggaatctcacagcggagaccgtcatgtcggtcatcggcaagaaccgtgtctccgacaccgtgaaggccgtggatcgggcgtggaggagcctaattgcaaatatgtagtcacgctggactgccatgtaggacggtcagcctgcaacgcacgagattatttccacaattacattaaaaatatagtttctgtatgtcgctattcggatgtgtcgtcggttcaacttcaccatacgtacctgggaattccatattttggaggaaatactatgactataaattcacgtccataccgtgtgcaaacctcaagaacaagcaagatcaacgcagagatcgagcaacagaaactagtcgagaaactacgacgcgaaagagacgacgaccatggctcgtattggcacttgtgcagcgatcgcccttcttgtcctagttgcttttgttgcctcgtcaggagcggcggcagatcagccgcgttgctgcgtggacttccactcgtggggcgggaacactgggtgcggcccggggcagaacgacgcctgcaactcgtggtgccagtcgcagtgccgcggcggcgagtgcaaaccccgcggcgaccgtcacttctgccactgcttctgctagccatctctacagcagatgacctagct

SEQ ID NO: 14978 - DNA, 561 bp, Oryza sativa
  unsure (1)..(561): unsure at all n locations
  Clone ID: PAT_MRT4530_20864C.1
ctttcagaggatggctcatntgctaggttgaggagtacntgataattttccctgatgagttgcgctggcaccaacctcaagatcctcgaacggcctataagtggaagaacagaagacagatgatactgatgatgactgatataaacagcaaggctgccttgatgccnctgtttctgtggtcagagatgagctgatccttgtcnaaatcagatctgaaggacttccacaatgctgggtaaagttgtgaatgtgccctgccttattgctcaacttgtacaatattatgtggtttgtggccccggcattgatgaattgagtcatctgtcatgctcatactctttcattttagttttgatatgcacgatcatgtcgcttgccttaatatcttttacatctagggaggcaactatgtagcagtcatattttcctaggaatggtgcatgttgtgtatggaatctgtaaggtgctgtacataccagtccgatggattttgtgaaaacttatgtcacacctggtgatatccaattttggtgaacagataagtgaattgagggcaaaaaa

SEQ ID NO: 14979 - DNA, 111 bp, Oryza sativa
  Clone ID: PAT_MRT4530_20865C.1
atgcaggacaatgccccagttgctgttcttggagcaaccctatccttgatggtggaggagttcattgcagctattcgcgacatgatcattgatcatcggccctcggtgtaa

SEQ ID NO: 14980 - DNA, 350 bp, Oryza sativa
  Clone ID: PAT_MRT4530_20866C.1
attattgggggtttactggctctttgggcggtaccatgccaacccggctgattacaaatgccaacacatcacatgttttcagggaaatcaatggaacatgatcgacgctcgcgacagccgggaaacaggatcactaccagaaactaggagagccttgaccaccaccaaagccaccggcatattaaacggctgtacataaccatcgcctccatagcccccaccggaaccaccataatcgacggccactggacaccgactagccaggctgaaggtattggacaccaaaacaccaactagatgaacggcgaatcctcgcgccaccacctgcgaacgaagaacgggccgagtat

SEQ ID NO: 14981 - DNA, 777 bp, Oryza sativa
  unsure (1)..(777): unsure at all n locations
  Clone ID: PAT_MRT4530_20867C.1
atggcgagcggcgtaggcggcacctcgtcagcctctgccagggcgtgcctcctccacggctgcctcgtaagcttgccgccaccaccacctcctgcactcgaggacgctcgcaaccaccggcacacaacttgtcctcggcttccaccggtgcgcagggctcctcctcggaggcatctgacgcataagagagagggctcagagtggtcgcttgcacttacagcatcagcatcaccgagaataatggcggcgacgacggcgccctcgttgccagggtacgaggtgtccggcgccgccgccgcggcgacccggcttcacggctcgccggggtcggtcggcgcgttcttggcggtgctcgccgccgtggtggcggtgaccgtcctgtcctgcgtcgtcggacaggcgtgcgcggcgcgggccgaggggcccgacgagcggtacgactgcgcggggctcgccggccggagatggtggctgcggcggtggcggcgggagcctcgccggccggtcaggccggcggcggaggaggaggtggaggtgaagcagccggccgcatagccggtgccggagccgtgaccacgagacacgcttgcaggtgaagatcgacaacttataactgaagcacatttcaaagcangatccaagaacttaaacttgacatcatcttccaaggcatatgttaaagatttaccatcnntgatcagtgccaaggattccagttttgattgacttgggggtggaatctgtttgcttcctcctctatttggtccattccccttt

SEQ ID NO: 14982 - DNA, 2010 bp, Oryza sativa
  Clone ID: PAT_MRT4530_20868C.1
atggagtatacatcaagtgaggatgatgagctggttgaaggttacatggatgttgaggatgatacaggcaccagcaatactgatcaaggaacaggtctgatgccttctgagatgcgtagcatccttccccgtccgtcgtctgttggcaacggtcggctgatggctgctgatgggttgggcacaaacgatgacccatgcctaggcatggagtttgagtccgatggagctgcacgggcattctacaatgcgtatgcgctgcgccttgggttcggcatccgcgtcgcccggtcgcgcagcgagcggaggaagggtgttgagctacttatcatgaagcgttttgtgtgcctgaaagagggacatcacaagaagaaggatgccgagcctagcgacaagaaaaagaggaagcggctctcgataagggatggctgtccagcgatgatggaagtggtgaggaggggtccggaaaaatgggtcatcacaaagttggtcctggagcatactcatgtgattcttagcccagacagggtgcgggaggtccagctccgtcgcctctctggaaagtgcgcagagcatgataatcaattgcaggagctgcgccggaatgtgtttggagatacagatgcgcaaggccttttcaactacttgaagagaatgcagtcggagaactctggttttttctactccatacaagttgacagtaagaactgtgttagcaatgcagtttgggctgatgctagagccagaatgtcatacacatactttggggatgctgtttattttgacactacttatagtaaaaatgagaatatgttaccctttgcagctttcacgggtgtgaatcaccatggtgatactgttccttttggttgtgcacttgttttggataggacagaatcttcatatacctggctatttgagacatggctgacagcagtgggtagacggttgccgttttcctttacaactgatgaaggcaaagcaattgcatcagcagttgcaaaagtatttcctcagtgtttccatcgtctttgtagatggcgaattttgtctagatgcaagaagaagttgtctgacgactacgtgagatttcccaatctccatgatgagctcagaagatgcatcaacgagtgttatactgaggttgcttttgatatgttctggggtactattcttgacaaatatggcctgagggagaacagttggttgcgatcaatatttgaagcaagacacagatgggttcctgcatacctgacaacaagctccttctttgcagaattgacattgacccagagaggagaaacaatcggtaggttttttaggaataacttcagcacaagagttcctctcgatgaatttaccactaaatttgaccaacacatagacaatttgtatgtacatgaaactcagaaagatcttggttcatctcatccggaacagatcctgaaaaccaatatagccttggaaaaacaagcaaggagcatctacaccaatgccgtgtttgaaatattccaaacggagttgtttgaagcattgcagcattatgctgttaaggttcatcaggatggaccttactccaagtactatgttgacagagatgatcctccaacaaggcacactgttttctacaatgttgccgagaagaaggcttggtgcgattgctgcaggtacgctttctcagcaatattgtgcaggcatgtgcttggagttttcatcttagctggaatcatggtgcttccggagacatgcatcgcgaagcgatggacaaagagggcaaagactgggccagaattaattgggcataatcttgagaatggaaattgctacatggattcttcaacttcaaggtataatgatctcattcatgatgctatcaaatgtgcagagaagggagctgtatcagcagataacttcagagttgcaaaggaaatactccgcaaagccttcatggaaatcaagtgtcttggagaaaaactgactgacgatgacctgcagcaggttgacagtagatag

SEQ ID NO: 14983 - DNA, 533 bp, Oryza sativa
  Clone ID: PAT_MRT4530_20869C.1
aggaattcggcacgagggcggactgcggcgatcgatttgggaggagaggattcagacgacgatcgatcgctcagaattcagatgaccagcgtgaggcgagcagacaaacgcagctgattcgacggattcagaatggcatcatcagttgcaggctcagtgactcgtcgtcctcctcccgtgctgctggcttgccgatcgcgaccaaataatcgtcgcctcatcagattgttaccgctcctcttcgccgtcgtcgtcttgcttgctcttcttccaccatgcgttcatggagctcgtgctctgaatgatgccaaagaagccaaagttgcagaggccagcgaccagacgacgacgacgacgcacgccgcggcggcggcggtggctcggtggtctgtcaccgtgagggaaggaggaggtggtggtggtcacggcagcggccatgccggcgccggccacggccacggcagcggccacggcaggccggagccagccgagcaccacacgggcaggcgcagcgcggcggccggatccgtgcg

SEQ ID NO: 14984 - DNA, 232 bp, Oryza sativa
  Clone ID: PAT_MRT4530_2086C.1
agcaaaaataacaatacatgcggctaatcgatacatgtgctgttccatgttacatcatcaccaaaaagggaagggaagggaagtgagccaacccaacaaaggcctgattggataatttctaactcattatcttcctatgaccacaattatagtggatcgtattacttcttaatccaaagaaggatgcttatttacatcgccatagaaggatttggcacgtacgaaagactat

SEQ ID NO: 14985 - DNA, 417 bp, Oryza sativa
  Clone ID: PAT_MRT4530_20870C.1
ctttaaccaagatgacgaaagtgaggaggaaagtgaaagtgatgagtaacaaatggcgtcagaagggaacatttggatctgtccagcacttttaaatgtgtacttgagtaagttaatttttggctaagtgctgtgattcgagccaaaataggatcttccgatgtccaatgaaaacaatcttcaatggtcttgaggacagatcatggctcagaaagaatcacagtacccttattgcgttgcgcttgctaaaatcatttgagtttctctgttccaatcttaagtacagacatgaacaaaacgaaattgcaatggacagcagctggtttagtcattgcaatggacaggttagatacctgaaatcactttgtattattccaaattgagctatgatcttacatgtatttttgattgatacat

SEQ ID NO: 14986 - DNA, 447 bp, Oryza sativa
  Clone ID: PAT_MRT4530_20871C.1
cgtcgagtggggtggtgctagagcaggaggccgcgagcgaagagtcaacgtctcaacgacgaccgtgactggagatagcttgcattggctcaatgatgtcgacgtaggccgtggtagtgagcagggtggcgctggagtaggtgtgcccctagcttgggagaagccggccggggaggaagggccgaatagagagagagatagagagaagggaggaaggaagaagggaaagaaggagataatgataccggcggcgcggccacggcacgagatgacgacgcgctcgcagatccaacctctccccttccgcaggacgaggatggacgctgccctcgccgccagctcgtgtcaggcggtgacggacgcaatccgcgacatctacgctcaagacatggaaaagctcaacttcgagcagctctacaggatagtttttttttttgtgcctgattg

SEQ ID NO: 14987 - DNA, 201 bp, Oryza sativa
  Clone ID: PAT_MRT4530_20872C.1
atgaggagatctggcgaaagcaaggtggggaaggcggtagtggcgaggtcgacggagacggcaagtgaggtcgacggcgacgacaaggtgggaaagatgatgacgaccacggagaggacggtagctcaggaagacgacgacaacgtgactacggtgagggctggagcttgggaaggtgacgatgacttctcggggccctag

SEQ ID NO: 14988 - DNA, 351 bp, Oryza sativa
  Clone ID: PAT_MRT4530_20873C.1
atgcccgacgtcatctccgcccccgatgctgaaaccaccggcggcggcggctcgtcgccgcacgtggagaagctgaggaagatgctgttccggaggatgctggtgggggtgaacgacgggcgctacttcctcgggctgttccactgcgtcgacaagcaggggaacatcctcctccaggacgccgtggagtacaggaccagcgcgcggcggcggtcgccgtcttcgccgtcgtcttcacccgcggagcagcgcggcctcggcctcatcctcatcccggccgcctgccgctcctcctgccatgtcgactgcgccgtcgaggagagcatgtcgctcctctctctcgacaggtga

SEQ ID NO: 14989 - DNA, 1029 bp, Oryza sativa
  Clone ID: PAT_MRT4530_20874C.1
cggacgcgtggggcgccgcgagcgaggccatggccatgatgctgcgcctgcagcggggtccggccgaggtccagatggagctccgccagttccgccgcttcgccgacgagaagatggcgctcgacgccgccgagatcgaccacctccgcgccgccctcgcccgccgcgcccgccacctggcgcgcctccgctccacgctccgggagtaccgccacacgtgcctccgcctcggcatcccactcgccgagggcgaccaagccgatgagttggccctagacgacgggttcgttctcgagggcgaggatggcgacggcgccggatactacccagagctacgctgctacgacggggagtactactacgaggatggccaaaaggagggcgaggaggaggacgatcccgttgtcgtcgatctggagcgccggatctacctcctcgagcacgaccacaaaaaccatggagttgagctgtgcttggaggaagaggaaggcgctccactttacgcagacgagccgctgccggattcatctgagcaggaattgaacagcgtatatgtcgacgaggcattgcctgaagggactgtgcaggaaagaaaccaatgcagtgatgatgatgatgagttgccggagtctccagctgctagaaatggcagtgaggaagagggaagcgatagtgatggtggtcgcagcggcagtggcagctatagggtatacacaatcgacaaggtgcatcaaggtgctactgctccagcagccagggtcttagagaattaccaggatggggaagtggagccagacattaagaagctatacatgagactggaggcgctggaggcagaccgggagtcaatgcggcaagccctggtggcaatgcactcggagaaggctcagcttgtgctcctccgggagattgcacagcagctagcccaggatgcgactccagctaacacaggaggatttggggtggtgccaactgtgcaccattttcctggaaagcaagatgggttcagagatcagaggtttcgggaaa

SEQ ID NO: 14990 - DNA, 309 bp, Oryza sativa
  Clone ID: PAT_MRT4530_20875C.1
atgacggcgtcatttccagcgatggcaagctcctcctcttctctagtgacagtgacacatccagctccaatagagaacatacggattgaggcttggggtttagatcagggtaggaggtggtacttggtacaagagaagaaggaggtttttctggcacatagaggaatgaccattggtggcggtgtgaacgaggcagcgcagcattgtagctgtgggacgggaagctggcgatgggcaaggttaggggcaacaataatggttaaagatacagtggtggtggaagcagatggcacaagctgccagagatga

SEQ ID NO: 14991 - DNA, 282 bp, Oryza sativa
  Clone ID: PAT_MRT4530_20876C.1
atgacggttgtgatggttggaatggtcggtaataccctccaaccgtcattggggcttcatctcaactatctagccaaaacctggatccaacggaggcaagggaggttcggccgaaccaggggccggcccaaccagcccacctttcggctggcagcatcctctgttgctcctttatatagacttgtgaattttggcccagtttgacgtgttaattctgagttcttggcccattcatgcagaagtctgattctcgacatcgtccgactgatttatcttctatgt

SEQ ID NO: 14992 - DNA, 1200 bp, Oryza sativa
  Clone ID: PAT_MRT4530_20877C.1
atggcgggggaagggaggagccacgaggcggggtcgctcggcgtcggcgccggatgcgatttgggacttctcttcgtgcggcggcgtgaggaacgaacgacggaggagagagccctactagggcttacctatgaactagactacaaagggaacatttgtgcagtaggcatggtgtaccaaagtggggtcaaggacaacaagattaaccttgctgatgccaaagccatctgcctgatggagtgccccattccagcagcagacggattaaactttgtttgtgattatccagaaggggacattcgcctctctatcgatgattggatcaacagggactatgattattttgagtttctcgcaccagatatgagaaatagttctcttcagctgcagggtccatgctaccctgtcatatttccaagtgtgaatgtctactggagctgccaatttattgcgcgagcatccaatgtctctttgaagcattggcagcagatgggtggtatcaacatcgacgaaaatattctcatagataaaacaatacacaaggccatcaattctaaatcttcagtcttgaagagatacgttgctgacattgggaagtcatggcctgtgttaattgtttgcggtggactgctccctcttttcttgtcagttatctggttgcttctgattcgttattttgttgctgccatgccatggataactgtagtggtcttcaatgctctagtaatctctgttaccatgtttttttatattaaagtggtgatgacagtagtaatgattattgcatttctgacctccatagctattatccgtcgtatactgatagcaacacctgtcctgaaggttgctgcgaaggtcattggtgaagttcaggcactaattattttcccagttgtgccatactttatcctcgctatcttttatatgttctggttttctgccacactccatctcttcagctctggtcaagttctccgaaatgactgcaatacagattgttgctcatatgatctgaagttgggcaaagtaaactgtgacaactgctgtgggtacagcatccattacacccctcatattggtattgccattcttttccacttatttggctgttactgggcaacccaattctttattgcttgctcttcaaccgtgattgctggatcagttgcttcatactattgggcacgtggtgaaatatct

SEQ ID NO: 14993 - DNA, 2157 bp, Oryza sativa
  Clone ID: PAT_MRT4530_20878C.1
atgggagggccgctcggcgccatcataggcaggcacccggcggcggcgggcggcggcggggaggatggcatcattcggcacaaccggcggtgccgggatttggccttcctggtgctcttcgcggccttctgggtcgccatgatcgtcaactctagcttcggattcaaccagggcaatccactcaggcttacctatgaactagactacaaagggaacatttgtggcagtaggcatggtgacccggatttgcatgagcttgatgttagatattggatgaacccaaaccaggtgtaccaaagtggggtcaaggacaacaagattaaccttgctgatgccaaagccatctgcctgatggagtgccccattccagcagcagacggattaaactttgtttgtgattatccagaaggggacattcgcctctctatcgatgattggatcaacagggactatgattattttgagtttctcgcaccagatatgagaaatagttctcttcagctgcagggtccatgctaccctgtcatatttccaagtgtgaatgtctactggagctgccaatttattgcgcgagcatccaatgtctctttgaagcattggcagcagatgggtggtatcaacatcgacgaaaatattctcatagataaaacaatacacaaggccatcaattctaaatcttcagtcttgaagagatacgttgctgacattgggaagtcatggcctgtgttaattgtttgcggtggactgctccctcttttcttgtcagttatctggttgcttctgattcgttattttgttgctgccatgccatggataactgtagtgctcttcaatgctctagtaatctccgttactatgtttttttatattaaagctggctggttaggcaatgatcccttgacagttgtaattggtgaaagtgatccatatgtgcatataactggacgggaaataagccaccttcatgctgctacggtggtgatgacagttgtaatgatcattgcatttctgtcctccatagctattatccggcgtatactgatagcaacacctgtcctgaaggttgctgcgaaggtcattggtgaagttcaggcactaattattttcccagttgtgccatactttatcttcgctatcttttatatgttctggttttctgccacactccatctcttcagctctggtcaagttctccgaaatgactgcaatacagattgttgctcatatgatctgaagttgggcaaagtaaactgtgacaactgctgtgggtacagcatccattacacccctcatattggtattgccattcttttccacttatttggctgttactgggcaacccaattctttattgcgtgctcttcaaccgtgattgctggatcagttgcttcatactattgggcacgtggtgaaatatcccatgacataccatttgttacagttgtttcttcattgaagcggttgttgcgttacagccttggttcagttgctataggttcacttgttgtatctgctgttgagtgggtgcggtttatactagaatgcctcagacgcaagttgaagctatttgattccgctcgtgaaagctgctttggtaaaatgacatcatcctcttctcaatgctgcctgggctgcatagactggaccctcaagtctgtgaatcgaaatgcctatataatgatagccattactgggaaagggttcttcaaagcttctgttctcgcaactggtttgatcatgaataacatactgcgcattggaaaagttaacgtcattggagacgtcatcctctttctggggaagctctgtgtgagcttgttctgtgcgctctttgccttccttatgttagacactcacaagtacaagtctgcacataacaagatatcatctcctcttgttcctgtagtggtaagcacatttccattgctaagacctaaaggtgtctgtatatattctgatgctgctacactgcaggtatcatgggcacttggttttatagtcgccaagcttttcttccaagtcgtcgagatgtcgatcgacaccataatcctctccttctgtcaagattcagaagagcaccaagggaacgcgcagtacgctccccctctcctagtggagacactggatgaacagagtgaactccatagactaactcaa

SEQ ID NO: 14994 - DNA, 2284 bp, Oryza sativa
  unsure (1)..(2284): unsure at all n locations
  Clone ID: PAT_MRT4530_20879C.1
atggcgggggaagggaggagccacgaggcggggtcgctcgacgtcggcgccggatgcgatttgggacttctcttcgtgcggcggcgtgaggaacgaacgacggaggagagagccctactagggcttacctatgaactagactacaaagggaacatttgtggcagtaggcatggtgacccggatttgcatgagcttgatgttagatattggatgaacccaaaccaggtgtaccaaagtggggtcaaggacaacaagattaaccttgctgatgccaaagccatctgcctgatggagtgccccattccagcagcagacggattaaactttgtttgtgattatccagaaggggacattcgcctctctatcgatgattggatcaacagggactatgattattttgagtttctcacaccagatatgagaaatagttctcttcagctgcagggtccatgctaccctgtcatatttccaagtgtgaatgtctactggagctgccaatttattgcgcgagcatccaatgtctctttgaagcattggcagcagatgggtggtatcaacatcgacgaaaatattctcatagataaaacaatacacaaggccatcaattctaaatcttcagtcttgaagagatacgttgctgacattgggaagtcatggcctgtgttaattgtttgcggtggactgctccctcttttcttgtcagttatctggttgcttctgattcgttattttgttgctgccatgccatggataactgtagtgctcttcaatgctctagtaatctccgttactatgtttttttatattaaagctggctggttaggcaatgatcccttgacagttgtaattggtgaaagtgatccatatgtgcatataactggacgggaaataagccaccttcatgctgctacggtggtgatgacagttgtaatgatcattgcatttctgtcctccatagctattatccggcgtatactgatagcaacacctgtcctgaaggttgctgcaaaggtcattggtgaagttcaggcactaattattttcccagttgtgccatactttatcctcgctatcttttatatgttctggttttctgccacactccatctcttcagctctggtcaagttctccgaaatgactgcaatacagattgttgctcatatgatctgaagttgggcaaagtaaactgtgacaactgttgtgggtacagcatccattacacccctcatattggtattgccattcttttccacttatttggctgttactgggcaacccaattctttattgcgtgctcttcaaccgtgattgctggatcagttgcttcatactattgggcacgtggtgaaatatcccatgacataccatttgttacagttgtttcttcattgaagcggttgttgcgttacagccttggttcagttgctataggttcacttgttgtatctgctgttgagtgggtgcggtttatactagaatgcctcagacgcaagttgaagctatttgattccgctcgtgaaagctgctttggtaagatgacatcatcctcttctcaatgctgcctgggctgcatagactggaccctcaagtctgtgaatcgaaatgcctatataatgatcgccattactgggaaagggttcttcaaagcttctgttctcgcaactggtttgatcatgaataacatactgcgcattggaaaagttaacgtcattggagacgtcatcctctttctggggaagctctgtgtgagcttgttctgtgcgctctttgccttccttatgttagacactcacaagtacaagtctgcacataacaagatatcatctcctcttgttcctgtagtggtatcatgggcacttggttttatagtcgccaagcttttcttccaagtcgtcgagatgtcgatcgacaccataatcctctccttctgccaagattcagaagagcaccaagggaacgcgcagtacgctccccctctcctagtggagacactggatgaacagagtgaactccatagactaactcaagggccttgacttttcttcttcttgcaagtagaattaagtcagaatggagaaattaagtagaagccttgtcattatgttctttgttgctggcttttgggtaatttcaccattttggtagtgcactctgatgctgaaagtctggtctatagcgtgactagtacccctggcctgatctaacgtatgtactcctactattactntgctaatacaatgatagtgaagaaggttatatcttgtctgaaaaaaaaaanaaaaa

SEQ ID NO: 14995 - DNA, 150 bp, Oryza sativa
  Clone ID: PAT_MRT4530_2087C.1
atggttaacgcggccatcaaaccacagtttcagacgaaccctagcagggttttcaggttgtacgaaccagcagacaacgaccagggctctggttcagaccagggctctggttcagacagctacaggccatgtagcttgacagcaacctga

SEQ ID NO: 14996 - DNA, 2476 bp, Oryza sativa
  Clone ID: PAT_MRT4530_20880C.1
gacaaccgcgagctaccacagcatcggatcgagggcgagcggcggcggaggcggcggaatgggagggccactcggcgccatcataggcaggcacccggcggcggcgggcggcggcgggggggatgagctgggaggtgtcggcggcggcggcggcggggatggcatcattcggcacaaccggaggtgccgggatttggccttcctcgtgctcttcgcggccttctgggtcgccatgatcgtcaactccagcttcggattcaaccagggcaacccactcaggcttacttatgaactagactacaaagggaacatttgtggcagtaggcatggtgacccggatttgcatgagcttgatgttagatattggatgaacccaaaccaggtgtaccaaagtggggtcaaggacaacaagattaaccttgctgatgccaaagccatctgcctgatggagtgccccatgccagcagcagacggattaaactttgtttgtgattatccagaaggggacattcgcctgtctgtcgatgattggatcgacagggactatgactattttgagtttctcacaccagatatgagaaatagttctcttcaactgcagggtccatgctaccctgttatatttccaagtgtgaatgtctactggagctgccaatttattgcgcgagcatcaaatgtctctttgaagcattggcaacagatgggtggtatcaacatcgacgaaaatattctcatagataaaacaatccacaaggccatcaattctaaatcttcagtcctgaagagatacgttgctgacattgggaagtcatggcctgtgttaattgtttgcggtggactgctccctcttttcttgtcagttatctggttgcttctgattcgttattttgttgttgccacgccatggataactgtagtggttttcaatgctctagtaatctctgttaccatgtttttttatattaaagctggctggttaggcaatgatcccttaacagttgtaattggcgaaagtgatccatatgtccacataactgggcgggaaataagccaccttcatgctgctacagtggtgatgacagtagtaatgattattgcatttctgacctccatagctattatccgtcgtatactgatagcaacacctgtcctgaaggttgctgcgaaggtcattggtgaagttcaggcactaattattttcccagttgtgccatactttatcctcgctatcttttatatgttctggttttctgccacactccatctcttcagctctggtcaagttctccgaaatgactgcaatacagattgttgctcatatgatctgaagttgggcaaagtaaactgtgacaactgctgtgggtacagcatccattacacccctcatattggtattgccattcttttccacttatttggctgttactgggcaacccaattctttattgcttgctcttcaaccgtgattgctggatcagttgcttcatactattgggcacgtggtgaaatatctcatgacataccatttgttacagttgtttcttcaatgaagcggttgttgcgttacagccttggttcagttgctataggttcacttgttgtatctgctgttgagtgggtgcggtttatactagaatgcctcagacgcaagttgaagctagttgattccgctcgcgaaagctgctttgggaaaatgacatcatcctcttctcaatgctgcctgggctgcatagactggaccctcaagtctgtgaatcgaaatgcctatataatgatcgccattaccgggaaagggttcttcaaagcttctgttcttgcaactggtttgatcatgaataacatactgcgcattggaaaagttaacgtcattggagatgtcatcctctttctggggaagctctgtgtgagcttgttctgtgcgctctttgcgttccttatgttagacacacacaaatacaagtccgcacataacaagatatcatctcctcttgttcctgtagtggtatcatgggcccttggtttcatagttgccaagcttttcttccaggtcgtcgagatgtcgattgacaccataatcctctcattctgccaagatgcagaagagcaccaagggaacgcgcagtacgctccccctctcctcatggagacactggatgaacagagtgaactccaaagactaactcaaggaccttgatcttttctttatttttttttcttcttgcaagtagaattaagtcgaaatgaagaaatcaagtagaagcctggttattatgtaatcatgttccatgttgctgggtagtgggtaatttcaccattttagtagtgcactctgatgctgaatgtctggtctctagcgtgaccaatacccttggcttggtctaacgtatgtactacttttacttagttaagtacaatgttagtgaagaaggttatatctcaaaaaaaaaaaaaaaaaaaaaaaaaaaaccccaaaacc

SEQ ID NO: 14997 - DNA, 515 bp, Oryza sativa
  Clone ID: PAT_MRT4530_20881C.1
ttctttattaatcttactcagtaaatcatatcaaggtggtccaattgccttgagagcactcccgtacgtatccaatttcgttaaggcatgcatgtacgcatgtatttaaaaactcagatttgttggtttggatgaacaattggctagatcatatgtgtctgtttagttcacagaaaccgtgtaagttggtttatatatagttagtttggagtatttccgtacgacattactggttttgtagctgttaactgttaatttcatcacaagagaaaactttgcttctttatactaataaggaagatgattttatattcccagagaaaaagtacttctcaagatttatatgtgcggcaccttctataactgggcggaattggatggacccatagggaggagtattttacaacggataacttcaagttctttttgttgcacaaattacgcacaggggatattgcataacaatgaagaaatagccgtgaagaaactcaccagaaaaagattgagagaagtgg

SEQ ID NO: 14998 - DNA, 263 bp, Oryza sativa
  Clone ID: PAT_MRT4530_20882C.1
gagacaaaacattttctcgatgcttgatgggcaaactactgactactgattctgggtgcgctttttcttacatacaagatgaacgcgaaacaacactaattgtagctaattctagccaagaaccaagcatgagcaaggctatctccggcgaggaggcggcggacaggaggggccgacgtcggcgacgcggagcgagtcccaaaagacgggccagttgcggcgcgcctcgatccaaccgaggagggagccctatctggcggggt

SEQ ID NO: 14999 - DNA, 456 bp, Oryza sativa
  Clone ID: PAT_MRT4530_20883C.1
atgtggcctgcagatgttactcgtgcaactaatccatttgaaaaccggagattcaagtacaagaaactcaagttcatcacagatggcttcaaaaccacaattgggaagggtgggtttgggcctgtatacattggttatctggagaatggaactcccgttgccgtgaagatgagatcacaaacatcctctcaagggaatacagagtttttggctgaggctagggtccaccacagaaaccgggtatcattaataggctattgcaaggataagaaacatctggcccttgtgtatgagtacatggatgggggaagcctagcggaccacttgaaggctatcagttcaatcctcttaaatagtgaacagcttgcagattccatctttttcttcttcacaggactggagtacatgcacaggtcctgcagcccaccattgatctctatcaccattgatccatag

SEQ ID NO: 15000 - DNA, 127 bp, Oryza sativa
  unsure (1)..(127): unsure at all n locations
  Clone ID: PAT_MRT4530_20884C.1
tttagtcttcgccatgtgttcttgtatctggcaaatncggttgggtcagcaaacatgtgtggggcttattgaaggcacaaactctaggtgatacttcaagcttagagttcaatgagaggaagaagga

SEQ ID NO: 15001 - DNA, 435 bp, Oryza sativa
  Clone ID: PAT_MRT4530_20885C.1
atggatgtgcactcggagaagcaagctctcgggttctctatcaaatcaaatggtgcactggaagagacccgttatgcgccggccctggcacggcgtccgaaggttagcccgctcatcagagccgccgatgaggcgatgacctctccgggccgtcgcctccctcccctcccctccgcccgtgcgcccgcctgccgccgcactcctctccgccttccgctgccctcccctccaccctcccatccgctgcctgccgccaccctcccctccgcttgctaccgccctcccctccgcccgcccgcctactgccgcctgccacggtgctcatggcgcgcagccacacaccaccgcgcgccgctgccgcgcggccgctgcccactacggagagggccggggagggcaggagggtatcgaggagaggggagggagaggaggtag

SEQ ID NO: 15002 - DNA, 282 bp, Oryza sativa
  Clone ID: PAT_MRT4530_20886C.1
ccgagaaacccgccctcaatagatgaggcaaaagcaagttaaagtcccaacttcctttcatattggtaacaaacctcggttccttgaaattcctaccaaaagtacccgagtttgccatgggattttgtgagttccattttgggcaaaattaaaaaattgcccagacagtccaacgacttgtttgggccaatcatctctgcccaaaggactttgttgagggtggcccctgctgaattgaggggtttaattagaccgccttgtcctgtacaaaacaaatttaat

SEQ ID NO: 15003 - DNA, 665 bp, Oryza sativa
  Clone ID: PAT_MRT4530_20887C.1
atggcagtggggaccgtggctctgcaagccgatcccgcgctcgcagaagaaccgcccgaagcgccgcgcctgggctcgggaagggcgaagccacggtccaaggccacgcgttggcggagccggagccccgtgcgtcgcctcgaccaatccccagatccgccgccaccgctactcttcaccgccgacggtcacgaagaaggaaggaggagaggaaccgctgccgttatggcccctgctgccagatccggcgagcccgcgcccggatctggcaagctcgtccgcgccgtcgtggggggaggaggacggtggcgtcgagccatccgccgccaccgctgctcaacgctgccgccagatccaccaccaccgctactcaacgccacctccagatccgccgccgctgccgctccctgccaccaccaaagctcgagcgccgctgatggggagctcgcggcggagaggggagaggagaagccgtctcgcggcagagaggggaggggagaagccgtctcgcaccggagaggggaggggagaagctggcgagctccgccggagaggggagggatctcgccggcggggtggagtaggcatcggtggaggtggagaaggggattggaggagcgggtcggtcgcgtgtgagaagggcaacgggagagagaagggggaga

SEQ ID NO: 15004 - DNA, 177 bp, Oryza sativa
  unsure (1)..(177): unsure at all n locations
  Clone ID: PAT_MRT4530_20888C.1
actagttctagatcgagagctcgtggtcgctggacctctactacgccgatcacagcaacgccggcggcggcggcggcggcgcgggcgatgtttgcgccgccaggagcccctgctcgtgcggctcctcctnngcngatgcgtccgaggtgtctgtggtctttttctttatcataataa

SEQ ID NO: 15005 - DNA, 379 bp, Oryza sativa
  unsure (1)..(379): unsure at all n locations
  Clone ID: PAT_MRT4530_20889C.1
ctgaaggcaaacagcgtgccttggcaattgggatatacaaaagatgtcagcaaagggacatnaagacngtcggncaaangaattggagttgacnatatgcactatctaaatgatggcctgtggaanatggaacggctcnaataagttnaatccnctacggaagcataatttgctgcnccntattgaaatgtnatgagggctggaattatgtatcactgcatctcgtgtcatgtnaacacataaaatagccagcgggnngcgtggtgctccanncctgttccantttactgtgaccatcaagttttgggagatgtttggcccnactttnactgnttttgctgtgttccacncttccacttggtattatcaatccacaaac

SEQ ID NO: 15006 - DNA, 177 bp, Oryza sativa
  Clone ID: PAT_MRT4530_2088C.1
atggagataaaacatatccagccaccaatacttctagtcttgaaggagaacttgttcttgacattcatgttaactggattagccgatgagaaaggcattcaaggtgttggaccaaaagtaggaggctgccgacatcatgggctcgtccttagccatatcggctacagtcaaggctaa

SEQ ID NO: 15007 - DNA, 198 bp, Oryza sativa
  Clone ID: PAT_MRT4530_20890C.1
ttttcacatagaactagaacgcgagcagactgctctaaattccattgcacatagagagacaccatatgcaggtatatgcagctggaaaattttctgataccacttggctttctttatcttcagctcaaaggttagtacaaggatccatagatcttggatgaagctatctctagccctaaaaacttgtagagactccac

SEQ ID NO: 15008 - DNA, 475 bp, Oryza sativa
  Clone ID: PAT_MRT4530_20891C.1
tcgggtttgtttcactggtctttggacgagcttctgagccagcgaccgttttacatctggcatcctcatgactgtgaatactgccggcaattatttcgtggctgctgacttcccttgtgtaaaacagatatccgaatgctctgtgtacatggctgtaatttgacacagggctattgaaggctggatacctgatatgtgatacatgtaattgcttggcattgccaatgccaaccatacggtagaagaggccagcaattcatcaggcctaggtctacattcttctgtaacttgtgcgatgagtaggatctgctatgtaccaaaacacagatggaaaccatctcttagtttcatgttcgctgttgtgattctcaatatagctactcctatcaaatcaatatactgttctggcaatatagctactcctgtcaaatcaatatactgttctggtctgacataaaaaaaaaaaaaaaaaaaa

SEQ ID NO: 15009 - DNA, 206 bp, Oryza sativa
  Clone ID: PAT_MRT4530_20892C.1
cgacttgagcttgttgaaggtgtctcacgacgcggacatgaggaacttaatggcggacctaaccctgaaggaaaacaggaggggggagctgaacttgacaagcatggcgacgccccactacgagccgcagactagcgggggagggccacagccgaccgcacaccggcgctgtgacagtgccaaaattggacgcaagcggaaaagcg

SEQ ID NO: 15010 - DNA, 2066 bp, Oryza sativa
  Clone ID: PAT_MRT4530_20893C.1
cccccgtcgagctcgtcgtcgcctgcccccgcgactgctcgggggtgtgggtggccgcggcgggcgtcggcatggcgagcgccgccgcggcgacgggcgcggcgctgggggcgcgcacggcgcgggcgtgcgacgggtgcatgcggtacagggagaagcggcggacgcggctcttctccaagaagatccggtacgaggtgcgcaagctcaacgccgagaagcggccgcggatgaagggccgcttcgtcaagcgcgccgccgccgccgccgccgtcgccacggcgtgcgtcgcgtaagcgctgcatggcggaagtttgatctgccggccgcgcgctcgccatgaaatcacacaagaaccaaacaactcgtcgaaactgcattagttttgggtggtttctttcacggtcacaaatgcgtcttctttttccatcagttcgccattgatggttgccaaggatccaaggacttttaataataattattactataataataatgataatcctgataagtgaattgtactatctgttgtgaggtatccaggtgttcgacgccaaactcgtcgagctctacaacgccgtgtcccccgccgccgatgcgcagcagatcgagcagaaacctgcttctcgcggcgttccatgcttggatccgtgtccattggtcgtcatgggcgggtacagttcggggcgactagatagacatgaaaatccagtcatatcgctatatagacacgcagtggattcgcgagccgtcctcataggagtcgaggaggggttagacgatctgggactcttacacgacggaagaccttacctgggtgccaacatgtacatagacatacatcttgcggccatctgctggacatcgacttcgactacggctcagctcaggcggcgacgacagccgacgagactcaagctcgactacgagggcgtcatcgactcgtgggcccgcgacggagcctcgccgtggttccacggcgagcgccctcgcttcgatcccagcgagtcatggccggacttcccggcgggaagccggggagggctcggcgcggcggtgacggcggtgaccggcggcgagagggaggcgcgggtgtcgcggtacagggagaagcggcggacgcggctgttcgccaagaagatccggtacgaggtgcgcaagctcaacgccgagaagcggccgcggatgaagggccggttcgtcaagcgcgccgccgcgctgccgccgctcccgctgcccaggcaccagcatccgccgccgccgccgccgcgcgctctgccgccggtgccgatgatgctcgcgccgcgcggcgcgcacgggcgctaccgtttttgagagctaccgctctcgatcggcttccgatgcgcatgcgcgcgtcgtctagctacatgcatgcatgcatgctagcgatagccgtttgcgtgatccaacaataagtacaaaaatactactatatatatatacaaacatacaaactcgtcgaatcatcgatcgtagcatgttggtttcaggtttaattgtttgggggtagtgttagttttgagcagaattaatctttgtgaattagggcgccctaccactctactatacgtaccaaatgtaccatgcatgtgtgcactgaagcagccggcaggttgtgtacttgtgcacaatttcatgtgcaaattaagtaggtaagttatgtgtgtggtagctaggctaggatgtgtactttcttggttttctgtaagaaagatcctgctaattataaaggttgttgtagattttgatcccggatcaatgtatgtaaaggcctatatgtatatactggtatatatatacagtgtttaagatcaaagtagagaaattacaatgggagcttgtatagttataagcatgtaagtatgtaactagaggatgttgaagcggaaatggctagtgttcttctatttgtatgcatgccttccaatgctttgtgccgttgttgggtgatctcaagagcactaactgttgtaatcacgtgttaaatatttttggataaaaaaactatagacatgtttatagtgtaaaaaaaaaaaaaaaaaaaa

SEQ ID NO: 15011 - DNA, 495 bp, Oryza sativa
  Clone ID: PAT_MRT4530_20894C.1
ttccggtgaacgccggcgtgttcccggagcacaagtacgagatcgtgaggttcattcaacgaggaggccacctgtgctgaccggcaacggcgtgaacgacgcgctggcgctgaagaaggccgacttcggcattgccgtctctgacgcgacggacaccgcgaggggcgccgccaacatcgcacgcgctagcgctgaagaaggccgacatctgcatcgccgcctctgacgcgacggacgccgcgagggagcccggctgagaggcacacatgctgagagcgcatgtgcaatctgtgatgagaccgaagcgtgtggattctgatgcaattcgatcggctcagacggtttgatttgcttgggtttagcttcatggcgttgtatcttcagagttcagagtaaaattactatagctttttgcatgcaaaatgtcagaaacttatacggaacatgtcgattttcttttaatgattagagatgaaatatgagtttgcccctgat

SEQ ID NO: 15012 - DNA, 326 bp, Oryza sativa
  Clone ID: PAT_MRT4530_20895C.1
acgtggcggagggagcgagtggggcgaagacccaggccatcagtacacaacgccccaaccgtccctcaccgcatggcggacgtgcggcgcagcccgattgattaacgtcaatcgcgcatgaccggattgtgaccggcctgtcgctggtcacatccgatagaacgggcggcggtgcccccacgttccgccctgtgcgcggcggagtgggggcagggggaatgacaagggtgtcccccgtgtcaggcggcaggcgacgctgggccccactcgaggacggacggctgcttagctttcgggcgaaggcacgaaaggtggtccggtccaag

SEQ ID NO: 15013 - DNA, 437 bp, Oryza sativa
  Clone ID: PAT_MRT4530_20896C.1
cggacgcgtgggttggatttaaatgtttaaagattgtttgtaaactgctacagtatacgtagcggctagtgtaagttaaccctatatgtaaacctagttgaatattattccctccgttgaaaattataggacacataatatttcggaaagtcaaattttgtgtgtttgaccaatgattaatcaaattataagtatatttagtgcataaaacttatatcttttaaaaaaatttcccaagacattagttctacagataacaagaatatattttataggtggtcagtggtcaaatcttgtcttaagtacttgttccaaataaaatatgccctatggctataatctgctacggagggagtaacttctactatatgaaaaccacaattctacgcaatcatgtttggagttcgccaccaagcactgagagtcagtgtgttaca

SEQ ID NO: 15014 - DNA, 298 bp, Oryza sativa
  Clone ID: PAT_MRT4530_20897C.1
ggggaaaaaacaaccctccccccttttttatttttttaaccgaaccggggaggggtttttttttttttttttggaaaaaggcggcatacgccatttattgaccaaacaacctttttacaaaacatgccccggaggtaatcccctttttttatccgggccccagagcccctacaaaggacttcgtgtcccacctttacaatgggcccccacattggccaaaccggcccccatggggggaccccggaatacttgaccgggacctgagggggaccccaagttccccctgtgagcgctatta

SEQ ID NO: 15015 - DNA, 513 bp, Oryza sativa
  Clone ID: PAT_MRT4530_20898C.1
tccgagaggactgagacgctccacatccaggaagcacagcgccaattaccaatcctgacacggggaggtatgacaataatacaataccggcgctttagtgtctgtaattgaatgagtacatctaaatccctacgaggatccattggaggcaagtctgtccacacccggtaattccagctccaatagcgtatattaagttgttgcagttaaaaagctcgtagttggactgggccggccgccggtccagcctcacggcgagcaccgacctgctcgacccttcccgcgatgcgctcctgcttaactgccggtcgtcctccggcccgttacttgaagaattagagtgctcaaacaaccatcgctctggatacattagcatgggatacatcatagattctcctatgttgtcggatcggatatgataataggacatcgggcatctattcatatcagagtgaatctgattatgaagcgacactgcgaacattccaggagtttcataaccaaaaaaaaaaa

SEQ ID NO: 15016 - DNA, 1629 bp, Oryza sativa
  Clone ID: PAT_MRT4530_20899C.1
attcaggggagcccacttagggactgtacacaggtgaaaggatataaactagacggaaatagtttgtgttgtgctctcatgctgtcctagtatggcacagtatcgtgtcgagcggcagcaccagcatgactctgactccgccggcatcgccgccgccgaggatgaggaggagggatccgaggtgtcccggcaccgtcccataagcacactggcctgttctattcaaatgtcgcaatccaaggaagtgaggtacactgcacgttctattacgcctcctgcagatagaaatggcacttcaaagtcaaagtcacccactccagtgagacgcagtacctctaggtcacctcctccaaagaagagtgattcaaggtctccacctccaaggaggcgcagtacttcaagatctcctcgccctagaagacatggcagatcaaggtcaaggtcaagggataggagtcgctccaggagccgagacgatgatttaagaaacccagggaataacctttatgtgactggattatccactcgcgtaactgaagaagaccttgagaagttctttagtaaggagggaaaggttcaaagctgtcatgttgttcttgatcctcgtacgaaagaatctcgtgggtttgcctttgtaactatggattccgttgatgatgcaagacgttgcataaagtacctgcatcgcactgtacttgaaggtcgcctggtcactgtagaaaaagatcatcatcctagagatcctactatcaggatgggatattacaatggccctaccagatatagatactactggtccatcatgatatgtattgaaaggttctggctggactgtgatgtaataggatcatacctgaagagatgtatagggaagctacaaccttgcaatgtgagaatggagaaagacctcttctctgcctgttcaaatggggtcttaactcctcgtgctgacttcctgaacttccagtttatatggctaaaagaactcgggagagaactcctacacctggaaaatattgtggccgcagaggctctcaaagaagttccaggagcccatcaccttaccggtctcgcagaagggagcgatctcgctcaagagatcgtcagagggaccgctcacgctccagggatcgccgcagggaccgctctcgctcgagggatcgccgcagggaccgctctcgctcgagggatcgccgcagggaccgctcgcgctcaagggatcgtcggggcagctctccacatgacagagattctcacaggaggcgtggagacaggtccaggtcaccggctaccaacgggaaccacaaaaaggactagcaagttttcccttcgggtgtttgtaggactggatttctgtttccgggatattattgagtaccggtgtgaacttaatggttcagtatcagacagcgtggtatggagtctcctagcagcttggctgaaatttggttaagcgcgttatccgcttactttctgatgagaagatattatatattgttataacttatatgatatttcagtgtgttctgggacaaaccgcgaacgattgaactttgtggaattcatatgattggttgcttattcaactggattgtttcgtcattttgaactcaaaaaaaaaaaaaaaaa

SEQ ID NO: 15017 - DNA, 1247 bp, Oryza sativa
  Clone ID: PAT_MRT4530_2089C.1
acccgcgattcccggtcgcctcctcatgcttcctagtctaaattggctgcacatctttctcatcagatagcaatcccaagtctagctcatccaaatcagtatttcttggtccaatcggcaattcggatcccactgagtttattaatgccgaaaccaacagggttcccttcagattagccaaccctagcttaaaccattggacaaacaccttcgaatcttggccaacgaccaacaaaaactggccagagtggtacaatagggtatcggctagtaagcaaacacactgggaagaacttgggatagccaagagcttagccttgactgtagccgatatggctaaggacgagcccatgatgtcggcagcctcctacttttggtccaacaccttgaatgcctttctgtttaaccaaggaccaatgacaccaacccttctggatgtaaccatgctaactggtttagatatcacctcatcggctaatccagttaacatgaatgtcaagaacaagttctccttcaagactagaagtattggtggctggatatgttttatctccatgaatatgggtataggtcctgtaacttctagggagcacacagccttcttgctaatgtggtcagaaaaatttctgttttgtggcccaagctatggtcccaccacaaactggcaacatgtagtcgaagcccttgaagagaagaaacaatttcctttgggtaaattcttgctaggatatctgtaccagaccctaaatttggcatcagcaagaattgcttcaggctctgctatcaatactggtggcccatggtggttgttacagacttggttgaatttgcataccacgagggtggttgatagaccagcactgactaaggctgaattcccaagatcccagccgatcatagatgaggatggccaagagatcacaactcgccgatgtatgtcttttggagaggcagcatctacatacgccggatccaagttattggctgaactctttaaggattggttcggcaacttctatgatggatttccaaaggactctagaatatggtttgcttatgaaaattttgcaaattttgagctcccagccgattttcggtttgatgaaatcaattctgacaaatttgagaaatccagagaagtcttctcaacagcaatctctccctgcatacttcctgtcggcatccatcagggtagaaatattcaaatatcatatgaagcaagaacatcatcctcctctgctcggcat

SEQ ID NO: 15018 - DNA, 2675 bp, Oryza sativa
  unsure (1)..(2675): unsure at all n locations
  Clone ID: PAT_MRT4530_208C.1
ctagaactagtccgcccacacggccgttgcgcacccttcgccccctccgcgcgctcttcctcccccaaggttggcgccgcctccctccgctccgtgcggtcaaggaatttccccgtgattgctgccgcagcagcgccgcgtgaagttctgaacactgcagtaaaacaagtgacttgtttccaaaccgtgaattgtatggagatgggaatgacgccagaacaaatctatggacaaaatgtgtatgttcctgcaactgcgaatccttatccatatggttatacagaagttggatcacctacggaatggtataataaccaaagctctttaggatatgatggccaagacatctattttccgggttttcaaaccgaaggcacacagtgcatgtactatgctgcccctgacaatggatctgttcatccttcctacagcccttacccaataaattcttctttcatagtcgacggttcatatctgccccttgaatatgttggtgatgctgctgaccaaacatgccaaatagttccctcgccctattatgttccaactattcttccttatgcacatgataatgttctgggaaacacaaccgcacctcttcaccccccagtctatgttcctactttgccaagctatactgtaacatcaacaaatcatgcattaccctcagttcctcctgttgccacaaaaaatgatatcattgcaaatccacctatacaatctactattgtcgcctcaaagcaatttctggatcatgcgagtgatcccaaggttcaattgcgtaatccaattccactgaagaaagagctggcagatggctccatgatgcctgtcaaatatcctcacacttcacaggcattttcaaattttcctgagaggcgatctgctgccaagcattcgccacaggagaaattttctgtaaacaatggctctggttttgttgggtctaatgttcagaggtgggctgcagcagagaaatttgagcctaattcaaatttgagtggtcgtattggtagtgctagcccaaagatgaaattatcgaacgtggatggcttaggtggtgcggataaaccttgcggtcagaagtcttctgccataatcgcaaaatcctacacatcaaggctctctgttggtgatccagaagggactattgttatacgatgcaaccaatataacagtaatgatctccgagtggactatccctttgcaaagttctttgttatcaagtcaattggtgaagatgatgtccataaatcaatcaagtatggtgtatggtcaagttcttctagtggaaacagcaaactggacattgcattcaaggatgctaacaggatagctaagaggaattctaccaagtgccctgtttttctgttcttctccgtgaatggtagtgggctcttctgtggcatggctgagatggttggtcctgttgattttcataaggacatggacttttggtgtcaggataaatggactggcagctttccagtaagatggcacatcgtcaaagatgtacctaattataccttgcagcatattttgctgcagaacaatgaaaacaagcctgtcacacacagcagagatacacaggaaataccatatgttcctggaatatctatgctaaagatccttaaggctatcaaagtgaaggagtgtttgcttgatgatttcatgaaatatgaggaggatgaggcgagaagtaaacattatttcagaaggtccaagttgagccataatgctccggattttgttcctgtcgctcaacgaagaaaagacgtcactgatgttcggcagccaaaatcaggcaacgtactgatagacagaacaccggtgatacagaatatgtcagtgaagccacagggtagtaatgcgatcaagcctcaggatcaatgcctacaagttgttgaaaaacaagccagcgatgacgggaaagagaacagacatcaagagaaccgcaatgtcaggcaggctaatgataaagtggtgaaaactgggactaagcagccacaggcatcaacagttaagacaagtgtggatggtaaacaacagtactggaagaaggttgagttccctcggcaaaatcctaacagtgctgttcatggctcatcgaaagcacatgaaaagcatctaaacgaatcaaaagcacctgaaaagcattcaaatggtgctaactgtagctcggcaactgtcagtttgaagacagccagagaggaaactatcgttgccagagtcagttctcttgctatcacttctgctatcagttatcagaattcctcagttgatgtcgtgaagattggcttcgatgccaagttttggttaacaaagctaatgtgtaggtgtggttcctttttaagcttttccaatgtggtctgcttttcttttttgcatttagcagggtctgcttctggtattacttctcatcatcataggttgtctgtcttctgtttagtgttgctcgtcttaaatgtggcaacggaaaagaaaaaaaaaatcatagaaaaaaaacatcatagattctagtagttccctggtggagaaattttgttctttcttttgaaaggaaggaaaggatgaatacaagacgtactctctaaacatatgaagagaagaaagtgatttgggactgaatggttccccagttttggcaaaaaaaaaaaaaaaaaaaanaaaaaaaa

SEQ ID NO: 15019 - DNA, 244 bp, Oryza sativa
  Clone ID: PAT_MRT4530_20900C.1
aataccaatacattatttatttgatggtggtttttattcaggcggctggttacatttaacctccatccaaataatcattgatctttacacacagaaattaattaagctacaaatctccattaatttcaatgcaaatagcaccggttcattacataacacaaattcatacttttatacacccataatccccgaagcgtccatattcttaattttcccattacacactgtgttaaaccatcaatat

SEQ ID NO: 15020 - DNA, 1730 bp, Oryza sativa
  Clone ID: PAT_MRT4530_20901C.1
tacaccacgttgaacaggccctaccaacccacctgaactacagtgcattggatgctaaggtttcacccccaccccctaccccggaggtgggcagtcccctcgtgcgccgcggtgaatccggcagctggacaaccggacaccccggccgacccaactccatcacgcccaccctcaccaccggtgcctaggaaaaggtcgagctatacttcagatcaagcagttacccactccagcttgtggcaagcgctgaaaagggacatgctgacatcatcatggggaggggcggcgccggcaagcgggccccgcacatcagcggcacaagaggataggcgcacggtggaccaagtccacacgtggccacgggtgcgcgtccaccacgtggacggcccagatcggcccgagccgatcgggcggccgatgggagcggcggccaggggtactggcgcggccgagaccggcctggccggccatggcgcggcggcagcgcgcggccaccggcagcagcagccggcggcacgggacggcgacgagcggcagagaggaaaaaagaggagggaggaggggtcctcaccgagggcggcgacggcgagatggcaccagggaagcggccgacggcggcacgggagtcgacgcaaaagaggaagggctcaccggcgcacgggaaaacggatgtccagcgagtttccggcaacgggaagtggtggccgaggttcttcctatccatgcggagccgagggaggcgtcggcatagagcgggatggacgggagtggcggccggaggcggcaaaaggcagtggcggctcggtttcttggtgggatggtgtttcggtggtggttttggggaggggaagcggatgctggggtgcggtggggtgtggcaacgctatgggtggcggtggcacgtccgggagaggcggcgctcgccagcgggaagcggctggaggcagtggaggcggcgatagctcgggttcaccgtggagagggcggctcgggggtggaaggggaggacggagtggatgccggggcgcggcatgacacggaggatcttttggcggcggcggcgcaacgcggcagcgactggagcggcgggaagcggcggctggaggcacggcagcgagcggcggacgcgcgggctcgcgcggggagagcgggagagagcgcggggaggtcgggaaggagggggaaatggaagaggggagcacgggggtgctttttatagccttggaatggcgggatcaagcccgagggaggcgagatcggccggcgacgtgggacgcctacatgggggtggagtggggaggctcggcgtcgatttttgcgggcagagtgggggaaaaggtggaggaggtggaggacgtggggtggaccgcgtcaacactcgcgcgggagaggggagacgcgcgggagaggtagcgacgtgggggcggcagcatggcggcggttggggcgacgggaggttggggaaaaagatgacagttgctaatgctggaaatttcggtaacctgaaaattcaccatgctgaaaattcacaaacgcactcctcggtttcactattgatttcttcccttgcgaaggcgaaatcgaaaccttcacaaactttccgtggcacactacaaccttgggtgctcaccggcgacgccttgtcgtctaggagacttttgtccccaagagtaacaaacacaatcgaagatttgcttgctatgaactcgagtgctcaaagaatggagtga

SEQ ID NO: 15021 - DNA, 209 bp, Oryza sativa
  Clone ID: PAT_MRT4530_20902C.1
gggggttcgaactgtttacattctgccagacatcaatataaaaccattccgagggaaggaaacaggcagaccaaacaccatacccaaagggaactcaattcatggaaacggcactgacgacgaacacctggggctggatggatggtccgagggcctccacgacttcgagagagacactggccacgagccctaccttgacaagaagataa

SEQ ID NO: 15022 - DNA, 325 bp, Oryza sativa
  Clone ID: PAT_MRT4530_20903C.1
ctttcacggcgtcctacacttgttctgccgctggatttgctctacacgctctacatgacccatgttctgttgtgaaggacaagatgggccacatcgatgcctgagccgccatgagcggatcatgacgttttttctaaagggcatatgctggggaatccactgcggtggaaaaaattcacatcttggtacttcaggaaagaaccctcacttatctggtgaatgaacaccgccatttccatgcctacaactgcctggctgccgtggatggattctacacagcgaatgttctacctggattgcaacctctctgactactgaaagagcc

SEQ ID NO: 15023 - DNA, 372 bp, Oryza sativa
  Clone ID: PAT_MRT4530_20904C.1
gaagccccatggccccaatttaaacccaaatttttatttttggaaggacctaaccccccccttaggagtaaaaggcttttccccttaaaaagggggaaatgggggaaatttaaaagttccggttttcccaattccccagacttacaatccccgtttttccaaaaaaaaaaaaaaaaacccagtttcccccaaataaataatttttaaaaaaaaaaaaattttttgcgccccccccccccctggaatatgggggggtttttttccccctcccaaaatcggtggccgttttatttgtttgtttaaccaaaaaaggggggtttttggttggtttatcttcctgaaaaccttaaccttctttttaaacaaaggggg

SEQ ID NO: 15024 - DNA, 800 bp, Oryza sativa
  unsure (1)..(800): unsure at all n locations
  Clone ID: PAT_MRT4530_20905C.1
ttgaccctttttaaccgccgcctttttttttnngggaaaataaacatgcaatagatattaattaactgaaggggaagaaacccaatcatttctgctaatacagtgaaagcaagatgcttggcactacagatgactaaataagctaaagcataaacatagtacaaatatattacatgtcgatcacatgatgcacacgataaatagatagctatgacagatacctccattgtgctggacggtctcttgagacaagaagaacccttgatgacgagtaatcgaatgtagggcagtacaaatcatcaaagccaatagccttttttactccaagagtggctccacggtcaaagctgtaagtttgttgaccgtcctccttaaaggcgtcaaatgcaaatagtcccataccacatgcagccaagacaaggttggagttgccccatacttgggttattgaagagtgatggaagtgggcattgaaatcaggtagctcataggttgcaacaagctttccctttctcagtgaatattgctgaactcgtgatttcagacccccttttatttgcagcctaccttctgtgctcccaatgaataccgagtcaccacgtgagaagattgaacttgctgtaccaccatgtcttgccattttaagaccgatgccagcaggtacacgaaagtcaaatacattaacactttcttgtgtgctaaaaacaccatcatttccctccacctcacaggaactaactctttgacgaactcctccgcccagctctgcatcagtgttgttcacatgaaggcagtaaagc

SEQ ID NO: 15025 - DNA, 479 bp, Oryza sativa
  Clone ID: PAT_MRT4530_20906C.1
gaggcaaaactcaacatggcgaatgatattttccacagtactttagtgtaaactaattacaggtaacagtaacaatcgacaaaactgtaccggtgcttctacttcaaaaagaagaaaaaaaacctgtgcatgtgcctacataatgattttgcttacttcaaaaagaagaagaaaacctgtccatgtgcctacataatgattttgctcaaattctctaatgcaaaatgtccaactatgccgtttgttttcaaataaattattaatacactcatggacaaaaaagggatatcagctggtcaagaacaaccgaattctctcaactggtatgtacatgttgcggtcaaattggagtcctgcaatgactaagccaacgcaacaagattcaacttgatcacgaacctacgtcagtatatgtacactgattaaaattgaatcattggtcgtccaaagaatgcttgttaatctgataacatatgctt

SEQ ID NO: 15026 - DNA, 1474 bp, Oryza sativa
  Clone ID: PAT_MRT4530_20907C.1
tgtcatggaggacgaggcgacgtcggtggcggcgccgctgctgcggccgcgcggcggcgttgacgcggaggcggtgaagcagcagctgtggccggccggcgcgagggtggcgggggagtggtgggtggagtcgaagaagctgtggcgcgtcgtcgggccggccatcttccagcggatcgcgctgtacgggatcaacgtcgtctcgcaggcgttcatcggccacatgggcgacctcgagcttgccgccttctccatcgcctccaccgtcgtcgccggcttcaacttcggtttcctgctgggcatggcgagcgcgctggagacgctgtgcgggcaggcgttcggcgccaagaagtaccacatgctgggcgtgtacctgcagcggtcgtggctggtgctcctcatgttcgccgtcgcgctgacgccgacgtacgtgctcatggaggacctgctgctgctgatcgggcagccggccgacctcgccagcctcgccggcaagatgagcgtctggctgctgccgcagcacttcgccatggcgatgctgctcccgctcacgcggttcctgcagtcccagctcaagaactgggtcaccgcggtcaccgccggcgtcgcgctcgcgctccacctcgtgatcacctacctgctcgtcaacaccctccacctgggcctcctcggcgccgtcgccgccgccaacgtggcgtggtggatcgtcgtgctggggcagttggtctacgtcgtcggcggctggtgcccgctgtcgtggaagggattctccatggaagcgttcgccgacttctgggagttcatcaagctctcctcggcctccggggtgatgctttgcttggagaactggtactacagggtgttggtgttgcttacagggtacctgaataacgctgaaatcgctgtggatgcactctccatatgcttgacgatcaacggatgggagatgatgattccttttggcttcttggctgcaactggcgtgcgggtggcaaacgagctcggcgccggcagcggcaagggcgcgcggttcgccatcgtggtgtccgtcaccacctccgtggcgatcggcctcgtcttctggtgcctcatcattgcctacaacgacaagatcgctctcctcttctcgtcgagcaaggtggtgctcgacgccgtcagcgacctgtccgtgctgctcgccttcaccgtcctcctcaacagcgtgcagcccgtcctctcaggtgtggccattggctcagggtggcaagcactcgtagcctacgtcaacgtcggtagctactacttggtcggagttcccatcggtgccatattgggctggccattgcatttcggagttgggggaatttggtccgggttgattggtggcacagctgttcagacactgatattagcctatctcactatcagctgtgattgggatgaagaggcaaagaaagcaagtacaaggatggaagtatgggccagctcaaaatga

SEQ ID NO: 15027 - DNA, 553 bp, Oryza sativa
  Clone ID: PAT_MRT4530_20908C.1
atgccgacgccggctggtggcctctgctgtggtgtaccctccctccctacctacaactacaagtcgttgttgaagtggaggaggcaaagcgaggaggaggagattggggatcggaaatccaatcatccaatccaagattccaaaagtggttggattaatcgagtcatcgagatgagctcgccgggcggcgtgaacgagtgggaggactcaccgggggagatggagtcggaggccgcctccgccgtgggcatgggcatgatggaggtcgacgccgacgaccgccacccgccctcctcctcccttcccatcgatgccgacttcttcaattccttccccgacgacttcgacgaccaagacctcgcctgacctcctctcctctcctctcctctcccctcccctcccctcccctacccatcgcaggtgcctgttgtacccaacatcaaatccaagatccatcatgtcatcacatttcgtagccaaggtaatgcttcttctccacctctagtattgttaccattattggatccccatctagacccacatatattctatt

SEQ ID NO: 15028 - DNA, 984 bp, Oryza sativa
  Clone ID: PAT_MRT4530_20909C.1
ttagcaaaagcttcctagctagcttgcctaccattgccatcctctcccctccaacctctccctccattcgcattaccgcgcaaaggaggaagaagaagaagaactcactcgcaggagcaccaatggcgaattctgcgtcagggctggcggtgaacgacgagtgcaagttcaagttccaggagctgaagacgaggagggggttcaggttcatcgtgttcaagatcgacgacaaggccatggagatcaaggtggagaggctcgggcagactgccgagggctacgaggacttcgccgccaccctccccgccgacgagtgccgctacgccgtctacgacctcgacttcgtcaccgacgagaactgccagaagagcaagatcttcttcttctcctggtcgcctgacacggcgaggacaaggagcaagatgctgtacgcgagctccaaggacaggttcaggagggagctggacggaatccagtgcgagattcaggccacagaccccagcgagatgagcctcgacatcatcagagccagagctcactgatgatcatatcatttcatcatccaacaccaccagattaattaattcattcccaacgtcgatcgccttattcaaccccagatccatgcatatatatatgcccatgggttaatatatcatcaattatggggtttatgtccgcttaaatttaccctacgtacgttttgatcctcgcaaaaaaaaacacatacatatatatatataccgttttgatcgactatttatacgttgttatacgacattgatgtcgtccaagtattattatcctattatatataattccttcatttcattctatttttcttctgcttatatcttcaacttttcatttttgtaatttgtaagttgtattgatgcaatttgttggcaacaagaatacactttttctattcatgtataatagaaacaacatattctcttattacgtgttatgagttgtgtgtgc

SEQ ID NO: 15029 - DNA, 1056 bp, Oryza sativa
  Clone ID: PAT_MRT4530_2090C.1
atgaccaaaataccctttgagtcatctaacgcttcggtgcgtgccgcatggaagaacgtcgtcgactgcctgctcaagctcaagcgcttcaagctgctgccgccgtcggtggtcgaccaggacggcggcgccagcaccgtgagcagcagcacggagcggctgggacaccgggccaagtcggagtccggcgtcatcttcccgtcgtcgcaccgtggcgccgggacgagcaggcacgtgttcggcatgatcggccggttctcgcagttcctgtctctagacgccggcggcgagtcgctgctgttcatgggcagcgagttcgagaacaacctcaagatcatccagcaatgccggatcgggagcatcttcacggagagcgagaagctgccggacgagtcggtgcagaacctgggtcgggcgctcatcttcgccgccgctggcaaggggcagaagttcagcacgccggtggaggaggaggagacggtcggcttctgctgggacctcatcgtgctggtgtcgtcggcaaacgtgcaccgcttcaccacgttctggccgcagctgcacgactgcttcaccgtggtgtcccagctgccgctcttctccccgtgcccgttcgccgagaaggcgatcgtggcgctgttcaggatcgccgtgaggctgctctccggcggcggcggcgtagaccggatggcggaggagttggtggtgacacggttcaactacgcggcgtgcatcgaggccgccttcgggttcgcggcgctcaagatcagcccgctcgacatcagcaccaagatcctccagctcatggccgactccgtcaactggctcatcctgtggcacaagtccggctactccaacccgggcaacacctggagcagctcaagctcctcctcctcgtcggtggtggcggcggcggcgacgatgatgatgatggaggatgcgtcgcggatgggcaacctggcgacgagcatgttcatcaagctggccgaggcgttgcgcaagacgagcctagtccggcgagaggagatacggaaccaggcggtggcgaagctgggctga

SEQ ID NO: 15030 - DNA, 1612 bp, Oryza sativa
  Clone ID: PAT_MRT4530_20910C.1
ccacgcgtccggcgaactctgagacgcgcgaaccatcgcaatggccggccgccggtcgtcgccgccgcggcggacgatgtcgatgggtagcggctccctcccccgccgccccaccgccgcagccggcggcgctggctccatgcttcccgggctctcccggtcaatgacgatgggcggcggcggcgtcggcggcgagcggacggtgaggcggctgcggctgtcgaaggcgctgacggtgccggagagcacgacggtgctggaggcgtgccggcggatggcggcgcgccgggccgacgccgcgctgctcaccgactccaacgccctcctctgcggcatcctcaccgacaaggacattgcgacgcgggtgatcgcgcgggagctgaagatcgaggagacgccggcgtggaaggtgatgacccggcacccggtgttcgtgccgtcggagacgctggcggtggaggcgctgcacaagatggtgcagggcaagttcaggcacctccccgtggtggagaacggcgaggtgatcgccatgctcgacatcgccaagtgcctctacgacgccatcgccaggatcgagagggcgtccgacaaggggaaggccgccgccatcgcctccgccgtcgacgccgccgctggcaacgaccccaccgccagctccatggtcgaggccttcaaggagcagatgctcaggccgtccctctctaccatcaccaccgcggaatcaacggtcgtcatcgtgtcgccgggcgattcggtgctgacggcaacgcagaagatggtggaggtgcacgcgagctcggccgtcgtcgccgtcgggaacaaggctcagggaatcctcacctcaagggacatcttgatgaggatgattgccaagaatctccctgcggattcgacgccggttgagaaggtgatgacactggatcccgaatgcgcgacagtggacatgccaatactcgatgctctccggatcatgcaagagaggaaattcttgcatctccctgtcatggacagagatggatccatagtctccatcctagacgtgatcgacatcacacatgcagcattctccattcgaggcatcgaggtcgcagatgatgtcggacatccacaacgagcagtcgttctcgttcaagctccaggacaggcgaggacggatgcaccggttcagctgtggtactacactagtactcgaaccgtgccggtttttgtacagtgttttcatttctggctagcagaggtgcagagcctgacgccgttgatcacctgcatcctccagcggctcggccccgacctcgaccgcgaccacctccctcaaatcctttacgaagacgaagaccgtgacaaggtggtgctggcgtccgacgacgacctcacggcggcgggcctgaagctgtacctggactactccggtagctccggcgtccgtaggaagagcgtggttcccagcgtcggggtcgggggcggcggcggcggccgcagcagtggcggcagcacggcggtgatggacctgtcgagccgggacgcgtgggcggcggcatacagcggtgtggccgccggcgccgccctggtcaccggcctcggcctgatggcctatctccggagagctagctga

SEQ ID NO: 15031 - DNA, 1165 bp, Oryza sativa
  Clone ID: PAT_MRT4530_20911C.1
ccggaattcccgggtcgacccacgcgtccgcggtgttcgtgccgtcggagacgctggcggtggaggcgctgcacaagatggtgcagggcaagttcaggcacctccccgtggtggagaacggcgaggtgatcgccatgctcgacatcgccaagtgcctctacgacgccatcgccaggatcgagagggcgtccgacaaggggaaggccgccgccatcgcctccgccgtcgacgccgccgctggcaacgaccccaccgccagctccatggtcgaggccttcaaggagcagatgctcaggccgtccctctctaccatcaccaccgcggaatcaacggtcgtcatcgtgtcgccgggcgattcggtgctgacggcaacgcagaagatggtggaggtgcacgcgagctcggccgtcgtcgccgtcgggaacaaggctcagggaatcctcacctcaagggacatcttgatgaggatgattgccaagaatctccctgcggattcgacgccggttgagaaggtgatgacactggatcccgaatgcgcgacagtggacatgccaatactcgatgctctccggatcatgcaagagaggaaattcttgcatctccctgtcatggacagagatggatccatagtctccatcctagacgtgatcgacatcacacatgcagcattctccattgttgaaggcaacggcgatggtgccgtgaacgatgacgcggcaatctccatggtccagaggttttgggactctgcaatggccttgggacccctagacgatgagattgaatcacaatcccagataagcgaggcatcgaggtcgcagatgatgtcggacatccacaacgagcagtcgttctcgttcaagctccaggacaggcgaggacggatgcaccggttcagctgtgaggtgcagagcctgacgccgttgatcacctgcatcctccagcggctcggccccgacctcgaccgcgaccacctccctcaaatcctttacgaagacgaagaccgtgacaaggtggtgctggcgtccgacgacgacctcacggcggcggtggaccacgccaggctcgctggctggaagggcctgaagctgtacctggactactccggtagctccggcgtccgtaggaagagcgtggttcccagcgtcggggtcgggggcggcgg

SEQ ID NO: 15032 - DNA, 336 bp, Oryza sativa
  Clone ID: PAT_MRT4530_20912C.1
atgtcgatgggtagcggctccctcccccgccgccccaccgccgcagccggcggcgctggctccatgcttcccgggctctcccggtcaatgacgatgggcggcggcggcgtcggcggcgagcggacggtgaggcggctgcggctgtcgaaggcgctgacggtgccggagagcacgacggtgctggaggcgtgccggcggatggcggcgcgccgggccgacgccgcgctgctcaccgactccaacgccctcctctgcggcatcctcaccgacaaggtcacgcaccataattatttttggcaaaatttacgttcaatatatgagaaattactctactag

SEQ ID NO: 15033 - DNA, 319 bp, Oryza sativa
  Clone ID: PAT_MRT4530_20913C.1
gtttgggggctgtactcgtgcaggtatacactggctgatagaccgccgatggtgaaaggccggttcgagaggaacggcgaggccgtcgctgatggcgactagcggaaagcgttcgactcaagctacagttgcaactactgcgcctgtggctacatggactaccgctgtggcagcgacagcagcagcgtaatctgctgatacaattacaaccgaagaggctgcacagggacaagatgatcatgttgtaagcggctgcgacaatggtgactggtggtgtcaaccactgggcagcatccccgacgaatttggtgtaaaacga

SEQ ID NO: 15034 - DNA, 1410 bp, Oryza sativa
  Clone ID: PAT_MRT4530_20914C.1
cccgcgtccgcgtctgcacgccggtgcacaaggccctcgccctcgaggccgccaggcgcggcgtcgtcctgctcaagaacgacgcccgcctcctcccgctccgcgcccccaccgtcgcctccgctgccgtcatcggccacaacgccaacgacatcctcgccctcctcggcaactactacggcctcccctgcgagaccaccacgccgttcggaggcatccagaagtacgtcaagagcgccaagttcctccccggctgcagctccgccgcctgcgacgtcgccgccaccgaccaggccaccgcgctggccaagtcctccgactacgtcttcctcgtcatggggctcagccagaagcaggagcaggaaggcctcgacaggacgagcctgctgctccccggcaagcagcaggccctcatcaccgccgtcgccaccgcgtcgaagcgcccggtcatcctcatcctcctcaccggcggcccggtggacatcacgttcgcgcagaccaaccccaagatcggcgccatcctgtgggcggggtaccccggccaggccggcggtcaggccatcgccgacgtgctcttcggcgagttcaaccccagcggcaagctgccggtgacatggtacccggaggagttcaccaagttcaccatgaccgacatgcggatgcgccccgacccggccaccggctaccccggccggagctaccgattctacaagggcaagaccgtctacaagttcgggtacggcctcagctactccaagttcgcttgccgcatcgtctccggcgccggcaactcgtcatcctacggcaaggcggcgctcgctggccttagggcagcaaccacaccagaaggcgacgccgtctaccgcgtcgacgagatcggcgacgaccggtgcgagcggctcaggttcccggtcatggtggaggtgcagaacccatggccccatggatggcaagcacaccgtgctgatgttcgtccggtggtcgagcacggatggcggccggccggtgaggcagctgatcgggttcaggaaccagcatctcaaggtaggggagaagaagaagttgaagatggagatcagcccatgcgagcacctgagcagggcgagggtggacggcgagaaggtgatcgacagaggatcgcatttcctcatggttgaggaggatgagttggagattaggttccaggattgagttttagatggaagattatttccttgttttttaaattttggttttgtttatgtcttttgagatgatacataaaaggagatccaatggattgatattaaattaatagagaaggaaaagttcttttgtcggaaatgtaggttggtttagacttatatatttgatatttgtctatatctgtgctattttagcactatgaggatagtatattgtcatgaccat

SEQ ID NO: 15035 - DNA, 466 bp, Oryza sativa
  unsure (1)..(466): unsure at all n locations
  Clone ID: PAT_MRT4530_20915C.1
cacgagctcgtgccgaattcggcacgagtgnantcnntgttancagggatgncctctccacnatctngtttnaccccccatccnnataaaantctcatagatctactttccnnnnatggtcntgngttcnggatcncatcncccatgggtntgnctcccctcgccctgctcaaggtngaccacccttncnggtnatttacagggancttgcagcttcnggaatcaagaaccatgttcnccnatcaacttgggctacttcaccctgttgacgagntcccnccnntcgaccatgaaccgcctcttccctngtggttcnactaganatgaatgtggtnatagccctagtnacaaaagtcacagagtgggtncagnnatcctnggtcctgtaactcgntactggaacaaggagactnaatcgaantntgtctcccattcacctntatncctgctgactccaatgacaacg

SEQ ID NO: 15036 - DNA, 621 bp, Oryza sativa
  Clone ID: PAT_MRT4530_20916C.1
gggaaatgcagatctaaggttctacagcttaacacatccaatgggctgcatatattcgaaatatataaattactcatgcggatgttcgatgtcaatgagatgctgctctccaacctcccctactacgccgaccacagatacaggaataaaagaataggaggggcgccgattccctccacccgctctgccctccccactctgcagagaagggcacgggcgacgatggcatgctctgcgcagagtgctcaggggagagggcgcgagcgacgacggcatgctctgcgcagagtgctcagggaaggacgtcgcatcggcaatggtgcagagttcgctagagtggaggtctctcagtgcagttcagaatcaccggtgacgtcgcccccgcccgggcccggcggctatagcaagcgccaggaaattaaaaaccacggcatccgcggagcgacggcgatgggtatcgcgcacgaggggcgagcgtggtgcggcagccatcttacgctacgtcagcttggtcttggcgtcgaccgcgacgcgctgacggattggagaccagcgtttgaccccgatcgagctagacgaccaaagaccggccggatgctctgggcacctttgacgatttga

SEQ ID NO: 15037 - DNA, 324 bp, Oryza sativa
  Clone ID: PAT_MRT4530_20917C.1
gcacgaggccccctctttttttttttttttttttttttttttttttttttttttttaactggggagccggacaccaacatttccatatcagagggactcaagatattttacataacgactgcagatgattcgatgatgaagtattctcaccgaatgggtcagatgaggttcaaacagagcattactgtcaccagtgataacaaaaacaggggaattccaaatttacaacagtggcgcaaaacaccctagctatcttctccaatgggctatcctcttttcagggagcggggccgcaggagttctctttctcaatcgacaatgttg

SEQ ID NO: 15038 - DNA, 1098 bp, Oryza sativa
  Clone ID: PAT_MRT4530_20918C.1
atggatgatgacgacaggaaggagaagatgcagaagctgatgccgctcccaatgcgcatcgggcagcaatctctattcggaaaggaggaaactgcccccaagccccatgagcccaacaaggtggtgtactgcaccgcctacgccggcggcgacttggttccgcccttctccgagttctacctgcagatgttcgtcgggctcctgcctttggtggatctcttctgtcgtaccttcgtggtgcgacatgccccgaaaagcaagatgagcagcctgctggagctcataggatgcgtcaccttcaccgcacgccctattcaagaattccttcacatccccatgaaggacaagtgggacgagtggcaccagaagtgggtctacatcagcgtagaatccccacgaatgcctcatcctccctgttgcctccacgatgggcctgctgtcatagaccaacgcaacaccacccgattggcgcttgagcccagttttttagtagatcatggaattggtgaaggccagggtcaccgcgtacatgatagtcgacgatttccatcgctagagattggcacccctgaaccagaggagccgtgcttggtggccctgaccaggtctcaccctgatgatttagaggagctcgggctggatgtgttgctggccgcatcactaaaagggggctcgatagagaaccttggccaccgctgggcagcgccacggtggctgggggcggggacagtcttcgggctgagcggcgtgcatggcggcgaagccaaggccggtggtgggcttctaggggttcctaggaggtgctaccgagagctaattaacctgggcaagatgtggctggaaggggcggcgaaagtgggagctcgaggcggagcgaggtcgtcgtcggccttctacccgggggcgacggtgcatgcaaaacaccggcgacagggcaaaatcggcgacgcgcaggctggggacgactatggggctcctagaggcatcttccggcgagaggacgacgcactaaaccgctcaaaggcagtggaggggcttgtgcagctcggtccggagcctatcagatcatggcatgctctggcgctggtgcgggcatga

SEQ ID NO: 15039 - DNA, 201 bp, Oryza sativa
  Clone ID: PAT_MRT4530_20919C.1
atggtttccgtccaagagctggcggggaaccacgacgctacgcaggatctggaaggtgaggcgccggcgccgcactcgcagtttctagcggcgcagggagacgtgaccgctcgaactcaagagggtaacgggaatggtggtgtggatggagtgtgggaagatgcggtggaaattgggccaaggagtgtggactgggcttga

SEQ ID NO: 15040 - DNA, 867 bp, Oryza sativa
  Clone ID: PAT_MRT4530_2091C.1
atgtcgaagtacggcacaatccccacctcctcctcctcctcctcctcgggggccgcgccgccgccgctcccactcggtggcggcggcggggcctccccgctcgacttcttctcccgcgccaaggcccggggcgcgacggcgctggccacgcggcggccgtggcgggagctcgcggacccgcacgccctgggcctgccgccgagcctcgccgacgcctacctccgggtgcgcgccaacctcgcccactacgccatgaactacgccatcgtggtcctcgccgtcgtcttcctctccctcctgtggcacccggcctccctcatcgtgttcctcgtctgcatggtcgcatggctcgtcctctacttcctacgcgacgagccgatcgtgctcttcggccgcgtcgtcggggacggcgccgtgctcgccgccctcgccgccgtcacgctcgtcctcctcctgctcaccggcgccaccgccaacatcgtctcctcgctgctcatcggggtcctgctcgttgtgctgcacgccgcgctgcacaaggcggaggagaacgtcgatgatgaggtcggccgctggtacacgccggtgccccctgtgtcggctcactagttcgaggttgccttccgattcttcattcttggtccattcctacaaatgtcagtattgtgtatgaatttctgtttttaccgctgaattgtgtacaatttgttaatctcttcttttgtattgtgatcattacagtttaatgtggacacaatcagttttacgcttctttgctaaaatgatttgcaagactttaattgtgtagtagtagatagagcagctaaggcgctgtttttggatctcaatttgatcataataattgctagt

SEQ ID NO: 15041 - DNA, 1101 bp, Oryza sativa
  Clone ID: PAT_MRT4530_20920C.1
atgccggtgaggcggcggcagacacggcggagggagacgggggcggcggagaggtacagggagatgggaatatcggccgcgctgtcgtggccgtgggactacccgacggcgtgcggcgagatcgtcgcgctcctccgaatcggctcgtcgtcgtcgtcgttgatctttggctatatagtattccctcttgctgctgctgctgctgcacggacgcagggaggaggaagtgctcgtgacttgttcatcaggagggagtacggtagtacagtagtacagttcttagtcgctgatcgatcgaggtcatcgtcgtcgccatccatggcgtggaggagcgggttcggggaggaggatgcggtgaccgcgggggagagtggcctcgagctcagccttggcctccccgcctacttctcctcctccaagccctcagagggatcaaccgctgctcctgcttttgctctccaatacaatggaaccacggcctccaagccaagctgcggcgccggttgtggggtggccgccggtgcggtcgttccggcggacgagagtgaggtcgccgcccgcctcgctttgcttgctccgctgctctcctcgtcgcccaacgccgcggggctgcttcaccgccggcagcgacacaacgtcgtcgacagtattcgcgaccggccaccgccctcgccttctcccgcgtcgctgccaccgcctcctctcccgcgtcgccccggcggcctcctccccaacaatgccaccgccctcctctctctcgcctcgctccggcggcctcctccccagcaacgccaccgccctcctctctcccgcctctcctgtcggcctctgcacccaccgctttacctcgcccaaagagagaggaggagaaagagtgagggtgatgacgtggattacgctgacatgtggggcccactctaccctctcttctcttttctccctctccctttctctgtcttctcctctctttctcacggccgagcggcgcggcgcggctaccggcaacgaagggagggggcggaaggcttaccgacggcggcgacggtggcggcggcggtggcgacgcacggcgcggcacacggcgcggcgcggcggtactga

SEQ ID NO: 15042 - DNA, 261 bp, Oryza sativa
  Clone ID: PAT_MRT4530_20921C.1
atggacctgtcaagctcgctgtccaccatcctggggctcttcctctcgtgcgtgcagatgctgtgcaagcggctgttgcgccatgtgatcagcaaggcggactacaagatggaccagaacgagcgcctgctgtgtcgctgcatcgacgccatcatcgctggccggcggcaggaccgcaaagacgtcacggcgaagatgggctgcaaggggtggatagcaagccagctcggctcggtcaagctcgttaggataacaagctag

SEQ ID NO: 15043 - DNA, 696 bp, Oryza sativa
  Clone ID: PAT_MRT4530_20922C.1
atggctgcccagatacgcataataatgaaatcttttatgagccaagctaacaaggttcaaggggttattccatacgctcagaagattggattgcctgaatcacgatccttgtatactgtgttacgatcacctcatattgacaagaagtccagggagcaattctcgatgcatgtcaagaagcaatttctggtacagaaagcggaaacgcacgagctgcaaaagaagctgttctggttgaagcgcctgcgcctacttggagctcaatacgaaatccaaatcagtttcaagactcgtttggataagatgttggatcatgtggacactgtttatactccatgccttcatggcactgatctgcaatgtttgatgttgcctagaaaaataaataactatgtgggctcatttgagactgggaatgtggtgaggacatccctatcattgatacaaccatacctagtatacagcaaggaccaattattcgagctcaagcacaacaactcaattatcaggaacattgaacacaaacaaggtgggaggaggagcagccatgagaatgaacaagtgaaagccagcatgagcaagggaaagttcagacagcatgtccggttctacaggcaatggcaacttcaattggtcataactctttacttcaaagagtgttggaagctcatgagcacttgttggaaagggttttga

SEQ ID NO: 15044 - DNA, 321 bp, Oryza sativa
  Clone ID: PAT_MRT4530_20923C.1
caataatatcttagctgcagtataacacgagctccccccattctgttgccctcaaaggcgctccatttagagtgtttaaatgtgcttatcttctcggattctcaatgggaagacacgatatttctccactctcagaagctcgcacactgaaaacaaatgtatcctctctgtcccggtctcatctctctcacaccatcatctccccattctcctctcccgagcaaccgtctcgggtcttctccttaagctaccgctggtccactctgtcctccgttccctctatgtggcgcctatgccatctgtctctttttccttgctgtg

SEQ ID NO: 15045 - DNA, 325 bp, Oryza sativa
  Clone ID: PAT_MRT4530_20924C.1
gttaattgagactgaacgcgacacgccaaaaaccaaagtctggacggcatccagaccacaatctacaagagattctgagaccatatctgaaccatggacgtcatgggcacaactcaagcggtcaaagcacacacactgctgggctcctctaaaagaaccagaacgcagggaccaagcatgcactatgctgggaggcctgcctacaatgttgggctacacccaggcaaactaaagaactcacccaaagaggcaagcgagcgttgaactaacatagccaaagagggtcaggatcaaccaaaaccttgaatcgaggccagcaaagggg

SEQ ID NO: 15046 - DNA, 741 bp, Oryza sativa
  Clone ID: PAT_MRT4530_20925C.1
atggggaagaaggcggggtgtggggctactcaaaggagggggatggtagggctcaccgaggtgagcggtgctcacatcgtggagctcgccatcgatcttgctgcctccaccggcgagcttgaagccacctgtgccgcctccctcttgagttcaccgttgcgtgcgcaccaagctgcggaggccgaggacgagtggctcgtcggtggttgcgagcctcctttcggcggagcccgagataaggcgtgcgccggcagtggctggcccgtcaagctcatcagcagggccttgtcctcctgtgattgggggagcgatagccgacgccagacttgcacgaaaagatggcgagcggcggtatacacaatagcggcgacaccaaaatctcttgttcctccatgcaatttgatccaatcccgctctgaccccccctctcgtcggccggacgaggatatgctgggtcatggctccggcatgccgggatttgacgccgccggcacgccgggccccgtcgcacagctcgtcctagccgccttgtttgcgttccccgcagatcgacgacgcctcctctgcattgcccacggatcgccgccaccttccccaacctctacatccccgtcggctcctagtcctagatcgataccggccatggccgcctcttcagccgcaccttcgcctttgtctgtgtcgccctcaccgccggtcacgccaccctcgcctctgcctccataccactggcctcggcag

SEQ ID NO: 15047 - DNA, 578 bp, Oryza sativa
  Clone ID: PAT_MRT4530_20926C.1
acggcacgaggcttacctcgatctgcaagcaagccaagccaagcataggtagacgacgtgtagatacgtagtcctcctcctctctctcgattctgcacgcctcgtcgagcagctagctagcatatatacccccatacctgcataccatgctgcgtccccagctcaatccatcgtccagccaccaccatacgacgacgacgagcagcagcagcagcacgcagctgtacttcgcctcctcgtcgtgcatcgctagccttacgccggccgtcgccgccgtcgctgatcgccggtgccggctgccggacgacgcggcggagacagcagggtaggcagcgagttgttgtgaggtgcgcgtcctcgtcggcggcatcatcggcgtcggaggcggcgagaagagggaccggtagttcggacatggcgccggcggcggtggtgaaggtgaaggcggtggcgacgatcaaggtcaccgtcgaagggcttctcaacagcctgaggccgtcgaaggcgatcgacaacatcagggatctcatcggaaggtcgctcttcctcgagctcgtcagctccgagcttgaagcgaa

SEQ ID NO: 15048 - DNA, 708 bp, Oryza sativa
  Clone ID: PAT_MRT4530_20927C.1
caaacccctctcactcccagatacctgctgctgccactagcccactaccatggatccttgcaagttccggccgtcgagctcgttcgacacgaagacgacgcccatcacgccgcgccccgtggtggggaggaggcagaaggcgacgatacacaagcagaacgacttcaagcagcccggggagaggtacaggtcgtgggcgccggatagacaggagaggttcatccgccgcttcgccggcgagctcgcgcaccccaaggtctcccctgagctccgcgccatctgggtcaactacctctcccagtgtgatgagtcgttgggggtgaagattgcgaataggctcaacgtgaagccaagcatgtgaagaaactaaggcacaagaatgcatcatctcttgttaattaattggagtactaccaaccaaataaggccagacaatgtcagatgcacgcatcttctgttgtcgttgggccatcttttgtatgcatcctattgttaattactagtacatgatatccaagtgatcatcagcaaggctacagaaattctgtaatacgataaattaaaagaaaccaaaatggagcctgcatatgtgtaacttaattaatgtactggcgtattaatgccactgctgcatgttgtaatactccatcaaagagtctattactattaagtatttaaattatcacttcaaaaaaaaaaaaaaaaaaa

SEQ ID NO: 15049 - DNA, 1208 bp, Oryza sativa
  Clone ID: PAT_MRT4530_20928C.1
ggacacgggggggaaggggaggggagggcgggacgccggccggagcacgcaaaaatctcgctcacctcgtgaagagctgagatcaaggggggagagatcggaggcggccgtagcgtggcggagatggatcctgctagcgtcagcgccagcgccagcggcgacccgatggcggagtgccctccggcggcggctgccgctgagggcagcgacgccatggactgcggcggcggcgggcggagcaacgcgagggtggccggagtgctccgcgggttcctcgccgtgcagcagcgccgcgccgaggcgtactccacgctccgaaggggtttttctgaatacatggctaatggaggtgaattagcttttcaacaactatgcgcgagtgttacggcggagttcaatgattgctcgaaacaagttctcgaaatggtagccctcctatcaacgccagaaatttgtcgtggcgatcttgccaacttactgaaggatgtgcaggcacacgagaaagagaagttgcatctgacggcaagaattcaggtgttgaagaaagctggtcgtccttcggaacgcctggtgaaccatgcagattgcaggtcaagcaatatggctcaacatgtctgtgtgcatgtcaaagagataaccgaggctgctggcacggaggatgcagaggcagatgctgagtatgatggtgctcttaaagaggccatacaaggtgttcaagaggcagtgaccagcataaacgagcacatggaggaggtgcgctatgagattgatgcccttggggcagaaataattggtaataacttggctgaagttgaagaagctttccctgatactctattgataaaatagaaaagttgcctaggcgctaaaaggcagagtgaaaacaaacaattggcacaaatattttggactaacaaacagctattcgtgtcccttcggggatttattaaaaaaaaggagagagaagagaaccggaagatttgtttaggccagcattgcttctttggtgttctgctattcgctagaattcagaggaatgtggcatgcttttggtcccttgttattcactagaattcaaaggaatgtgggatgcatctttatgggatcgatattcgatagagaatgtgatctgaaattgttgtgaatattgttatactaatttggtatactcatgccataagattttctaaaaaaaaaaaaaaaaaaaa

SEQ ID NO: 15050 - DNA, 1882 bp, Oryza sativa
  Clone ID: PAT_MRT4530_2092C.1
actatttttttagtttttttttttttgggttaacgcattaacaagtatatattatcataataacactatagatttttttttttagtattttaccaagtatacattaacacaaaaacactatagaatataatctatagtagtctgtagtctatggctatgtatacacatgaatgtctgaacgagatgtagctgcacgacattgtgttcacagcataaaggttagatacagttacttatgcaaaccgtgaggactgtaggctattcctaacaatccacaactatagcgagtactgttgtctcccttcaccctttcttgggaaacaagtgaagctcatgtgatacaattgtatgatcttccagttatctgccaccggatagctgaatgtcttcctggatattgagagactcctcgatacttcaccctttcttgggaaacaagtgaagctcatgtgatacaattggatgatcttccagctatctggcactggatagctgaatggcttcctggatattgagagacttctcactgaagctgaacagcctgcgctgttggttcatctcatgctgatgccgccgggcaagttcagccacctgccactcctcccattgctccgctgggacaacattgccttccagcatctgcacaacctctgacatagcagggcgaagatgaggctccacatgagtgcagaggagtgctatttggatcatcttctccagctgttgcaaatcgtatgcagtgtccaggttgtggtccacaatgtctgtcaatcgtcctccttgcaccaaccttttcacttgatcattgagcatgatctcactgtctccttccgagaattcagggaacactgcacgctctcctgtcactatttctaacaacattacaccatatccaaatatgtctgtcttcactgatggccttcctgtcttcaggtactcaggagctatatggcccattgtcccgcgaaccccggtcgtaactgtattcctctctctgtctatcatcttcgccaacccaaagtctcctaccactgcttcaaagtttccatcaagcaggacattggctgccttgacatcgcggtggataatcttggggttgcagtgctcatgaaggtattccaagccacgggcagcgccaagggcaattcgcactcttgttggccaatctaatgctggttcatttagtttgatatctctcaaacgggaagcaacactaagattctccatgtaagggtagaccaagagtcgctcttttgtagtcgtgcagaatcctatcaatcttaatatgttcttgtgcacagcaatgcttatcaattcaacttctctcaggaaagctatttccccttcaggtttttccacttcaaacagtcttttaactgcaacctttctgccatgtggacctgaaagcactcctttgtacaccttaccaaaaccacccttgccaagaacattttgctcgctgaaattgttggttgcaatttggagttctcgcaatgagaaccgctttatctgtccaaactctagattgtgatcatgttgacctggaacatcaacgtatatttcaggtcggtggcgcattctttgccaccataacagaaatagtactatgataacaaggagagttactgctccaccaatgcttgcaaccaccttgagtttggagttatttgatccacctgtatttatattgtttccttcacaagaaatcaagtgttggccacaattcaaatggttacctatataactgtagtgagacacctgaagcaaccgtttgggtatttcaccgctcagattgttgtctgctagattgatatcattcaatgatgagagattagacaaagaagttggaatattcccgattaagagatttttgctcatgtcc

SEQ ID NO: 15051 - DNA, 1395 bp, Oryza sativa
  Clone ID: PAT_MRT4530_20930C.1
tagtggatccccgggctgcaggcacaccttcttcttcctcttcgacgacgtcggcatccccaccgattaccgccacatggacggcttcggcgtcaacacctacaccttcgtcacccgcgacgccaaggccaggtacgtcaagttccactggaagcccacctgcggcgtcagctgcttgatggacgacgaggccacgctcgtcggcggcaagaaccacagccacgccacccaggacctctacgactccatcgccgccggcaacttccccgagtggaagctgttcgtccaggtaggtgatcatccagaaattaacgcctatacgatctgagttcgaagccgcagtactccttctaattaattatttaatactgttaggtgatcgacccggaggaggaggagaggttcgacttcgacccgctggatgacaccaagacatggccggaggacgaggtgccgctccggcccgtggggcgcctcgttctcaaccgcaacgtcgacaacttcttcaacgagaacgagcagctggcgttcgggccggggctggtggtgccggggatctactactccgacgacaagatgctgcagtgcagggtgttcgcgtacgccgacacgcagcgctacaggctggggccaaactacctgatgctgccggtgaacgcgcccaagtgcgcccaccacaacaaccactacgacggcgccatgaacttcatgcaccgggacgaggaggtggactactacccatcgcgccacgcgccgctccgccacgcgccgccgacgcccatcacgccgcgccccgtggtggggaggaggcagaaggcgacgatacacaagcagaacgacttcaagcagcccggggagaggtacaggtcgtgggcgccggatagacaggagaggttcatccgccgcttcgccggcgaagctcgcgcaccccaaggtctcccctgagctccgcgccatctgggtcaactacctctcccagtgtgatgagtcgttgggggtgaagattgcgaataggctcaacgtgaagccacagcatgtgaagaaactaaggcacaagaatgcatcatctcttgttaattaattggagtactacccacccaataaggccagacaatgtcaagatgcacgcatcttctgttgtcgttgggccatcttttgtatgcatcctattgttaattacttagtacaatgatatcccaagtgatcatcagcaaggctacagaaattctgtaatacgataaattaaaagaaacccaaatggagcctggcatatgtgtaaccttaattaatgtactggcgtattaatgccactgctgcatgttgtaatactccatcaaagagtctattactattaagtatttaaattatcacttccaaaaaaaaaaaaaaaaaaaa

SEQ ID NO: 15052 - DNA, 1050 bp, Oryza sativa
  Clone ID: PAT_MRT4530_20931C.1
ttaactaggcataatcagaagggcagcaaaaaagttaagcatgacaggaaggatcactacttctgatgggcctctcagcatgaaaaaggcttcagacttcttgggcacctgcgaaacaagaatcccacatccattctttcgctcgcgaagcaccttgaatgcatcttcatccgttttatcatccccaatatagataggaagaacagtttcagaatcatctagctcaagcgatcgaagcaaaaactcgacggcttttcccttgtcccagttgatcattggacgaacctctaaaaccttccgtccagtggatactttaagactaggaaaatcttttagaacattgttgacaacctgtgcgaccaacttccagttcttcttgtcgacattacgataatgaacagatacgcaaaacttgttgttctcaactgttgcacccttaatcgctttagtgacctctatcagggatttggaaacctcagttatcatagtcagaaactcatttgcaggttgaaaaagcttggtttctttggtcttttctatggtactgtctgaatctgcaaaagatgctagtatgtccataccatgactccctgcatagtatatctcagtcagcttgacaaaatcaaacaccttgtcgcgggatctcccactaactattgctgtagggaagtgctttgcaacacttttcacagtagcacgcatctcagaggacatgaatgctttctctggatcattcacaataggagaaagtgtgccatcatagtctagaaacaacacaaccttcttgtcttgcgcactagctacgatttggtcgaagaaacataaggcagaaggacaaatttctgcacgagaattctcagtggaatcttcatcagacgaaccgtcgtaaccagattcaatgtctggcttttcacggttcgatgatgtcatcattaccccgacaagtccatcaacgacttcaacaagttcacgcttacacttcttgagtgttttcttcttggtgtaggtgcgtgcacagttgttcaacagaaagttagcagagatcttcat

SEQ ID NO: 15053 - DNA, 198 bp, Oryza sativa
  unsure (1)..(198): unsure at all n locations
  Clone ID: PAT_MRT4530_20932C.1
gaaacaaaaggagtatttatttatgtgtaaanaaactaattgaatttttgttaanaatttcagtgcaaggcacgcagcagcaagntgaatgctagtggcagtggcatggtgatggcgccaggacagctattggagtacatcgccgcgctggccgaccgcaaccaaggacgcgccacctcctcgacgtcgcctcctccg

SEQ ID NO: 15054 - DNA, 498 bp, Oryza sativa
  Clone ID: PAT_MRT4530_20933C.1
atggagagcgagccggcgcaagtccacggcggcgtcaacctcaacctgcgcgtgctggagacctcgccgcgccggcgttcggccaacggcggcggcggcggcgctgccccggccgccgccgccgccgtcgacccacgggaggccttctcctgcaactactgccaccgcaagttcttcagctcgcaggcgctgggaggccaccagaacgcgcacaagctcgagcgcacgctcgccaagcgcagccgtgacatcgtcatgaccgccgccgtgtcgccgtcgccgtcgtcgtcgtcgtcgtcccgggcagtccacggcttcgacggcgtcgccgggggcttcttctggacggcgccgccgtacggccacgccgcggcggctgaggcggcggaggaggatcacgacgtggcgccgccagcgccgccaccggccgacggcggctgcggcggcgggcgctacggccggaatggggaggagatcgacttgtcgctgaagctctga

SEQ ID NO: 15055 - DNA, 329 bp, Oryza sativa
  Clone ID: PAT_MRT4530_20934C.1
gacagcccgagaatacaaccgatgacgcggacgaggaaacaccaacagcagcagcagcagcggaaccaacggtctaacacccaacaccacaggcgacggctgggaaccaggatgaaaccctaatcttcactttatttcatcttcactgcagaggggggtacactttacacacacgacattactaacccggatcacccagcccgtgagatcagtcacgtcgggagaccttaaggctttcatgacaagacatttcgatagccgacacaggttcaccatatgccaacgagaggggtcccagaccaacaccagattaggtcccagaccatact

SEQ ID NO: 15056 - DNA, 554 bp, Oryza sativa
  Clone ID: PAT_MRT4530_20935C.1
cccacgcgtccgctcaccgaccggcagtagcattcaccttctccgccctcccccctccgccgcctccgccgctcccccaccttccagaaccttcctttcccgaaatagccacccctaccctaccctaccctacccacccccgccaagatccccgccgccggcgagctcgagcccttggtggtgctccggcgggcgttgtcgcggtcggatcagctgctgctggtgctggtgatgccgctctctctttcttgcgtgtacttccgggtgggaggttgatggcgatggtgaggtgttctttggcgcggttgccctcgcccccactcttatctcctctcctcgcccatgctacctaccttcctcccccgccggagctgctctgctgctcgtactagcgtgggagctgcctcttcttgttgagccatttcttgcctacaaggacagggtgcctcgccgtcgccattgccggcgtcggagccggacaaggaggttcagtgtactgtaccgtggttttgggccttctgagctatggctgatccaatgctgaatgcggtgaa

SEQ ID NO: 15057 - DNA, 1347 bp, Oryza sativa
  Clone ID: PAT_MRT4530_20936C.1
atgagtctaaaggtttttggaatcatttttggaaatgattttccctgggacagagaggcctacccggaggctgtggactccttctgggatctttgcataagtgaggcaagggttcctggctcaagaactccagaagttccgggctactcatcctacccggaagttccggtgttcatcaccaggaggttccgggccctctgtttggatgattgtggtctcattgacctcggcttcacgggggccaagttcacttggtgcaacaaacaagatgcccaaagcaatgtcaaggtccgtcttgaccgtgcggtggcgaacggaagggccaatagagggctgtccagcatccttcaaaagaaggaatcaatgggggtgattcagggcattaggaacggtcatcttggcccaccaatctcacacctgctctttgcagacgacagcatcttctttgctaggagcgatctgcacagtgttcaagggctgaaagatgctctccaagcatactgcaaggcctcgggacagaaaattaatcttcagaaatcttccatcttctttggtcagaactgtcctgaggaaataaagaactcggtgaaggagacactccaggtttcggttgagatcctccaagacacggctgggaaggagacgatgctcaaagctgttgcgcaggcgattcccacctatgttatgagctgcttcaagctgcctgtgacaacttgcggcatatcccagctactgatggctgttgcttctgtgaaagggatgacagaatcgagcacatttttctcctctgcccttttgctgcggttaggggtgatgctcttcgtccagttcccagatggaggcctccgcctgaaggcgcgcgggctcgatgaggggaggcagcggagggctcaccggcgagagacggtgatcttccgcggggaggagccctcccctccgccagatctggcgggaggggaggcagcggcaggggcggcgggctcgccgggggtaggtggcggcaggcagtgggcttgcggaggagacgcggcgatgggctcgccggaaggaggcggcgggcccgcggaggagacacggcggtgggctcgccggtgggaggtggcaggctcaccggtgggagtcagcgggctcgtcgacgggaggtggcgcgacggctcgaagacgaccgaccgtgcgacggcaacgatggcggatcttaagagcgccttcctcgaatatcaggattcctcgaagccattagttggcatcgatcaccgcataggcagagaggacgctggcaccaaggtggtagtaggtatacacaaggatcgctacgccagtttggatcctcaacaccccggcgtctag

SEQ ID NO: 15058 - DNA, 462 bp, Oryza sativa
  Clone ID: PAT_MRT4530_20937C.1
atggaaagaaacagtggtgtaactggaggcgtcttcagcctgaaacgagctgtgcttctcaaaaatagttccaacaacacaggaaaaatagaaatgcaagaggcaaagatctcaccttggatagcatcaaactcaacagagtacttgtgttccaggagaggggaccttagacttttgctcatcccagaaatcctcctgatgctgttcatcttcaagaacaagctatatgttcgctgcagaaaaagaatacaaagatcaccagaggcatggagactgcgcctaagtcacaaagtttacgtgaatactactactctaaagaatactactactctcaatcagcagtgcagatcttgggtagatgtggccaaagggatggctgacgaggcttctctttggcataaagcaaacccagcgattcctgcgctgcaattcaggagggagggtgtgtttagttcacgctaa

SEQ ID NO: 15059 - DNA, 309 bp, Oryza sativa
  Clone ID: PAT_MRT4530_20938C.1
atgcaggaaccaaaagccggagctgggttgtgggaggcgtggaaggggtgcggctgggagggcgttgcggtgggcgcgtggggtggtgcgagacgcaaatgcaggagccggagggcggagctaggtggtgggtggcatggaggggacgcggctgggagggcgaggtgctgcggcagacgcgaaatcaggctcctcctccgcagtcgcctcctcccgcttctgcctcaactcctcctccacgtcctcttcccgacgccgctgcagcgtggccgggttgatgtcggcaaccgcatctgcagcctgccgtga

SEQ ID NO: 15060 - DNA, 547 bp, Oryza sativa
  Clone ID: PAT_MRT4530_20939C.1
ttgaagatgtctacaagagtgctgaggctgttgagtgggttacaaaagaactagggggaaggattttgcggcagccaggtccactaccagggctcaacacaaagattgcctctttccttgaccctgatggctggaaagtggtatggctcctgtcttcgtgttccactatattttactactgttaaccatcaaatgatcggtacatcaattgtatttaagcctagagcatttggcagttcttgtttaagaaagcctggtcaaaaaggaaagcaaaccatttgcttacacacaacatagtaatttttagtgcaggcacaaaactaaaacatagtcacaaaggaccaaagtacaagggctagtgtttaggcattactgtttaccagctaggtccattcttctcggctaatccgccagattatcaccgcagattatttgcaccatgcttccaaaaattctcttcaccagcattgattgattaacctttctcaatctatttggtagggttataatggatataatatttattatactcataaacaagcatatc

SEQ ID NO: 15061 - DNA, 4454 bp, Oryza sativa
  Clone ID: PAT_MRT4530_2093C.1
tttttttttttttttaaaagtctcatttttctttttttcctaattttagtccaaaactaagccatagtctttcgtagatggttatagaggtaatgtgtacattcctagttagaataaaaagaaagactgaacaataatactgtctccgttttttaatatatgacattggttatcagagtaacctctaacttaataacactagtaattaactgcagtgagtaagtgagtaatcaatcagggaagagctcctccatgacagctggagcgatccactggatctggatgtgggtgatctcccacagctcgtctccttccatggcgaccagcacccccttgtccttcatctccacgatcatccgcttcagcatcctcggcaccagctcctgcatcacgccggcgccgccgcccgccgccaggtccgacttgatgcacgtgtccagccgccggagcacccccagccagaacgtcctgaaccccgccccctgcgccagcgtccccaggaacagcacgaacacgtcggcgagcagctccgtcgccgccgccagcgtcccctccatgctccgggtctccctctccgccccctccctcctcgagtactccagcgtcttctcgtgcaggtcgtccaccatggcgaagatgaccaggttgaagcacgccagcgaccccgtcgggcccagctcgagctcgccggcggcggccagggcgaacgctcggcccagctccgccaccgcctggttccgtatctcctctcgccggactaggctcgtcttgcgcagcgcctccgcgagcttgatgaacatgctcgtcgccaggttgcccatccgcgacgcgtcctccatcatcatcatcgccgccgccgacgacgacgagcttgagctgctccaggcgttgcccgggtcggagtagccggacttgtgccataaaatgagccagttgacggagtcggccatgagctggaggatcctggtgctgatgtcgagcgggctgatcttgagcgccgcgaacccgaaggcggcctcgatgcacgccgcgtagttgaaccgcgtcaccacctgcgcgccgtcgttcatgagcttgatcatggcggccaccgactggtcgaacgtctccgggtgccgcccggtgacggacagcaggtgaagcaccgtcttccacccgatcggcgtctgcacgttgctggcgtactccatcagcagcttcacgatgcactccgagatgccttcgcagcaggtgtccaggatctccttgtccagcttccacatcaggttgatcgacttgaacaccagctcctccgccatccggtccccgccgccgccggagagcagcctcacggcgaccctgaacagcgccacgatcgccttctcggcgaacgggcacggcgagaagagcggcagctgggacacggcggcgaagcagtcgtgcagctgcggccagaacgtggtgaagcggtgcacgttcgccgacgagacgaccgcgatgaggtcccagcagaagcccaccgtctcctcctcctccaccggcgtgctgaacttctgccccttgccgccggcggcgaagatgagcgcccgccccaggttctgcaccgactcgtccggcagcttcccgctctccgtgaagatgctcccgatccggcattgctggatgatcttgaggttgttctcgaactcgctccccaccgacagcagcgactcgccgccggcgtccagcgacaggaactgcgagaaccgcccgatcatgccggacacgtgcctgctcgtcccggcgccacggtgcgacgacgggaagatgacgccggactccgacttggcccggtgtcccagccgctccgtgctcacggcggcgccggcgccgccctcctggtcgaccagcgacggcggcagcagcttgaggcgcttgagcttgagcaggcagtcgacgacgttcttccacgcgccgcgcaccgactcgccgaagcggttggtgatggtgaagagcgcgagcgtggccatcctgggcttgagctcattgctgaaggtgaagagcgtctcctcggtggtggcgtaggggttgagcagcgtggtgaacttgcagaggcagcagaggagctcgtcgaggacgtcctcgaggccgtagcgcgcgatccgggcgacggagatgaggccctcgacgcactggttgaggatgtcctcgtcgtcggtgtagtcgaagatggcggcgagggtggcgacggcggggccggagacggtgacgaacacctcgcgggtgagcttgtgcttgaagtcgcagggggtgaaggggtcgatggcgcgggagcgcttgacgaggtcggcccatctggtgggcgtcatctcggcggcggcggaggcctggctgaagacggtgatggcgttgccggagatggagtggaagagctcggagaggtactccctggggaggtccttgccggcgttgatggcacggttgttgcggatgaagtcgtcctccgacatctttttcttcacttgtgggttgtggagatcggtgttgagcatgatgagggagtagcagaggatgaaggcggcgtccttggtggcgaacacctccgccgtctgctgctcgtagaacctctccgagaacgcctccaggatccgctgtatcttctgcgactcgccggggaggcggaacgtctccaggtaggtgcgcagcgccgtgtccaggatcacgccggtgaagtcgaacgtctccgtgaactccttgagcaccctcaggctctgctcctccgggtcgcccaggagctcgccgatcttgttcttgtccagccccggcgagtagcggaggaagaaggccatgctccggggctccggcggggtgggcaccagctggctcagccggaggtactccatccccttcttctcgtcgcggttgtagtggttcgccgcgatcgccaccttcttcttcctcagcttccgcttgcggacgaagtccacccacgtctcgttgttgccggagccgccggcggcggcggcgtcccagcgctccacccagaagaggcggtagtcggagatgtcgacggcgtaggcggcgtggtcgggggccttgtcgacctcgacgttgtcggcgatggtggtgagcatgttgacgaggccctcgaacgcctggagctgcaccgtcgtcatggggctcgacgccgggaacgccgccttgcacagcagcttccccacctcctcgtacacgttccgcagcatcgggtcgcagtcgtagttcacgtacatctcgatcacgaacgtcggctgccggcagaagctgatcagcccctcgatcgccacctcctggagctgcgccccgcctccgccgccgcacagccggagcagcacgtacatgaagaacgcctcgagctgcagcttcaggaaccggcgcaagaagtggtagaggttgagagccgtgctgcagatcatggagaggacgagagggctggactcagtggcgtagtggatgaggtggtagaagaggtcgtcctggatgaggcggagaagcttggggtgcttgccgatggcctcgccgccgagctcgatggcggagttgatgaggacgagggagaagagctgcacgtcctcctcggtgatgaacgcgccgtggccgtccccggtggccaccatgtcgggggcgttgagcagcagcgtgcagaggaagttgaagatgtcggccatgcagcgcgcgccgaagccggccacggacaggtcgtcggcgtcggcggcgtcggcggccgggatgtcgggcaggcgggcgaagacggcctggaggatctcgtgcatgcagtgcctcgccgtgcgctggaggagctcgctgccgcggccgctggcggcgtgctgcaccacctggaagcaggtgttgacggcgttgcagacggcgtggtcggagaggagcggcgcggcgcgggcgcggagcagcgcggcgagcacctgcagcacgcggaggaggacggcctcctcggcgcccgggtcggcgatgcgctccacgcggcagctgctcaccgccgtcagcaccgcctggatcgcgtcgcgggcgcccggggagcactcgtcgaacacgtcgatcctcaggatcttgagcaccgacgacagcgccacgccggtggccgccggcggcgactcctcgctctggaccacgtcgaggaacggcttcaggtacatggccgggtcggagcagcgccaggcaccgtgccggggctggaagaggagcccccgcaggttcttcagcgactggatgagcccggcgaacgtcgcctcctccgcggcggcgaccgccggcgggaggtaggagtaggggtccgggcggcggcggatgacggcgaggagcgcggccacctcggtgttgagcatgcaggagatgccgaggtccttgagcctggggtcacggcgggggccccgtggcacggtgtacgccggcgggccatcgtcgtcgtcgtcggagaccgccgccgccgccgtcctcgccat

SEQ ID NO: 15062 - DNA, 1076 bp, Oryza sativa
  unsure (1)..(1076): unsure at all n locations
  Clone ID: PAT_MRT4530_20940C.1
ggaagcgaggtgaggaaaggcaccgcgcgacgctgtcaaatccgtgcaatctccgccatctccctctcaccatcttcctcctctctccccgttatcccaaatttccccatcaatcgccacccgcgcccaattcccccactcgattcgattcgactcggtcgggatccccccatggcgagcggcgcctcgtagcgacgaaatcgagccagcgagtggatgcggcgcgcgccatggcgccctcggacgcgtgggcggacgcgtgggcggacgcgtgggcggaccggggtcgagggtcggggactggggtgttgacttgggggaggggtgggactggaggagcatcccgaagctcctctcctccgctctgcctcttcatctgctccggaggctgttttggatgctgtgataaggctgtgagacatgtaggacagctttcaaagagtttaattactccggaccaaaattacaccattggggacgaactctggagcacaaccacctatcgaggtcgaacagtcatgggctcttgatcagcaaggagtggggagcagtcagggccctactgaatttgtcaatcatggtcttgttctttcgaaggagattaggaaggactggactgcgaaaacaaggcaaatncctgagacgaaacagattcgcgaaccaatattgagttggaatgcagcctatgagagtttgcttggatccaataagccgtttcatcagcccatccctctacatgagatgnttgattttcttgtggacatctgggaacaagaggggctgtatgactagcacaaatgtttttaataatagtaacatagttgtaggcttgatgatgatgaggtaactttgaggtaacttggagggttcggcctgccatacttgtttttgaatggcggccagttgtacttgcttaatacaaggttgtggttgttgtaatgtgagaaaggtcgagatttagacgctttgtcgaattgtcaaagaaagcaaagccagagagaaatttgtaacactaactcatggacattaatgtgatgtgtgtcgatagagaagtatatactaaaaaaaaaaaaaaa

SEQ ID NO: 15063 - DNA, 2142 bp, Oryza sativa
  Clone ID: PAT_MRT4530_20941C.1
atgtcccgctatcacctcgacgcggcagctggaggagccttcttctctaaaatggttcaaggagccgttgaactaatagagaagatggtctccaatatgggttggaacgaggaacgacttcagatgcgtcagcgaggcatgcacaccgtcaaggagtcggagttacttgctgccaagctggacctcctcatgaaatgcttggacgaccacgagaaacggccacaaggcaccgtcaaggccttggactctcacgtcacatgtgaggtctgcggcaacacaggtcattctgggaatgactacccggaaacccgtgaggaggcgatgtacatgggcaacaacaatgggtatcgttcacaaggaggaactaacgggatatcaaaacaagcgccatctagtgactcggctgacaaagaggttcagccagagaagaccgtgccgcaggaatactgcgacacacggttgctgccgtttccccaacggtgtaggaaaccgtcagtggacgagcaattcgctcgttttgttgaagtaatccagaagatccatatcaacgtgtcgttgttggatgctatgcaagtaccaacatacacccgttatctcaaggacatagtcaacaacaagagaccgctcccaacaacagaggtggtcaagcaatgcagcaacgtgatactccacaagctcccggagaagaagaaaaatcagggcatcatgccgaaagacgtcttcgatagactcaacttcacagtgttggcaccaacaccgatgcgccttcaactggctgattcgtcagtccgttacccggcagggatagcggaggatgtgtcagtcaagacacgggatttctttatcccggttgacttcgtggtgctggacatggacacgggaaaagagacgccgctcatcctggggcgcccgttccacgtcaacggcaaggaagagaagtttgagtttcaaccgaggacggaacaatactccatgaatttcatggagaaggaaacaactatgcctaagaaccgttattggaagatgccggtagaaccacccatactggccaagaaactagagcagccggctcagaagaagccgccatccgcaccaaaaccaaagaaggtgtggaggaagaagccaaagacgcccactccatcacctccggagacggatgttttgatggaagacgccgaagctccgcgacgactcctgaacgacaccgacctcgaccttgtcagtgatcggaagagacaagcctactacatgctgagcgaccgggagtatgctcacacgcgagaatactcaccggagctgctgaaaaagataggtggaacatatagggagacgcgcaacatgataaggaacgaacaagaaagttcatcatcctcaacacccgtgcagatgtatgaggcagcaaggtactggatcttggccaggaggaagctgggagatcagaaggcgcctctcttccccacccctcacatcaccatcggcgccggcggcagctccacctcctactacgagtcatgggaggaacgtgccttcgcggaagactccgcagggcatctcgggggctgcatctggccgccgaggtcctactcctgcagcttctgcggccgtgagttccggtcggcgcaggcgctgggcgggcacatgaacgtccaccggagggaccgggcaaggctcaagctctctggggttgtggaggacggcaccggcggcgaaagccacggcatgccgccaaaccaaaactacatgatacaaccatgccctccccaaattggcaccctgcagcacgcctacagcccaaaccctagaagtggcagtattctcgctgctgacactaaccctaattccatatgtgatgttgtcgcgtaccctgctagatccttgcttcaagttgcagctgctagaactgccttgggcaaacaagtcctgaacgcccctcttgtctcatcgaagtcgccgtcggctggtagagaacatggtaagagggagacgttgtttcttggtgctgttcgattggcacaggatcatgacacgcaagatggtggtgatgaccaacatcatgaaaagatactaaaactttatcgtagctcctcggttgaagaactagatcttgagcttagactcggggaagccccaaaagaacagtag

SEQ ID NO: 15064 - DNA, 1026 bp, Oryza sativa
  Clone ID: PAT_MRT4530_20942C.1
atgggtaccgtccacaaggaggtggtcaagctgacggagcaatgcagcaacgtcatactccagaagctcccggaaaagaagaaggatttggggtgtcctacgatcacctgctcaattggggcacaacagttcgaccaggccttgtgcgatcttggagccagtatcagcattatgccaaaggacgtttttgacaagctcaacttcacggtgttggcaccaacaccgatgcgcctacaactggctgactcgtcagtccattacctgatagggatacgggatttcttcatcccggttgacttcgcggtgctggacatggacacgggaaaagagacgccgctcatcctagggcgcccgttccttagcaccgtgggagccaacattgacgtgggaatggggagtatccgtttccatatcaacaggaaggaggagaagtttgagttccagctgaggacggaacaatgctccatgaatttcctggagaaggaaacaacgatgcccaggaaccgttattggaggacgccggtaaaaccaagtacaccggccaagaagctagagcagccggctcagaggaagccgccttccgcaccaaaaccaaagaaggtgtggaaggaaaagccaaagacgcctgctccatcacctccggagttcgggattagccttctcggcaagaatgaggaggcgattgtctcgtctgttcaagggtctggctcttcatcaagtcatcatgacgagtctagcactcattcatcagctgatgtctcgatgaaagatgccgaagctccgcgacgactactgaacgacaccgacctcgaccttgtcggtgatcgggagagacaagcctactacatgctgagcgaccgggaggagacgcgcaacatgacaaagaatgaacgagaaagttcatcatcctcaacacccgtaccgatgtataagttcgccaacatcaacaacatgatgcagcaacagcacgatgaccttcaagcgtacttccgctttcaggggttcaatccttatcaaggaccctga

SEQ ID NO: 15065 - DNA, 1821 bp, Oryza sativa
  Clone ID: PAT_MRT4530_20943C.1
atggctgacaagacccttagcgagtttgctgctccctctactgacaatgtggccattgggccacaaatcaacatgggagacatggatttcgacctgaagtccagcctcatgacgatggcgcaggctagcctattctgcggaaagcctaatgaggatgccaatgctcacctgcaacaattcctggagatctgtagcacgtataccatcaagggcgtcagtccagacgccatcaggctaaggctgtttccgttctccctcctcggaagagtgaagcagtggttctacgccaatcgtgctactatcaacacctgggacaaatgctctacggcattcctctcgaaattcttcccgatgggaaacttttacaatggactcaccccggtgtcccgcaatcacctggacgcggcagctggaggaacattcttctctaaaacggttcgaggagccgttgatttaatagagaagatggtctccaatatgggttggagcgaggaacgactccagactcgtcagcgaggcatgcacaccgttaaggagacggagctacttgctgccaagccggacctcctcatgaaacgcttggacgaccacgagaaacggccacaaggcactatcaaggccttggactctcacgtcacgtgtgaagtctgcggtaacacaggtcatactaggaataactgcccggaaacccgtgaggaggcgatgtacatgggcaacaacagcagcgggtaccgtccacaaggaggtcaagggtggaatcagccacacccatattatcagggagggaggattctgaggcaacccgactcctctgttgaaaatgtcaaggcgatcatgatgaggggaggaattaacaggactgcaaaagaagcaccatctagtgactcggctgacaaagaggttcagccagaaaagaccgtgccgccggaatattacgacacacggttgctgccatttcctcaacggagcaggaaaccgtcagtggacgagcaatttgctcattttgttgaagtaatccagaagatccacatcaacgtgcctttgttggatgctatgcaagtggttaagctgacggagcaatgcagcaacatcatactccacaagctcccggaaaagaaaaaggatccggggtatcccacgatcacctgctcgatcggggcacagcagttcgaccaggccttgtgcgatcttggagccagtgtcagcgtcatgccaaaagacgtctttaacaagctcaacttcacggtgttggcaccaacaccgatgcgcctacaactggctgactcgtcagtccgttacccggcagggatagcggaggatgtgctagtcaagatacgggatttcttcatcccggttgacttcatagtgctggacatggacacgggaaaagagacgccgctcatcctggggcgcccgttccttagcaccgtgggagccaacattgacatgggaacggggagtatccgtttccacatcaatgggaaggaagagaagtttgagtttcaaccgaggacggaacaaagctccatggtcagaataaagtacgagccgaacacacagaatattcaagtggtcgaagtggagccaaccaagatggatagcctgttgaagtttatgcaaaatttcctggagaaggaaacaactatgcccaggaaccgttattggaagacgccggtaaaaacaaatacaccggacaagaagctagagcagccggctcagaggaagccattttccgcacctaaacctaagaaggtgtggaaggaaaagccaaagacgcccgctccatcacctcgggagatgggtggaaaatccacgaactga

SEQ ID NO: 15066 - DNA, 2651 bp, Oryza sativa
  Clone ID: PAT_MRT4530_20944C.1
ctttaaacttcgatcgccaactcgccggcattttggactcgtgtacatgctgttcatgcatcgggagtaccgcgcaggcttcatcagcatagactgcggcttgccggagaagaccagctacgtggacgacgccacgaagctgaagttcacctccgacgacgccttcaccgacgccggcacaatccacaacgtctcgtcggagttcgccacgccgacgacgaccacggacaggagcctgtacaacgtgcgcagcttccccgccggcgcgcgcaactgctacacggtcccgtccgtcgtgccggggtccaagtacctggtccgtgccaagttcttgtacggcaactacgacggcctcaacaagccgccggtgttcgacctccacctcggggtcaacttctggcagacggtgaccgtgccatccgccgactggctggggaacgccgaggtcatcgccgtcgtgccggatgatttcttgcaggtctgcctggtgaacaccggcgccgggacgccgttcatctccggcctggacctgaggcccctgccgagctcgctctacgcgcccgccaacgcgacgcaggggttggtcctgctcgaccggaggaacttcggcgcgagcgggagcaccgtgatcaggtaccccgacgacacgtacgaccgcgtgtggtggccgtggagcaacccgccggcggagtggtcggacatctccacggcggacaaggtccagaacacgatcgcccccgtgttcgacgtgccgtccgtcgtgatgcagacggccatcacgacgcgcaactcctccattcccatccagttctcctgggacaccaaacccaatcacgtcgatttttaccttgtatgtcaccgagctggagctcctggccggcaatgccgttcgccagttcaacgtcaccatcaatggcgtgatttggaccaaagccccatacaagccggtttatctgtccaccgacgccatgtacaacggagatcgaccctaccggggcatcacccggtacaacttttctttgaacgccgcgggaagctccacgctgccgccgatactcaacgccgcggaggctttctccgtcatctccacagccgaccttgcaacagacgctcaggatgtttctgccatcactgcaatcaaggccaagtatcaggtgaacaagaattggacaggtgacccatgcgctccaaagacactggcttgggatgggttaacctgcagctatgccatttcaacccctccaagaatcacaggagtaaatatgtcgtatgccggtttaagtggcgatatatcatcttatttcgccaatctaaaagaaatcaagaatttggacttgtcacacaataacttgacaggatcaattcctaatgtcatttcacagctacaatttctcgcggttctagatttgacaggaaaccagcttaatggatcaattccttctagtcttctgaaaagaacatctcttctttttgataggtacggcaataatccaaacctttgcagtaacagcagttcatgccagctcccacaaaagaagagcaactctatgcttgccgtctatgttgctgttccagtagtggtgataggagcagttgcagtgttcctgattttcttcatcaggaagaagaagaacaaatgcgtgcagtcacacagtcagaatggcagtggagggagcctgctggaactgcacaaccgtcagttcacgtacaaggacttggcagtcataacgaacaacttccagcgagtccttggcaaaggagggtttggccccgtctacgacggcttcttgaaggatggtactcatgtggcagttaaactacgggatgagtcttccagccaaggatatagtgagttcctgacagaggcacagattttaacccggattcatcacaagaatcttgtttccatgattggatactgcaaggatggggataacatggcacttgtttatgagtacatgtcagaaggaactctacaagaacacattgcaaacagcaggagaagattcttaccctggagacggcggctccagatcgctctagaatctgctcaagggctagagtatctacacaaaggttgcaatccacctctcatccatagggatgtgaaggcaaccaacattctattgaatgcgatgttggaggcgaagattgctgatttcggtttgtccaaggcttttaatcgcaacaatgacactcatgtttccacaaacacacttgctggcacacctggatacgttgatccagagtacttaatgacaatgcaacccacaaccaagagtgatgtttatagcttcggtgttgtgttgttggagttggtcacagggaagccagccctactacgggacctagataacactagcattatccaatgggtacagcagcacctggcacgaggcaacatcgaggatgtggtggatgcacgcatgcatggagaccatgacattaacagtgtgtggaaggttgtggacatcgcactcaagtgcaccatgcaggagtctatacatcgacccacaatgactggcgtggtggcaatgttgcaagagtgcattgaacttgaaaatagacatctgaaagactacgcggccaatagtgaaaaccacaactcaagttataatacatacggtgttgaccaatccactaatgtgatc

SEQ ID NO: 15067 - DNA, 2649 bp, Oryza sativa
  Clone ID: PAT_MRT4530_20945C.1
atggacaagccgagcggccgcgtctccgtgccttgcctctccatggagcaacacgacgagtctgctgcagataagccggcgctgttcagcatctcagacaagaaggccatcgacggtgacatccctgggctgaccaacaccaacgcctggttcaccccgcaggggtggatcctactacgccagagcaccgccaccttcctgcagaaccctcaggatccccaagacaagatccatctcccagaaggtctgtcaaccagatgctcctgccagctctccggcaagccatctctccctggctgcatcgtcctcctcgttgagcccgtcgccaccaacatatggtactgtcgcatcggcgacgatgaagagtggacgagacacgacgacgacattggaacccagccattggatccacccatggatggcaaggaccacgagaaggtgccgatatgcgagatcgccgcttgccggggcaagttctacttcaactgcttcttcgagagcatcggagtactggagtttacccccacgccggtgttcagcaccattgagatcgtcgatcctatccccggaggattaggggtgataggcgcggcggtcgtgttcttggtagaatccgaggacgaattgtacatgatctgtctgcggcttgaccacgacttcgccatatacgatatgaccgttcataggatggatttcttgagcttgcaatggcgcagagcctatgaggccataaatgttttgaggtatccaaggtggaggatgatgcaactgagccgaaagattagagcattagctgtcctacttgatgggagagctgcaacctacttgttgatgatcagcaccgagagaacccacaggatcctgacgaaaagattcatctgccgcacctaccggaagtcctgcacagcagatgtgcttgcgtgctcgctctccgacaagccgacgatccccggctgcatcgtgctcctcgtcgagcccgaagacaccatcatctggtactgtcacgtcggagaagatgaggagtgggttaggcacgagtacgatattggcacgcagcacttggatccacccatgaatggcaaggactatgagaaagtactgatatgctcgatcgcagcttgccaaggcaagttctacttcaacgccagattccacaacatcagtgtgctggagttcaccccagagccgacgttcagctccatcgcaatcaccgaccccatggattttgtgggcgcagcatgcatattcttggtggagtcggagagcgaactttacatggtatgtcagctgcttgagtacgacttcaagactgtctacgacgtcactgtttataagatggatttctccaagcatcaatggtgcatagccgaggacattggtggccgtacgttcttgatagctccttgttattttggtgcttcacgttcggctgatgagtgtgggctagagaaggattgtgtatatgctatttttgcgcgtgataaatattttgaggtatccaaggctgcaattcgtggagcttcaggcagggattcctgtgaccgactcgtaatccaccgtttgtactccgcaacatctgaccttgtgactcgtctgcaaccagctagcaatcccctacataagagaggcttcggttcggttgcagatccaacgaagaggataggagatagatcagccttgatcaccatggacaagacgagccgtgtccccgtgccttgcctcgccctgtacctaaagcatggcgccgacacagacaagccggcgctgttcagcatctcggagaagaaggccatcaatggcggcgacatccccgggctgaccaacaccaactcctgggtgacgtcgcaggggtggatcctagtccgcgacaccgcctccgcaaccacatttttgcagaatcctcgcgatttcgacgataagattcagctaccccatctaccccaggacgtgcacatcagttccacatgtctgctctcctgcaagcccacgatgcctggctgcgtcgttctcctcgttgagccagtcggcactatcatctggtactgtcacattggagacgacgagaagtgggtggaacatgactacgacattggcacgcaggtcttggaccctcccttggatggcaaggaccacgagaaggtgccgatatgctggatcgccgcttgccagggcaagttctacttcaatggcggcttcgaaagcatcggcgtgctggagttctccccctcgccaacattcagctccatcgcaatcatcgaccccatcattggaggattaggggtgatgggcatggcaagcctgtacatggtcgagtccttggatgaactatacatggtttgccaaatgtatgactctgacatgaagaccatctacgatgttactgtttataggatggatttcttgaagcaacaatggtgcatagccgaggacattggtggtcgtgcgttcttggtagcttcatgctattttggtgcttcacgttcagctgatgagtgtgggctggagaaggattgtgtctactctatttttgcgcgcgataagtattttgaggtgtgtaaggtggaggatggagaaactgaagagtatgatctcatcgaagctccagattcacaaggagggatgtggattttgcccgttgaaaaaaagtag

SEQ ID NO: 15068 - DNA, 1215 bp, Oryza sativa
  Clone ID: PAT_MRT4530_20946C.1
atggacaaaaccaatgcccttcgtggaaggatttcaagtttccagcagacaagggacgagtctattcctgaagtatgggaacgtctgcaggagtatgtggccgcctgtcctcgtcatgggatggacgactggctgatcctgcagaacttttacaatggactcacaccgatgtcccgcgatcacctggacgcggcagctggaggagctttcttctctaagacggttcaaggagccgttgatctaatagagaagatggtctccaatatgggttggagcaaggaacgactccagacccgtcagaaaccgtcagtggacgagcaattcgctcactttgttgaagtaatccagaagatccacatcaacgtgccgttgttggacgctatgcaagtgccaacatacgcctgttatctcaaggacatactcaacaacaagagaccactcccaacaacggagatggtcaaactgacggagcaatgcagcaacgtgatactccacaagctcccagagaagaagaaagatccagggtgtcctacgatcacctgctcgatcggggcacaacagttcgaccaggccttgtgcgaccttggagctagtgtcagcgtcatgccaaaaggcgtcttcgataagctcaacttcacggtgttggcaccaacaccaatgcgccttcaactggctgattcgtcagtccgttacccggcagggatagcggaggatgtgctagtcaatatacgggacttcttcatcccggttgacttcgtggtgctggacatagacacgggaaaagtgacgccgctcatcctgggacgtctattccttagcaccacgggggccaacattgacgtgggaacagggagtatccgcttccacatcaacgggaaggaagagaagtttgagtttcaaccaaggacggaacaatgctccatggtcaggataaagtacgggtcgtatccgcagaattatcaagtggtcaaagtggagcaacccaagatggacagcctggtcaagtttatgcaaaatttcctggagaaggaaacaacgtggcccaagaaccggtattataggccgtcggtaaaaccacccatactggccaagaagctagagcagtcggctcagaggaagccgctgtccgcaccaaagccaacgaaggtgtggagggagaagccaaagatgcccgctccatcacctccggagatgggtagaaaatccgcaaagtga

SEQ ID NO: 15069 - DNA, 1353 bp, Oryza sativa
  Clone ID: PAT_MRT4530_20947C.1
cagcgccaccgacgttcaagactatggctaacaagactctccacgagttcgctgctccctctgctgacaatgtggtcattgggccacaggtgaacataggcgacgtggatttcgacttgaactctagcctcatcacgatggcgcaggctagcccgttttgtggcaagcctaatgaggatgccaatgctcatctgcaacagttcctgaagatctgtagcatgtacaccatcaagggcaacttttacaatggactcaccccgatgtcccgctatcacctcgacgcggcagctggaggagccttcttctctaaaatggttcaaggagccgttgaactaatagagaagatggtctccaatatgggttggaacgaggaacgacttcagatgcgtcagcgaggcatgcacaccgtcaaggagtcggagttacttgctgccaagctggacctcctcatgaaatgcttggacgaccacgagaaacggccacaaggcaccgtcaaggccttggactctcacgtcacatgtgaggtctgcggcaacacaggtcattctgggaatgactacccggaaacccgtgaggaggcgatgtacatgggcaacaacaatgggtatcgttcacaaggaggaactaacgggatatcaaaacaagcgccatctagtgactcggctgacaaagaggttcagccagagaagaccgtgccgcaggaatactgcgacacacggttgctgccgtttccccaacggtgtaggaaaccgtcagtggacgagcaattcgctcgttttgttgaagtaatccagaagatccatatcaacgtgtcgttgttggatgctatgcaagtaccaacatacacccgttatctcaaggacatagtcaacaacaagagaccgctcccaacaacagagatcggggcacaacaattcgaccaggccttatacgacctgggagccagtgtcagcatcatgccgaaagacgtcttcgatagactcaacttcacagtgttggcaccaacaccgatgcgccttcaactggctgattcgtcagtccgttacccggcagggatagcggaggatgtgtcagtcaagacacgggatttctttatcccggttgacttcgtggtgctggacatggacacgggaaaagagacgccgctcatcctggggcgcccgttccacgtcaacggcaaggaagagaagtttgagtttcaaccgaggacggaacaatactccatggtcagaataaagtatgggccgaacccacagaatatccaagaggtcgaagtggagccacccaaaatggacagcctggtgaaatttatgcagaatttcatggagaaggaaacaactatgcctaagaacc

SEQ ID NO: 15070 - DNA, 1032 bp, Oryza sativa
  Clone ID: PAT_MRT4530_20948C.1
atggcgcaggctagcccgttctgtggcaagcctaatgaggatgccaatgctcatctgcaacagttcctggagatttatagcaccggttggacgaccacgagaaatggccacaaggcaccgtcaaggccttggactcacacgttacgtgtgagggtctgcggcggcacgggtcatcctgggaatgactgcccggaaacccgtgagaaggcgatgtacatggggggtaccgtccacaaggaggtcaagggtggaatcaaccacgcccatattatcaaggagctgagcttcaacaaaatgatagaaacccagctagctcagttagcatctttagtccctgcaaatgaaacggggaggattccggggcaacccgactcctccgttgaaaatgttaaggcgatcacgatgaggggaggagctactgggataaccaaagaagcgccatctaatgactcggctgacaaggaggttcagccagaaaagacagtgccgcaggagtactgtgacacacggttgctgccgtttctccaacagatgaggaaaccgtcagtggatgagcaattcgctcgttttgttgaagtaatccagaagatccacatcaacatgccgtggttagacgctatgcaagtgccagcatacgcccgttatctcaaggacatactcaacaacaagagaccgctcccaacaacggaggtggtcaagctgacggaacaatgcagcaacgtgatactccacaagttcccggagaagaagaaagatccggggtgtcctacgatcacctgctcgatcggggcacaactgttcgaccaggccttgtgcgaccttggagccagtgtcagtgtcatgccaaaagacgtcttcgacaagcttaacttcacggtgttggcaccaacaccaatgcgccttcaacaggcttattcatcagtacgttacgggacttcttgtatggtcatgacgggctgtcgtaaggaactcggcagtcaggggtggcttctcgaagtaccaggagggcatcggatagagggtattagctag

SEQ ID NO: 15071 - DNA, 1026 bp, Oryza sativa
  Clone ID: PAT_MRT4530_20949C.1
caaggtactggatcttggccaggaggaagctgggagatcagaaggcgcctctcttccccacccctcacatcaccatcggcgccggcggcagctccacctcctactacgagtcatgggaggaacgtgccttcgcggaagactccgcagggcatctcgggggctgcatctggccgccgaggtcctactcctgcagcttctgcggccgtgagttccggtcggcgcaggcgctgggcgggcacatgaacgtccaccggagggaccgggcaaggctcaagctctctggggttgtggaggacggcaccggcggcgaaagccacggcatgccgccaaaccaaaagtacatgatacaaccatgccctccccaaattggcaccctgcagcacgcctacagcccaaaccctagaagtggcagtattctcgctgctgacactaaccctaattccatatgtgatgttgtcgcgtaccctgctagatccttgcttcaagttgcagctgctagaactgccttgggcaaacaagtcctgaacgcccctcttgtctcatcgaagtcgccgtcggctggtagagaacatggtaagagggagacgttgtttcttggtgctgttcgattggcacaggatcatgacacggtgagttctaatcttgacctgcgtgttgggaaaaatgaattgaagataactactgttttggggtgccgatcaagaagggactttatgtacgataacgaccgcgcggatgatgaaaagactgttgaagcaagtcacaagaaaagaagaatcgatttggaggtaaaccccctgattctaacttcttcaaccagtaatcatcaacagcaagatggtggtgatgaccaacatcatgaaaagatactaaaactttatcgtagctcctcggttgaagaactagatcttgagcttagactcggggaagccccaaaagaacagtaagtttcatatcccctgttgtatttcaacttgattaccaatgtttaatttggatttattcacccctcgtgtttccttgaat

SEQ ID NO: 15072 - DNA, 107 bp, Oryza sativa
  Clone ID: PAT_MRT4530_2094C.1
gttttagccactgactatgacgatctcggtagtgcgatttttgcgtgccatgattgaaactcacatgatgtgtgactctattggttgagctactagcaactagactg

SEQ ID NO: 15073 - DNA, 204 bp, Oryza sativa
  Clone ID: PAT_MRT4530_20950C.1
atggatgacgtcgacgatgacggcggcggtcggtttggcatggagcggggccgggtggctgcgcggcgcaggcgcggcagggctgacggcggcaacgaccggccggtcggccacgcgcgagcgcgggaaaaggcgaaggcggtggcggacgaccttgtccgacgggcggtgaggtcaacgaggcagaaccactgtttggtgtag

SEQ ID NO: 15074 - DNA, 1880 bp, Oryza sativa
  Clone ID: PAT_MRT4530_20951C.1
atggctaacaagactctccgagagttcgctgctccctctgctgacaatgtggccattaggctgcaggtcaatataggagacatggatttcgacttgaagtccagcctcatcacgatggcgcaggctaacccgttctgtggcaagcctaatgaggatgccaatgctcatctgcaacagttcttagagatctatagcacgtacaccatcaagggcgtcagtcccgacgtcgtcaggctgcgactgtttccgttctcccttctcgggagagcgaagtagtggttctatgccaaccgtgctgctgtcaatacctgggacaaatgctctacgacattcctctcgaaattcttcccgatggaagcatgggaacgactgtaggagtatgtggccgcctgtcctcatcattggatggatgactggctgatcctgcagaacttttataacggactcaccccgatgtcccgagatcacctggacgcggcagctggaggagcattcttctctaaaacggttcaaggagccgttgatctaatagagaagatggtctccaatatgggttggagcgaggaacgactccagacccgttagcgaggcatgcacaccgtcaaggagacggagttacttgctgccaagctggatctcctcatgaagcgattggacgaccatgagaaatggccacaaggcaccgtcaaggccttggactcccacgtcacatgtgaggtctgcggcaacacgggtcattctgggaatgactgcccggaaacccatgaggaggcgatgtacatgggcaacaacaacaacgggtaccttccacaaggaggtctggggtggaaccaaccacgcccatattatcaaggaggtaacaacaacggtaacttttctaaccagccctccttgaaggatctcgtttttgcgcaagctaaaaccaccgatgcgctaagcaaaaagcttgcaaccaatgacaagttggcatccttagtccttacaaatgaaactaggaggattccggggcaacccgactcctccattgaaaatgttaaggcaatcacgacgaggggaggtaagtccactcgtgatccgccatatcctaaccctacaggaattaatgggatatcaaaagaagcgccatctaaagactcggctgacaaggatgttcagccagaaaagacagtgccgcaagagtactgcgacacgcggttgctgccatttcctcaacggattaggaaatcgtcagtagacaagcattttgctcgttttattgaagaaatccagaaaatccacatcaacgtgccgttgttggatgctatacaagtgccaacatacgcctgttatctcaagaacatactcaacaataagagacagctcccaacaatggaggtggtcaagctgatggaacaatgcagcaacgtaatactccacaagctcccggagaagaagaaagatccggggtgtcctacgatacctgctcgatcggggcacaacagtttgacccggccttgtgcgaccttggagccagtgtcagcgtcatgccaaaagacgtcttcgacaagctcaacttcacggtgttggcaccaacaccaatgcgccttcaactggctgattcgtcagtctattactcggcagggatagcggaggatgtgccagtcaagatacgtgatttcttcatcctggttgacttcgtgatgctggacatggatacggggaaagagacgccgctcatcctggggcgcaccttccttagcaccgcaggagccaacattgacgtgggaatggggattatctgtttccacatcaatgggaaggaagagaagtttgagtttcaaccgaggatggaacaatgctccatgatcaggataaagttgggagccaactggggatgcacc

SEQ ID NO: 15075 - DNA, 583 bp, Oryza sativa
  Clone ID: PAT_MRT4530_20952C.1
atgagccccacctcgccacgcctgcccctccccgccaccaacaccgcgccgccgtttaaagtccacaggggctcccgcctcatccacaagcagccacccgccgccgcatcgtcctcctcctcctccaactcttccacctcctccgcctccggtctgacgacgacgacgaagaacaagaacaatgccgccaccgccgccgcagctcaccggccgccgtcgcgccagcaacacaagcagcagcagcagcagccagtgattatatacacgcactcgccgaaggtgatccgcacgagcccacgcgacttcatgtccatcgtgcagaggctcaccggactcgacagcgcccgcaccgcggcctcgcactcgcaccacgactcctcctcctcctcctccagcgccgacagctgcaccaacacctcccaccaccacgcacacgcgccgccaccgccgtcgtcccactcccactcctacgtcgttgtcgatccgccgcgccgccactgccaacgacgcaccacttcattccgccggagatcccactgctcgcgcgtgcaccagcctccgacctgccgccggctctctgcgc

SEQ ID NO: 15076 - DNA, 132 bp, Oryza sativa
  Clone ID: PAT_MRT4530_20953C.1
atgcagaagtcaacgatgatagggaaggagctaaaggtcggtgctcgaggtcacgaaggtggcggtagtgccatggaggtggtcgtcagggaggaggagcagttgcgtggaggtatcaggggtggaggctag

SEQ ID NO: 15077 - DNA, 1796 bp, Oryza sativa
  Clone ID: PAT_MRT4530_20954C.1
aatcgggcgcttcgacctcggaagacattttttttgctagcaatcaatcacagatgaaactgaaatcatacgtttgtctactgctctttttaccccaagagcaaggaaaacaattacggtgtactcaagacagcatatagtacgaaactgaaatcacccaaagtcccagtcatgaacgacccatctctgtggtggcccaactcggtggttacgtgcgtcactttaatctccacccaacaacacagcccaccacctcattcaatcatccttcaatcatttcccacgtcatgcgctggccgcttccctccacgactccaccagccgcgccaacgtcacctccgactcgccgccgtcgcgcagcgccgccttcgcccgccgcatggccgccagcgtccgctccaggagcgccctcccgccgtcggactccatcagccaccgcaccttcgccgccacctcctccgccttcacggtcccctccccgacgtcgtcgtcgtacccttccaccgccacggccagccgcatctccttctccaggaacaccctgttcatccgctgctccgcgtacagcggccacgccagcatcggcacgccggccacgatcgactccagcaccgagttccacccgcagtgcgtcacgaagccgcccaccgccgcgtgcgccagcacgtcgcgctgcggcgcccacgacttgacgacgagccccctgcccttggtccgctccaggaaccccttggggaggagcgcgtccaggtcgggctccggcggcttgtcgaacttcttcgccgggtcgtcgctcggcgggctccgcaccacccacaggaaccgctgcccgctcgcctccagccccgcgcgccacctccttgatctgctccgcgctgaacaggccgatgctgccgaagcagaggaacaccacgctgccgttgggctgcgtgtccagccacgccaggcactcctcgctccggttctcgcccacctccgccgactttatcagcgggccgatgcagtagacgggcggcgtcgagacgcccggaggcgcgcagctccccgcggcaatggtctcgacggcccgcggctcgagcgagcggaatgtgttgacgaggaagccctgggtgcggcagaggtcggcggacgctttcagaaattccgcgtaggccgggtcgtcgcgttccatgagcggcaggacggagtgcgtcgccgggaacgaggggatgccgggggcgtgcacgagctcttcgcccatctccccgaagttcgccgtggtctgagcgtgcaggaccgggaggtacaagaagaaagccaggatctcggcgccggaagtgtagaacatgtaggcggggacacccagctcgtcggcgacgtcgagggcggcgttgcagaagaagtcgatgatgaggacgaccggggaggcgccggcgaggaagtcgcggaggccggggttggagaggcgggtgacctcgaaggtgagcgactcgtggtgcttggacgccactggcggcacctccaccttcggcagacggtggaacgtcatggccgggttggccgcggtgacgccggcgaggaaaggccccgtcgcgccggtgttgccgtacggtgggtcgacgacgacgacggtgacggcgaggccgcgggcggcgaacaccttgccgagctcgatcatggagaccaggtggcccatgcccggcgacgggtagagcacgaccggcttccgggccctcgtggtggctgcgtcgccggcgtccatcagtccgtgacggatcgagcactcgagcaggtatagaatctcgcggacgcgtggg

SEQ ID NO: 15078 - DNA, 209 bp, Oryza sativa
  unsure (1)..(209): unsure at all n locations
  Clone ID: PAT_MRT4530_20955C.1
gaagcaccagtacaacgccaacggggcggcgccaacatggtggccagcggctactccancggcaccgnnctcggcgccgaaatcatcggcacnttcgtcctcgtctacaacgtcttctncgnnannnacccaaagcgcaatncccgcnactccnacgtcccggtgctcgcnccgttnnccatcgggttcgccgtgttcatggtgcacct

SEQ ID NO: 15079 - DNA, 615 bp, Oryza sativa
  unsure (1)..(615): unsure at all n locations
  Clone ID: PAT_MRT4530_20956C.1
atgggtgtactcaccattctattcgcaaaaggaccttgggagaatgtcaaatatgataccaatctagaaggtctcataggtccaactttgtgttttggaaaaaaccacataaccacagctgacagggttaaaattctcacaaaaagttatttccattccacacatattgaaagcattgccttcccttgggaagccaaaagcaagatattagaagcaattgacatcaattgggaagctcaaagacatgttgcaaaagattcttcactcattgcctgcaaattatggaaagaagtagacatgtcaggttctaagattaatcaatatttaatattttggcttctccataggaaaagcacaataatgtggagaatgattaaacaaccttggttctatgaaggcattacacttgttggggcatcacgtgaaattctcatcgatgttgtatggaagaaagtgatattcaatgacaagatattgaaagcaatgacatcaaatgggaagctcaaagacatgtttgcaaagattcttcactcattgcctgcaaattattggaaagaagtanacatgtcaggttctaagattatgcggggtggggatattttggctcttccatag

SEQ ID NO: 15080 - DNA, 220 bp, Oryza sativa
  Clone ID: PAT_MRT4530_20957C.1
ctaagcaggagagttcaaattgtttaatactatttctttctttccaaggctaagcacaaaaaggggcaacattgggtccactccgttccacgccaaaaaagcacaaaaaaacagagcggcaacatggccaccgccctttcctccacctgaaaaacaaacgataatcagcgagtaacgaacagccacgccacttaaacaaataaaagcaccgggggggaca

SEQ ID NO: 15081 - DNA, 193 bp, Oryza sativa
  Clone ID: PAT_MRT4530_20958C.1
cgaatttccgatgcgctgtgcctccattattccgttcccttctctttgcattatatgagtattctgtacatcatattggatgtgctagcaattgccatatgcttggtgtttatactctctttatatggtacaaccttcagcgatatgtgtgcttgtggtggctaatagtcatgtttttgacttttgcatatta

SEQ ID NO: 15082 - DNA, 200 bp, Oryza sativa
  Clone ID: PAT_MRT4530_20959C.1
gtgtggtatatgaagtatgccgtcttcgcagccagttgtggtggtcgcgtacaaggtcttaattgaatctcgaaatggaatagtcacattaaccgcgaaggtggaagtaatttccatggaatgccagaggaggcgaatggtgagcttccaatggggatttcctttaatcgtctggcaaaggatgaggtcctactcggggg

SEQ ID NO: 15083 - DNA, 505 bp, Oryza sativa
  unsure (1)..(505): unsure at all n locations
  Clone ID: PAT_MRT4530_2095C.1
acgagctcgtgccgaattcggcacgagatcnnacccaggnctcgnggcncntctcctcctcctcctcctcctcctccgcatgagctcntccgngttggcgttggccngtcntctccgggaggantnttgcatgcggcggcngggaaatccgaaacngantttgttcgttttggagcggaatggtgaggtgagtcctccacataggggantgcaacgtgggaggangaagcggaagcnganactgcttnatcaaactgttcgggaagacatccccgtgccataacccngcgcctgcgccgccggcgatgtttntnacgaccttcnncacagtggcagcngcccccactgaacnaaaatccgtganaacaccgttcnngactccacgtgtcccctccgcngccacaagtcctctacccgaggactcttccctcatatgaactctcngcacaatcancaccnacagggcggataccggcagcccganngagaactnaaganacctgac

SEQ ID NO: 15084 - DNA, 278 bp, Oryza sativa
  Clone ID: PAT_MRT4530_20960C.1
attctctccccgaccgtctcttcttcccccacccctcgcctccatcatgctctcgggtgagataggcttacaaggaactatcaacagggggaagagcaagacgatactcttcttgagggtccggcggacccggtcctcggggaccccatcgcatcagttcacgacgcctccccccttctacgacaagtaccgctgatcgttgattcgcctactgaagggttcggaacccggctatccctttgcccctggggcaaaaccccctccgcaagctttagttt

SEQ ID NO: 15085 - DNA, 1008 bp, Oryza sativa
  Clone ID: PAT_MRT4530_20961C.1
atgacgactaagctggagcttatgcggagcaactacttgaagaagcttctgacggagatcgtgccggcactggccgagaactcgccggaggcggcgcttgtggtggtttcagacccgcccgtcgacgacgtcctcacctacgtttgtattgacgtggctgcgagtgacacggccagtgagggaggcaccgatcagcaactgcgccgccgcagcaacaagctgtctccatcgtccctcggctccgtcgggatcatggtggcttcggcagcaatcactgaaatcaccggcgccggcacaaccaccagcccggcgtatggaccctacatttttttattattatacgacaaagtcctcgtcttcaacctccaacagcccaatggactaggaggcgcggccgtggcttgggcgagctcgccggtggcgaacggcgtggccaaaagaaaaaaatgtgtgcatgcttcttgcgcaccagtaggtggtctaaatgcggccgatggtgactccagtaaatatgtaggggtggctcaagtggtggtgaggctcggcatgcttgtgaatgttgagctccgattcgatttagggaagtactccgtacaatgcatgaatgtgtgttataggggttcttggatgctcaccaaggttggcgcgaggtccggaaaggtctggacggctactgctgctgttggaacgtcccggcggcatcgtggactccgggtggatgtcgacggcgtgctaccgacaacgagctggaaatacaacatgtccaggtatcatggtgatggtgttggcgagacagctcggccggatctgcaccgtggtggccggaacgcgaggacgacgccggcggctgcgctcggtgcgcgccgtggagctccgatggcgcggtcgcgttcccgggatgaccacggctcgtcggcggttgagacaccgttgtcatcttcacggccgatgacggagaagaggaggtggaggatggctgtaatggctgtttgctcagcttcgccgtaa

SEQ ID NO: 15086 - DNA, 1308 bp, Oryza sativa
  Clone ID: PAT_MRT4530_20962C.1
atgatggttgtggaaggggaattgtccgaagtgccctccaaccgtcactgggatgtaatcctgtacgtccacgccgaaccctacatccaacggcgccaggataggttcggccgaaccaccaagttcggccgaaccatgggctgggccatcttcggctggcggcctcctctattgctcctttatgcagacttctcagtatttctaatcaatgtggagtacgacaccctgttgcaaagactggagacgagacctcaagtcgtcaggcctaacgacgtggcgagcatccttcgcaacttccgtgcccgtgctgccccattactacgtcgtgtctcctgtcggagcgcggcagatgtggtgcagccgtcggcccgtagggcatcaccaccactaccccgccgttctagcatggatcccactattccatccacgtcacgttgcgggtacgaagtggcctacacatctcacagccatccttcctttcagcacaccccagcaccggagtacaccatggggtcagctagatcagggggagcatctgggtcagcacacttcccttacatgccaacaggggacaacgtgttgaacacaccagcatggggacttcatatcattccgcacgatgagtacggtttggcgtcgacgcatcatggaatgcctgcttactcccctcgctcagcattcgttgaggacttcttttccactgagcctcctcaaggggaagcagggatggattacaggcacgcagcaccttcggtcacacagccgacgctggagacggaggccgttcaggcacccaagagttatgaaagcgaccatgcgagagctcgactagtgcccgtcaagtctatccacacatcagccctatcttcagcactacgcttcctgcagtccctccagttcaacacaatggaagctccattccgcgagcatttagactggcggagagatccactcgcaggtctttttccaccatggtgcgaccttccaatctgcgcatgcggacagagatgcttcgtctatcctaacattgtcgacaatgatttcatcgaagaagaccgcaaatgtagctatgtaaagtggattgatacggtgcgaagaacttccatcggttcgacgataactcaacctgagacgaccacacaattcattcaagcatggatggaagatcgctgccatgttgtaacgtccttctcacaagatatatatggcatgcggtacttcgtctgtcccaacatagacgacaacttcgttgggaatccaaggatatgtgcttttacttcatggatcaacatggtcagcccgatgtag

SEQ ID NO: 15087 - DNA, 448 bp, Oryza sativa
  unsure (1)..(448): unsure at all n locations
  Clone ID: PAT_MRT4530_20963C.1
gccggtagctggactcgtcggccaggcctgtacattggtgattgccactcngtgtggctgaaggagctngtggcattgtgctgattaatgctccctgatctgctgctgctgctgctcatgatgctgatgatccctgagaggcagagaacctgaacttccaggaggcaaagtttcagatgttgagtggtgatggttncaggctttctctcacctgcagaaagggttgcagacctgcagtcatgcaacaatttaagatgttaattctgcaatcatcaaaatgatgtccaatctaataactgttccttaatccttactgctgagaactaatgggaagaaagtagctaaccatcttctggactggatgaaattgtaacattgcgacatgttcattaaaagtttgagaaatctcccgtgttccaagaaaaaaaaaaaaaaaaaaaaaaaaaaa

SEQ ID NO: 15088 - DNA, 499 bp, Oryza sativa
  Clone ID: PAT_MRT4530_20964C.1
cgaacctaagctagctagctatagctcatcgacacaagaaacacacacacgtacgtccggcgaataattgcatcaatcaattgaaatatggctactaccagatgcgtctgcattgtgctctgcctgggctcggtggtcaactgaggggctcgcgctcacgcaagccgaggcggcccgtgccttggcagagtacgccgctccgccacgcggcgactacgacgacgacgcaggctgcgccgactgctgccgcggatttggtattcgtggacgtcgtccgccgctgaggcggaacgtgaggagcctacatggcggcacgcggaaagtgccaggccgtccgtaccctcagcaccattactagacgacgatccgatatatatatcgagcattatgcgagaaataatctcgtctgaggctctgacgatctcaaagaaataatctgtgtgcgaggcttaggttgatcgactggtgctcaatagaagcactactaaacccttgatac

SEQ ID NO: 15089 - DNA, 213 bp, Oryza sativa
  Clone ID: PAT_MRT4530_20965C.1
tgttctttcaagtcgaccaacgccgaggaaaaatggctaaagagacccatgtgcggtctcttccacttccatgattaaagacacaggacaaaactcggcatggtgaccggcctgacagccgtaattacacatcgaggcgtctggcaagtcttgcctactacacattagagcacgtactcggaaaaggatgcggggcataaccactaacgtact

SEQ ID NO: 15090 - DNA, 226 bp, Oryza sativa
  unsure (1)..(226): unsure at all n locations
  Clone ID: PAT_MRT4530_20966C.1
cagcctcgctcctcagtaaggaggaggaacatgtcggcagaaagttccagcacccgtggcatggatccctccgctgcctcccgaggaagcgctcctcccgccaccgctgcaaggtgaagttcttcccccctgtgggcgtgtggaaaccctggctttttgtcttccttcggtggcctcctgggggggggtgnctgccttttccgcgcgttggcctgaggcctggttt

SEQ ID NO: 15091 - DNA, 325 bp, Oryza sativa
  Clone ID: PAT_MRT4530_20967C.1
ggcttaacattcaaatatggccatttgtccattcccttttaaaaagtttaaaccatttttgggtcccaaaattttacagaagaacatagcacgaactcaacacgagcaatacaaaacttttacaaatcgatctttttgctgcccccctatgcacaaatttttaaaaatcgctgacccccttttttaaaagttgatgccgcactgcctgacgtcagggcccctggccttgatggggaagggatcaatcctgacccaaagcaaggaaaagatggaggcgagcagcacggaccagatgacaacaatggggggcgtccggttctgcctc

SEQ ID NO: 15092 - DNA, 351 bp, Oryza sativa
  Clone ID: PAT_MRT4530_20968C.1
atggccggcaaggaggcgggagaggacggcaacgctgacgccgacgtcgacgagatcgagcggggggacgcacggcgccctcaccggggaacgagctccctgctccctccgccgcctcccgccgtctgtgataacaagatccggcgctctggcctctccgccgattgcaacaacaagatccgggcatctggcgtatgcgacatcgagcctctcaagttcacgtcagcgatgatgagctggctcaggtcgctggtgaagcagtcggcctgcagggcgagcgccatccgtcgccactcccaccgccaccaccacttcagctttccccgctctggcgcccacccgccgccgctc

SEQ ID NO: 15093 - DNA, 3448 bp, Oryza sativa
  Clone ID: PAT_MRT4530_20969C.1
gagtgagaataccagcccttgttgcttaacattcaaatatggccatctgtccattccctcttcaaaagtttaaaccatttctgggtcccaaaatattacagaagaacatagcacgaactcaacacgagcaatacaaaacttttacaaatcgatcttcttgctgcccccctatgcacaaatcttcagaaatcgctgacgccctctctcagcagttgatgccgcactgcctgacgtcagggcccctggccttgatggtgaagggatcaatcctgacccagagcaaggaaaagatggaggcgagcagcacggaccagatgacaacaatggtgggcgtccggttctgcctccccatgagccccttgaggaaggggtagaggtggacgatgacccagaaggcgaagaagagcttcccgaagagcgggccccacgcctcggagccgttgttgatggcgtcggagacgccggcgacgacgccgatgatgttgaggatgagcagcgtggtgggcgggatgaggagggtggtccacttgaaggcgtagagctccgcgaactcgtcgtcctcgtctccggtggccttggacgtgacggtgaagttggtgtcgatcccggccagcaccttgagcaggccctgcaccaccgcgaacaggtgcgccgacacgccgccgatgacccagaactgctcgttcctccaccactcctcgatgctcaccccgctccacctcatctccaggatgcccgtcgcgaagatggagatgaagagcgcgatgaagaacaaactcgcaaacgtgctaatcggaggcatgatgaacttgccggtgaggaggcagacggcgggtagggtgcagtaggcgaggagggggagagaagtgaaggggtagatggtggtgttgatgtaggagaagcgctcgagccacttgaggttgccgttcttgtagccgtagaggagcgggctgtgccggctgaagaagatctcgacggagccgagcgcccaccggagcacctggttgagacggtcagataggttgatcggcgctgaccccttgaacgccgccctcttcggcatgcagtacaccgacctccacccgcggcagtgcatcttgaaccccgttaggatgtcctccgtgatcgacccgtagatccaccccagctcgagaccccagtcggtcttgtcctcgtagccgcagctgatgacatggatggcctccttgaggagcgcggcggggctggacgacggcgggacgccgccttcctccatcagcgtcgacgtcacgaacgccgccgactgcccgaaccgcttctcgaagttcatctgcgacatgagcatctccttgtcgctgtccatcccgccgtcggcggcgacggcctccgggaggccgtccttgccgtgcttccgcttcttcctcccgaagcaagggcagcagtcgcaggtcaccatcttgggcctcttgggtcccttgggtgggttgtatccgtacagcgcctgccgcctgaacacgcaccctgtcccgacgtacaccgggccctggatcccatcaagccccttcatgttgatgtcgaagaagacggtgttgcggttggcgtatcggtcgtggacgtcgatgccgtcgaacctctgcgggaactgcacgtagcaaaccttccgtccgacctgcggatccatgaggaagcacatcgcctccctgatggccttgctgttgttgatgtagtgatcgcaatccaagttgagcatgaacggcgcgttcgtcagcacggccgacacacgaatgagggcgttcatggcgccggccttcttgtggtgctggaagccggggcgcttctcacgggagacgtagacgaggcgggggagctcgttgccctcggtgtcgtggccgccgctgtggccgaggaacacctggatcatgcccgggtggtcgcgggtgttgttccccggccatggcgtcccgtccttcatgatccacccttccgccggcaccttctgcgccttcgccaccagcgcgttgatcctcaccttgaactcctcgtactctctcttcatggcgcggcgctcctggacgaagttgggatggaccttgtccttgaggtagtcgaccttctgggagaagtagaactccggggcgcggggctcgatgctgaacttcttgcagaatggcacccacttgcgggcgaactccgccgtctccgacagcgactcgaacgtgagcatggacgcgccgtcgtcggagacgtagcaggacaccttgtcgacggggtagtcgacggcgaggatggacagcacggtgttggccgtgaccagcggcggctccttgagcggatccaccgtgctgacgaacaggtccaccgccgacagcagcgacggctccccctcgcgctcgtagcggagggagaggcggtcgaggtaggtctccctgtcgatcgggtaccacttggggaactggtcgaggatccacgacacggcgaaccagatctcgcagatgatggaggtgagccacagcgggatggcgtcgggcaccgggtggaggatgcggtaccggaggaagaagccgagcaccacgagacggaggatgatcaccatccggtacgggttcaccttgctcgacgcgatcgacaccttcctcgacagcggctgcctcgcctcgtcgttcagtgggacgtcggcgtcgtagtcgtcgggatcgggggcgccgccggcgacgatgccctgcttggatttccagtcgtccatcctctccttccagctcacctctttcttctcgtcccactttgcactccctggctcagacaccgggtaggggtggatgcgcttgtgcagggaagaggagaactcgccatggccatggctgttcgatatcgggaactccccgctcaccgggacggagcgagcgccggtgatgatcggcgggagcggggtgctgttgccgtcgccgtcgtcggggcccctcccgtagctcatcttgccgtgcagcatcgcctcggtgatgtggctgttctgcatgccatcctgatcctgctgcagctgcttctgcttctcgtcgtcgatgttgaactcgtgctccaggtcgtcaatgtcctcctcgtcctcgtccccgggcaccctcgggctccccttgaggcgcttgtagcgggtcttgcactgggggcagttctgggtgccctcgcggcgctcgtactcgtagcaggggcggcacaccgggaagccgcactcgttgcaggcgacgaagaggtcgccgtcgacggtgcggccgacctcgtcgccgcatatctcgcacacctgcccgctcagcgcccgcagcggcttgggctcctcgtgcccccggatcagcaccagctcgttccggttgtgcgacccggccaccagcccggcgctcgcctccatggccgcgcaacaacggccggcaacgagctgcggctgatcagggaggcgacgcaggaaggaggagaggaggaaaaa

SEQ ID NO: 15094 - DNA, 439 bp, Oryza sativa
  unsure (1)..(439): unsure at all n locations
  Clone ID: PAT_MRT4530_2096C.1
cgnaggggctccgcaaacntcagcaatggcggcaggatcaggtgcatgcaggtgtggccgattgagggcatcaagaagttcgagaccctctcttacctgccaccgctcaccgtggaggacctcctgaaagcanatcnagtacctcctccgtnccaagtgggtgccctgcctcnagttcaacaaggtcgganttgtctacccgtgaaaaccacaggtccccngatctacaanggcgggtatggaacatttgnaaactcccatntttcggatgcnccgaccccccccangtnctcnaggancncnaagaagccaaaaaggngttcccngatncnttcttccntttcntcggnttcnanaactttcgggaggtgcagctcatcancttcntccccctaaaaaccccccgggcngcnaagaaatctgggtggcaactaaaccc

SEQ ID NO: 15095 - DNA, 226 bp, Oryza sativa
  unsure (1)..(226): unsure at all n locations
  Clone ID: PAT_MRT4530_20970C.1
cggacgtgatgtataccttcgccatcaagccggattcgaggacggagggatgantggaggaggagggggagggcctctncnagatcgcncggttgccggaggagctcctctccgccgcnatctcacgcgcctcgccgcgggacgcctgccacgccgccgccgtctccccggcgttccgngccgccgncgactccnacgacgtctgggcttccaagaaggagctctt

SEQ ID NO: 15096 - DNA, 768 bp, Oryza sativa
  Clone ID: PAT_MRT4530_20971C.1
atgaaagaagaatctcaaccctcgttacgcttcatctccatccacgtggttgggttggagagggagagggtgagagaagaatggatcccctctcccccatactcgcccgtccagcgtggccatcttatggccgcaagccgccgccgcaaaaggacatatgcctggaaaggaagctcgccacaggcttcaacacctcctcatggcgctactgtcgtcgccgcctcgaccaggctgggcagccaggtcacatcgccgtcgcctccgtcctcccaccattgccgccacaccgccgctacgaaccagtggtttcaccgtcgctgggtcggcatcgcacccctcggcgcaacatgcgtcgaccatcgcctcgccgaccacagccaacaccgccgaccaccgggagccaacaccaccgggagctccaccaccgccctcagccactcctcggcgtgccgcgccgtcctccgccgtcgcctgccgctccgtcgcaccgagtcgtcgtccgccgtcgccagctgcttctcgatgcgcgccgccgtcctccgtcggtgccggccgcgcctccctcgggcgagccgctgccgtcgtcacgcctttcgtcggccgactgctgccatcgcccgcgcctcctgccgtccggccgccaccgtctcacactccctcccaccagcgcctccagccgtcgtccttccgccgtcgctcgcgtcgtcccccgcattgtccagttcgatccggcggcgggagtgccggatccagccgcggggaggctag

SEQ ID NO: 15097 - DNA, 876 bp, Oryza sativa
  Clone ID: PAT_MRT4530_20972C.1
atggcttcccctaaaccctttgcttgcagtgccattgccttgttatttgctgcaaacttggtgtcagctcagcttagcgcaaatttctatgacaaatcatgccctaatgcactgcccaccatccgaatagccggttgtgatggctcggtgctgctagatgacactccaacattcactggagagaagaccgctgctccaaacaacaactctctgcgtggatttgatgttatagacaacatcaaggcacatattgaggggatctgtccgcaggtggtctcatgtgctgacatccttgctgtggcggcacgcgaatctgttgttgcgctaggaggtcctacttgggttgtccagctgggacggcgcgactcaacaacagcaagcctggatactgcaaacaatgacattccagctccaacctttgaccttggtgatctcacgaagtctttttcaaacaaaggactaagcgcaactgacatgattgcactctcaggggctcacaccataggccaggcaaggtgcgtcaattttcgcaaccgcatctacagtgagaccaacatcgacacttccctggcaacatctctgaaatcaaattgtccaaacacgactggcgacaacaacatatccccccttgatgcatcgacgccctacgcctttgacaatttttactacaagaacctgctgaacaagaagggtgtcctgcattctgaccagcaactattcaatggtggttcagcagattcccagacgaccacctactcatcaaacatggcaacattcttcactgatttcagcgcagcaatggtgaagatgggcaacatcaaccccattactggatctagtggacagatcaggaagaactgcaggaaggtaaactag

SEQ ID NO: 15098 - DNA, 417 bp, Oryza sativa
  Clone ID: PAT_MRT4530_20973C.1
atgtcgcagctgccgccgccgatggccgccgccgccgctgcggtgggcgtcgccgacggggggaggacgaagaagcgggcggggctcccgaggctgctgcacaagttcttcttcaaggtgctgcggctgaggccggcggcggcggcggcggagcccggcgccgccgcgttcgaggcctactacggctaccggatggtggacgagtactactactacagctacggcggcgccgccgggccggcgtcttgggcgggcgtgctctcctccatcccggaggaggagagctccgacgagggcacgccggccgccgacgccgccacgctccgcaaggcgcgctccgactccgaccagttcgtcgccgccgaggccgccgccgtcgccgtagtagtagtaaattaccgcggcgcagctagctga

SEQ ID NO: 15099 - DNA, 398 bp, Oryza sativa
  Clone ID: PAT_MRT4530_20974C.1
accctcttttgtgtataccaaaagaaaaaccaacaaagaagaatggagagaactggtactctgcttttcctcatgttgattgtgcttctaggaaattcttcgattcatgcagaggagcattgcaacagctatgatttcgcaaagctcgtatgcgtgaagccactgtgttacctgaactgcaagatcttctttcggaagcacctgaggagctacagctgcgagggcacctggccacaacgcaagtgtgtctgctacgcctgcgatgacaattagacaactcagtcaatggagacaagcaccataattgaactggggaaataacatttgcttatagaaagcatcttgatcgtagtgcatgtttaactgaataacatggaattttgaagtcagtatgattt

SEQ ID NO: 15100 - DNA, 2576 bp, Oryza sativa
  unsure (1)..(2576): unsure at all n locations
  Clone ID: PAT_MRT4530_20975C.1
tttttttttttngtttttttttttttattttttttttttcgtcagttgcaaatgccggaaaattattagcaacgtgtgtttaagtgaaaatgttaatgttcacatagcgtcatttagcgccgcatttcccgtggcagcgtacaactgcaagtgtagtagctcacaaaatttctgagttcttcgcggatatctcagaaggttatttgaaaggtattcctaaaaaatggggttgcgctaatcaagctgtttacaacaattacgattcgcctcatcgcaatcttcttgagcgttcatcctactgctcggcgatctttctgatgacatacggtaaaatgccaccattgtcgtagtatgcaagctccacctcagtgtcaaatcgaagtgtgcaagtgaaggacttcccattatcagtcgtcacagtaacatcttgcccaggcttgatctcacttacattggccgggaggtgaaccgtgaaacgctcatggccagtcaatccaagggtgtcggcgtcctcccctgacttgaagcatagaggaatgatacccataccagcaaggttgctgcggtgaatcctttcaaagctcttagcaatcacagccttgactccctgtagcattggacccttcgcagcccaatcccgagagcttccactaccgtactcagcaccagccaggataatagtgtcatgtccttcattcttgtatttcgtagcagcgtcgaaaacagagagcttctcccctgatggaatatggatggtttttgggccaacctcacccttcaagaacttgttcacaaggcgaatgttggcaaaagttcccctagccatgatctcatcatttcctcgccgactgccatatgagttgaagtccttcctttcaacaccacgctccttcagatatctagcagcagggctgtcagggtgaatacttccggcaggtgagatgtgatcagttgtgatactgtcaccaaagttcaggagacagtaagcatccttcacaggccgtgggccaggaggggacattgtcatatccttgaaataaggaggctcatggatgtaagtagatgtcgggtcccatgggtagagagtgcttgctgatacagacagctcattccacataggatttcctttggttattgcctcgtatgtgctcttaaacatgtcaggtagcacacttgatttaacaacctcagcaatctcttcagtggaaggccagatgtccctgaagtaaacctccttcccatctttcgagatgccaattggttctttctcaaaatcaatattgaccgtgccagcaagggcataggccacaaccaatggaggagaggcaagataatttgctctggttaatgcgtgcacacgcccttcaaaatttctgtttccagataacacggcagcagcgacaatatcgttgtcagaaattgcagcagatactgtttcatcaagttctccagaatttcctatgcaggttgtgcaaccatagcctacaatatggaagccaagctggtctagatatttctgcagaccactcttgtccaagtacttcttcacaactccagaaccaggtgcaagacttgtcttaatccatggcttgacctcaaggcctaattcacaagcctttttggcaactagagcagctcccagcattacattaggatttgatgtgttggtgcaactggttatagcagcaattacaacatcaccatgctttagctttgctggtgtcccatggaaagagaactcagcaactttaccctgtgattctttggggacagcaaaacccttgaagcctacatcattatccaagcaagacagccaatctgatttcatgttcttcaaagtcactcggtcatgaggccgttttggtccagacaagcatggctctacctcctccaagttaagttccagataagatgagtacactctttcagcttcaggctggttgtagtcgacgaacatcttattggcacgcaggtaagactctatcatggccacagtgtcatcacttctgccagttagcttcaagtagtccaatgtctttccatcaactgggaagaaacccatagttgcaccatattctggtgacatgtttgcaattgtagccctatcagccagtgataattcactcatgcctcccccgtaaaattcaacaaattttccgacaacgccatgtttcctaagcatttgagttactgttagaaccaaatctgtagcagtaacaccgttcctcagcttccctgttaacttgaagcccacaactcctggcaataccatgctcattggctggccaagcattgcagcttctgcctctataccaccaactccccatccagcaacaccaagaccatctatcatagttgtgtgggagtctgttccaacaacactatcagggtaaaggatcccaccattgttaaacacaactctggccagatattcaaggttaacctgatgcacaattccagatccaggtggaacaacaagcatgttacggaaagcagttgaaccccatttcaaaaatccaaacctctccttgttacgatggaactctagctccatatttgcctgaacagcattttct

SEQ ID NO: 15101 - DNA, 186 bp, Oryza sativa
  Clone ID: PAT_MRT4530_20976C.1
atttagagcttgacgcgatgctcgccctccgtcagctggtatgcctcctgttgtccgccctcctttttttttttttttttttttttttttttttttatgtctctctaggcccacgtttttgcttcaacacaagttgcgagaacccgcatgaagagtgccaggaacatccagatgattacaaaagcc

SEQ ID NO: 15102 - DNA, 2261 bp, Oryza sativa
  unsure (1)..(2261): unsure at all n locations
  Clone ID: PAT_MRT4530_20977C.1
gcggaacagaaacccaaagaggacctgatcagcaagctccccgatgacatcctcgtgcccatcctgtccatgtgcccctacgccgacgccgagcgagccgccgcggtttcacggcggtggcagcatctccacacccggctccccaacgttcggttcagcatgtccgtgcaggggcttctcgcgcctcttggcgagtcgagcaaaccgcgcgtgcagagcatggcgcgcacgcttcagcggcgctgctgcggcggcggcgacaccgtgaaaacgcttcacattggttaccggaaggacgtcccgttcgagtgcaggtacgcggaggagttcgtcgcgctggccaacgcgacgaggctggagctgggcgtgcagtgcgcgagggggctccccgacgaggacgccggcgagtggtcgctcgagctgccgccggcgaccgccgagctgcagctgcggctgtactggtacgcggtgcggccgcccggcctgcacggccccggcgtcgcctccctccggtggctcgcgcggaacggcctggcggtgctacgcccggagtcgttcctctccggcggcggcgtcgtcttcccggcgctggaggagctgcacatcgtcaagtgcacgcttccggccggcggcggcatcgacatcacgtccgccgccatgccgcggctgaggcgcctcatcgtcaccgacgtcgccgtgatgagcgccgccaccaaggccgggatcgccgtgctcgccgacgagctggcggagctccgcgtctcgtgtcgctgcgacaccgagcccatggcgacgtccgaccccgccgcctaccacctgaagccgcggttccgcgccctcttcacccgctactcgtgcgtccgcgtgcgcgcgcccaggctgcgcgtgttcgagtggcgctgctgcttcgccgacgaggtgcgcgtggagagcgtcggccgcctctcggacgtcgcggtggagctcgccgccggccggctgccgaggctgtgggacgaggagagcaagtctctgtcggtagaagactgcgacaagctgatgaaaggcatcctacgtgggctcctgcctggactgcggccgcgcagctgggattgggttcagagtcaccccgtccgccgctatcgccgcgcgggccgacatcgccacggcgcacgccgagtcacgttggaggcgggccagcacgagggacctatagctatggtgttgtccctgctccttcggcaagaagtctcgggagtagagtcgcagagctagcccctcctcatgctcccccacaacctctgtggacatgacggcggattggtggaccgacagagcagtacacattgtgtcgacgggggcgtactcgctgaacagccacccgccgcgcccgcacgcccggggcgccacggcctcgctggtggcggcaatggcgccgccgccgccgcaatgcgaccgcatccacgattggccgggagcgcactggtgcagcgcgcagcgcagccgggaaacgcgacgcgcgaagagataagtcgagagaaccctgcgccgtcgccgacgatggggctcgccggcggggcgcgcgtggtgctcttcgtcgtggcggcggcggcggctgcggctctgactgccgccgccgatcagatcttcaccagttcaggtgcgccgtttgggcggaattcgcgtgagccgaggtaccatgttgagttccatcctgtcgatgcgccatttaatccagagaatggccaggaatctgtaccaatgactagccacgtggggaaacattatacatgcttcctacctgttgaggaaacaaaaaccatgaagtcgataatcccacaaaacgcaaccaatgttatcatagaaagtgaacggagagttaagccaaaggatccagatgaattgctggaaattctcaaggatcagtgcttctacaggcatgaaggttggtggtcttatgaattttgctactacgggaaaatccgacaagtccacgtagagggcgagaaggttattcaagaatatgttctgggtgaatatgatgctgatgcaactgatgcttactatgaaaatcaaacatctgactctgctgatgaagatgataacctgatagacacctctaagaggtatcatgtccacctgtacacaaatgggactgtctgcgatctcactgatatgcccccgggaacangaggtagatttgtatggtcagaacccactgtagtgatttagtcnattaaggagatctcttccctgcaatatgttttaacagttcaaagccc

SEQ ID NO: 15103 - DNA, 170 bp, Oryza sativa
  Clone ID: PAT_MRT4530_20978C.1
gcggccacgcgtccgagcgtactagagcaacgaatgagagagctcgttgagctgcacagatggccctctctgcgatggcgtcaagtgcaaccaccgtatgtccgttgcaggggcttaagtccactgcaggtatgccagcgtccggactgtccggaggctcaagctcatgc

SEQ ID NO: 15104 - DNA, 339 bp, Oryza sativa
  Clone ID: PAT_MRT4530_20979C.1
atgtcgaccagcatcaaggcgcgcaagctcgagctcgcagccggtagcggcaagggcgacgcgtcgtcgctgccggcgccgccactgttcctgggccgcgaggtgctcgaccagagccctagcccaagccgcacacacagcgccacacctccgagctgcgaccgtgtcgtgcacgaccagtgcgcccttccggttaccttgcaccgtgcgccgcgctgtgtgtcgcgccacgcccgcgtgggcccgccgcccgaccaagccgccgaaatcctgcacaaaggccgcgtcgccacgagcgcctgcgtcatcccgtctcatcgcgagtcaccatcgagctga

SEQ ID NO: 15105 - DNA, 797 bp, Oryza sativa
  unsure (1)..(797): unsure at all n locations
  Clone ID: PAT_MRT4530_2097C.1
gatatattactgggcattcaagcttagattttcagaggattgatggggataacgatagatcagaaaatgatggggatagttggactgatcaagaaacgttattgctgttggagggcatagagaagtacaatgacaactggaataacattgcagagcatgttggaacaaagtcaaaagcacaatgtatgtaccattttattcgtcttcctgttgaagatggtttgttagagaatattgaggtgccagatgcatctgtgccatttagagcagaaaccaatggatacccacatttagattgcaatggcagtacttcaggttgggtttttggcttctgctatgggaccaagagttgcagcatcatgtgcaagtgctgctttatcagttttgacagtagatgatgattccagggtgaattcagaaggcatttgctctgattctaggggccaaggtccgcatccgaattttcgtgatcataatggtggtgtatcttcatccatctctccagaaaaggtgaagcatgctgccatgtgtggtttgtcggcagcagctacgaaggctaaactttttgcagatcaagaggaacgtgaaatccaaagactaactgctactgtaataaaccatcagttaaaaaggttggaactgaagctgaagcagtttgccgaagtcgagaccttgcttttgaaagatgcgagcaagtggagagaataaggcagaggattgcatctgaccgtgtccgaatcgtgtncacccgcttggcctcgcctggaaatagcctacctggggggtagtactagcac

SEQ ID NO: 15106 - DNA, 396 bp, Oryza sativa
  Clone ID: PAT_MRT4530_20980C.1
ccggccggggtcttgcctcgaagcatagcctcgcgaggtcgaccgccggctgagccgagcacacatgaatatcatcatcgtatgcgatgtggttgttattactgtgtggaaggcgacgcatctgttcggccagaggatgaaacgctaattactgtctgaagtacagacggatcgactgatgtgctactgctcgctcatctaatctatgcagcgcgccacggatgggcaagagctgcaggtgatgaccctccgccagaacggtagcctcaactagctcgcgtaggatgtcatgccgaggcacagggctaaggagatcaccgatgtcgggcagaccagagatggcagtcttcggagggacccgatggatcggcatgggaacattcacgacttgagccg

SEQ ID NO: 15107 - DNA, 138 bp, Oryza sativa
  Clone ID: PAT_MRT4530_20981C.1
aactccttgatttctataccatttcattccaccggatattcttcaagcagcgacaacaccttaaccaaagcgaactcaatttatggtaacatcacggacgaagaacacctaacactggatggatggatagagggcttt

SEQ ID NO: 15108 - DNA, 1509 bp, Oryza sativa
  Clone ID: PAT_MRT4530_20982C.1
atgcacgagcccctctacagagttcacaagaagcaacagccagtgacagctcagcatcgcccccgcctccgcggcgaggcgaccaccttgggctctatccgggggaggcgacgtggaagcccacatgaaactggtggccgctttaatgagaccgtgaagtgggccctacttaagcatgaaaactttgatgggtcgttgtgggttggggaattggcgcaggttacctcgccgcgatccccgccgggggcgccccctccgccggagttcgagatctcgcggcagtcccgtctcctcgcggcgctgtccaagaaggtgatagatctcgatgagctgaggatgctggctgctcagggggtccctgacggcgccgccgtccgtcctactgtgtggaagctgttgctgggctatttgccgagtgatcgtgccctgtgggagcaggagttggcaaagaagagatcacagtacgcagcctttaaagaagaattccttagcaaccctatggaaattgcacggcaacgggaattagaaggccaagggagtgagaatgcagggagtatatataatgggttacttcatagatcagaggttacacaagaagagcacccattgagccttgggaagacaactgcatggaatcagttctttgagtattcagagattatcgagcaaattgaccgtgatgtgaagcgcactcaccctgacatgcattttttctgtggagactcatcttttgcaaagtccaatcaggagatctctaatatctaactgattatctttgcaaagctgaatgccggaatacgttatgtacaagggatgaatgaaattttggcacctctcttctttgtgtttcggaatgatccagatgataaaaatgctaactttgcagaagctgattctttcttctgcttcatggagttacttagtgggtttagagacaacttctgccagaaactagacaacagtgctgttggcattcaaggtactctctcaaaactgtcgcaacttgttgcgaagtatgatggagagcttcagcgttatttggaaataacaacagaaattaatcctcagttctacgcattccggtggattacgctactgttaacccaggagttcaactttgctgacactattcacatatgggacacactattaagtgatcctgatggtcctcagggccgatcaatctacagagatggaactggagaatccatgtacacaaatatagaaacgagcgttgcacatgcgtatcagtcatcccggaacagtgccgttccggtagtggagaagcttcaccggtgccgaaaggctacaggagctgccaggctacagtttgctgccgcgccatttctttccccatttcgatccccagaaaccacagaaaacgcagaagcttttgctttcccgtgccgttttctcgcagctacgcggcccatttcggtgcaaggcgacctcaacctttttccttcattgccctactcttgcagccttgcagctgcaggattggtactg

SEQ ID NO: 15109 - DNA, 807 bp, Oryza sativa
  Clone ID: PAT_MRT4530_20983C.1
gtccgcatcccggtcgcccagccggccgggccaccatggcgacctcgccgcgatccccgccgggggcgccccctccgccggagttcgagatctcgcggcagtcccgtctcctcgcggcgctgtccaagaaggtgatagatctcgatgagctgaggatgctggctgttcagggggtccctgacggcgccgccgtccgtcctactgtgtggaagttttgcagctgttgctgggctatttgccgagtgatcgtgccctgtgggagcaggagttggcaaagaagagatcacagtacgcagcctttaaagaagaattccttagcaaccctgtagatggaaattgcacggcaacaggaattagaaggccaagggagtgagaatgcagggagtatcaataatgggttacttcatagatcagaggttacacaagaagagcacccattgagccttgggaagacaactgcatggaatcagttctttgagtattcagagattatcgagcaaattgaccgtgatgtgaagcgcactcaccctgacatgcattttttctgtggagactcatcttttgcaaagtccaatcaggtgaactccactatctaagtctaaacagagttctgctcagaaacctgactgatcataggtcatccttaccaggaatctctgaaaaatatactgattatctttgcaaagctgaatgccggaatacgttatgtacaagggatgaatgaaattttggcacctctcttctttgggttcggaatgatccagatgataaaatgctgtatgggaactttgcagaagctgattcttt

SEQ ID NO: 15110 - DNA, 535 bp, Oryza sativa
  Clone ID: PAT_MRT4530_20984C.1
ttgcccctttaaaaggacccccaagtccgccgctacctgccgccaccctcgccttcgtctctcgcctataagtgcctgcaaagtcaacatgaaaattaaagtttttggttggctgtttctcatggacagagtgaatactagagacttgttggatagaaaacattgtgctctcttgagcgcatcgatttcttgttcgttgtgccaggagaatgcaagagaaaccagggagcatctgttctttgattgcgccttcagtaaagggtgttggaataggctgggatggtgttggaacacgtcattggagtttaatcaaatgctacactcccagcgctcctctttctcccatcatggtttcatggaattgttccttctggctgcttggaacatctgaaaggagagaaacggtctgatctttcaagggattcagccctctattacaagttgtttggccaatctcaagtcggatctgagcctacatttaattaggttcagggaaagtgatcgccccttagtgcaatcatggattggtcatttg

SEQ ID NO: 15111 - DNA, 257 bp, Oryza sativa
  Clone ID: PAT_MRT4530_20986C.1
agattggaaccacaagctgcaacaactaaagatcattattaaaaaagggtataataaacttatgcaaatataccaacttaaggatcactattattttacaaaaagtgcaaccacctgttaattttactttaaactaccatatgggattaacatgacaatgtccaatcttatcactacaacctaaattaatacaaactttactttttccctttcgcccaagactcaaaacctgtaaacatatgacaactaccgtcaaa

SEQ ID NO: 15112 - DNA, 378 bp, Oryza sativa
  Clone ID: PAT_MRT4530_20987C.1
agttgagcaccacgacgcacttgatgctcttgcacaccgtctggatcaccgtcggcccgggctccgggatcgtcaggttcaggttgtcgccgaacccctccgcgtacggcggctcgccgaccaccacgatcgctgtttttttttttaaattttattattttaattattttttttttttttatttatttaccacctgtattgtctgtgtttaatatgttgtatcattttctcttactgtttatttttatgcccagcagggtatgttgtttgccgggcttgtcctttgccaaggtgatggtcccattcctttttttttttttatttattatttatctatttttttttttttttatttattttttttttctatttgttttc

SEQ ID NO: 15113 - DNA, 180 bp, Oryza sativa
  Clone ID: PAT_MRT4530_20988C.1
atggcgtcgtcgacagctcgctgctacctgccgcggcgctgttctcctgaccacctctgctaccatgcgcaaccaggtcggagaggcgcggcggctagagtggggcaaaggatccggagttgcgcaagatccatccacagtcgccagccccttaagactgaggggcttggcatgaaataa

SEQ ID NO: 15114 - DNA, 522 bp, Oryza sativa
  Clone ID: PAT_MRT4530_20989C.1
atggggagcatgggcgccgctgcgcatgtcgacgcgacgcaagcgggggttcacgcatcttggcgtggttctacgtgcctcgggcggtggtacacgactggcgctttgaatggaggagaggatgtatggttgcaaatcccggagataccgcaccgcgcgatagggccggaggaaggagaagctgatccaaagacagaccccccaaaatgttcagtcatcagtgggcctggaacggaaaacatcttccggcccatcaaacaccccatgttgatgcacacaggctataaccaacgaggcccatggatgcgtaaggtatcaactttggctcctgacaagcgtggtgatcagatacggacatgcggtaggcatgagataatgcatgttttcaacgtttcgcggggttccaaattaatcaatgatagcgtgaaccgatcagagcaccccaaagcatctttaccagtaatcaggcctccaaaacctattcacgcatatgctctccctgcagcctccaagggcgattga

SEQ ID NO: 15115 - DNA, 164 bp, Oryza sativa
  Clone ID: PAT_MRT4530_2098C.1
acgtcccagtgctctacattctccgactgaactaaaatgcaccgataccgtgcacaatgcatgagacagaaagtcctgtttgcttgtgtcatgcctggcggggatagatatgatgacaactggtgaaacaagctgggctagatctcgcgagtcattatctaatc

SEQ ID NO: 15116 - DNA, 885 bp, Oryza sativa
  Clone ID: PAT_MRT4530_20990C.1
gaatcgcacgagttttagtagccaagctgaattatcaacacacgttaataaaacacacgaaatttagctaaattaattaaacaaaaggagcagctaatgtaagctagtgtgcagatcgaactaactacgtacagccatatccagcaaacgtcgaggcttgggtcgtacacgtatgtacgtgtatacgcacacgtacatgcatagtaccgtacgtacgtatcgccaatatgctacggggcgtgccagctggctacgtaccaaggaaggggacgatggagatgaacgacggcgacggcgacggcgaggttgattagttaaaaattagcgctaggagtggaagcgctgcatgcaagcgtggcaggtgatctcgagcgcggcggcgccgatgcggcgagcggcggcgacctccttcatgcgctccaccttgtgcacctcgccgcgggcgcgctcccagatggcgcgcgcgcgggcgaactcccgctccgccacctccagctcccgccgcgccagctccatcacgcgctccgcgtacgcgcgctccgccgacgccagccgcgcctgctccgccgcctgctgcttcagcgcccgcacgtcgtcgccgtcgccgtcgtcgaagcccgctgctgctgatgctttcttctgctggccggcctgcgcctgcgccgtcgccgtcgccgtgcgcgtgtgcgacggcggcggcggcggcggcccaatgcggatggacaggctcaggtcgagctgcgggtggtcgcgcggcggctgcgccggcgggaacaaggtggcggcggctccgtcgtcgtcgcggggcgtggtgggtgccgtggcggggaggaggaggagccggagctcgccgtccggcctgacatggtggtggtggtgctccat

SEQ ID NO: 15117 - DNA, 1566 bp, Oryza sativa
  Clone ID: PAT_MRT4530_20991C.1
atggcggcggcggcggctggggtcacgtgccacctctgccgcgaacaccagatggagatggaatgctgccgcgggggcctgctgccgcgcggctccaccaccgcgctccccgacgccgccggcggtgaggcggaggaggaggaggaagaccgcctcagcgccctccccgacgacatcctcctcccgatcctcgcggccctccgctgcgcccgcgccgccgcgcacacctccgtcctcgcgcgccggtggcgcggcctctgggcccgcctccccgtcctcacgttccaccgcgtcgcccccgccccgctccacgccgcgctcgccacggtcgccgccgccggcggcgccgcccccgcgctcctcgacatcgacctcttcagccaccacgacctcgacccggcctcgctgctcgcggccgccgcggcggtggcgccgggagagctcgtcgtgaacgccagctggtccgcgcgaagcaccgagctgccatgcttcgaccgcaccgcctcgatcaagatcgacgtccacttcgccggcttcacgctgccgcccgccggagtcttcccggcgctcgaaaccctccacctcgagaactgcttcgtcgacctcggcgacatgatcccgcgctgcccgcgcctccgcaagctctccatcccgttctggaacgccaccgcggtcaccgtccgctcgccgtcgctcgaggagatggaggtgtatgccaatttcaagatcaccatcgacatcgtcgcgcccgcgctgaagaggctgtatctggatgcacgtcgcgggatcaacacggatgccggcggatttacgctctcggcgccatcggtggaggatctgacatggaactgcgagtgccaggccgtgagcgatagttttggtgtgagatggcgcatgtggagcttgagctttagctcatcatgtcttgacccccatgggattatgcagatgcagcagatggacaacaacggcgaagccgaaaccgcgcattcgctgtcattgtcgtcgtcgtcgcagcgacgccctcgtggtggcgtcctgtctctgaacttagagaccaatgtcatgacaggtgattcaaccaggagctttgagcaagagatattccggtttcaagttacggacaacttttctgttttggagctggatctgaaggcacaagggcatgtctatggggcaatcgtcctgcacctacttggcatttgtacctctacacaaaggcttagggtgttgctagatgaatttctgtcgcaggactcatgctttgtaagttgccgttgcgaccagcccaataactggagaaatcaaagtatctccttgactgatcttaaagaagtagaaatcagaggcttcagaggacaaaaccatgaagttgatttgttgaaggtgctcctgagatgcgcaaccgtgctcgaaagagtgaccgtcagattttccaggaaggttacaccgagtgattgtcgatgcagggaactcagtggcattttagaggcctatccttctgtgaaatgcagtgtttattatctccaatctggcaagcaggttttcatatgcaggcagcaatag

SEQ ID NO: 15118 - DNA, 1038 bp, Oryza sativa
  Clone ID: PAT_MRT4530_20992C.1
atgatgaaagtagagggcaatgtcgggttcactctcttcgacagagtgcaaattgagactgccacgggtaatttcagcaagacacacatcataggggaaggaggacagggaacagtttacaaggcagatttagacggagttgctgttgcgataaaacaatgcaaggaaattgacgagagcatgaagagggactttgtccaggagttggttatactttgtcgtgtcaaccatcccaacatagtaaagttgcttggctgttgcctgcagttcaaggggcccatgatcgtatatgagtttgtgcaaaacaaaacattgcaagagctgcttgacctccagagaagcaggaggttccatgtcacactaggaactcggttgaggattgccgcggaatccgctgaagcacttgcgcatctccattgcctaccgcatcctatactacatggcgatgtgaagccagctaatatcctacttgccgagggattgatcgcaaaggtgtctgactttgggtgctcaacaattgatgaggaaaatcaggctgtgcccaaaggcactccggggtatattgatccggactatctactcgagtaccagctcacatccaagaatgacgtatatagctttggagttatccttcttgagcttctaacaggtaagaagccactatcaaaagaaaggaggagcttgacatcaatgtttcaggaggctatagcacatgatacactccgtgagctccttgacattgacatagttgatgaagctagcatgagggtgatctatcgtgcagcgatgctagcgagtcaatgcttagttgttccaggtacaacaagaccagcaatgacggtcgtggcggaggagcttcggcggcttgccctagcagatgaagtgcagcgatgcccacagtcgccattagttcttgaggatctgagctttacggatacaggaggaagcacagtgtccatttggtacaatgggagccagaccagcggggtttacaacctcgagaaaaaggccgttctgagtacaggattcgccagatga

SEQ ID NO: 15119 - DNA, 618 bp, Oryza sativa
  Clone ID: PAT_MRT4530_20993C.1
atgggcgcggcggcgacggcggcgtcgacggggtacggacgccgccacggcggcgggggacagcgacggcgtcggcgggggacgggcgctgcggcagcggcggacgggcgcggcggcggcgaaggaggcgacgggggacggacgcggcagcggcgggggacggtgatggcggcaagctcaaaaacactgaaacatcttaagccccctgatgatttaggtcgtgctttcccacagctacctgaggtcatccctccgatcaacaaggccgagtatatagccaacgtcgtcatctctatgcaatcgtactcccatcctccctacacaggcccggctctggggcatgggccgcatggcaatgagggcgacggcctagggcccgacctagctaggggcccatgcctaaaattgtatgagtactgcccgtactccgagctcggcagcgacgatattatgttgggggcgcaggcgcagaacatgtcgagcacgagcgcacgagcagagggcaccgacaagcgaagggtaccgtggcggagaagctgtggcttggccggcggctcaatgaggacgacggtgacggcgagccgtgccgcaggaagagattggccagctccactgtag

SEQ ID NO: 15120 - DNA, 531 bp, Oryza sativa
  Clone ID: PAT_MRT4530_20994C.1
atggaggacgaaacaatctccattgatgagatgctagttcgtgatggttcaaatgatataactgtaaaatttgatctttcaagggtgtttagtgcaaaagctggcatccattctagggaaattctcccctcttctcgctccttcctccggcgattcgcgaaccgtctccgacgttggccactgccgcacgcacctcgccgtaccccatccctaaaaaccctagcccacagagcctccctcttcacttcacctgcgaacgcgcctgcaccggcgaaggagcatggatgctacgagcgcggctatgcggcgcggcgcgcatctgcagcaggcacgatgagggcaggggtcgggtggttgaccccttggctcgatgagcggcccaagggctacctcttcaagcagctgttgccgccggcaggggagttccacaagtgggtggactgggagcttccctgcaacctcaccatcgtcattctcggcatcaggctcaacgcgaagcccaacctcaccctgcagacctggccgcactag

SEQ ID NO: 15121 - DNA, 151 bp, Oryza sativa
  Clone ID: PAT_MRT4530_20995C.1
aaaaacattggagtttattatttatttgtgagatgctttttaaaaaacccctgcggaccacccgggacaccccggaaattcccaaccggcacttgaaagtcacccaatttaccttataatgagacttatcaaatcttgggcgaataagagg

SEQ ID NO: 15122 - DNA, 463 bp, Oryza sativa
  Clone ID: PAT_MRT4530_20996C.1
ttttgccctcccggcggcgatggcggtggacgcaagggggggaagggaaaggcggcggctcaccgtcagcggcggtggcggcaacgatggcgacggcatcgcaagtcgcggcgcggcgcggcgcaatgcgaggtgactgaaactcacagattttgaggtggaacaatgtcatggcgcaaagggggttgatcaatggacaggtgtctcttctcatttggattgtgaaggtcagttctgtgaattggaaaacctgttagatgccaagtatgatgcattgataacagagttgcagaataagcaaagctacatgtatgaagatgctgatgatataacaaaagaatcaaggagacgcctttctaattttagcaaaaatttgctactgccttgatgatgttggtcttgttttagcaagtgaggtatttgttatattcattgacataactcaggataagttttggtttga

SEQ ID NO: 15123 - DNA, 421 bp, Oryza sativa
  Clone ID: PAT_MRT4530_20997C.1
gagccagtgttgtgtatttatactttatttggttaaaaaccagagaaggataaacaggtagtgtgcatgcatgtagaaacccctctacagaaacagaaagagtttgaccaacatttataagagagacaggttgaaagaccatctgaaagctttgaacagatagggcctcgcaacggactgattcctgctcctgacgctgccattatcaaaatccaaagaaggaacgaacacggcatgaagttgcatataaagggacgagagaaccattgcatttttggagaggggccatgctcttgaagaagttccccagagtgttgctgacagaaaagagagggaaatccttacaacaggtagggcgttgaacagaaaagattgtggaggggccaaaagcggctatacaggttctatggggggcaataat

SEQ ID NO: 15124 - DNA, 236 bp, Oryza sativa
  Clone ID: PAT_MRT4530_20998C.1
aaaaggcaaatgcacactactaggaaaagcgttatcgcaagcagccgaaaagggtctttgcaggcgaggcgaccgtccgcctgtaagccaacgactgtgaagatcgctgatcttcgcaggcggggcggccgtccgcctgcgaagataattttcgcaggtggacattggctagtccggtccgtctgcaaaaataggaatcggccgcctgcaaaaaaaaaaacttccgcctacgaaga

SEQ ID NO: 15125 - DNA, 386 bp, Oryza sativa
  Clone ID: PAT_MRT4530_20999C.1
tagtttccccacctccgatccgacggttcggggggcctcttacgcaccgagaccgatcgccacctgcacggccgattgcgcaccgccaccgagtcctccgcggctgccaccacgtggtgaatacgggctcccaccagcccatcgcacggtggcctgcgtcggcgacagtttgagtcttttctgcccttgatcaccgagggacatctgcatctaggaaaaaaagacactgaactatggctgatagactcaatgtccgggggtatgctccccttcctacagaggacagggatcacagcagtgttactggtgatgtttgaccatccggtcaattacactccaaaatcctttatgaaaatcccgtggaaagcaattgccctggcattatt

SEQ ID NO: 15126 - DNA, 525 bp, Oryza sativa
  Clone ID: PAT_MRT4530_2099C.1
gtctcttctttcttccttcctcgcccgaccagtcctctaaccatcttatacaaacgcccggagatgggctcgctagcgatgcaccaccagggaccactccctcctgggctcgacgacctgcctagcgcgcccggggcggcggccgtgccctgtcgagcgcgctgtcgtcgtcatggaggccgacgctcaggccaaggtcgcactcatacggattggaacgcgtgggagtcctctggctcttgctcaagcccatgaaactcgggaaaaactagagagccgcacactctgagttagctgagagagggggctattgagatcgtcatgataaagaccacaggagacatgacctcggacaaaccccttgcagatattgcaggcaagggtttattcaccaaggagatagatgatgcactcttgcagggaaggattgatctagctgggcactctatgaaagatgttccaacatatgtacctgaaggcacaatatcgccctgtaacctgacacgagaagatgtaagatatgca

SEQ ID NO: 15127 - DNA, 2112 bp, Oryza sativa
  Clone ID: PAT_MRT4530_209C.1
atgggaatgacgccagaacaaatctatggacaaaatgtgtatgttcctgcaactgcgaatccttatccgtatggttatacagaagttggatcacctacggaatggtataataaccaaagctctttaggatatgatggccaagacatctattttccgggttttcaaaccgaaggcacacagtgcatgtactatgctgcccctgacaatggatctggtcatccttcctacagcccttacccaataaattcttctttcatagtcgacggttcatatctgccccttgaatatgttggtgatgctgctgaccaaacatgccaaatagttccctcgccctattatgttccaactattcttccttatgcacatgataatgttctgggaaacacaaccgcacctcttcaccccccagtctatgttcctactttgccaagctatactgtaacatcaacaaatcatgcattaccctcagttcctcctgttgccacaaaaaatgatgtcattgcaaatccacctatacaatctactattgtcacctcaaagcaatttctggatcatgcgagtgatcccaaggttcaattgcgtaatccaattccactgaagaaagagctggcagatggctccatgatgcctgtcaaatatcctcacacttcacagaaatttcttatctctctttctgagctgacaaatcttgtgctaaatgatcaggcattttcaaattttcctgagaggcgatctgctgccaagcattcgccacaggagaaattttctgtaaacaatggctctggttttgttgggtctaatgttcagaggtgggctgcagcagagaaatttgagcctaattcaaatttgagtggtcgtattggtagtgctagcccaaagatgaaattatcgaacgtggatggcttaggaggtgcggataaaccttgcggtcagaagtcttctgccataatcgcaaaatcctacacatcaaggctctctgttggtgatccagaagggactattgttatacgatgcaaccaatataacagtgatgatctccgagtggactatccctttgcaaagttctttgttatcaagtcaattggtgaagatgatgtccataaatcaatcaagtatggtgtatggtcaagttcttctagtggaaacagcaaactggacattgcattcaaggatgctaacaggatagctaagaggaattctaccaagtgccctgtttttctgttcttctccgtgaatggtagtgggctcttctgtggcatggctgagatggttggtcctgttgattttcataaggacatggacttttggtgtcaggataaatggactggcagctttccaaacaatgaaaacaagcctgtcacacacagcagagatacacaggaaataccatatgttcctggaatatctatgctaaagatccttaaggctatcaaagtgaaggagtgtttgcttgatgatttcatgaaatatgaggaggatgaggcgagaagtaaacattatttcagaaggtccaagttgagccataatgctccggattttgttcctgtcgctcaacgaagaaaagacgtcactgatgttcggcagccaaaatcaggcaacgtactgatagacagaacaccggtgatacagaatatgtcagtgaagccacagggtagtaatgcgatcaagcctcaggatcaatgcctacaagttgttgaaaaacaagccagcgatgacgggaaagagaacagacatcaagagaaccgcaatgtcaggcaggctaatgataaagtggtgaaaactgggactaagcagccacaggcatcaacagttaagacaagtgtggatagtaaacaacagtactggaagaaggttgagttccctgggcaaaatcctaacagtgctgttcatggctcatcgaaagcacatgaaaagcatctaaacgaatcaaaagcacctgaaaagcattcaaatggtgctaactgtagctcggcaactgtcagtttgaagacagccagagaggaaactatcgttgccagagtcagttctcttgctatcagttatcagaattcctcagttgatgtcgtgaagattggctcgatgccagttttggttaacaaagctaatgtgtag

SEQ ID NO: 15128 - DNA, 2883 bp, Oryza sativa
  Clone ID: PAT_MRT4530_20C.1
aggttccactcgtgccattttcgctcccaagtcccaaaccacggcgacccgccgccatccatccccctaaacccctagctagggtttccaaccaccatggcgaccacgccggcggcagcggcagcggcggcggcggcggggggcgcggcgatcctcgacactctcggggacttcacctcgcgggagaactgggacaagttcttcgcgctccgcggcaccggcgacagcttcgagtggtacgcggagtgggacgacctccgcgccccgctcctctccctcctccatggcggcggcggcgcggagggcggaggcaaggccccggagatcctggtgcccgggtgcgggagctcggtgctctcggagaggctctacgacgccgggttccgccgcgtcaccaacgtcgacttctcccgcgtcctcgtcgccgacatgctccgccgccacgcccgcgcgcgcccggagatgcgctggcgcgtcatggacatgaccgacatgcagttcacagatggatcatttgatgtcatacttgataagggtggactggatgctcttatggagccagaggctggcacaaaactagggatgaaatatctaaatgaggcaaagagagttttgaaatcaggagggaaatttgcttgccttacccttgcagaatcccatgtcctagctctgcttttgtctgagttcaggtttggatgggatatgagcattcaagctataggtaatgaatcctctaagtctgccttccagactttcatggtggtcatggtaaaaggaaagatgggtgtagtacacccaatacaatcactattagaccaatctggtaaattctgtaacatgaaacaggcaaatgatgtgattcattctcttgagaaggaaaacaccatccgggagtcatacagttctggtgttgatattactttgtcattacgcgatcttcagttaggagctgtaggagatctgaaggtgattatcccaggacgacgaaggatgttcattcttggtgatcagggaaattcactttattgctataaggctgttctcttggatgccagaaagcgaactgagacctttgtatatcattgtggagtttttattgtgcctaaggttcgagcacatgaatggctttttgcttcagaagaaggacagtggcatgttgttgaaagtgcaaaggctgctcgtctaattatggtattcttggatagcagacatgcaaatgctgacatggatgttatcaagaatgatttatctccccttgttaaggatctggaacctggaaatcctgaagaggaagctcgtataccgttcatgatggctggtgatggtgtgaagcaacgagagattctgcaagaggtaacttcagaaataactggtcctatggttgtggaagatgttgtttatgaaaataatgatgaagaccaaagttctatgactgaaaagatgttccggcgccttatatttaaaagaaattctggcttagtgcaatctgaagcattgcttgtcaaagattccaccagtgacaaggcagatgaaaacaacaaaaaatcaccttcagcatccaaaaaaaggaggaaccagaaaaaaggtccctcaggatccaagaccgttctgaggattgatcatagctaccttggtagctcttatcacagcagtatcatatctggcttttctttaattgcatctgctctggattctgctgcagtagctggaacaaaagttagcacaaccgtcatagggcttggagcagggactttaccaatgtttcttcgtggatgtctccctttcctagatattaaggttgtggagttagatcccttggtagaggaggtggcaaacaaatattttggcttttcaacagatgagcaattgcaggtgcatttgggagatggaatcaaattcatagatgatattgctgttgcaaacagtagggctaccacccagcagctcatgtctactggcaatgagaacaatgcagttaaaattcttattgttgatgttgattcatctgacgtgagctctgggttgtcttgccctcatgcaaactttgttgaggattcttttcttctggcggtgaaaaagttccttgatgaaggtggtctgtttatcatcaatttagtctcgcgatcatccgcagtcagggaaatggttgtttcacgactgaaagcagcctttgagcacctatattcactacatctcgaagaagatttaaatgaagttttatttgcaaccccaagtgaaagatgcctggataacaacaatatggatgaggctgtggccaaactgaaggccatgctgaaattcccagtgaatgtagaatcagatatgaagaagttgcagaagctgcagtagtcggctcagctgcagcgaaatgccattcattttgtcctcagcgaactcaggaaaatgctggtgtaacttccttcaactataggaccaaattacctgtaccaaaggcataggtacaccttccttcgtgttgtattgccaaattttgttcttgtcaaaccgtgccgcgatctgtatagagctacaataggcgagaagatgtctgtcagttttggtctccattgctgagagcctttctaaatcattgacagtgtacgttatagaagtgactcccaaaagttggccagtgcatagaattgcattgcagcttctgagccgtcagtaggttggcagacctgaccgtaacatgtttactacacaattgctactgctggatacgcatgcgattttcattgtttacaatggtcttggtagtagctggagattgtgaacagttgactagttgagtatgagttcatcttgcttggctaaaaaaaaaaaaaaaaaaaaaaaaaaaaaaaaaaaaaaaaaaaaaaaaaaaaaaaaaaactcgagact

SEQ ID NO: 15129 - DNA, 259 bp, Oryza sativa
  Clone ID: PAT_MRT4530_21000C.1
gcataataacaacggggggatctcatttagtcattacatgtcggcaagacatttgaatattggttaccgtgctcccttagtttgaaggctatatcttcacgctctacaaatacaagaatccgatgaattgatgctacaaataattatgacttcgcgcaccaaatcgataaaaaacgacatgggtccaagaaaggagcagattcatcgaatttattctcgctttttcttgtggagaattttagccaggggtttaaaaggg

SEQ ID NO: 15130 - DNA, 168 bp, Oryza sativa
  Clone ID: PAT_MRT4530_21001C.1
acatacaacgtagtcatgcaaccatgcttgcaaagcagacattgtacaaatgtacatgttacacccacaccctacacccatgcttaataatacataggttatactaacgtggatgcacaaccctctcgatcacacgcaccatcgatcgcacaaagttgcgtacataca

SEQ ID NO: 15131 - DNA, 1141 bp, Oryza sativa
  unsure (1)..(1141): unsure at all n locations
  Clone ID: PAT_MRT4530_21002C.1
ttcggcacgagggcaaagcaaactcaagtagtagctgattaccagctcttctctcttctcattgagaagagggaattaagttttgatctctgctttattgcctgatcatcctcttgttacttgacaagcaagaacagtagtgtnactgtgcctcattgatctcctcccaccaaactctctctctctctctcatattccgagctagctagttaatcaagatcttgctgcaatggctggcatgtctcttcagcatccctgggccttcgcctttggtctcctaggcaacatcatctccttcatgacctacctggccccactgccgacgttctacaggatctacaagagcaagtcgacgcaggggttccagtcggtaccctacgtggtggcgctgttcagcgcgatgctgtggatctactacgcgctgctcaagtccgacgagtgcctcctcatcaccatcaactccgctggctgcgtcatcgagaccatctacatcgccgtctacctcgtctacgcccccaagaaggccaagatgttcaccgccaagctcctcctcctcgtcaacgtcggcgtcttcggcctcatcctcctcctcaccctcctcctctccgccggcgaccgccgcatcgtggttcttggttgggtctgcgttggcttctccgtcagcgtcttcgtcgccccccttagcatcatcaggctggtggtgcgcaccaagagcgtggagttcatgccgttctcgctctccttctccctcaccatcagcgccgtcgtctggttcctctacggcctcctcatcaaggacaaatatgtcgctcttcccaacgtgctgggcttctccttcggcgtcatccagatggggctgtacgccatgtacaggaactcgacgcccaaggccgtgctgaccaaggaggtcgaggcggcgacggccaccggcgacgacgaccactccgccgccggcgtcaaggagcacgtcgtcaacatcgccaagctctctgccgccgtcgacgtcgtcaagacccgcgaggtgcaccccgtcgacgtcgagtccccgccggcagaggcgccgcctgaggaggacgacaaggccgccgccgccaccgccgccgccgtcgccggcgccggcgagaagaaggtagctgcatga

SEQ ID NO: 15132 - DNA, 1322 bp, Oryza sativa
  unsure (1)..(1322): unsure at all n locations
  Clone ID: PAT_MRT4530_21003C.1
tcactcctatgggcgattgggaccctcgaggccggccgaggctgagaaggaagagaagaagtgaaaggattgcaacctgcaacgttaagaatagatgccctaagttttattaccattattgttatcagcttctcctgatgcgagactggcattctgatcttgctgctgtctgtctactcttcagtttgagcttgtttgggtttttgtctgaagtgaaccaaactaagtgcatactacttgtcttaagatgaattcagtcatttcgctaaaaaaaaaaaaaaaaaaagaacggacgcgtgggccgcgccgccacctcgcgtcggcatcctcctccgcctccgccgccgccgcctcgccgcccaaggtaaggtaagccatggtgaagcacaacaacgtcatcccgaatgggcacttcaagaagcactggcagaactatgtcaagacatggttcaaccagcccgcccgcaagcagaggcgccgcatcgctaggcaaaagaaagctgtgaagatcttcccccgccctacttctggaccacttcgccccattgttcagtgccaaacacttaagtacaacatgaagtctagggctggaaggggcttcacccttgaagagctgaaggcagctgggatccccaagaagtttgccccaaccattggcatctcagtggatcaccgccgtaagaaccgctcacttgaaggtctgcaggccaatgtccagaggctgaagacctacaaggccaagcttgtcatcttcccaagacgtgcccgcaaggtcaaggctggtgactcgactcctgaggagcttgccacagccacccaggtccagggtgactacatgcctatcacccgtggcgagaagcgctcggttgaggtcgtgaaggtcacggatgacatgaaggcattcaaggcctacgccaagctgcgcgtggagaggatgaaccagcgccacatcggtgcccggcagaagagggcggccgaggctgagaaggaagagaagaagtgaaaggattgcaacctgcaacgttaagaatagatgccctaagttttattaccattattgttatcagcttctcctgatgcgagactggcattctgatcttgctgctgtctgtctactcttcagtttgagcttgtttgggtttttgtctgaagtgaaccaaactaagtgcatactacttgtcttaagatgaattcagtcatttcgctacgtctcatttacctgccagccatatggatgatagtagatgcttgtgttttcattcgccananaaaaaaaaaaaaaaaataataaaaaaaaaaaactcaaaaattatattaatata

SEQ ID NO: 15133 - DNA, 753 bp, Oryza sativa
  Clone ID: PAT_MRT4530_21004C.1
gacttcctcagtttaattgtctcttttcgttgagcgaatggatgcacctttagttactcatgcaccttcacatacgaacataccaacatcactataaagcctggtatattttttcgggagcaagaattgaaagaggggaatgtggtcagaatgccagatatagcgaatgagttgacgacggctcgttcgtcgttccttccccgatcgatcgcggataggatcccattcaaggctgaggctgtcaagtccctgttcgggctagagccaaacacaaccttggcaaaggctgtggatgaaacggtggcgcaatgccagagctcgccaagcaagggcgagacgaagcggtgcgtcacatcagcagaggacatgatcgactttgccgtggcgatgttaggtgatgacattgtggttcggagtaccgtactgccaaatgggcccggcgagtcgatcatgattggtaaggtcaagggaataaatggtggcaagattaccagctcggtatcatgccacgaatacttatttccatacatggtatactactgccactcggtgcctaaaatcagagtttatgaggccgagatcctgtccgtccagacgaaggagaagatcaacagcggtgtcgccatctgtcacattgacacgtctgcctggaatgctgggcatcctgcttttgtggcactaggtgggaagccaggtcagaacaaggtctgccactggatatttaatggctctatgacctgggtcatcgccgac

SEQ ID NO: 15134 - DNA, 300 bp, Oryza sativa
  Clone ID: PAT_MRT4530_21005C.1
atgaagaagctctgggcccttcccctcgaggatgagttgctgctgctcgatgaggaagctgccaccaccatgtttgcggacaaggacgtcgacgctgccgcggtggaccgtagcgcttgtatacgtggaggacgtgctggggtggtgacaagtcgcgcgaggatgccgctcctcttcgccctccctaccagcgcgcaaagcgccgccgtccctctccaccgcacgctggcccgcggggccgccgcgcctccctgccgcgccctggccttcgcgcgccgccgcttctcgctagggttctag

SEQ ID NO: 15135 - DNA, 889 bp, Oryza sativa
  Clone ID: PAT_MRT4530_21006C.1
cttttattgattttctttttctatctaagatttcgttagtttataggggtaattgtgtttttcccttgttttacagttcaattgtgattttactctcgctttttagggtttgtgattttgtctctgctttttttaagtgaagcagccgtctgcctctggttttgacggtagttaggtgggcctagaattttcgaattaaacgaaaaaagaaagtgatattctaatttgtcaatgaccatcctacccttggttcactgaaagagccaacctgctggaacgatttccccaaatcgaaaagatctagaaccctagcgagaagcggcggcgcgcgaaggccagggcgcggcagggaggcgcggcggccccgcgggccagcgtgcggtggagagggacggcggcgctttgcgcgctggtagggagggcgaagaggagcggcatcctcgcgctgcggaccggcgggcgcgcgcacagccaggctcgtcagccgtcgtcgccactgcccggcgtccagccgccggctgctgcgcgcaccgacttgtcaccaccccagcacgtcctccacgtatacaagcgctacggtccaccgcggcagcgtcgacgtccttgtccgcaaacatggtggtggcagcttcctcatcgagcagcagcaactcatcctcgaggggaagggcccagagcttctaatcctacacggcaacaacactttatacttgtgtataatttctcttcgtttctgagttcatggctatctttgtctctcttatcttctcccttttgctatctctatatttgtgattgccatggaaatacagaagacgaggggccgctgatgtattgacttgtgagttctagtttgggggctttcgtttgcaaggattttcatttgatt

SEQ ID NO: 15136 - DNA, 339 bp, Oryza sativa
  Clone ID: PAT_MRT4530_21007C.1
atgtcggcgaggcgaccgatcgagatgaggggagcgctggatggatcaggcgccttgtcgacagcggagactggagaggagagtctgccgagcagagcgacgagcttggtggccagggccgcatcagcagaacagagcgtgttccatcgccggcggggcatttggtcgaacaggccgctcgcggggcaacaaggccacgggcagagcttccatgttgctgccgctcttttctttcttgtcactgaaagaaagggaaaacaaaaaggaatgtatgtcccatctaaacagggtcaaggacaactggccattgggctaaacaagaagggctcagttgagtag

SEQ ID NO: 15137 - DNA, 591 bp, Oryza sativa
  Clone ID: PAT_MRT4530_21008C.1
atggaggcccgcagctccacgggctcccccacctgggccttcagctcgttgatgggcaatgtgccctttgctcctggccagcccaagatgaaaggccacccccaccggatcgtgacaagaaagaaaagagcggcagcaacatggaagctctgcccgtggccttgttgccccgcgagcggcctgttcgaccaaatgccccgccggcgatggaacacgctctgttctgctgatgcggccctggccaccaagctcgtcgctctgctcggcagactctcctctccagtctccgctgtcgacaaggcgcctgatccatccagcgctcccctcatctcgatcggtcgcctcgccgacatcgatgctgcaacgcctaatgtgatataccacgagctccttttcaaaatattaaaagcctggacggcgacggcgacggcgacgaggaagacctgtcacggcgtcggagcggcgccgcaaactctgaagatcgacttcaccgtccgtgatgaaaagggcggtgtgaatgagcagatacgccgcaaagatgccacaagatcaagatgcatgatggcgataaacagcactggaactaattaa

SEQ ID NO: 15138 - DNA, 247 bp, Oryza sativa
  Clone ID: PAT_MRT4530_21009C.1
ggggggccatagcaaaggaaattaagttttaccccaaaccgggtttgaattccaaaacaccgtcggggggtgatttaacagggtggggcctgggaatccacccaaccttcagggggtggtttaaactagttggggtttggacacatgggcccactgtccgggtctgttttagttggggaggggtacaaaccccccaaaataacggggggggggtaaaaggcccaccaggattgttaatcccggccct

SEQ ID NO: 15139 - DNA, 2812 bp, Oryza sativa
  Clone ID: PAT_MRT4530_2100C.1
ttttttttttttttttttccgtaacaacacttttgaggctataaaatgaaaacccaagtgatcataaatacataaaatgagaacctaagtgatcataaattatacgaccaatggaacatattgtacaaatgaataacaatgagatgtttatgaatcatataaagctacaactgaggaagctacactggttggaatcttatgaatctcccttttttctttctcctatcctacacttgaattgtttccagaagacgacctcaacagttgatgatgattaggggttacagaattgggcatgcctgggttgaacatgatgtttgacgtctgtggggatggctgggtttggatggccgacagcggcagacgaggtccaaatgacagcatctgctgccgctgctgctgctgctgctgttgtaagaatgccatctgggggtgaccatgcccctgcatgttattggcaaatggtgctggcatactggattgaggcatcgagcctggcacgcccatcggtctggggctcatactcattggattggatgacatggtgctagtactacccccaggtaggctatttccaggcgaggccaagcgggtggacacgattcggacacggtcagatgcaatcctctgccttattctctccacttgctcgcattctttcaaaagcaaggtctcgacttcggcaaactgcttcagcttcagttccaacctttttaactgatggtttattacagtagcagttagtctttggatttcacgttcctcttgatctgcaaaaagtttagccttcgtagctgctgccgacaaaccacacatggcagcatgcttcaccttttctggagagatggatgaagatacaccaccattatgatcacgaaaattcggatgcggaccttggcccctagaatcagagcaaatgccttctgaattcaccctggaatcatcatctactgtcaaaactgataaagcagcacttgcacatgatgctgcaactcttggtcccatagcagaagccaaaaacccaaccagtgacatcaccggattagaagaattaatgaacggaagctggttatcaggtggaattttttgaggtagatttcctgaagtactgccattgcaatctaaatgtgggtatccattggtttctgctctaaatggcacagatgcatctggcacctcaatattctctaacaaaccatcttcaacaggaagacgaataaaatggtaaatacattgtgcttttgactttgttccaacatgctctgcaatgttattccagttgtcattgtacttctctatgccctccaacagcaataacgtttcttgatcagtccaactatccccatcattttctgatctatcgttatccccatcaatcctctgaaaatctaagcttgaatgcccagtaatatatctcgcatcatggaagcaatcagagcatagagcgatatctgcctcctttagtgactgatagtgcaagctggtcaaaggctgtaagcaataactgcaagaactctctgacaatcgctccctaatctttccatccaattctgcaagtccagcatcaaaatccacaacctccgaatttgatgccaatgaagaaatgtcctctgcttggaggttacatttcggtcgatcaaacaaaattaggccatcaattgatttcagtggcgcagtcaatagttgcaactccccggttggctcctcccttagaagggaggttgccatccttagaccccggtgcaccgacccagacgcaaggtaattgatgattccccaagtgtctaagaacctaacaatcctactgagatcatataattcagctgtgttcgcaacaagcccctggcactctgcaaaagcaagcctcttgcttgggttctctaaatattttgcaataaccttattcctcaatagcatgtacttctctggagtgttgcccggcgacttccctgaaaagaactgtggcaccacctgcctttccagcctgtgcacgatccctggggagaaccaatctacaaatcgcaaacaagttagtgccgcattatagctcagacattcaggtttttggttgcaaagagcaggcggacctgagtgcttgggcacgacatgtaggcgaccctggaactgcttggtcacgccatgcccctccataagattcggcggcgtgcacacataggtagacggcttgtcagtgtccgtcgcgagcgaagcgtggtcagggagcaccccggagagcacctgctgctgcccgtacgagatgttctccagcaccggcgccgccgccaccgcggcggaaccctcacccgcgcacgcggatcgctcggccgcgatgacggcgaggacggacgggtgcggccggttgacgacgcgtcgggtggcgacggggaacgccgagacgggctccgccgaagggagcacctccgcctcgcggaggtcgagcacggggtcctccgccccggctagggtttcgtcgtcggcgtcctcggggaccgcggagtcgtcgtcctcgttaacggcggcggagtcggagtcgtcggagtggtccgccgcggcggcggcggccgacgagcggttggacggcgacggggacgcggtggggttccgcttccacttccgccatttcaggcgcgaatctgaggtcgacgaggccttccgcggcatcgtcgtcgtcgtcctcggcgtcggcgtcggcggcggcggcggcggcggcgagtgagggggacgggtcgggacggggtcgacgcagggaagcacgtgcgagggaggtcgggactcgggagtgagtgaatcagtgtactgaatgaactcattc

SEQ ID NO: 15140 - DNA, 263 bp, Oryza sativa
  Clone ID: PAT_MRT4530_21010C.1
ttttggggggaaagtagtttttgaattcttcattctgggtgggattgctttggggaaaatcccggcttctcaattaatgccctggccatgcacccacatgggccttcacagacacatgaaaaatgcctcgaccgaaaccgaaaaatgcataaagcaaactgactaactttggctgcaaagcgaccgatcgaagggagtcataaaacgcaattttattcgaaggataggggccggaacgggggggcagactgttactgtagaag

SEQ ID NO: 15141 - DNA, 303 bp, Oryza sativa
  Clone ID: PAT_MRT4530_21011C.1
atgcacaaggtttgtgaggtcaaggagatggtgtatgtgcgaggaatcgaacaatggctcaccgaggcagcgctggggttcttgaggcgtattgaagaggaggttgaggcgatgacgatggcgcagcggcttgctccgaggtcaaaagaggaaatgctcggcattgtgtggagagatgggaacgcgaaagagatggaggtgaccttgactcaaatggagatggcgatggtcgtcgtctccatggccggcggcaaggtttggagcgatggagaggcagagaacctcctccctcggtttctttag

SEQ ID NO: 15142 - DNA, 456 bp, Oryza sativa
  Clone ID: PAT_MRT4530_21012C.1
atatgatagaactaaataaacaaatctgcgcaaattgaattcattatggaacagacaacagcagaaccttagctcctctagtagtattcttctttgctgccagattgctagctggtgcagatgaaaaggttttgattcacctatcctcagaataaagctcagacaagatctaatttagtaggtatctgataataataagaatgacaaaataaggaggtgccagaagatggcattgctggtctggatgatcttggttcttggttgcaattgcgtagtcttaatggcgaccagttgtgtaattgggaaacccacacgcacatagtgccttgtaaattcagagtatcgaataaggccgtcttgagactgtcactttgctcatgtgtacggctattgctgttgaaagtgaaacacatactattgctgaaagtgaaaattcatcaaaaaaaaaaaaaaaaa

SEQ ID NO: 15143 - DNA, 1827 bp, Oryza sativa
  Clone ID: PAT_MRT4530_21013C.1
atggcggcggtggtgccgctgtacgtggcgatgttcctggcgtacgggtcggtgcggtggtggggcatcttcacgccggaccagtgctccggcatcaaccgcttcgtcgccatcttcgccgtgccgctcctgtccttccacttcatctccaccaacgacccgtacgccatgaacctccgcttcctggcggcggacacgctgcagaagctgctcgtcctggcggggctcgccgcgtggtcgcgcctcccctcgcggaccggcgcgccgcggctggactggtccatcacgctcttctccctctccacgctgcccaacacgctcgtcatggggatcccgctgctgatcgccatgtacgggccatactccggctcgctcatggtccagatcgtcgtgctccagtgcatcatctggtacacgctgatgctcttcctcttcgagttccgcgccgcgcggatgctgatcgccgaccagttcccggacacggcggcgtccatcgtgtccctgcacgtcgacccggacgtggtgtcgctggagggcggccacgcggagacggaggccgaggtggcggcggacgggcggctgcacgtcaccgtgcgccggtcctcggtgtcgcggcggtcgctgctggtcacgccgcggccgtcgaacctgacgggagcggagatctactcgcttagctcgtcgcggaacccaaccccgcggggctccaacttcaaccacgccgacttcttcgccatggtcggcggcgggccaccgcccccgacgcccgctgcggtgcgcggctcgagcttcggcgcctccgagctctactcgctgcaatcgtcgcggggcccaaccccgaggcagtccaacttcgacgagcactcggcacggccgccgaaaccaccggcaacgaccacgggggcactcaaccacgatgccaaggagctccacatgttcgtgtggagctcgagcgcgtctcccgtctcagaagtcagcggcctgcctgtgttcagtggcggcggcggcggcggcgctctcgacgtcggcgccaaggaaatccacatggtcatccccgccgacctgccgcagaacaacggctcaggcaaagagcacgaggagtacggcgcagtggcattgggtggcggcggcggcggagagaacttcagcttcggaggcggcaagacggtggacggcgccgaggcagtagacgaggaggcggccttgcctgacgggctgacgaagatggggtcgagctcgacggcggagctgcacccgaaggtcgtcgacgtcgacggaccgaacgccggcggcggcgccgcgggcgcggggcagtaccaaatgccgccggcgagcgtgatgacacgcctcatcctcataatggtgtggcgcaagctcatccgcaaccccaacacttactccagcctcctcggcctcgcctggtccctcgtcgccttccggtggcacgtctccatgccagcaatcgtcgagaagtccatctccattctctcggacgcaggcctggggatggccatgtttagcctgggattgttcatggcgctgcagcccagcatcatcgcgtgtggcaaatcagccgccgtcgtctccatggccgtccgcttcctcgcgggccctgccgtcatggccgccgcgtcaatcgccatcggactccgcgggacgctcctgcacgtcgccattgttcaggcggctctaccacaagggattgtgccttttgtttttgcaaaagaatacaatgtccacccggccatcctgagcacagcggtaatttttggcatgctaatagctcttccaatcacattgctgtactacatccttcttggactatga

SEQ ID NO: 15144 - DNA, 633 bp, Oryza sativa
  Clone ID: PAT_MRT4530_21014C.1
cccacgcgtccgtttgtaactacctttataaatgaatgcagtacacagctaaacctgctggatacagacgagcagagggcagcatggggagagtctgaaacaggtccagtacctcaggtcctaacatgtgataaacttctttcacaccctcttatcatttcacatttgcattttacagcctattactgttatgcattgttcacttgaactgtgaaaggactggtcattgggccatggcttgatgcaaacattaatctttcctttaatacttccattccaagttgcttttgtcatgcatatttttggggtctgtaggtccaccatgcagtagcgctcagattctgcatcatagatgaccccattatacagtgtttctttcaatgcaagtttgtatggtactactgcaatctgaaaaaaaagggaaaagaaaaagaactgtttgtttggtgccagccagctttttttccataggacaaaacaaagaagggaaaaggtaaattgaatattaatattttactaaataaaggcatttatggaagagttgatgtttgcacatatcacaatgaagagcagtttatatatgaatatcaggtgtaatcaaccctaccgagggttatattaaggatatgcttt

SEQ ID NO: 15145 - DNA, 550 bp, Oryza sativa
  Clone ID: PAT_MRT4530_21015C.1
ggggaaaaggcaagggtccataaatattggtttatttggcccaaggccagataaaaatcctttgttccctgacccggggagggcctttccccccccttttttggacccccaaaggggaagggttgcaaaaaaattaagcaacccaaggtgaactctcggccccccctgtgagccttttattgggggggggcgggaactttttggaaaaaaaaaaacccccccctgggaaaaaaaaacaaattttttcccccccaaattgcccacccggggggcgggaacttacggggaggtctcctccccccccgggaaccttggtatgggggccctccccccaaaagggggggttttttttcgccgggggactcctcgggccttttgggggcctttttttttctggggggttcggggaaggggtaacccccgggtccaacccggccccggggcccaaactcccccgggatttttggcctgggcgcggtttcgggggcctttttttccctgggctttttatacaggggaaaaaggcccccgggggcaagaggcccccccc

SEQ ID NO: 15146 - DNA, 2242 bp, Oryza sativa
  Clone ID: PAT_MRT4530_21016C.1
gcgattggtaccctcgccgcgcgcccggccgccgaaacccaaaaccctactccctcgtcctcctcgtcgacggcggcggcgatgctcccgcagagccagagcagctcgctgcagcggctcaaccacgtcgagcagatgatagtccgggcggtgaatctggccgggacggtcatggaggagctggggaacgccactgggccccgcaccgagggcgtcgctggccactgccgcgagttcatgctcgccatgaaggaaattcaaacgacattgcgtgaggaaatcaaaagtgcttgcgaatatcgcccatttgagaagtgtgactacagtgcaaggattgctaatgagatttgttgcaaaaaggtggaatatgtacttgagaagctggatgctatgcaaaagaacattgaggaatgttctactactagttaattgataactagttatctacctacctactggtttacagtggcacaagtgtgactgagcggtttacaaaggaacatgagtgtcggtgtagccagcttgcaaatgcacaaggcatcattgaactatgaaatgtaatttaccttcggtttacagtgctttggtttaggtggttgcacagtgataaactgcaagtaaccacttcagtcttgcagaaggtttacagggcagaatctgaaatgaatgcttgctagtactcgtatgaaatgaaaggaatggttgcacatgcttgcttgcaaaaaaaaaaaaaaaaaaacttttagtggaggacaacgactgggaggagtccatcttccggcggttccggcaggaggtgatgacggccggcgcgctcaggagatcaaacgccgccgccgattttgacctccaccgccacgacgccaccaacaagctaaagcgaagaaagaacaacctgcctcttcccaagcgatcggctgccatcgctgcgccgatcgctctcctcctagtggtcgggctcatctcgctctatgacttcaccttcgctgatcgctacccgaacattgacgccgcctcgtcatcgtcgtcgtcgtcgtcgtcgccgtctccggccaccgtgagtaagtgcaaccttacgcggggcgagtgggtgccggacggcgaggcgccgtactacacgaacctgacgtgcccgttcatcgacgaccaccagaactgcatgaagttcggcaagccgagcctcgagtacgtgagctggaggtggaagccggacgggtgcgagctcccccgcttcgacgccgcgaggttcttggaggccatgaggggcaaatccatggcgttcgtcggcgactcgctcgccaggaaccacttcaagtctttgctgtgcctcttgtccaaggtggcgcagccggtggagctcgtcggcgcggctccggagatcgacgtgacggggagggcgggccaacctagcgaacgcgacgctcggcttgtgggactccacctcgacacggcggacgcccggtgggcggcgcacgtcgccgagttcgactacgtcgtcctctcggacaccaactggttcctccgcccgtcggtgtactacgagggcgggcgcgccgtcggccgcaacggcgccgcccccgtcaccaacgcgaccgagatcgccgtgccccgcgccgtgcgcgccgcgttcagcacggcgctcggcgcgctcgccgcggcgccggggacattccgaggcaaggcgatcctccggtcggtcacccccgcgcacttcgagaacggcgagtggaacaccggcggcgactgcgtccgcacccgcccgttccggcgcgacgagcgcgccctgggcgccgtcgaggccgagtacctcgccgtgcaggtcgacgcggtcagggaggcggaggcggcggtgaggaggaacggcggcgagctgcggctgctggacatcaccgaggcgatggacctgcggccggacgggcacccgagccggtacgggcacccgccgggcggcagcgtggagggcagcttcgttgtggattgcctgcattggtgcttgccggggccgattgacctgtggagcgagctgctgttccacatgctggttgatcaatagtactagtatatactcgttcaagtagatcatgagttcaattgctctaccaaaatttcaaagtgctgcttgtggaatgcaattggtgcattatacctggaagatcatttatgtgaaatctggaaaactgtactgttctgtaaattgagaaaggctaatagattgattttttttaaaaaaaaaaaaaaaaaa

SEQ ID NO: 15147 - DNA, 219 bp, Oryza sativa
  Clone ID: PAT_MRT4530_21017C.1
atgggagctatcaagaaagtttctttcttgtccgacaaggacttgtatcaacccatgggtataaatatgtacacccggggtctatgtaaccaatctatcgatcaatactactctcggcgcatcgccaccctcttccctgaggtttttacttatcttccggcgggatttgggcaactgacgcggggctgcatcggctttcgatctccggtgaagggataa

SEQ ID NO: 15148 - DNA, 468 bp, Oryza sativa
  Clone ID: PAT_MRT4530_21018C.1
aataagacactccatgtgatggcacatcagtgagctagctctgacagtatatggtatgaatatcccagcaactgcacgcaaccaaaaaaagacagaaacaacattgatccctctactcgacattctgttcttgaagctatgttaaccctacaaggtaactctagtcggatgtacattttgtctacaagttagagcaagatacaatcatacaacagttttacagcatataccagattagatcatgaattacaacatagttctaacaataagtaccagacttgggctttcctctttagcatcttagcaggtacatcgtagtgcctgacttttttccttctagggaagtcacttgggagggaaccaaccaccattgtatagtttatttgacggattcggagctgggaggctggcatggacgacttgtgtaaaggttctaggattggacaaagaggaactaaaacaaccttg

SEQ ID NO: 15149 - DNA, 388 bp, Oryza sativa
  Clone ID: PAT_MRT4530_21019C.1
cttcccaatgggccaatcacccggtgaaccggtgggggggggattaccagggcctggagccgattttaatttccggttttaagagaatggccattcctaaggtcctggttttaatgggcaagccggggagaaattgaagaacctaagggccatgggtggaaattggcagggttgaatcttggaagttggtcctgaattttaaccaaatggtggtcctgaaaacaaaacctgcaaaggctgcaccccagaacattttgccaccccactgtttcccgccggcattgtttgtgaacctgaaaacctattggggccaaaatccggccttcggtttttggggggccttgttggggccccatttttaatggggtggataagcttaaccccccaa

SEQ ID NO: 15150 - DNA, 401 bp, Oryza sativa
  Clone ID: PAT_MRT4530_2101C.1
gcacgaggggagggccattccacctgccccaactccggccaaacccttgcagatcaccggcttgtgccgaaccgtgctctccgcagcttgatttcacagtggtgtggggtgtatggcttgcagtatgattcgcccgagagcaacgaggggatggcggaatgtgttgctgcatcttgcagtagtcgggctgcaatggaggcaaacaaggccacgagctaggattttggtcaggatgctggaggacgggtcagaaaatgtaaaggcagtcgctgctaaggaaattcggttgctggcaaagaccgggaagcaaaaccgggctttcatcgccgacttgggtgcgattccgctgctttgcaggttgctcttgtcgaatgattggatggcacaagagaatgcagtga

SEQ ID NO: 15151 - DNA, 1856 bp, Oryza sativa
  Clone ID: PAT_MRT4530_21020C.1
atgcttccgcaaagccagagcagctcactgcaacgcctcaaccatgtcgagcagcggatagtccagctgatgcaactggcgggggcggtcatggaggagcttgggaactcgcagggtccccgccccgagaaagtcgttgcccactgccgcgagtacatgctcaccatcaaggaaattcaaacgacattgcgtgaggaaatcaaaagtgcctgcgaatatcgcccatttgagaagtctgactacagtgcaaggattgctaatgagattagttgcaaaaaggtggaatatgtacttgagaagttggatgctatgcaaacaaacattgaaaaatgcaccatccgtggctgctccggccactacttcccttctgagcacgctgctccagcttctccgggaggagctcgctgccgtccgtggcccagcgagtgccgatggcggtggttgcggcgaagggttgcaagtgcggatcttttagtggaggacaacgactgggaggagtccatcttccggcggttccggcaggaggtgatgacggccggcgcgctcaggagatcaaacgccgccgccgattttgacctccaccgccacgacgccaccaacaagctaaagcgaagaaagaacaacctgcctcttcccaagcgatcggctgccatcgctgcgccgatcgctctcctcctagtggtcgggctcatctcgctctatgacttcaccttcgctgatcgctacccgaacattgacgccgcctcgtcatcgtcgtcgtcgtcgtcgtcgccgtctccggccaccgtgagtaagtgcaaccttacgcggggcgatgtgggtgccggacggcgaggcgccgtactacacgaacctgacgtgcccgttcatcgacgaccaccagaactgcatgaagttcggcaagccgagcctcgagtacgtgagctggaggtggaagccggacgtggtgcgagctcccccgcttcgacgccgcgaggttcttggaggccatgaggggcaaatccatggcgttcgtcggcgactcgctcgccaggaaccacttcaagtctttgctgtgcctcttgtccaaggtggcgcagccggtggagctcgtcggcgcggctccggagatcgacgtgacggggagggcggtccggcgagacttccggtacgacagccatggcttcacggcttcgctcttctggtcgcccttcctggtcaaggccaacctagcgaacgcgacgctcggcttgtgggacctccacctcgacacggcggacgcccggtgggcggcgcacgtcgccgagttcgactacgtcgtcctctcggacaccaactggttcctccgcccgtcggtgtactacgagggcgggcgcgccgtcggccgcaacggcgccgcccccgtcaccaacgcgaccgagatcgccgtgccccgcgccgtgcgcgccgcgttcagcacggcgctcggcgcgctcgccgcggcgccggggacattccgaggcaaggcgatcctccggtcggtcacccccgcgcacttcgagaacggcgagtggaacaccggcggcgactgcgtccgcacccgcccgttccggcgcgacgagcgcgccctgggcgccgtcgaggccgagtacctcgccgtgcaggtcgacgcggtcagggaggcggaggcggcggtgaggaggaacggcggcgagctgcggctgctggacatcaccgaggcgatggacctgcggccggacgggcacccgagccggtacgggcacccgccgggcggcagcgtggagggcagcttcgttgtggattgcctgcattggtgcttgccggggccgattgacctgtggagcgagctgctgttccacatgctggttgatcaatag

SEQ ID NO: 15152 - DNA, 2054 bp, Oryza sativa
  Clone ID: PAT_MRT4530_21021C.1
cttgacggaccctcgggtctgggtacaccccgtcctgactcggacgctccttcatcctttgcgcctttctccacctggaccagctgcctacttacttcatgcttatctacactacacatgggtgaaggaggataacagtgagggtagctgtttgcaagactctccttggatttttgtgcactgttgaaactggagctggatgttacggtgggaatttcttacaggaaaacgcgtttcgttgaccttattaatgtaatttctccccataacgaattccagaatacatacccagtccttgctgagcgatataaagccgcggcgatttgacgcacctccatatgatgaatatcccacacaccttcccgccttagatcggtcctgcctcctgcgctggtctgcggcctctgcgtcccgctgcccgcggccccgctggagtctccgacttcccggtcgcccggtgagcttcttgcgccccagcctccagcccctcctcttagcggccctgtctcagccccgccgcccccttgtcgccgccctacctctcctccgctttctgttcctcgtccatccctacccaccataaccagtaagcggtaggaacccacaacttacggtcaacgaatctttcagcactcaggaacaagcaaacatgtatcgtcctcataacagtcctcacgatagtactcgtgcaaaatgcttgttaaagaagataccgctcgtgagtgacgttttccttccattgcttctttcttttcctggcaactgtggcaaaggaaaggcccatcccatggacgcagctttcctgactttgacaaaccctcatgtatggatataccctgaccagactctaactctacttgacaaattgcacatatgaagagcttgaacatattccgaactggatattcagaatctagccgtcttgaaagggaaggacatccatcctcaaagacttcctccaccaaatctggctgggtacattggtccttatctgcatgacatggtgagtctgatgttgctttcttgtaaaagatatttttgaaaagtcctttccctgccttttttgcaggttgcacagtggggcttattttttctggaggtattatgtcaatgacaatacaagtcgtatcatctctcaatccttttgatgcaattgcttctttgacaatttgatccgctgcagcttctggaggaagccctcgtgcacaactaaaagccgtatccacagtcaaggcatcccaaacaccatcacttgaaataatgattctgcctccagcacttgatagcttgatctgcttcacataaggcacgggaatgataaattcacctacatcctgatcaccaattgatcttgataggcacaagccaccaggccaacatctaagtggcccaatctcagctccgccgacaacatttagccttccaacttcacctccgcattctgttacacgtccaacctcctcttcgctagcatcgaagcgatggtcagcggacaaatggtaaatggtaccctcagcttcaaggacgcaccgcgaatcgccaacggatgcaacggtcacaacgtacccatcgattatgacaaacgtcacggttgttcctcttgtttgaaaatccttgtccgtcttgacgaacccggccaccagcgccctcgggagcgctgcgagccactcgtcgccgctcagatcggcaggaacgcagcacatgacgttgctgaggatattctccttggcgtacaccgcggcgccgctcccgttgtgcccatcgaacagggcgaaggcggagaagggggcgccgccggccgggaggcgctcgcaggccggcttgagcagcgcgaagtcctcccccttcttagccctacacgcctgccccgccgcgacgctgggccgccgctcccgctcccgcccgcccgcacccgccgacgccgacgccgaagcgcgctccgccgacgcctcacgccgcagcaggtccccgagcgccacgctcccgctccgcctcctcctcccccccgccacccccaccgcctccaccgtcgccgccgccgccgccgccgccat

SEQ ID NO: 15153 - DNA, 139 bp, Oryza sativa
  Clone ID: PAT_MRT4530_21022C.1
gtaccgcacccgatatccccggatcgactcaccgcgcgcacactcgtccggagggatcaactaccaaacgtgcagagtggtgcgtagctgatatctcactaacgcgcagaggggcatgtgcatgatctcctactccacc

SEQ ID NO: 15154 - DNA, 488 bp, Oryza sativa
  Clone ID: PAT_MRT4530_21023C.1
cccacgcgtgcgccagggcgttcgtcgagctgtcgccctttgtatattaccttttagaacccgtatgaggatgctgcttgatatattgatgcactaacctcatcactgcggtaaagaaaattgtgcgccaaactacagtgctataactatatgttataggaatataggtagcagctgatacgaagaggacagagaacacacgttccatgacgagggacgactaattcttggacaggatggtactagacagaattattgcacaatcagatgggcgttgtgctttttaggggggagctaaatgcgtacctcatgcaggctgggcagtcattaagtgcttatcaactacctgcttgttcaatgaaccatctattaaggacataggaactcatagctgaggccatgctgtagctagaactgatggtgatcaactagaaaatagtgctcatgctagccgggaacagggccgccgtgcattagaacctcagcag

SEQ ID NO: 15155 - DNA, 830 bp, Oryza sativa
  Clone ID: PAT_MRT4530_21024C.1
atggagtccgaagctgacaaggccgccgcgccggcgccggcagcggcggcgtcggtagcggagacgagcgacgacgcgattcaagaggagtcaccggcaccggctcccagcgggaagcctggatcggaggcggcggccaagccggaggtcgaggtgcagctgttccggcgtgggcgggggccggtggccgtgttccggtcgccgctgggcgggtacacgcaggaccagctggaggtgggggacatcctggagcagcacggcctcaagtccgtcttcgtcttccaccccgcctcccgcacccgcggcgtcgccatccgcttccacccccgcaacggccgctccctcctcacctacgtcgctggttccaccatcttcctcgacggcgagcccaaggattctttgctgaagcccgtcacgaaggtgatgattggtgtggcagctatgacagcagttgctgcagtattgctgaaggagggcaagatgcccgagtggcttaaggaatccaagctcggcaatctgaacttcccaccatgggtactggcttgcatggtcattgtgttcatgaggctccggaagagaaccaaggatgccatgaaaaagtttggctggtcttcatgaggttcgtaatgacaaatgtgtgtttttggctgctgcttcaaatttgttgccaatactggagatgtaccaagcgggtgacacgctaagtgaagaactattacacaaaaaacactagttttaccctttatttgcatactcgatgccggaaactcgatagatttttacttgtacttatgttcatgaataaaaaatagcaaaacaatccttatcat

SEQ ID NO: 15156 - DNA, 447 bp, Oryza sativa
  Clone ID: PAT_MRT4530_21025C.1
atgaatggcagcggattacaaggatacagtacagaggatggagttgccatggacagcgaccaacacgggagagatggtagtgacaatggctggtggctttgcaaatctattcacgtcttgacagcccttgcgcaccagcgcacgcctgtgcagttgctgctgtttgtctgccaaaacgagttgaatgctcctgttgcgctaggtagagaacgatcggatacagggcatccagagcagtggacagtggagttgatagtggtaaacacaacagtgatttctctgtctcacccaagaggtaatcacaggggtaatctgaacttagcggtcaccagaggcttttaccttaactttgttcagaatataatggagaactctgttaacaggactcgtaatggggcgcatcatgctatgattcataccagaagtgatgttgacgtcactcaatga

SEQ ID NO: 15157 - DNA, 697 bp, Oryza sativa
  Clone ID: PAT_MRT4530_21026C.1
cggacgcgtgggcggacgcgtgggcggacgcgtgggctgtactactggccagtgaccagtcacttacttgctcttctcccccattaattgagctccagccgtccgggagacgagataattccgttcaatttcaagttaatcccgcggcagccatggctgcgcttctcatgaacaccggcgctgtctcgatgcccttccccaccacgcgcaccgccgcgcgacggcgaaccagcagaagcagatgccaggcttcatctagcggcggtagcagcaacgaaggaggcggcgagagctaccgcgggaggagcgggcgcggtgggtcgacgacgtgggtgacggagtacgacctgtacgggctgctgggcgtggagcggtcgtcgccgcagtcggagatcaaggccgcgtaccggtcgctgcagaagcggtgccaccccgacgtcgccggcgccaagggccacgacatggccatcgtcctcaacgaggtctactccctcctctccgaccccgccgcccgcctcgcctacgaccaggagcaagcgaagcagtcggagttcgtcgggtacacggggaagccgctctactcggcgtggttcggcggcgaggccgagcagcgcgcggtgttcgtggacgaggtgaggtgcgtcggctgcctcaagtgcgcgctctacgccaacaagaagtgcgccgtcgaggtcgt

SEQ ID NO: 15158 - DNA, 816 bp, Oryza sativa
  Clone ID: PAT_MRT4530_21027C.1
ccggccggggtccggccggggattcagcttcggagagagctactcctcgtcgttagccatggcgtccaagcggatcctcaaggagctcaaggacctgcagaaggatccccccacctcctgcagcgccggccctgtggcagaagatatgttccactggcaggcaacactgatgggtccatcagatagcccttatgctggaggcgtgtttttggttaccattcattttcctcctgattatccattcaaaccgcctaaggtggcattgaagacaaaggtgttccacccaaacattaatagcaacggaagcatatgccttgatatcttgaaggagcagtggagtcctgcattgactatttcaaaggtgctactctcaatttgctcgctgttgacggatccaaatcctgatgatccattggttccagagattgctcacatgtacaagactgatcgggccaagtacgagtccaccgcaaggagctggacccagaaatatgctatgggctagaatggttaacaataagaaatgtgagatatgccattgtattgccttgtattctcctgtaactctttcaacatttaagaaacagcaagaatcaaattgaactctcgagttgttgtatggaatcctactatagatgttcagctattgtaaattatgtagtgggtggttctattgattgttcgatgagcacttggaatggtacttttatgttccagagtaactgtgacaaaatagtctgtattgatctcctgaaaggctgaaacccatcttggactgtttagtgttttattaatttcgttctagttttagctatt

SEQ ID NO: 15159 - DNA, 405 bp, Oryza sativa
  Clone ID: PAT_MRT4530_21028C.1
agccttccggggcccctgggccaacagggggtcaagtcgatttttggcttccttggccaactttttgggcctgttcggccgaaggaacttattttccttggccttgattggcttgcgcccagggccaaaaataattaacaaaagttttaaacgtttccggcttgttaaggttccggttgccccgcaacttaagaaggaaaggtggagaaaggatttgaaggttaaaggcagaactttggttgcaaaggaaaagccgaaaccaatggactaaatggtattacctcctggacaaccatcaatgttggtccttttttggggccttaattcctccttccagttgaaatggacccaaccacctggttggaattttgtcaaggtattgcttcttagttcaaacgtccttgg

SEQ ID NO: 15160 - DNA, 2300 bp, Oryza sativa
  Clone ID: PAT_MRT4530_21029C.1
gatttttttttttttttttgtttttttattctttttaactcaatgcaatgaaatagtatatttgtacaggtttatacgagcaatagagtacgcttcttagcacatcatgaaacaagagcagaaacgaaattatcattcgtcaaaccggactctcagaatctacgcacacttaacacaataccaggccttgagcactaaatcatgatgcttgtcaaaatcttcctccactctaaccccgttcccaatgaccctgcgaaagaccaacacaaaatttctctcacactttcaccccacacatcagctcgaagcctcgtcaatgaaagttgatcggatttcacaaaaaaataaacaaaagaatcttccaaattgagttactacatacggtggccaagtgcaaggtcgagaagccagggaaagggagcttctgtctttattccatcaacacctacgggtcgcatgagatcgttcgtgggccatcagtaccaactccctgcatcgcctggcgggacttgtggcggattgtggaattgctcccacacagtgagcgacgaaacgagtggtcgggatgctaagctggtataggggcccgggcccagacggtttcacaggtggtttctgcgcacgacggcgggacgtcctcccacgagcgccaaggcggggttgacggagcccgtgtggatgacgggacgcaccgtcttcgatcgctcgcactggtccaggatgatgcgcatcgcgtccgtggtcgcttcggcggtgttcttgtacttggtgctggtggggtcgtgctgcatcggggtagcgacgaggaagacgaactcgcagccggcgatggcgggctcgaaggtgtcggcgtcgtacatgtccgcctcgaacagcaccagccgctccgccgcgccgggcaactctctcaccggcgccgtcttcttctcatctccaagatttctccaaggttgcatggacgacgcagcgtcatttccaagagcttccagacgggcagtggcgccttgctcgtggatgcaccgatggcgctaggctttggtcatacacgcattgactggatcatttctatcctggcgagctcttcctccaaggtgattttaaatggcagggcaggactcagcttcatgcatggtaggggccttcgacaaggcgaccccctatctccgatgcttttcattctggcaattgaccccctacaaaaactcctcgccgcggcacaggaagaagacctccttcaacctctacaccgacgaatagcaaggtttaatgtcgccttgtatgctgacgatgcagtggtcttcacacggccagacaaacaggaacttcacacggtgcacagcattctacaacatttcggccaagccacagggatgatcacaaatctaacaaaaagtgaagtctactccattagatgtgagaaccttgatctacaggacatcctagcccctttcccagcacaacaaaagaccttcccctgcacttaccttgggcttcctctgcacatcagaaaactccggaaaatggatgtacaacccttaatagacaggttctcagcgcgactaccaaaatggaaaggaaaattgctaaataagacaggtcgctcagtcctcatcaaatccactctgtcggctctaccaacctatcatctcacggttttccctcttaagaagtgggcagcgaagaaaatggacaagatccgcagaggatttctttggacaggcgccgatcaggctaatggtgggcactgcctagtgaactggaaaaaggtatgcaaaccaaaaaatttgggcggactaggtataactaacttggagttttttagccgatccttgcgtcttaggtggctctggtatgactggaaagcagatgggaaaccatggcaaggctccaccctaccatgcgatgaaacggacaagcaactcttcagggcctctacaatcatcacactaggcaatgggggcaagacaaagttctggcacgacagatggcttgatggccaatcccccaaagatctatctccttccctatacaagcttgctatgtggaaaaacaaaacagtggcccaagaactagaaaaccacaagtggttacggccactccgaaggatgaactcgacgaccgaggttcgagaatttatcctgctctagcacttgatacaacaggtacaactggatgaagacagggaggacgatctaatgtggaaatggaatgcgaatggaatctactcagccaactcggcctacaaaattcaattcactggaagcattcaggacaatcgtgctaacttcatttggtgagca

SEQ ID NO: 15161 - DNA, 262 bp, Oryza sativa
  Clone ID: PAT_MRT4530_2102C.1
cctcgccatcctcaacaatgacgacatagccggcgacatggagcaagctactagccgacggcgccgtgtcaatcaaggccggctttatacctctcctactacttactcatctcatcctcctcctcctacctccaagaaggggaagaagaagaagaaggaggaagagaggccaccagcgaggcaccaacaacccggccggggtagggtccagtacagcatgcaagcaatggctgaattctactcaaaggggaccatgaattga

SEQ ID NO: 15162 - DNA, 465 bp, Oryza sativa
  Clone ID: PAT_MRT4530_21030C.1
ggccccaaccgccttactggacctgcaacgaatttatacatatgaaaaaaatgctacgaacactaacatacatcatctgatgaaatgaacagatgaatgacatcaacccttatcacacacattatgttaacccccagaccccacggccggaggcaggctcctaccggccaaaacacagctatacagaggcattccactctgcataactgcatgaacttgcaacatcgatcttcactatttgttctggaaaaggtacttaaagaggacatgactttctcctgtacgtcgatgaacactctctgtacatttcctatttttgacgccatcattgtatactgcaaagctgggttgctcatgccagaacaacagaacagactgttttgcactggatcaggggaacctaggatcaatctcttgtgaacactgaaacataatccgctgtcatttgctgatccaaatgctaac

SEQ ID NO: 15163 - DNA, 759 bp, Oryza sativa
  Clone ID: PAT_MRT4530_21031C.1
atgagggatcttatatatactttttccaaatggcaaacgctcccggttggttcgggactagccccgattttggcccagctactcaggcccaataagcagaaggagaagcgggcgctgcgcttaggtctcgatattattggtatatttgttcgccttttacctgaatttgtactcatgggatttgcggtgatacaaaattttggcacctccacccggtggcctggctacctgctacaccgattcaccctttacttgggtattgtttcccccatttgcaaaatgctgcctaaggatacttttgataatctccaagccaaggttcaaatgtgtttcgttaggataatagctatgagtgcaggaaaaccgactttatttgctccaggaatagttattgcgaagaagaagctatcatgctacgtcataacagacaaggggacattttgttatggttctgaagggctctatgctgctgtttttcctggcttgaacatggagattgtctctttcatgctaagcaaaccaaaatgcactaatccattagctgctgtgaaaatctgtgaatctggaccgttgattaatgaggatgtttacaccttgggatatcagaatccaaaagtaccttttatctcctggatcggtccggcaatcaaggacattttgcagccttttatggaccaaaagaatgttttattagagaaaaggaagccaccagttgatactagtgccggagcttcaaaaaagagtaaaaccacacgttga

SEQ ID NO: 15164 - DNA, 804 bp, Oryza sativa
  Clone ID: PAT_MRT4530_21032C.1
acaagcttttttttttttttttttttttttttttggtggggtaatggtcaaagattaagggaaaaaattgagcatagaagagagagttttacaagttttcgtatattacattttagggagtcacaatatagttaattttaggtaggaggaatcaagaaagtgtcatgtggtttaaaatagaaaattgcatccttgtagagaagtgtctgtggaattagttaaaaacatacacttagtctagctgagtggtttttgttactggttcttgcttctggggtatgcagattagtgttggttagatgatatgtgaaacaaatacttcattttccgtgttctcaggagttcatttgctggcttggacagactatctgaatatttgctaagtttcacttttggaagccaataatttttttcttcattgtatgaacaactaaaactgaataagcagttggaagtaatcaaattgttgttggctggtgaatgtgatttgtagttcatgaaaatatatagcatatccatccaaatatatctgacagcaggactatgcattgtgctaacaagtagaaaaaagagagtttttatttgttgttgcatacttatcatgtcaaatatcaggtttttatttgttgtaattgcttactgatcatgtcaaacttcttgtttttttttccatgtaataatgagaatggaaggagatgagtatttcactagcttgatgaatgatgacagcactgcactgagtcgggaacttggggttctctgaatagccagacaaaattgcagcctttgctgatcgtcgaaagt

SEQ ID NO: 15165 - DNA, 452 bp, Oryza sativa
  unsure (1)..(452): unsure at all n locations
  Clone ID: PAT_MRT4530_21033C.1
atgcgtgcactgcctgggctatgacacgaaaggatgcctgggcggagcggatggtgctggctgtgcaggaactgcttgtggaatgcaatgcctgtgtgcaatgccaagatagtgttgggaggattaaaggattttgaggaccctggcggcatttgctggntgccgaggagcccttggaacctgccaatggaatnatgatccgagtaacttgtgcattgggaggaatgaggttttatcgntctcttgggtnagcggcacatggttcccctggcatgcgatgtagtgtgtatggatggttggaaaattcgggaggagttncccagtaaatgntatncggtataatnttncgttgtaccnaagcccttttgngccctcttnnttagggtcctgtggactngcgagcagtgacaatagagggacctcccgagtttcaccnncgtaaaaaaaaaaaa

SEQ ID NO: 15166 - DNA, 799 bp, Oryza sativa
  Clone ID: PAT_MRT4530_21034C.1
gcgagtcagaacacaccctcaacctacactagccatggccgcagcaaacaagattcccctgctgctcgccgccgctgccgccctctcgctcgccgcgagcgccgtggcggcggcgcccggcccgcgccgccggccggtgcgcatgcggctgtacatgcacgacgtgatcgacgggccggggcagacggcgatccgcctcatctggggcgcggggccgccccacgcgtccatgccggggcgggcgttcggcgacacggtggccgtggacgacctcgtcacggagggcccgagcatcgcctccgccgccgtcggccgcgcgcagggcacgtacatgctcagctcccagcgcgaggcggtgctggtggttgccatcaccgtggcgctcacctcggccgggggcccctacaacgggagcaacctcgtcatcgccgggcgcgacagggtgcgcgacgagacgagggagctcgcggtggtcggcggcaccggcgcgctccggggcgccgccgggtacgtgctgtggaggacggccaaggtgtggtcggagatccacatggcgctggagctcgacgtgcacgcgtccgtgccggcgacggcagacgacgacgcggtagccaccgagtaagagagattattgtactcctacgtggatcgtttgattccgccatggatatctatccggccgggagctcccgtgcactgcagctagattatactcgtatttatttgttgtgcttttaactttttgtttccttacaagaaataaaaaaaggctatgatcctctgatcattactattaatc

SEQ ID NO: 15167 - DNA, 513 bp, Oryza sativa
  Clone ID: PAT_MRT4530_21035C.1
cccaaaaaggctttaaattaaaccaactttttttatttgtaaaacctatgggatcacattgaccaaaacccggccggccacagatgagggtttcttgagtaagtccgtttgggtaaaaaaaaaaataacctcccccacctccaaaataaaaatcatttccggttacccggggatccggggggggccggccaccgccctttaccacggtttgccggccacccttgggatggacccagcaaagcgggtgaccctcgtgacgtaggacccggccttgggcttgaccaaatccttgttgctgaactgtttttggatcggcccaccggacgtgggaaagtaggccccctccatgaacaggccctcctcaaagggccacacccagtttttccactcctcctccgtcgccccgagctgtttcgtgatccgtttccccgttaggtttggcggcccaatgtacctgtccccctggctgatgatcgccgggttcttgctccctccgtgggcatacatgaccca

SEQ ID NO: 15168 - DNA, 1221 bp, Oryza sativa
  Clone ID: PAT_MRT4530_21036C.1
atgggcaactgctccccgtcccctcgccgccggggccgcccgacgtcgccgtcggggtcgccacctctggaccgcaccccgtcggccaaggccgcgggtggtggcgccaccaccacggtctcgccctacgcgctcgccagatccccctccgtgtccgccgctgaggccgacggggacgacggcgtggtgcgcgtgtacggctccgacggctgccccgtcgcgtggcgggtccgcgtcgcgctcctctacaaggcggccgcgccggtgcacttcacgccgtccgaggcggcgccgctcggccgccccgtgctccgcctctccgcgtccgacccggagctctgcggcaccgccgacgagctgctgcgacacgtcgacgcgcggttcgaggggaagccgctggtgacgccgccggagcggccggcgcgcgtgtcggcggcggcagcggcggcggaggaggtggccgagctggtgcggctgcagcaccgcagcgcggagcggcacctggagggcgtggcggcgaaggtggcggagatggtgaagaagggagcgaagaaggctgggaagggggcgaaggtcgtcgtcgtggagggcgccgaggtgaggaggttgggtaagtggtacggtgacgccatggaggtgatgctggagcacgccaggatggaagaaacggtgctcttccctgacatccagagggcctctttcccaggggttttggataaggctaatgagcagcacgggaggcacttgcccatgatgaacggcatcaaggaagatataaaaacactcctcactctggaattaggcagctccctcttccaagaagtgctggttaacctctcagtccggctcaaagcattgcaggatcacaccaaagagcacttcaaggaagaagagagggagctgctcccaagattggaaggagtacggcggatgcagagagaagaggggaatgtatctgacaagtccaatactgcatgggcgtcggaggccatgggtacaatggaaatgacgcactctaagctgtttccattcttcatgacgggtctcttgcctcaggaggctatgcagtacttagacctggtatgccgatgtactaaaaacactaggcatttggtctccatgctcagatcgctcgcagagcgtctggaagacgcaaacccagcaattatacacaacaatcccacaaaactatatgagcacctacttgtaaaatccccataa

SEQ ID NO: 15169 - DNA, 390 bp, Oryza sativa
  Clone ID: PAT_MRT4530_21037C.1
atggcggtcgggcgccagtcggcccagtgcggtagcggcctgagggagcccaggcagtgtcaggcgaatggggagagaaggccggcgcgagagccagccacgccggccggcgaagttgtatgcggcaatatggggaggagcagaagacgaagtggctggacgccgtccatggcggctagccggctagggttcactgtgtccggtggcgagaggggaacacgagagtggcaaggcaagctgccgcccagccgccgtcagccgggcacggccacgtcgacgcgcccgctccgagcaccgccagcggctgctgtccttccccctgccgccaagctccctcctcaccgcgccggccttctctccctcaggcctctgccgcgctgggctgactag

SEQ ID NO: 15170 - DNA, 1941 bp, Oryza sativa
  Clone ID: PAT_MRT4530_21038C.1
atggattccaccccggctcctgccgccgccgccgcggagacgccgaccaccgccccggcgttcgaggaatgcctccgcctcctccgcggggagcgcgacgagcagaagctggcgggcctcctcgtcgccgccaacctctgccgcgccggcgacgccgcctccgtcgtcgaggtgtaccgcgccgtcgggccccggttcctccgccgcctcctcaacaccgggctggggaaagtggagggcggcaaggaggaggacagggaggcgtacctgcgtctctcggtgacggtgctttccgggcttgctcgattcccagaggttgccgccgacgagggggtcgtctccactgtgcccctcatcgccgagatcgtctccaaatcgtctgatctggcaattactgaagaatgttttgagctcctgtctcttattgcaatagcttcagatggtggggcgcatacgttttgtgaacctggagtgatggatatgctcttcctccaaatctcaaacttcccagatggttcaaggtgcttagagcttgccattcatctaatgcagctacttgttcataaaatcagaatagacaacatgaccgtggagaaactgcaaggcatgacaagcatggtgacctcacttgctaggctttttgctgttcttcatactacagttaaatttgaagcgctgcatatgcttaccgcccttctatcccaaaaggaatctccgcttcatgacgctttgagatcagtaccttccatgatttggaaatgtcaaattcgagttgggataacggccgttctccaaaaccgtgttgtatcttctgaaaagttgcaagctcttcttttggcggagtgcatgatgtctatacttggtgagaattggctgtcagaagaatacaaagtccctgatgaccagaatatgatgcctgttgataaatttgtattgcttgtcctagaatctgcaagaatcgaagtttctgtccttctaaatgagcttgcttatttgaagtatgaatcttcaaaaaattcccagagagatgatgccatcagtcagaaagagagaaacctggctatattattttcactaatagaaagaataataaaaatgatatcaaatgccagtagtggggaaggtgctgtatgtcagaccatccgtgagagcaccatcatgaaagcaattacaggattaaatgagacagttggcttagttttagactttctgcaggacgcaaaggatcatgggcaaaggaaaggcgatgatcttttggcggctgtgagaatagtaggaagttatctggcagaggcaccatatgcctgcaaggagaagattagacatctgctggaatttatcttctctgttgaagggcaagatgaatcaagctcattccattctatttgttttatgcttcccatgctatcacaaataacaatggaggctgatggatgtagaattttggcatcatttggaggctataaaatggttatagactgccttattaaaatgatcgaacagaatggaatgatgattgacactggtaacatgtttttagcatgtgataccatcataaactttttgtcaaatatgaaaaatgctcatattcaaatggggtcttgttttgtcggccttctaaaagcacttgtttcatggactggaaccgccgatgattcatcagttatcataacagcctcctgcttatgcacgttggtgttggacttaacaacagaagagtttttattgagcagctctgattttgattccaagacacttgagaagttgtcaaagctcattgccagaagtttgcatcagggcattcctgacgacgacatagaacaatccaaccaaaagcaaatcatactatcaggcaaatactatactctttttaacataaactggaaaaaagaaaagaagagctctcatttgatttgctatcggttacaggaggtggtctga

SEQ ID NO: 15171 - DNA, 284 bp, Oryza sativa
  Clone ID: PAT_MRT4530_21039C.1
aatcacctcctttattcactcaagaagtgcttaatgatgctttttgccaaaaagaggtgtaagcaacctttctcacatttttcatttcacggataactctacaaattctagggtacttttggtggatcaaccaatgagcaaacgcgccgcggcccaccccccctagcaaaaacaatcctttaatctccctggtttaacattccatgcccattatcctcccttgaaaccctttaagcattggataccccgttaactgctggaacgcgaataatgaaggccttccc

SEQ ID NO: 15172 - DNA, 294 bp, Oryza sativa
  Clone ID: PAT_MRT4530_2103C.1
aaaaaacatatacactttaggattgctgattgatcaaatggctagcaggcgcttttcgcgggggctcatggcggcatggggcattcgcccactacagcgaatgagcaggacaggcagcccgaggcgacacctgcctgcccggctgacgactaccccgaaggtcgcagtcgcgccgccctcgcggatgcaggtgcgcactgagaggaccggaggcgtgcccgcatcgcggatgggagagctacagagagcatgccatgccctgagcaggctggtcgtcgtcgtcgtcggaatact

SEQ ID NO: 15173 - DNA, 384 bp, Oryza sativa
  Clone ID: PAT_MRT4530_21040C.1
atgagtccggccgccgcgctcgccattttctcgcgcaagtccggcgccggctgccgctcatcgaccatcgccatcttcttgcacaagtccggcgctgaggcccagctcgtgagcttgactggccagcgtccaccggcgcgcgcctcatactcggcctctgccgccaggaggctcgcagccgccggcgcgccgctcgtcctcggcctccgtcggcgcgacaaaggcacacccacgtgcggatgcctcgccatgccatgccggcgtggggcccactccgccagcgactgcgggtgggcccggataaaggtggggcccacgggtgggggcccgggggtggcacgtgggcgtgctggtgtggtggtggtggtggggccgaaaagctga

SEQ ID NO: 15174 - DNA, 2259 bp, Oryza sativa
  Clone ID: PAT_MRT4530_21041C.1
atggctcacctcgtcggcggcggcggcggcggcggcgggggggtcgaggaggagggggatgcacgacgacggcgacgagcggggatgatgccagcggcggcggcggcggcgggtggcatgtcactgggcggaggaggaggcggccgctcgcgttgtgttcggagtaatgacactatagtagtagtactagggggtggaggaagctcggggatggaggaagctcgtggctcaatggaggcccaagagcccaactcggcagccaagaaaaccctaatgacacctcgatcccgatctggcgtggccgattcccgatccatccccttctctcgttctcatcctccccgccgccagccaccaccaccacccgccagccgccagctcgctgcccgccaccgccaagcgccgccgccgccagccagccaccaccgccaagcgccgccgccacgccaccgaaggagcggcgccgccgccgcatccggccactcctcagccaccgtccaccgaaggaactcaacgccgccaaccccatggccatcggtgccgccgggctacgaatcctcaactatctcaatctgtcccacaacgcgccggaatgcagagcctaacggccgtcgatttctccgacaacaatctctccggcgaggtcccagcgaccggccagttcgcctacttcaacgccacgtcattcgccggtaacccaggcctctgcagcgccttcctctccccatgccgctcccacggcgtcgccacgacgtcgaccttcggctccctctcgtcggcgtcgaagctgctcctcaaaatacaaataatgtcattgacaaacacccgatttcacaaaatatcatcgataagcgtgaattttataaaatattatcgtacaaggcccgaattgacaacgggcagcgacctgctgcagccggtcacgtgagccgctggcggatccacgtcacggggatgcttttgacgaggcaatttcagagcatgaactttttggcaggtagcgagtggggcccacacccaaaagcgaggataaagcgacagcgacggccaacggagagcccgggaaagtcgcctcgccgccgtcagcttttcggccccaccaccaccaccacaccagcacgcccacgtgccacccccgggcccccacccgtgggccccacctttatccgggcccacccgcagtcgctggcggagtgggccccacgccggcatggcatggcgaggcatccgcacgtgggtgtgcctttgtcctggattggattcgccgtcgctcgatcgcgggggagaacgaaaggaaaaaataagaattacccacttgaactatcgccgacgaggaatcccacgcgccgacggaggccgaggacgagcggcgcgccggcggctgcgagcctcctggcggcagaggccgagtatgaggcgcgcgccggtggacgctggccagtcaagctcacgagctgggcctcagcgccggacttgtgcaagaagatggcgatggtcgatgagcggcagccggcgccggacttgcgcgagaaaatggcgagcgcggcggccggactcatcgtcttggaacgacacccacaagaagatggcgagtctgcatgtagttttcctatttatgttgataacaaaccagaaaagcgagcgcatgcaggagtgcttcggccgacaacgtgctgctgtgccgacgaggaggaggacgcccggccggcgagcttgacgggcttgccgccgccgcccgagctccgccgtgcgggagtacttccgctaccgcgtagcgacttgctgcgatgttatgccgacaaggaggtggaggcccggctggcgagctcgacgggctggccgccgccgcgtgcttcagcagcatcccctgagctccaccgatggccgacgggcgagcgcatgtttttcgagggagtaaggaataaaggagaacttcacatcagtaaccagtacacatccgcatcgatctacagctcttcaccaccacaagccaaagccgatcgaaatgatcctccaacaaatgggccacctagatccagaaaaagacacaaagctgtgattttctattatgaaaatggagaggagcagccattttatcctactctgacgaagcaagttctgaaacctgaacgagcctcggcaacccacatttttggcttttcctttaatgccaacaagacgagatttctctattatcttccagtgttttcacgaagaacgagtcttgtagcagttgacttaattgatgcatcatccgga

SEQ ID NO: 15175 - DNA, 1558 bp, Oryza sativa
  Clone ID: PAT_MRT4530_21042C.1
ttatcagcaaggagaaggaagaagaagaaggcttccgtttctatcgccgaaaggttgctccctttctcctcacgattcgagctgacgaggtgaaggccatggagaagagcaccacgagctgacccgaatccccctctctccagcttactgttcctcggagatgggctgcttcggccgcgtgagggatatgatcaagaagcggaaggggaagaagaggccgccgccgcacgaggggccagcgccgccgccgccgccgccgtcggcgctcgccggctcgtcccactccacctccacggtgtcgtcgtcggccgtcgcgacgagccagtcgaccgaggactcgagcgcggcggcggcgaggcccgccgccgggtggagcaggtcgtccgggtcggtctcgtcggcgcggagcatcccggagctgtacgaggagaggggcgcgagctccctgcaggagttcgggctccgggagctccaggcggcgaccagggacttcagccgcctgctcaagatcggcgagggcggcttcgggagcgtctacaagggcgtcgttcggctgcccggagggcccgccggtggcaccgaggtcgccataaaaaagctcaatcccaacagccgacagggtcacaagcaatggctgacagaagttcaatttctaggggttgttgagcacccgaatctcgtcaagctcattggatattgtgccgctcagagtgaacgaggccctcagaggttgctggtatatgagttcatgtcgaacaagaccttggatgatcatctattcaataaagcatatcccgtcctcccatgggacatcaggttgaagatagcattgggtgctgctgaggggttgttgtacctccatgagggattggaagttcaggtcatataccgtgatttcaaagcatccaatgtgctacttgatgaggaattcagaccgaaactttcagacttcggattagcaagggaagggccaactgcagataacactcatgtgtccacagcggttatggggacttatggttatgcagctccagactatgttgagacaggccatctcacaaacaagagtgatgtttggagctttggagttgtcctatatgagatcctcaccggacgccgttcaatggaaaggaatcgtcccaagaacgagcagaaactcctggaatgggtgaggcagtatcctgttgagactaagaggttcagcaggattatagatatcagactcaggcacaattactctaagcagggcactagagaaattgccaaattggccaacagctgccttgcaaaacatgcaaaagaccgcccaactatgagagaggtggtggagagcataaagcaagtgatgcagcacaacgaattggatggtgacgtcgaggcatcaggggagagctcaccacctcatgaggttcctgggaagccaaccgcagatgatgttgctgtggcggcagcaaggcggcggatgcttcacctggctgcgctaggtgaaaatgcaaacaatattgcgaggaggagattcatgctcatgagggcagctgctgctccaactccaacataa

SEQ ID NO: 15176 - DNA, 898 bp, Oryza sativa
  Clone ID: PAT_MRT4530_21043C.1
tcaagcagctgcagcttgttcttgttccttctcgagctgcagcctgatctccatgttgaacctggcgatgaactcctccacgcgccggttcagctcctcgtcggagagccgcgagtactcgctgctgctcgtcgttgtcatctcctcctccggctccggcggccgctccgttgcagttcgccggagcttctcctccctcacgacaacgatgctcttctcctgcaccaccggcggcgtcatcatcagcgcgtggtgcgacgagtgcgacctgcttcgacgacggcgacgcgccatcgtcgtcgtcctctccgcctcactgctcgccgtcagccttgtcggccttgctgctgcctgcaccacctcgccgccgtagtacggcaccaacatcatcgtcgactcctcctccgccggctcgccggcgacgacaacaccgtcatcgtcttcttggccacctctcggcggcgccaccaccaatgcatggctgaggctgacatcggtgacaaccatggcttgaagctcgccggagcttgaggcgggcctagcggcgaagaagagcatgccggagtcggcggcgatgacgatgatgatggagttggacatgaggaaccagaaggtggtgtcccggaagagcgtcgccggcgggatgcggaggaaggagacgtagagcaccggcagcgacatcaccagaatggagatggacaccttcgccgccaccatcatctgcttgttgttgccactcttcttctctgcatcaccaccatcgccaccagcagcttcagcttgcatgttcagcagaggcagcatctatgatctatctagctatagatttctgaaattatttctgctggattatcttggcttcttctctcttcttgatctagttcttgctttggctttg

SEQ ID NO: 15177 - DNA, 156 bp, Oryza sativa
  Clone ID: PAT_MRT4530_21044C.1
acgtccacgcatctggagtgacaacatgattgagaggtgcaccaagcttgactggtaaaaagacaccaccttgattgaggctatagaccagatcaactagcccaagaggacatgaaacaaacccgtacgatttgcccttcacgacgtgtacaagat

SEQ ID NO: 15178 - DNA, 760 bp, Oryza sativa
  Clone ID: PAT_MRT4530_21045C.1
ccaccacttgctccagtaccttcccatgaccgcgctggcgacaaccaccacctactctaccaccttccccaaccacccctttccccgagccgcaccgcctcccccgcctcccttgcctccacttcctccccttgctcgtgcctccgacctccgatgcatccatctcttccgccactgccgctgctacgggaatcgccaactcttccgccctcactggcaccgcagcaacttcctcccccccccccaaacaaaaggaatccaccaagcctaccacccgatcccctccctcaccgcccccattggacccccaccgtgcgagacccactcctccccccgacaccccctctgcccaccccccccattaccccacctccccccacgtgccccccctctcaccccccccaccccctcttcggagtctccaccccacagtccccccgtcccccagaccccccgccccctggactcccaggactccccacgcgctcctccgcccccccgacccccctgtccccctcctgaccccccgccacacccccccgcccctgtcttcacccgatatcccccccgataccgacgtccccctgtctgtcgtgtcccacaccctgacagatccctctcgatagatgctccccagtatccacctcctcctatgcaccccgccccgggcacacccctccaccgataggcacctcccacacctcccccgcgcccactcccgaataccccccggcggaccacccgcccctgtcaccctcct

SEQ ID NO: 15179 - DNA, 2364 bp, Oryza sativa
  Clone ID: PAT_MRT4530_21047C.1
atggtcgagattgtgacgggcgcgatcagcaccctgctgccgaagctgggtgaggtcctcaggaaggagtaccagctgcataagaccgtcaggggagagatcatgttccttatggccgagctggagcgaatgcaggctgccatcctggagatctcagagtcagatgaacccaacaagctcgtcaagctctgggtgagagacgtcagagagctctcctacgacatcgaggacaccatcgacagcttcatggtccacttcgacaagcatcgcagctttaggggcttcatcgacagaagcctcaacctgttgaccaagttcaagattcgccataagatcggtgccaacatcagagacatcaagagccacatcaaggaggtgagtgagctgcgcgataagtacaaggttgatggtgttacagtagccaggcctgtcggtcaccaaactgtcgatagccttcgcctgcagtcagcactgtataagaatgtttcggagcttgttggcaccaagaagaagaccgatgatctagtcagtaggctgatggagatgcatgatgatgtagagtccaagcgaaacttgaaggttgtctccatcgttggttttggaggtttgggcaagacgactcttgctagtgttgtgtatcacaagcttaaattggagttcgattgtggggcttttgtttctatatctcttcatcctaacatggtgggggtattcaagaacatgctccgtcagctcgacgagaaaacgtacttgaacattaacggagaaacatgggaagaagtgcagcttattgatgaactaaggaaattccttcaaaacaagaggtacatcgttgttatcgatgatatatggagcaaatctgtgtggaaaacaatcaaatatgtgttggttgataatcaacttggaagcagaataattacaacaactcgagctgtagacgttgccgaacaagttggcggtgcttataagcttgagcctctttcacctgatgattcaataaagctattcaaccaaattatatttcactcggaagacaaatgtcatccttatcatttatccgaagtatctcaaaaaattttgaagaaatgtggtggtataccattagctatcattacgatagctagtatgttggctagtaaaaaagcatgtgatattgttaacgattacccagagtattatcgtgtacatgacatggtgcttgatctcatcacgtccctatcaaatgaggagcatttcctaacaagattagatggacacccgtccttgtctctaccaaaaaagatccgccgactgtccatccaaacaaacgaggaagagtatgtcaagcagttggctacgataagcttgtgccatttgaggtcactgactgtgtgtgggcaaggttgtctttctaagctgaggcgcttaacaatttacttcgataaatgggatgagagctatgagaaacctttcatccagtgcctatccaacctagtaagccttgaactcctagaggtagatggaacactaggttccacatgtggcagtttatcgcctgggcctcaacggcttcaatccattgacatgtcattctgcactttaaccgcttttccaggatggatgtcctcactctgctccctctcctccctgcatctcatattattaacacttggagaagacgaactgcaagttcttgggagcataccacatctcaatgatctctatatatctatatcggtgaacaaagccatacatgacaaaaacaagaggttggttattgggaaaggctgtccattcctgtgtctaacacagttcagtttagcgagcagcagcatgtatgtgggatttgcgcaaggagccatgcagaaggtcagggatctgagtttatactttggagtaagtgagacaatgggtcaatttggagatttcgacttcggtctggagaacctctcttcgctcgagcatgtcgatgtttggatgcggtgttttggttccaagacaggggaggcggatgatgcagagattgcaattaagagatcgctccagttaaaccccaacaaccctacaatggagctggagaagatttatcgcgattcagtaaaaagtacctcgaggtacgatgatcggaaacgatttggtatcgtgaggtaccgatacctcgaggtgtctacgaagacacgaaacacgcgagcgaagaggaaggcgagccgtcgcgaacgaacagggagcagtcgcgcgaagcgcttcccaaaaaaaccttattgccgccttctcccggtgcagaacgtcgaaggcagaggttccggagacctgctctcccgatcgctggtgcacgccggcgagcgagatggagtagtctacgagcgacggcgcagtacagagtag

SEQ ID NO: 15180 - DNA, 3882 bp, Oryza sativa
  Clone ID: PAT_MRT4530_21048C.1
atggccgccgcagcgattggagggatgcttgcctcggccgccatcaaggagacgacgagaaagctgggttccgccatcggaggtgagatcaagctgcacagggacttcaggagggacctggagtgcttcaggaacaccctggaatcaatcgaagcggtgatggaggacgcggagaagaggtccatcaaggagaaaacggtgcagctgtggctgaatcggctcaagaacgcctcctatgacatctgcgacatgctcgaggagtttgaggccaaaactgctacaccagctgcacgaatgctgtcacgtaagctcttccatcaccccaaaattaccaagtttaccatggttcataagatgaaggagttgagactagaactgaaggatattacagatcagtatcataattttggattcaagcaaggctctaccttcagtgagcagcatgttccagataaacgggaaacatcacccaaggagtacgaagcattcatcgtagggcgtactgaacagaagaattttatattgtcttgtttgtttgacaatatcaaggacaagataataatacttcctatatatggcattggaggtataggcaagacaacctttgcgaaaatggttttcaatgatacccgactcaatgattattcaaaagtatgggtctatgtgtcccaggcatttgacttaaataaaattcgcagttctataatgtcaaaactatcaaaagaggagagtcaattgagtaatcagacgaaccctgcagagccatttggtgacaagaaaattatggttgttttagatgacctgtgggagattgatcaatctgaattagacaggttgagggctatattggtaaatgatgttggcattggcagtaaggtgattgtcgttgtaaccacccgtgagaaagaaattgcaaacaagttttgtactgttgcgccgttcgagcttccacccttgactgatgatatgtgctggacaataatcaaacagaaggttgagtttgatactagacctgacaaagatcagctggagcaggttggaagagagattgcattgaagtgtggaggtgtggcgttagcagctcaagcactagggtacatgttgagatccatgacagtcaacagatggaacacagtgaaaaacagtgatatctggaatgaaaacaattcggaagatagatccaaccagcatcacaatgttatggcatccttgatgttaagctgcaataacatgtctccatatttgaggttatgctttgcctattgtgcactatttgcgaaaggtcaaaagatagtcaaagatgatctgatttaccaatggatttctcttggttttgttgaaaaacaaggcatattctccatttgggagaatggtgagaattatgtttgtcatcttatggggatgtccttccttcaatattcaaagtcaccttcgattgttcaagtgcatcaagaggatgttacattgctgaccatgcatgacctggtgcatgacttagcaagatatgtcatggtcgacgaaattttagatgctagcaaacaaggcaatattactgggaggtgcagatgccgctttgcgctgctcaatgattgtaccaagccattgaattcactcactcattctcctacccaggtaagggcggtgcgttatctggaaaatgaagaaaatgtgctccgagatgcttctttttcatctgctaaatacatgcgcgtcttggatttaagcgggtgctccatacagaagttgccagattccattggtcacttgaagcaattgagatatcttaaagctcttgggatcaaggataaaatgatccctaattgtataactaagctctcaaaattaattttcctcagcatttctgggtcttcggcaatcttgacactgccaaagtcaattggagaaatggagagtctgatgtacattgacttgtcaggttgttctggattgaaagaactgccagagtcatttggcaaactaaaaaaattgattcatctggatttatcaaattgttctaatgttactggtgtatcagaatccttggagagtctcatcaatctcaaatatttgaatttatcatactgccggaatattggacaactacctgaagttatgggtaacctctcgaaactggtatatttgaacttatcaagttgctcctatatgaaagggaggttagaaacagaagttttgggtaccctcaccaaacttgaatacttgaatctgtctacagaacacttttatacggaaaggctagctcaaggctcgctgaattacttgggttcttcaatagatatcagtttcctcggttgtctgaacaacctagagcatttggtcttgtcgaagaacatatatcttaatggcgtcgtcttacctgactgttttgatacactcaaaaagctacatacacttgacctctcggattgcccacttttgagtagtttaccagcaagtataggtaaagctgacagcctgaagtttgttaatctgaatggtagtgacctgtccaaggtgccacaatggaacaaaaatttactcacattaccacgctttgtggtgcaacctaatgatgatggatcttctagcaaccttgttctgcttaatgatgtgaatcctcctaacttgcagataagatgtcttgaaaatgtgaggtcggtcaaagaggtccagaagatagaactgattgaaaagcaaagaatcaaagagttggaattgcattggactcaacatgttaagaggtctatggaggacatagatttgttgcgtgagctagttcctccaagatctctaaagaagtttcggatggaaggttataaagacaccaaatatccatcctggttaatggacatttccctttatctccctaatcttattcaaattaccatggcacaaatgcccaagtgcgtcaggctaccaccacttggccaattacctaatctggaagagttgtgtcttgaaagaatgaagagcgtggtgaaaatcgatgaggatttttgtggcggcccagggccatttcctcgactgaagaagtttaccatagaaggcatgccaagcctagaagtgtggaacacaatgtactcttgcgatgaggatagtgtgagcgagtttatgtttcctaacctttgtgaattggaaatctccaattgccccaaactgcagcttacaccatgtccgcctagagctaagaagtggactattgtgagaagtgatggcatcatatcctcatgggcaggaaatgcaccacacactagtacatcctgctccactcctctggtatcttctttagtggtccaacaatgcgattctcctctgcgtgagtggaggttgcttcatcacctccctgccctcaattatttaaagatccagtatttcggtgatcctacgatctcagcagagattattggagccctctccaccctccaatcactggctctggaaggcatctatagccatcagccacaactgccagattggttgggtcatctcaggtctctcaaggaattgaagataaagttctttgaggtgaaagcaacacatgagaacatcacgcgtctcacttcgctacataaactaagtctttcccgttgtgatagcttgacatcattaccgctgtgggtgggagacctcgtctctctccaggaattgagcatctcagattgtccaaacctgaatgatttgggagattgcatgggacgcctcacctctctcaagagacttgagatcaagggttgttatgaaatcaagtctttgcctgagggcataaaaaaactcaccatgctcgaatatatgttaatttttcactgccgtgaattaagggagtggtgcgaattagaggataacaagaagacgcttgctcatgtcaaacaaatcaaattgcgttaa

SEQ ID NO: 15181 - DNA, 3012 bp, Oryza sativa
  Clone ID: PAT_MRT4530_21049C.1
ctactccatctcgctcgccggcgtgcaccagcgatcgggagagcaggtctccggaacctctgccttcgacgttctgcaccgggagaaggcggcaataaggttttttgggaagcgcttcgcgcgactgctccctgttcgttcgcgacggctcgccttcctcttcgctcgcgtgtttcgtgtcttcgtagacacctcgaggtatcggtacctcacgataccaaatcgtttccgatcatcgtacctcgaggtactttttactgaatcgcgataaatcttctccagctccattgtagggttgttggggtttaactggagcgatctcttaattgcaatctctgcatcatccgcctcccctgtcttggaaccaaaacaccgcatccaaacatcgacatgctcgagcgaagagaggttctccagaccgaagtcgaaatctccaaattgacccattgtctcacttactccaaagtataaactcagatccctgaccttctgcatggctccttgcgcaaatcccacatacatgctgctgctcgctaaactgaactgtgttagacacaggaatggacagcctttcccaataaccaacctcttgtttttgtcatgtatggctttgttcaccgatatagatatatagagatcattgagatgtggtatgctcccaagaacttgcagttcgtcttctccaagtgttaataatatgagatgcagggaggagagggagcagagtgaggacatccatcctggaaaagcggttaaagtgcagaatgacatgtcaatggattgaagccgttgaggcccaggcgataaactgccacatgtggaacctagtgttccatctacctctaggagttcaaggcttactaggttggataggcactggatgaaaggtttctcatagctctcatcccatttatcgaagtaaattgttaagcgcctcagcttagaaagacaacctagatcgtgcaacatggttggagaatcgatagtgataacattaggaatttcctgcagcctgtttagactcccaagaccgtctggcaatctcatcatattggggaaatgcaggtacaccagctgttttagttgaataaaggtcggtggcagctctttgatattagtgatagatatgtccaggacctgtaaaaactgcagatttgcaatctcttttgggagctcgcttatacttgtaccatatagccgcaaatacctaaggtgaaacaacttgcagatatccttacaatgttgattctcaactttgtcacaaccactgaaatccagtacacgtaagaatgggcacatgcttggtagagttggcagtagactactcagaccttgcccacacacagtcagtgacctcaaatggcacaagcttatcgtagccaactgcttgacatactcttcctcgtttgtttggatggacagtcggcggatcttttttggtagagacaaggacgggtgtccatctaatcttgttaggaaatgctcctcatttgatagggacgtgatgagatcaagcaccatgtcatgtacacgataatactctgggtaatcgttaacaatatcacatgctggttggatcatacccttgttcatgagctcataaatgtattcccctcctacttgataaaaactactgccctgtttagtctcaacgaaaccttcgcctacccatttccatatcaaggtctccctagtactcagataatcctctggataggaacttaaatacaacaaacaagtcttcagatgtggagggaggtcatagtaactgattgataatattcttctcatgttcctcaaatcaggactgtcctcaagcccagaacccatggaatggtacaccttataccagtattcatgttgattaccttttttactagccaacatactagctatcgtaatgatagctaatggtataccaccacatttcttcaaaattttttgagatacttcggataaatgataaggatgacatttgtcttccgagtgaaatataatttggttgaatagctttattgaatcatcaggtgaaagaggctcaagcttataagcaccgccaacttgttcggcaacgtctacagctcgagttgttgtaattattctgcttccaagttgattatcaaccaacacatatttgattgttttccacacagatttgctccatatatcatcgataacaacgatgtacctcttgttttgaaggaatttccttagttcatcaataagctgcacttcttcccatgtttctccgttaatgttcaagtacgttttctcgtcgagctgacggagcatgttcttgaatacccccaccatgttaggatgaagagatatagaaacaaaagccccacaatcgaactccaatttaagcttgtgatacacaacactagcaagagtcgtcttgcccaaacctccaaaaccaacgatggagacaaccttcaagtttcgcttggactctacatcatcatgcatctccatcagcctactgactagatcatcggtcttcttcttggtgccaacaagctccgaaacattcttatacagtgctgactgcaggcgaaggctatcgacagtttggtgaccgacaggcctggctactgtaacaccatcaaccttgtacttatcgcgcagctcactcacctccttgatgtggctcttgatgtctctgatgttggcaccgatcttatggcgaatcttgaacttggtcaacaggttgaggcttctgtcgatgaagcccctaaagctgcgatgcttgtcgaagtggaccatgaagctgtcgatggtgtcctcgatgtcgtaggagagctctctgacgtctctcacccagagcttgacgagcttgttgggttcatctgactctgagatctccaggatggcagcctgcattcgctccagctcggccataaggaacatgatctctcccctgacggtcttatgcagctggtactccttcctgaggacctcacccagcttcggcagcagggtgctgatcgcgcccgtcacaatctcgaccat

SEQ ID NO: 15182 - DNA, 402 bp, Oryza sativa
  Clone ID: PAT_MRT4530_2104C.1
gtttgctgtcgtcgttgtgttcttcggataaaaggatttgggttgcaatgctgttgtatggggagatcgtgatgcggggcaacgccgtgatgaagggctacctgaagaaccccaaggcgaacgcggaggcgttcgccggcgggtggtaccactccggcgaccttggggtgaagcaccccgacgggtacatcgaggtgaaggaccggatgaaggacatcatcatctccggcggggagaacatcagcagcctggaggtggagaaggtgctgtacgcgcacccggcggtgctggaggcgtcggtggtggcgagggcggacgagcagtgtggggagtcgccgtgcgcgttcgtgacgctcaaggaaggcgccgacagctccgacgaggcggcggtggccggcgaca

SEQ ID NO: 15183 - DNA, 137 bp, Oryza sativa
  Clone ID: PAT_MRT4530_21050C.1
gtgaatgggtaccctcgggcccccggaaaaaaaaaaagaacccttggactcacccgctttgcttcctcccctatttcagctggggtaagctaagctatggggttcgtcaccgcccgcaccccgatccgcagcccccc

SEQ ID NO: 15184 - DNA, 735 bp, Oryza sativa
  Clone ID: PAT_MRT4530_21051C.1
atggtgagcagcatgaagcttcctttggtggatggggaggagcagtcgtcctatgaccccatgggggaaaagttgaagatgatgagcggcaagattatttcggaggagcagcgtctagtggagttggagttggagttggaagatgaagaggaggtggaagatgaggagttggccgagctgataacggcgcgagacttccgtgtcagctgggaacatcgctttacccctcgctattccttcaacgacaccacaaccgtatgtcccatgcgctatacggagggacctatcccaagatatgcttgctgtggtgataccttgcagatcttctctctccaagtgaaagaagcaaaaggtggtcttgactggccgctgcatgtgtatggcttggttgccaccagggactctgtagatcaaaggcgcaaccttcttttcaggtgcacaagggataattgtcaaattctcactccacaggattcacacctgctgttaacaggcccatctcgtgcagttgtggtaattgatccagtaacgtttgaagttgaactaaaggcctgcaggctgcagctaatccaatcccgaccaagaagcaaccggttcaattcattaacaccaattaacatatggatggatgcaatcagcaagatgcaaaatgaacaagatattttccccacaagcatctgggactggaagggacatgacatgcccacccttgttatcgtcaaatatcaatcttga

SEQ ID NO: 15185 - DNA, 243 bp, Oryza sativa
  Clone ID: PAT_MRT4530_21052C.1
atggtgccgccgtcgtcaagccaaccaaaggccagcacaggctttcgccagcgtcatccaaaaccacacaacccatccacacaacgaacgtcgccggaccgccacatcgtccctttagccgccaagcctagcccaccacccatagctcaggcaggctcacaagtccgccaagccgccgccatccactgctgcaccgaccaccggccgatgcggccatgggaccggctgtcgaggctcggctag

SEQ ID NO: 15186 - DNA, 323 bp, Oryza sativa
  Clone ID: PAT_MRT4530_21053C.1
agtaggaaccagacacaaaggccatatatgcaaccggaataacagaattacaactgcactggacggattatattgttcacaagcgaaaaagtaaactaaggcccagatcatcagggtcgttacaacttacaacggggtagattgggaaacaaaatgcaactgattatcccaactagcattagcagagggggcgggtcctgaagaacaccgcccacgttttatgctcaagctggacaaagaaggccggtatcgccggcccggcggacggggaataccatgggaagcaaggggatagtactgccgctcggcccggtggcgggtca

SEQ ID NO: 15187 - DNA, 450 bp, Oryza sativa
  Clone ID: PAT_MRT4530_21054C.1
cccacgcgtacctcctactcttcagacacctccgatatctcaactcatgaccccttgagagatgttgttatcgagaaggacaccatctacatcactaacgctattgtccacttcctcaatgcacatagaaagtccattacccaactctaacatcttcatcatcaacatttacagttacatcatttatatgcatctacagacatttgaagaattcaatatctttcattccatattgactcctttctacgtacatttcttaacccatttcttaatcttattaactttttccatttttccttcccatttcctgttttcatgtttacaaacatattgcattaaccttaaataaattctatttcctttaatacttttgtatcaaatcctaaatcctattttttttatcaatatactacttatttatctcttctaatctaatcattttctacattt

SEQ ID NO: 15188 - DNA, 117 bp, Oryza sativa
  Clone ID: PAT_MRT4530_21055C.1
atggtttcttcggggttccacgccgaccaaatggaacatagagatcctccaaacgagcagctgcaggcgtgcaggcctcttgcagaatcggaatatgagagttatttatgtgcttaa

SEQ ID NO: 15189 - DNA, 936 bp, Oryza sativa
  unsure (1)..(936): unsure at all n locations
  Clone ID: PAT_MRT4530_21056C.1
tttttttttttttttttttaaaccattcattctgtgcaaagaacattttcatagtgctctctgtttcttttcttgtcgcgcttctgtgttcttggggtggtgtggatctctttttggaagaaaatagggctaggaatattgagctgagctgagctgagagtggcatttgcccattacaaacctccattagttacagacatcaacctgtgatggggactgttccccaatccccattagacgtttcgtattggcagtgtataataaaatcaggcaatataaatggccaagaatggcaatgtgatgatggtactctcccaaaaacttctaatccatacatgagagcaaaggcggagaggaaggtggattccactagctagatacgtacatccaccacttgtaaaggccaaacccatagattgtcgtaagcatagccatccttaggggatagggcttaaatttccagacgtcgtgctcgcgatccgcggcggcttcggcggccgtgcggcgggaggccggcatcggggtgagccactgggagtagtcgcggtcgaagaactcccagtcggggagcagcacgcccgcgatggccaggattccgaacccgtacgtcgccgccgccttccgcaccgacgccgtcaccacccccgtcaccaccaccgccgccgctagcgccaccaggctccgccgcagcatctcgtccctccccatcccacccaccgccgctcccaccccgtcgtactcctcctcctcctcctcctcctcgaagcttcgcggagccgagtcgcgaggcaggacgaggagagagcgactccgcggttacgcctccgcgcgcgcgcgcgcgcgatctctacgccctcgccgccgccgccgacgccgacgccgacgcccgccgcgcgccggggnttcactgctcnagcgggccccgtgggtcgaccc

SEQ ID NO: 15190 - DNA, 306 bp, Oryza sativa
  Clone ID: PAT_MRT4530_21057C.1
ctccacctgctcaccgacgcggccacgcagtagtcgcggagaaaagaaaccgaaaagaaaaaaaaaaatctagctacgcatctcggcccggcccccccgccgccgcgcgctcggatcccccgacggctcgccgccacggcgccgccgccgccatgagcctcgcctgggggggccgcgcgttcggtggcttttccgcgccctcctcctcccgcgcgcgccaggggtggtccctcggtggactacgcgggaccaccaggtcgccgacgccgacgtagaagccgctcgcatcgctccatgaggcagaag

SEQ ID NO: 15191 - DNA, 420 bp, Oryza sativa
  Clone ID: PAT_MRT4530_21058C.1
atgcaatggatcaccacggtcgtgcgctcgtgcccgctatgcgtgctgctgctggtgcaggtcacacactggcccaatggcgataaggaacttcttcacaggcgagacgtgaaatacagcctcactaaggcgcttgtggcgttctacccgttcgccggccagcttggcgtcgatggagctggccacatccaaatcgactataccggtcatgtacctccgaggctccgatgtggcggcgtagtgctcagcctggcgagcattgcccgtgcctccgccgaggcgctgttgccgccgacggagacgccgcacctgtatcgggactcggatgtgcttcgaccacaagctgctcaccacatgtgccacgtgtattatgctaggtcgctaggaccactcaagcagcgccgctggcatatgcggtga

SEQ ID NO: 15192 - DNA, 453 bp, Oryza sativa
  Clone ID: PAT_MRT4530_21059C.1
atggggagggacgagatgctgcggcggagcctggtggcgctagcggcggcggtggtggtgacgggggtggtgacggcgtcggtgcggaaggcggcggcgacgtacgggttcggaatcctggccatcgcgggcgtgctgctccccgactgggagttcttcgaccgcgactactcccagtggctcaccccgatgccggcctcccgccgcacggccgccgaagccgccgcggatcgcgagcacgacgtctggaaatcgaagttggctgtcaatcgctacattttattgaactatcaattttatccaaatgaatttaagccctatcccctaaggatggctatgcttacgacaatctatgggtttggcctttacaagtggtggatggttgaacggcttgttcaacgtgatgccaggcttatttctggtgtgattgtactttccctccagctgatatga

SEQ ID NO: 15193 - DNA, 273 bp, Oryza sativa
  Clone ID: PAT_MRT4530_2105C.1
atggtttggggaggcagcgttgtgaccatcggtcacaaggtttcccccgagcacgtgtcggcggcggatgggatggacggcgatgaggtgggccaggatgtcgacatcctctacagaaggaggcttgcaagttttcatgggggagggctccggtggactgggagcatggtgcaggagggaaacgagcgaccttgctgcttggtgagaggatggggtggcgacgaggttgacgcggtggtgtgcatgtgcagccggctgggcaaaaggaagtga

SEQ ID NO: 15194 - DNA, 753 bp, Oryza sativa
  Clone ID: PAT_MRT4530_21060C.1
gcccggggttccgggcgctgcactgacgagcgttccagccggatcgcatgctggaggcggcctgggcgcatcgacaaccccgcgctcctctccgaatgcgatgccgttcagcctggcgtgtgatcatgtcgcagctatggcggttcgggtcgtccttgggatgggatctccccatgttcaaggtggtatatactgttgcagaacgaaggttcagcggctcgagattcctgaaggacctcttggcaagttaattcgcagattgttgggcagagccccaagatcggccgagctgtcaggagatccttacccgcttgctcgactgcgaatatgccgtcagctgaagtcaagctgacgaaccagctcactccttgcctgcagaggccgataagtttctcctgtaaaacctgtaaaaattagcctgtggattttgcaaaccggcgagggtacacatattgacttcttatattgcggctgtataaccgcgaaccttcatgaatgtacaaaaagaatgtgtctccgcttatagaagaacatgccttgaatcgcaggaactagttttgctgtcatccttcatcaggaccgttgcgtgtcctcggatctatcatttgtttctctgaaagttttggccggggtactcggtaaaagttgacatttgagatcttccttgagatgcaaccaattgacagagtacctgtgttttctgactttattatgactgaatgtactgctcggtacagtaaaaaaaaaaaaaaa

SEQ ID NO: 15195 - DNA, 132 bp, Oryza sativa
  Clone ID: PAT_MRT4530_21061C.1
atggcgccatcatcatcgccaccgacgccggactgccgcatcatcgccgcctctggccgcccttgccactggcagtgccagtcgcaccgctaccagccgtgccacccagattacaaccctggccagatctga

SEQ ID NO: 15196 - DNA, 375 bp, Oryza sativa
  Clone ID: PAT_MRT4530_21062C.1
atgggaggggtcgggcaattactcttcccgatcggcttatcaagcattgttcctagggataacccggttccagtctaccccgatctggaaatctctcgctccacctcgatgctagtacttcgtctgctttgcgatagccgaaagagattgaccaaggcagctcggcgtggtttcgacaccattgcaaccctcgtcgcctggacaatctggaaagagaggaatagcagcgttttcaatcagcagcaaaagacttgggcggaagtggcaagggcaatggccgccgaagcagaactctggagacttgcgcgagcagccattccggagttcttgccacagccaactgtcgagaggtcgcaacatcggataggagaatag

SEQ ID NO: 15197 - DNA, 844 bp, Oryza sativa
  Clone ID: PAT_MRT4530_21063C.1
cagccgaccgattgcggagtcggggattgccgcatcccgaccgctgcattctctatgttgcgacctctcgacagttggctgtggcaagaactccggaatggctgctcgcgcaagtctccagagttctgcttcggcggccattgcccttgccacttccgcccaagtcttttgctgctgattgaaaacgctgctattcctctctttccagattgtccaggcgacgagggttgcaatggtgtcgaaaccacgccgagctgccttggtcaatctctttcggctatcgcaaagctagaggtggaaggagacttcgttcgtcggcagagaacttgtttgtccaatggccctcagtgccatccaccacaactagcgggactttgggcaagcgaccaggagatgatcgatgctttcatcgcattgatcgcataggacacatcggtcggggtgtggcagcccgcgcctcctcaatcgatcacccgtccagcacctgttaagcgccactaaccagacgaagtactagcatcgaggtggagcgagagatttccagatcggggtagactggaaccgggttatcccggctggtccgtgaggtgcactgcacgaatgtcttgccacagggataaatactcaagaatggcttgaataccaagggcaccagagatgtccttgatccaccgcctatcagacagagcttctgcgaccgttctttttttgcgaatgcgagccgggatagcagcatagagagccggcgccttgcagcggatggattctccctgcagccagttatcctcccagaacaaggccaggtgagtggatgcagagacagtgagagggggggggggggggg

SEQ ID NO: 15198 - DNA, 156 bp, Oryza sativa
  Clone ID: PAT_MRT4530_21064C.1
atggctcctcgaaccgtctttgagaagaaatctcatccagctgccgtgtctaggtggtcatgggacatgggaaaacttgaaattcttccgcgaagggcgctggttttgcccatcggaaagaactttgagaggaatgtcgtgaagcatctatcccag

SEQ ID NO: 15199 - DNA, 433 bp, Oryza sativa
  Clone ID: PAT_MRT4530_21065C.1
gtaacttctacagaatcaattgtattatgcagactaaacataatactctgtcctgcgatatagaggaacatttttctcctctaagggctctatgtattcggtcttctattttgactaattggagatccttttgcatttcctttagggcacaatcaaatcacatgacataagcaccagagagatgatgacctttttggcacgggggtaccaaccaaaaagtgttgggttgattgtcgaagctgtccaatgcctctataccataggtgagaaagaaatatggacacatgccttttgcatggtttcgaaagatggaaaatttgggatgtccttgctagccatgtggctatgtaattaataatggaataactcgtgatgtcacccttttctttaatattgacagtgactcattttaacaagaaaaaaaaaaagggga

SEQ ID NO: 15200 - DNA, 1118 bp, Oryza sativa
  Clone ID: PAT_MRT4530_21066C.1
ccatttagtttctcgtatgtgttgaagaaatttccctgcattttgaattggataggacacacgaaggtgagacgtcgatcagttgtaccatctctacacaaacgatttctctcggtgatggttgacagagttttttgtaaatgtgctgagagattagtggagaagcttgagacatctgctttaagtggcaaacctgtaaatatggaagcaaggttctctcaaatgactttagatgtgattggtttgtccttgttcaattacaattttgattccctcacatcagatagccctgttattgatgctgtttacactgcactcaaggaagcagaacttcgttctacagatcttttaccatactggaagattgatttgctgtgcaagattgttcctagacaaataaaagcagaaaaggcagttaacatcatcaggaataccgttgaggacctaattaccaaatgcaagaatattgtacatgcttttaatttacaaattgagggtgaggaatatgtaggggaggcagaccctagcattctgcgattcctacttgctagccgtgaagaggatccagcagcgctgaggagagctcaagcagaggttgaccgtgttctacaaggtagactccccagatatgaagatctaaaagagctgaagtacttgatgcgctgtataaatgagtctatgcggctttatccacacccacctgtgttgatacggcgagccatagttgatgatgtgcttcccggaaactataagatcaaagctggtcaagatattatgatttcagtgtacaatatacacaggtcacctgaggtttgggacagagctgatgattttattcctgagagatttgatttagagggacctgttccaaatgagacaaacactgaatacagatttatcccattcaggggaggtcctcggaaatgtgttggagatcagtttgctctcttggaagcaattgtggcacttgctgttgtgttgcagaagatggacattgagcttgtgccagatcaaaaaattaacatgactactggggccacaattcatacaaccaatggcctgtatatgaatgtaagtctgcgtaaagttgacagggaacctgattttgcactcaggtg

SEQ ID NO: 15201 - DNA, 439 bp, Oryza sativa
  Clone ID: PAT_MRT4530_21067C.1
aacagttaatttgctttattaaacaattgcttcagtgataggtgacccagcctcacgctacaagatcttcttgaagctgtaaaactacaccatcgcggctatgctacacccattagcagaaactaagggaacaattaggccctgtgcataagtaccactaacattaccatgctaatcgaactcacttattgtgccgggatctagcagctgttggcgtaaccccacgctgatcatacaatgacctccggatagatataggtgaccaggaggacggacatattgagcccatatccgaatttgccagataacacggcggcgctgaacttgatgccgatgactaagttaatggatctagagagcatcgcaagcgtgcctacccacaggggggaccaggtccaatgtttccagcctttcgactcccagtcacgcctcaaaaaga

SEQ ID NO: 15202 - DNA, 306 bp, Oryza sativa
  Clone ID: PAT_MRT4530_21068C.1
atggaaagaggagatgaactttcgcgccaattaaattgcacgtacgtggtggtgccgcagctgatcagctacgtgcacgtaccgatcgacatcatccacccattgacttcgcagttcgtagttcgtacacgcaaggggctgctgaggtcggcgaccgtgcaaataggatggatggagttgttggcaccggcggcagccggcagggagagagacaactggacaaggagaggtgcaatggatcaagtgcctcccactgcgtgggcgatgaagggacatgcaccagcgctggatgggtccggcgcatga

SEQ ID NO: 15203 - DNA, 1596 bp, Oryza sativa
  Clone ID: PAT_MRT4530_21069C.1
atggccgccgccgccgccgccgccgtcccgtgcgtaccattcctgtgcccgcctcctccgccattggtctcgccgcgtctccgccgtggccacgtccgcctccgcctgcggccgccaaggagcagcggcggtggaggcggaggcggagcggggggagacgagccgcccatcaccacctcgtgggtgagccccgactggctcacggcgctctcccgctcggtggcaacccgcctcggcgggggcgacgactcggggatccccgtcgcctccgccaagctcgacgacgtgcgggacctcctcggcggcgcgctcttcctccctctcttcaagtggttccgcgaggaaggccccgtctaccgcctcgcggcggggccgcgggatctcgtcgtcgtcagcgatcccgccgttgccaggcacgtgctgcgtgggtacggttcgaggtacgagaaggggctcgtcgccgaggtttccgagttcctcttcggctccgggttcgccatcgccgagggcgctctctggacgtttctcgtatgtgttgaagaaatttccctgcattttgaattggataggacacacgaagatagccctgttattgatgctgtttacactgcactcaaggaagcagaacttcgttctacagatcttttaccatactggaagattgatttgctgtgcaagattgttcctagacaaataaaagcagaaaaggcagttaacatcatcaggaataccgttgaggacctaattaccaaatgcaagaagattgtagatgctgagaatgaacaaattgagggtgaggaatatgtaaatgaggcagaccctagcatcctgcgattcctacttgctagccgtgaagaggtaaccagtgtgcagttacgtgatgatctattgtcaatgttagttgctggtcatgaaacaacaggctctgtactgacgtggactatttatcttctcagtaaggatccagcagcgctgaggagagctcaagcagaggttgaccgtgttctacaaggtagactccccagatatgaagatctaaaagagctgaagtacttgatgcgctgtataaatgagtctatgcggctttatccacacccacctgtgttgatacggcgagccatagttgatgatgtgcttcccggaaactataagatcaaagctggtcaagatattatgatttcagtgtacaatatacacaggtcacctgaggtttgggacagagctgatgattttattcctgagagatttgatttagagggacctgttccaaatgagacaaacactgaatacagatttatcccattcagtggaggtcctcggaaatgtgttggagatcagtttgctctcttggaagcaattgtggcacttgctgttgtgttgcagaagatggacattgagcttgtgccagatcaaaaaattaacatgactactggggccacaattcatacaaccaatggcctgtatatgaatgtggtaaatatcggcgtacaggttgacgaagctcgaaagcatggatataattcgtttattgtttatggatatacgttgtatgcttatatatccccgagaatctggtccgcaatgcccgttctatag

SEQ ID NO: 15204 - DNA, 1964 bp, Oryza sativa
  Clone ID: PAT_MRT4530_2106C.1
atggcggcggagagggacatcgacgacctgccgcgggggggcgccaactacacggcgctcacgccgctctggttcctggagcgcgccgcgctggcgcacccggcgcgggcatccgtcgtgcacggccccgtgcgctacacctgggccgacacctaccgccgatgccgccgcctcgcctccgccctcgagcgccggtttttaccatgctatgtctcaatggaaactgaatggttctttctcttgatgctgatgggaaatgggaaccttccaaatccagtagctgtaatagctccaaatatcccagcagtctatgaggcccggttcggagttccaatggctggagtagtggtgaacggcgtaaacattccatcagttgctcgcccacgtaaatgtcttacggggaagatagcaatgcggggtcaactccgtgatgaagggctactctgaagaaccccaaggcgaacgcggaggcgttcgccggcgggtggtaccactccggcgaccttggggtgaagcaccccgacgggtacatcgaggtgaaggaccggatgaaggacatcatcatctccggcggggagaacatcagcagcctggaggtggagaaggtgctgtacgcgcacccggcggtgctggaggcgtcggtggtggcgagggcggacgagcagtggggggagtcgccgtgcgcgttcgtgacgctcaaggaaggcgccgacagctccgacgaggcggcggtggccggcgacatcatgcggttctgcagggagaggatgccggggtactgggtgcccaagtcggtggtgttcgggccgctgcccaagacggcgacggggaagatcaagaagcacgagctgaggaccaaggccaaggagctcggccccgtcaagaagagcaggatgtgagctcctcttttgcctctgcactcggctggttgctgtcgtcgttgtgttcttcggataaaaggatttgggttgcaatgctgttgtatgcaaactgttccgtcaaaactgatgtccccatcatttgtttcatcaaaaaaaacaacgaaatgtccgagacgtacggcccgtccacggtgtgcgcgtggaagccggagtgggacgagctgccggacgacgagcgcgcccgcctccacgcccgccagggcatccgctacgtgggcctcgagggcctcgacgtcgtcgacccgaagacgatggcgcccgtccccgccgacggctcgacgctcggggagatcgtcatgcgcgggaacggcgtcatgaaggggtacctcaagaaccccagggcgaacgcggaggcgttcgagaacgggtggttccactccggcgacctcggcgtgaagcacaccgacgggtacatcgaggtgaaggacagggctaaggacatcatcatctccggcggggagaacatcagcagcctggaggtggagaaggcggtgtaccagcacccggcggtgctggaggcgtcggtggtggcgcgggccgacgagcagtggggggagtcgccatgcgcgttcgtgacgcccaaggacggcgccgacagctccgacgaggcggcgctcgccggcgacatcatgcggttctgccgggagaggctgccggggtactgggtgcccaagtccgtcgtgttcgggccgctgcccaagacggcgacggggaagatcaagaagcacgagctgagggccaaggccaaggaattgggcccggtccggaagagcaggatgtgagcccatcaatcttgagctctctgaatttgctgcgctctgaactgaactcttgttactgtatctgctatggtcatcgtcacatcatcgttgccacgaattttaggaccgtgttgtaaactgtaatctcatactttcatatttttgtatcacgaacacacctgatcctgatgagtgaatttttaaagagcttgaaataatacaaaagcaggtgaatgaaaaaaaaaaaaaaaaaaaaaaaaaa

SEQ ID NO: 15205 - DNA, 150 bp, Oryza sativa
  Clone ID: PAT_MRT4530_21070C.1
atggagaggacaaggagacacttagagaggggcttagaggtgtggaggatcagcaagggcgtccaagttaagatggagggtgttatagaaacggccgggcgggtccagccgtcggccatcaatggtgccggcatgccggcgagccattaa

SEQ ID NO: 15206 - DNA, 207 bp, Oryza sativa
  Clone ID: PAT_MRT4530_21071C.1
atgggacagggcatacttgcccccactccgcttgacacagggcgagacgtgggggcactgccacccgtccaattgctagggaccggcgctgagcagcgcatcctgctccgcccactctccctgccatgtggtggccagacgtgggcctcggggcagcacgcgccaggggacccgaggggcgtgacgtggcaccccgaggcctcctag

SEQ ID NO: 15207 - DNA, 399 bp, Oryza sativa
  unsure (1)..(399): unsure at all n locations
  Clone ID: PAT_MRT4530_21072C.1
aagtagnatctattattnataannatanaaatgggaagggatatagttatgtaaaaaattaaagggaatgagaaaaataggatgggttaaagatagttttgaaaaaagnngttnannttggtntatttnttttttttgtanttgaaaaaggagntnattagtagggttttttanatagttttnntggnattggggatgaaananaagngnatgaaattatatggtgagggaagntttttttttaagntttnanttgagttgtattnnggggtaattannagaaagtttattgagttgttannaaaatgatnagagntgataattagtgntttgtaagtgnatanatgaaggaggttttgtttggggtgtaaatggagaatgaaaatggtatgttgtaat

SEQ ID NO: 15208 - DNA, 140 bp, Oryza sativa
  Clone ID: PAT_MRT4530_21073C.1
ggcgcgcggcccgccctcccggttctcagggggggcacccatcgccgacccgagggacatgaattctgctcttgggtcgtcgacgcggcgcaaggcgcttagtggaggacgcgcgcacttatcgcgctccgggagagaga

SEQ ID NO: 15209 - DNA, 1387 bp, Oryza sativa
  unsure (1)..(1387): unsure at all n locations
  Clone ID: PAT_MRT4530_21074C.1
cggacgcgtgggcggacgcacgagggcgcattccacaccacccaaccagcgagagagagatggcggcgctccaccaccaggcggcggcggcgccggtgacgacgacgacggacgggggcgagctgcgggcgatggacctgtacgagaagctggagaaggtcggggaggggacgtacgggaaggtgtacaaggcgcgggagaaggcgacggggcggatcgtggcgctgaagaagacgcggctgccggaggacgacgagggcgtgccgccgacggcgctcagggaggtgtcgctgctgcggatgctgtcgcaggactcgcacgtggtgcgcctgctggacctcaagcaggggcagaacaaggagggccagaccatcctctacctcgtcttcgagtacatggacaccgacctcaagaagttcatccgcgcccaccgccagaatctccagaagatccccgtgcccaccgtcaagatcctgatgtaccagctctgcaagggcgttgctttctgccatggccgcggtgtgctgcaccgtgacctcaagccgcataacctgctcatggaccgcaagaccatggcgctcaagatcgccgacctcgggctcagccgctcgttcactgtccctctcaagaagtacacccacgagatcctgacgctgtggtacagggctcccgaggttcttcttggcgcggcacactactccactccggttgacatctggtctgtgggctgcatttttggtacggattcatgccttgacattgttgatatatcttgtgcattgcagctgagttggccactaaccaacctcttttcgctggagattccgaggttgctgggcaccccaaatgagcaagtttggccaggagtgagcaagctacctaactggcacgagtacccccagtggaatccctcgaaagtgtctgatcttgtccatggtctcgacgctgatgctcttgatcttcttgagaaaatgctgcagtacgagccgtcgaagcggatctctgcgaagaagcccatggagcatccctacttcaacgacgtgaacaaggagctctactgaaggtcgattgatgatgttcaccaccaaggaaaaaaaaacgttgtgcgtcttcgtgactagcctgccctgaagcattgcttttgcttctagggggaaaagtactgtttgtgtctgtttcctggatgctgcttagtgtgcttaagaattcacttgtttgtgatggtaatgagtaatgacttaagaattcgacaaaatctgtgtgtttatatgtttcataagtcgatcagttttcttgtttggttttgtttgttgtcgttaattcgtcaagtcagtcagcnngttntgtgngaaaaaaaaaaaaaaaaaaaaaaaaaaaaaaaaaaaaa

SEQ ID NO: 15210 - DNA, 696 bp, Oryza sativa
  Clone ID: PAT_MRT4530_21075C.1
caatccccaaatccactcctccctgccggctctcccctcctcccttcgctgacgccgactcccctcctccctccgccggcgccggctctcctctcctccgggcggtggctcccctcctccctccgccagcgccagtgccggctctcctctcctccgggcgtcgtcctcgaagaagcgacggcagcgtcctctgagccgtgcggtggcgtcgtcctcggggccgagctacgacggcgccctcgaagacggcggtggcggcgcggatctggagcgcggaggacggtgcaagcgcgggacggcggcggcggcgcggatctgggctcctcctctctcggccggcgacgaggagacgaagccgctcgtggtcgttgtcctcctcgctttgtctccactttccgccgccggcggcgaggagagaaggacggcggcggcgccctcggcgacggtcctcggcgacgtctcatctcctcgcaaagacggccccgcgcctgactttttaagcgaggttgctcgttcctctcctgggatgcgaagaacccagtgtagctatgggccctaccaacttttttcgccacatagactaggtaacacaccacgtaggactaggtaactcccactgtgaaaggcctaagcactacaacattttgacatggactccaccgtttctacataaataaacattcccaatactgaatg

SEQ ID NO: 15211 - DNA, 117 bp, Oryza sativa
  Clone ID: PAT_MRT4530_21076C.1
atgggggaagtggggaagctatacgcgtttgggtcgctggggactggggcccagagcccctccaccgcggttaaggtcgcatgcgttaatgggccgtggctttttggtctgtactag

SEQ ID NO: 15212 - DNA, 687 bp, Oryza sativa
  Clone ID: PAT_MRT4530_21077C.1
atggcggcatggatctggagggcgacgaaccgacgactcgacgaccagatacaacagtgggccccacttcttccccctctgtatcctatcccctctctcccaccatggaagtcccatgggagcaggcggagcggtggtgcaggaagtcgacggggcggcggcaggcagagtggggtgacggcagccggagcaacgacggcgcgcgaagccgaaggggcgaagcagggcggcggcgagcgaagcagcagcaatccactgtcggcgccgatctccacaatggaagtttgtgtcctcctcttcctccttctcgaacccatcgccatcgtcttcgtcatcttcaacggccacaatggcggggaagcaggtgggaagcgggagctcacccgttgtcgcccacggcaaggacgctgtcaaggtcagagagcagctcggaggatggcgaatgtggcggcgagggccgcgatggtgatggtgaggaatagaaaaaggataaaggatagaggaaaatggaggaaaacagaaggattcaaagcaaagaagacaagtcagagggactccagcaggaccgtcacgactcgtcccaaagtcgtcggactcgtccgcactcagcgggcccttgttcagattttcatgttgaaagacccgatgttttgtgatagattgatcaaagtatatgtagtttcgtga

SEQ ID NO: 15213 - DNA, 313 bp, Oryza sativa
  Clone ID: PAT_MRT4530_21078C.1
ttctgtgggtaggccggcgccgcctgccgacgggtggcgaggagaccgactgggctagacggtagaggaggtccggcggccggcggctgcggggaccgcgacgactcgagagcatgagagcaaggcggctgtggccgcgacgactcggcgccgatgtgcacttgctctcgttgaagattgggaggctcgccgtctcgtctgagtcgtgcctcccgactatgcgcctggcttgccgccagcgcggagatcgtcttcaccatgtagttcttctcggcgcccgcggggccagcgggcttgggcgccgtcatgctct

SEQ ID NO: 15214 - DNA, 851 bp, Oryza sativa
  Clone ID: PAT_MRT4530_21079C.1
ctactccgacgacgacatgaaagaaaccaacataacactattagtttttggctcgttgcctctctttgttgtggacgcgatgccgccacgaggccccggggagctttctactggtacgttctgtagcttcgtacgtccatccgggaccacgatcactggccgcttgatatctgcaacactaggcttctccggcggcggcgggatttggaggcggcgttggcgatggcatcgggctttggcggcgtcggtggcggtggcggcagcgtcggcggcagcggcgggctttggcggcaatggcggggagaggcagcccgattcattcgacgggcttgagcggttgcagctttcagcgcacacgggccgcagcgtcgtcggcaccatggttgagatgtgcttgcggcaaagccgctgcagtgaacaaatccaacaccccgaggaatccagggcggcggtggattcagtgcgggaaagagccaaagtgttgctcgttgtggatatgggaggatctgttgaacgaatatgtggaggaaatggttgcttattcccatgctggcgaggacgatggtctaagagacatgttgcgacagcttgcagaagagcataaggaagagaggtcgaggatgcagggtttggttgaggcaaaccataggcagatgcaatccatatatcagcagctgaatgattctaagaaaaagtgtgagcagctaaagaagatgttgaaagaagagaagtgtagtcgtagtagacaactttatgtgatgttgttcttgttggccataattatgtatttctatgtttggtctggcagctctggggccatgctgggtgcgtgtgggtacagcaagagctaa

SEQ ID NO: 15215 - DNA, 306 bp, Oryza sativa
  Clone ID: PAT_MRT4530_2107C.1
atgccgtcctcccttgctctccctgccgcttcctcctccccctccctcccctgctatgatggctcgcggcccgagcctcgccgtgccgcaactgcccgcgcaccgatgcctctcgctggatctggcaagctcgtcggggaaagggagaaggagcctggggaaacggcggcggcggcggcggccgaaagcaggtgcggtggcatgaggttggaaatcgatgggatgccactaatctggtcgcagcgcaacaccccatttgcgagatcagagcttgaggttgacggcgaggtggttgatcccggctga

SEQ ID NO: 15216 - DNA, 778 bp, Oryza sativa
  Clone ID: PAT_MRT4530_21080C.1
gctcaagaccccgcgcgtgctggccgccgcctggtccccgctcgccgcggtcctcgcggcgtccaaggccgcctccaagtcctacaaggccgcgcgcacgctcggccccgccgcgcgcctcccttccctcccctccgacaagcgcctcaaggccgccttcgccgccgcctcgctcctccgcctcgccgccgccgcgccgccccccgtcgcgtcccccaccggcgtcgcggccctcgcgatactcaagtctgggtacaagctctccaagaactcggccaaggtcatcgagggtttcctcggcctccaggtgcacaagggcatcaggaatggtgtcgacgcgctcggggtggtcgtcaaggtcgccgtcatcgcctccgaggtcgccgtatgggtcggcggccgatgctggggcggccggcgtgggcgctccgtgcgatttctctgctctacccgcccgagcggtttactccttgttcggtacagcaaatctgaagcccaagttgtgctctttgatcatggacttggaatagctgcgatggatggagatgagaagcagatggaggagcaagagggctctgatttactctgcctcgcggtacctgtgcctgaggcaacaaattattagtgagttagcacttggcacaaaactgttgtacaattgcatatatcagatattgtcatgtagagatggctttgaattttgattgaatgtttgcttcctttttttcgtttgttagttaagtttggctaatgaaactgtgcaacggtacctcagttc

SEQ ID NO: 15217 - DNA, 510 bp, Oryza sativa
  Clone ID: PAT_MRT4530_21081C.1
attttgataatatgtttgaatatattttgataatatgtttgttgtcttagaaatgttactatatttttctataagcgtgatcaaactttttttaaaaaattaactaagaaaaaaagtcaaagcgatttataatatgaaacgaagggtttactaatgttgtcactgcttgagtaagcggttctctggggattgtagatttggaagaagcaaattcaaacctatgcaggttgagtgcatgtcttggaattcttcgatcatgaccatttttattcggcttgaatagtacagcagtaataggatgtgtctacactaaatattacaaccaaccaacagaagaagcaatggcttgccatgctcatgcctatgaatcacactgcatcctgttatgtgaatgaactgcttattaatgtagcacctttattctagtttacatatattcttgtattattagagattaggacactgaaataatcaatctcttcatatacatgagatgtccctgtatcatta

SEQ ID NO: 15218 - DNA, 153 bp, Oryza sativa
  Clone ID: PAT_MRT4530_21082C.1
tcagtgatcaaggcccctacagggcttaaatggctcggcccatctatctggcgaaatcccctgaggacgtagcggcccgctaggcctcccgacaacgaggttcggtactctggcgaaacccgtgcccgtgtgcctaggctttcgccgcatcat

SEQ ID NO: 15219 - DNA, 489 bp, Oryza sativa
  Clone ID: PAT_MRT4530_21083C.1
atgtatacatctaaacaaccctttcataaatccaaacaaacttttcataaatccaagcaaacttttcgtaaatccaagcaaacttttcgtaaattcaaacaaccttttcgcaaacccaaacaaccttttcgtaggcgtcctcggattggcccgggggatcgaattgattatagaaacatgagtttaattaatcgatttattagtgaacaaggaaaaatattatcgagacgaataaatagattaaccttgaaacaacaacgattaattactcttgctataaaacaggctcgtattttatctttcttaccatttcgtaactatgagaatgagaaacaatttcaagcccagtcaatttcaataattacaggtcctagacccagaaaaaatagacatattcctccattaacacaaaagttcaattccaatcgaaacttaagaaactccaaccagactttaagaaacaacaatcggaacttaagttccgattgt

SEQ ID NO: 15220 - DNA, 755 bp, Oryza sativa
  Clone ID: PAT_MRT4530_21084C.1
ccgccggagctcgccggcggcaaagccggcagcgagcagggaaggcggcgacgagacccttccttcctggcgactcccccctggcgcgacgtggacgggacgacgccggcgaagtccctccaccacggtcggaggtggcgacggcggcgcgatgcggggaggcagcagatccggcgcctccaaggccggatccggccaccccgcgcctggatctggtgcgacggcggcgtgaggtggctggggggcggcggcaacagctcagcggcggcgtggccggcccggtgcggcagcgtgggcgcggtggcggcggctcgacggctgggacggtggcagcctggaggcggtggcggctgggagcggcggcagcagcacgggcggcccggcctcggcagccgggcagccagggtgccgctgcagtgccctcctcggccaggtgggctgtgcggcgcggccagatggggtgcggcgaccgggtgacggggcgccggtgggttgtgccggagccgaagcagcagtagcttcactggcgtcggctcaagcccagatggcagtgtaaagggagctggtggcggttggtcgtcttctccgttgccggtcggcaccctcgcccttcctggagctcctccccttctctgtggggacggcgggtggtggaacggaggggtcctgggccagctctcaggggcggtggttgatgttggctgacggaggggcgtcagtgcagtgtggttcgatgaagtcagccgacggaggag

SEQ ID NO: 15221 - DNA, 838 bp, Oryza sativa
  Clone ID: PAT_MRT4530_21085C.1
ggacgggacgacgccggcgaagaccctccaccgcggtcggaggtggcgacggcggcgcgatgcggggaggcagcagatccggcgcctccaaggccggatccggccaccccacgcctagatctggcgcgacggcggcgcgaggcggctggggggcggcggcggcggcggctcagcggcggcgtggccggcccgctgggaggcggcagctcggcgtgcggccggtccgggctgcccgggctcgcgcggctcggcagtgcggccgaacggcagcccatggcgcggctcggcggtgagccgcgagcccccatggcgcgggcaggcctcggcagccgggcaggcagggtgccgccgcagtgccttcctcggccgggtgggctgtgcggcgcggccagatggagcgcggcggccgggtgacgggggcgccggtgggttgtgccggagccggagcagcagtagcttcactggcgtcggcgcaagcccagatggcagtgtaaagggagttggcggcggtgggtcgtcttctccgttgccagtcggcaccctcgcccttcctggagctcctccccttctctgtggggagtttctgggttggattgaggcggcaactcgtcagcgggggaagcccagactgccaaagcaatgccatccagtcccgggttctcctttcgtccaaagctggcgaggaggccggcgggtggtggaacggaggggtcctgggccagctctcaggggcggtggttgatgttggctgacggaggggcgtcagtgcggtgtggttgaatgaagtcggccgacggaggggcgttggtgtggtatggcggaagctacgtgctaccat

SEQ ID NO: 15222 - DNA, 243 bp, Oryza sativa
  Clone ID: PAT_MRT4530_21086C.1
atggcgacggcggcgaaggcgttctggaacagccccgtcggccccaggaccacccacttctggggtcccgtcgctaactggggcttcgtcctcgcgggcttagttgacatgaacaagcctcctgaaatgatatccggcaatatgacagcagatgttactatttttttctataaacttgatcaaattaaatggaatcttgcacttagacaggctctgcatcctggcgctcacggcaacccctaa

SEQ ID NO: 15223 - DNA, 3679 bp, Oryza sativa
  Clone ID: PAT_MRT4530_21087C.1
ttaatctaagcacatgcaacactgattggctgtataagacctttttggtgttgtgtcagtatgttccaagccaaggtattgttcccaagctccataaacatctctcctcttttttttttttttttgctaacaggaactgaaagctgcactatctggcaaattattctcttacattttatcaatagacatggaaaattggaaccaacaccaaaccccattatacgattctcccactgctccaaggctaacagaaacgggagaagcaaataaagcaatcagtcacggctataattctgtatacatgcccctaccaaaatctttttcttatgtaccagctttgctctacacaaataaagcaacatctaccttatcctagcggggccatcacactcgacacaattgttttgcccggaaacaagatggaaagccttgaaaaaaaaatccctgacgcccactacatcacgagtaagctgcaccaacggcgtcaaccagcgggaagcaatataggcctcagcgtaatggccatatgttttgttgccatgtttcttctgttgaggttgtcttactttgtgatctctctttggcatggcatgctatccagacgaggcctttgttcagggcttcaagcccagctataaatcttctcaattataaattttcacaggcttctcaaaagtgagacaagtctgattggcttgcaaatccctttttagcattatcttaagtatgaagattcgaaaatatcatacaaaaattctattcctttggcttctccgaaaacgtgaagttcaaaagtcgacatctatgcacatactccaaaaatgaaggaacgtctggataccgcacttgagtctccccatctgacacaggtgacttttggaaacatattttgtccccaacatcacgcttactgttacgcatagttagtttactatcaaagagttcgctcaacacattcggatcctacttaatttcattaggatccttaatgaaatcataaacatgaatcaccggcatttcgtgggccaaggttcttctcttcctcgggtatctcgtaggcacgtagtgtccagtactgatcatttaaagttcttccttttcagggttataaagtttaaagaaaagtagtatatcctccttgctcttctcaggtggacgaatgggccgcagatccactccagtctctacttccagaaacaacttcaactcagcattgtgcgccttgttagatacctccctaagttgccccaccttttcatggtccaccagatcaagatatatattcttaccaatctgttccttcaaatcctcatctcgggcaacctttatgatggtgtagagatgagcttcagctttttccttcttcttgtgttccttctcttcttgttctttcttcaaccttatccgcaaatgctcagcgatgtccttttcatcaacattacacattattttatccttgtcgctctcacgaatatagacaagcatgtaggcattcgaatactttgtgaatttaaatggggtgttattgaaaccagggtttatttgaggcaactcttcttcacccccatactgctcttcaagggcttttttggtatcttcttttgttactcgttcatcatcaaatttatacctgtgaagagtgtaaaggtttctaatgcttctatctgcatcaggagcaagatatttcccatcatctctgtcaagatcaagttgaagtgggaactcataccggtcattaatcttgaccattgtatctcgcatgtaatcatattcaaaacgcttcagttgaagttgcaaaacaggagggaaatcaaggaagagtactcccttctttgcatcctgtaagccatactgctctgcatgatatttgttatcaccctctagacgctccacttcgacatatttatcaaatgatgcataaacatcactacaacctttgacatcaagctgtagatcataaaaggattcttttctgttagatttataatcaacattaatgcactcgatatagtttatgtggtggccttcaaataattgttcaattgttccttccacaacagtttccttcattttgtcttcaagtttctcacaaagaactctgttaagctcttgaacatcatgctgcatgaaagaatcataagtgtcccatccaaaagatttggtcaactcctttgtagctacgctattgtcgctgtattggagcttgtaaaaaaggctctgcagggctaaaggaatactcccagatggcatgtcattctcagtagttggcatatgatatacagccttcctgaaatatggtatatggtacagtgtttgtagaagagagttcatataacaggtagctccttgattctttagaccaacatatcctgtttcctttttcgagtcataagtccagtaatcaaccattctgcgaacagcaacctcagcttccacaacaacggtgtcattaacaaggtagcccctacttgggtcatacagatcactcaaaggcataaaagatgtgaaaccccagtcactctcacgtgcattaaattgatgttgagtatctttccgaatggtatacttcggatggatctggttcacaacagccaagctgaactgagcataccggttccatccataagggagattcaccgagtccgcgacatccaaatacatagagaaatggtccacattgttccccttagggaaaatcagcacacgccatttgaatcctccaacaacaaacggctccgagtagtgcttcttcccgttgatcctggtgaagttctcgatcgtccacgtgaaccgcgacgtctgcgggtcctccggcggctggctctctgccgcgttggcaggctctgtctgcgccacaacttccatcggctgcacggcgtcggcgacgacagcggcggcggcggcggggagctcctggtgcggcacgagcatctcctcgtcctcctgctgctgctcgatggggggaggagtcatcatagtcatggagccgtgggcgacgtcgtaggcagcgggacgtcgcgcgcgcgggcgcccgcagcggcggcggtggcagcggattcctcggttggggagcgggagccgcgactgcggcggcggcggcggcggcgaggggtgggggtgggttgctgatgcggagagggaagggaagggggagggggaaatatcttataaatcttgtgatagaatacttcaagcaagcggagttcagcatcaggattggacagttcaaccttggtttttaggtcagtaatcacatcactgatggtgctgtttttcggtagtcttatgctatggattacaacctcatctttagttgcatggtggaatgcaactttaagagttttcaaacactgcaattctggcagtggaatgtccagaacctcgtaatacaagatgtcagaagtctgattgtaatgaacaagcatatccaataggtgctctacaccacgatatctgataggctgtggtttaggttgctgggaataacagttgtgagatgtaaggcgaatttttgatggatcatccaagccaagttggcgtgcaactctctcaacaacatcatcataagtatgaagcttcgacaattccaaacaaaaatcatcctcctttggtttctccaaagaccggaagtgcaccacctgtccggacgcgtgggcggacgcgtgggcggacgcgtggg

SEQ ID NO: 15224 - DNA, 278 bp, Oryza sativa
  Clone ID: PAT_MRT4530_21088C.1
tagttttttatttctgaccgcagagcacaggtacttgtgaggacatgggaaggattctgcattttaccggtagcaagtgcttgatcgttgcttatgacagtccaccagtagtatgacccatgcatggaaaaactactcctaatgagttcatttcatgaagtatactgtcatgctggacatattgactggcacctggaagttaagtcacatttgcatactgacacaacttaatgaagtggacccattcctttattaagtactgcagaaccacatgtatg

SEQ ID NO: 15225 - DNA, 1178 bp, Oryza sativa
  unsure (1)..(1178): unsure at all n locations
  Clone ID: PAT_MRT4530_21089C.1
gacaagcaaagatattggattaaaacaagggttccacgtaattttacaagcaaatgacagactgtaaactgatcttcatgggttgtcaaatcacaacgaatagaacagcaccgacacaaggttatgctaacaggaactgaaagctgcactatctggcaaattattctcttacattttatcaatagacatggaaaattggaaccaacaccaaaccccattatacgattctcccactgctccaaggctaacagaaacgggagaagcaaataaagcaatcagtcacggctttaattctgaatacatgcccctaccaaaatctttttcttatgtaccagctttgctctacacaaataaagcaacatctaccttatcctagcggggccatcacactcgacacaattgttttgcccggaaacaagatggaaagccttgaaaaaaaatccctgacgcccactacatcacgagtaagctgcaccaacggcgtcaaccagcgggaagcaatataggcctcagcgtaatggccatatgttttgttgccatgtttcttctgttgaggttgtcttactttgtgatctctctttggcatggcatgctatccagacgaggcctttgttcagggcttcaagcccagctataaatcttctcaattataaattttcacaggcttctcaaaagtgtgacgattctgattggctgtataagacctttttggtgttgtgtcagtatgttccaagccaaggtattgttcccaagctccataaacatctccgctctgaaaacgtgcagatacaacgtcgccatcctggaggtattcaggccgattcatagatatgaatgcaagcttccacttggagaattcctcatcaggaactcgaagttttttctgaattcgttctaatatctctgctgcagtttcaccttcacggataaccagcaaaaatggatctccaaaattctgaatctgctgattttgattaggatctttcatgaaatggtaaccatgaatcaaccgatcatgtgggccaaggttcttctcttcctctggtatctcctcagcacgtagtgtccagtactgatcatttatgttctctattttctcgtgaggtggaaatatcttataaatcttgtgatagaatacttcaagcaagcggagttcagcatcaggatgngacagtcaa

SEQ ID NO: 15226 - DNA, 311 bp, Oryza sativa
  Clone ID: PAT_MRT4530_2108C.1
gcacgaggctttctttttccgatgcataattcatggttcgaaggtaaaggtgctccgtgatgctacgttcgtttgtccagtaagttggggagattgttgtggtggttagtacacaagaaaatcattcgctgtcagttgttggtttgttccaactgctctgcaattcgagtgaatttagcatcagctgttccatatattgatgatatttggtacgactagtttagaacttttcattgtgatgaatttggtggccatcgtcgctggctcacttcactggatcagtctggcacagcactagccctcattttccc

SEQ ID NO: 15227 - DNA, 1847 bp, Oryza sativa
  unsure (1)..(1847): unsure at all n locations
  Clone ID: PAT_MRT4530_21090C.1
gcacgaggcatggcgttcgcggcgaccaagccgagcaagtctccccttctcatcctcctcgtctccggcgtcgcgttcctgctcctcgcctccgccgccgagtgctacggcggcggccgccacgatgtgacgcggtcggccgtggcgcggcgctccggcgtcgggagccggcggcagtacgtgcgccaccgcctgaccggcggcgccgtggacgttccgcacaggtacatgctcgccgagaagggcagcaactcgactcgcgctaaccacacctcgccggcggcgtcgaactcgacgccgtcagcgacgacgacggaggcgccggcggcggggaagcaccaccgcagccacaagcaccgggtgcggaactggatcatcgggttcgtggtcgggtccctcgccggcgtcgtctccgggctggcgatgtcggtgctgttccggatggcgctcaactgcgttcggggggggtaccggagcaagtccgacacggtgatcttcatcccgaagctgatcaagagcaaggagcacctggcgttcctggagaaggaccaggacgggctggcgtcgctcgccgtgatcgggcgcggcggctgcggcgaggtgtacaaggcgcagctcccgccggagcgggaaggcgacgcgccgcggttcatcgccatcaagaagatcaagaagcgctccggcgacggctccggcggccagaacaacaacctgagcgacgaggagagccggcagcttgacaagtggacgcggcagatccagtcggagatccgcaccgtgggccacatccgccaccgcaacctcctcccgctcgccgcccacgtcccgcgccccgactgccactacctcgtctacgagttcatgaagaacggcagcctccacaacgcgctcaaggccaccaccaccgacaccacgacgaacgactacaacgacaacaacagcggcgagcatccgccgccgtcgccggcgctgccgtggccggcgcggctgcggatcgcggtggggatcgcggcggggctggagtacctgcacgtgtcgcagcggccgcagatcatccaccgcgacctgaagccggcgaacatcctcctggacgacgacatggaggcgcggatcgccgacttcggcctcgccaaggcgatgcccgacgcgcacacccacatgacgacctcgaacgtggccgggacgctggggtacatcgcgccggagtaccaccagactctcaagttcacggccaagtgcgacgtgtacagcttcggcgtcatcctggcggtgctgggcaccgggaaggagccgacggacaagttcttcgcgcagcaggtggtggacgacgtcgggatcgtgcggtggctgcggcgggtgatgcaggaaggggaccccgccgcgcaggccggggtcatcgacgccgccatcgccggcgcgggccacgacgagcagatcctcctcgtcctccgcatcgccgtgttctgcaccgccgacgaccccaaggaccgccccaccgccaaggacgtccgctgcatgctctcccagatcaagaactagcaagcgaaatgtgctcgtgcttcgcgtgcgcgaggcgtcgtgacgtctgccgtgttaggcagcaagcgtgtccacggattcctcagtgtggaacactggtagcgcttagtgctggacttgttgggtcgtcgtcgatcaggtcaaaggtgggtggggcccagttgatagggaccgtggcacaattatttatagcgggaaagggaggtcagtgaacgacgctgtgcttgccgtgtttacacaagtgccgcgcttgttaattaagtgaacagtatatacaccggaggagtcgactaaaanaaaaaaaaaaa

SEQ ID NO: 15228 - DNA, 235 bp, Oryza sativa
  Clone ID: PAT_MRT4530_21091C.1
gcacgagggacacactcacccaattcccctctcctcttcgctctcatctccgcttccagccatggcagtgcaaccctaagcctccgcaaagccctaccccccttccgccaccatgggcaatgccgacgccgatgccgtgttcaaggccgcctgagtcaagcgcaagaaggccggaggcgccggcaagccctaagcgcggcctcaccccgttcttcgccttcctggctgagttcag

SEQ ID NO: 15229 - DNA, 632 bp, Oryza sativa
  unsure (1)..(632): unsure at all n locations
  Clone ID: PAT_MRT4530_21092C.1
ccacgcgtccgggatgggacacttatgattctttcatgcagcatgatgttcaagagcttaacagagttctttgtgagaaacttgaagacaaaatgaaggaaactgttgtggaaggaacaattgaacaattatttgaaggccaccacataaactatatcgagtgcattaatgttgattataaatctaacagaaaagaatccttttatgatctacagcttgatgtcaaaggttgtagtgatgtttatgcatcatttgataaatatgtcgaagtggagcgtctagagggtgataacaaatatcatgcagagcagtatggcttacaggatgcaaagaagggagtactcttccttgatttccctcctgttttgcaacttcaactgaagcgttttgaatatgattacatgcgagatacaatggtcaagattaatgaccggtatgagttcccacttcaacttgatcttgacagagatgatgggaaatatcttgctcctgatgcagatagaagcattagaaacctttacactcttcacagtgnttcttgttcatagcggaggagtacaatggcggtcactactatgctttcatacggcctacgctatcagaccagtggtataaatttgatgatgaacgag

SEQ ID NO: 15230 - DNA, 849 bp, Oryza sativa
  unsure (1)..(849): unsure at all n locations
  Clone ID: PAT_MRT4530_21093C.1
nnnnnnnnnnnnnnnnnnnnnnnnnnnnnnnnnnnnnnnnnnnnnnnnnnnnnnnnnnnnnnnnnnnnnnnnnnnnnnnnnnnnnnnnnnnnnnnnnnnnnnnnnnnnnnnnnnnnnnnnnnnnnnnnnnnnnnnnnnnnnnnnnnnnnnnnnnnnnnnnnnnnnnnnnnnnnnnnnnnnnnnnnnnnnnnnnnnnnnnnnnnnnnnnnnnnnnnnnnntaaaaaaaagtagtataagcgggcgggggagctcaggtggacgaatgggcggcagatccactccagtcgctacttccagaaacaacttcaactcagcattgtgcgccttgttagatacctccctaagttgccccactgattgtgattcttcatgagggcccagtggacgattcggtcggtatgtatgattttgcctcttagcccacagccagaagcgctgaaactgcacagggatcccacattcctttgcgacttcctccttaaatgaagtaaaaggtagttgcttctgtatgcggaagctgcgaaccttttcatggtccaccagatcaaaatatatattcttaccaatctgttccttcaaatcctcatctcgggcaacctttatgatggtgtagagatgagcttcagctttttccttcttcttgtgttccttctcttcttgttctttcttcaaccttatccgcaaatgctcagcgatgtccttttcatcaacattacacattattttatccttgtcgctctcacgaatatagacaagcatgtaggcattcgaatactttgtgaatttaaatggggtgttattgaaaccagggtttatttgaggcaactcttcttcacccccatactaca

SEQ ID NO: 15231 - DNA, 243 bp, Oryza sativa
  Clone ID: PAT_MRT4530_21094C.1
atggcccgaggcccggctcaaggcatgccattttggcccggcccaagcacggcacggcccgactcagggtcgtgcccgtgccggcctggcccgacagccgggctgtgcctgggttgcaccctcggcacgcatcacatccccgcaaaggccaacaccaacgccgagcaaatcaacacggacgacgtacattaccttcctgcacgacactacaaggttttctcaagaaagaatcgtgcaaaatag

SEQ ID NO: 15232 - DNA, 207 bp, Oryza sativa
  Clone ID: PAT_MRT4530_21095C.1
atttggtattgatacatgagacactccggaacatactgctgtggttgtttatgcattgagtcctgaagcaatgcttcagatgacagatactaatggatgtcatgttgcacaacggtgcttgacgaaattgttacctgagtgtaaagcgttccttcttgatgttggcggattgggttcttttagattacccaaagaccaacatggctg

SEQ ID NO: 15233 - DNA, 456 bp, Oryza sativa
  Clone ID: PAT_MRT4530_21096C.1
tttttttttttttttttttttttttttgttgttttttttaaatttttggggggattctaacattattgcccaaaaataaagctaccccaacaccccccaaaaatccccaacaacaaaggggctccaaacaaccccaaaaaattcccccccatctaaggggaaaaattaaaaacaaaaggtcactcaccttaaacttgacacatttaaaaaccggggaccctttgggtttttcccaaaacggaaaaaaacccgggcttttcttgcaacttggaaaaacggagccaacccgggattataaatacaaaaccgtaaaccccccccccaaagaaatatctttccttaaaggcggaaacctccttggaaaagcccccctgccccaaattgggaaaacccaggcccctaaatcccggtttgggggaaaaaaaaaagtcccaccccataatttttttccttgtg

SEQ ID NO: 15234 - DNA, 138 bp, Oryza sativa
  Clone ID: PAT_MRT4530_21097C.1
atgccgccccaggcgccacgtggctcctccccgagggggatcgggcccgaggtgcccacctaccgcatttatggcatcccgagcgatcgcgccacgccgtatttaatgcggcgtgcagtgcactcaaccgttctgtga

SEQ ID NO: 15235 - DNA, 408 bp, Oryza sativa
  Clone ID: PAT_MRT4530_21098C.1
ttcagccatagccggttcacccattttcttcttccagaactagactttagacaccctgaatccctttcatggttggacttcacgtgcgattgcggagcgaatccgacagctacaatgccgtgacggtgaggacttgcctcactttatatggacatcacgcgtctgcacattctgctgcgcaggtttcagatcttggcaggacttgcttatccttcgccggccatggatctatcaggggaaggtggtgctgctgctcaccctcacggttggggagtgactaccggagccgatgctgacctattagaggtccggatgaagcatgctccgtacgagctgacatctatgacacgatggtgctagggaggaagctgcccgttctctggatcctctgcatgccgggctgcggcg

SEQ ID NO: 15236 - DNA, 2790 bp, Oryza sativa
  Clone ID: PAT_MRT4530_21099C.1
atgggattgcactgttggctgtttcctgtgtccaaccacaaaaattgtcgtagactggtacaagtagaatacatgcagaagcactgtccccgcagcggagcgcggacaggatgggaggagcagcggggtacgtgcagccaacaccactaccgaatagcctctgggccatcccgccagacaccatcgtcgtgtgggatgcgtatcgatgcaagaactactcatgcttggtgcacggtgactagtgaacgcgatcggtcggcacgcatgaggactggaccaaaaccagaccgtgcagatcccactgtagcacagtgcatcacacatcccatccgtgctacagaaacctgccgggtccgtccggtccccagcaacagaaaagaaaaagaagaagaggaggaaaatctgccggaccacacgtgggctttaaacaaacaaaagcgttgtgcaaatctagcccagcaatatccttctggcccattacttctgaaccaaaacacagaggccaatctctgggcctctgaatctccgaccagcccaactccaccacaacagcaacgccgccgagtcgccgacgacgccttttggacagatgtttcacaaggctggtccgctggtgtgctcatgatgatcatgcatgcgcagcaacagcacagcactggagtaaatgcgagggcacgtctcaggaggatgcatgctgctgcgtgtacactttgcgcgtgctactgcgacaactacggttgccggccggccggccggccacccgcggccgctacaggacgcagcagctacactacatggcatcacactcaactgaaacaggacaaaactaaagcagacgacactccaaataccaccgccgttcctgcatccattttgaacggacaaatttcaggctgcatctgcaattccgcacccatccactactccctggaaaaaagaaaagaaaaccttttctgctctgaaactcgtgtgaagcttctgtcttccaagcaaagtgtgaagcatagcgattcgaatttttttgaacccaaattcggttcaaaaattaaatataaatcacagcaatcaaggaacagcacggatctcgatgcgcacactggacgccgagtgagatacgctacgccctgcggatggacggacgcctgtactgtatgtagtagtagaatggaacccgacaagagctgctctctcacaacatcggatacccacgcgcggtttccgaggcacacgccaaaccatggacggcgacgacgaggatatgcgcgacgtctcgtccacgtcgtcctcctcctgcggcggaggggagggcgcggggttcgaggaggggatgggggagggggtgatggtgatggaggtgaggtggttcgaggtggacctggagtacgagttcgacgcgcccaggtggttcgacctcgccgtggaggagtcgccggtggaggcggcggcggcgcagctgtggttcgcctccgcgcccagctacccgccctctctttgattgtcaaccgcaatgagtccattttcctgataataaatgaagaagaaaaagctatgctgttctcaaggaaaactgatgttcttgagatgttaatggtagagaaggcacccacagccttaattgccaagatgttggctgaagatcttgggttgcaaagtttaagaagcactgtggatatagatgcagcacattgctctaaatcctctcatgaatgttccaatggtgctgaacaaacgatccatcggccacatataccaaatgaaggaaggataccttgccatcaagtttcagcgaacgagcgaaaacatggcgttcgaactattggaaaaggaactatcccaaagaggtctacactgatgaagcctacagccagtcaattagccaggcaaaacagacaaattgaagtgaagaactccacacagagtaaaaagtcggttggggtgagaagtgatagaagtaccatgagctccaatgactgcacctaccaagctgctaaaaggcagagactagaaagagggcatctcaacaagaatgttatgactagtagctctgatcatgccattgctgtaccaaaattgaagattacaattcccagagaacctgaattggcaacaaagctaagagcagagaggttgaaacgacttatcatatacacactatccatgcctactaaaaacttggttctctggcaggttgtgcaaccttctgggcgcaatgatcatcagcatgcaagtgttccacatcgcggtattgggtcaaatgtgccagtgtgtactgctaatcgtccaaggcatcttgacaacatttgcaaaacgccggatgagtgcagagatgacctgtttaaatttaaagctcgaccagtggataaaaaggaatttaagttgtcaactggtaggaagggtaagcaggctccattatctgaactcttcaacaagctcactttaactactgaagcacgccgtgctttagatcaccggactgctgatcttccaaattatattaccaccaagctgaacataattccgtacctgctcgcggccatggcggagatcgatttgtacagagaaactaaccatgacgccggagttcacagtccagtccagtttctgctagaacctgtgacagattcaacatcatttgacgaaaaccaatcaaaaaccacggaatttcgaggttccaacgcaggacgaaaacacagcaacgagccaacgaagcaggacataaatactaggcatggagattcagagtttcagaggcagcagcagcagcagcagcagcagcaaacagacgtacac

SEQ ID NO: 15237 - DNA, 219 bp, Oryza sativa
  Clone ID: PAT_MRT4530_2109C.1
atggcgatggcgatggcatatgtgacagcgacgactgcaacacgccaatacgggggtggtggatccgccgctggtaagcatagtatcctaggactgatatcggcatcacggttatgcacgagacagttcaccattccccaatggcgtaccctcatttgcattgtctatatggtggtgtcaaggtggggtgtgacatggatgaagacgaactttatatga

SEQ ID NO: 15238 - DNA, 140 bp, Oryza sativa
  Clone ID: PAT_MRT4530_210C.1
ctcgaatttagttttcaaatagaaatatgccacatacggggacattttggattcttataacgatggcattgcgctgtcaccatgtggtgcactggccattatgccaaggcctggatgtctgggactacattggcatgaat

SEQ ID NO: 15239 - DNA, 1033 bp, Oryza sativa
  Clone ID: PAT_MRT4530_21100C.1
ctgagcattccgataattggttccatcggctgcccttccagatgtctgcaccatgtgatgtgaccacggctactacagatacaaccattactcacatcatggatgaacaagatgataacaagatcaagtgcttcacgtgctggaatccgattcggccacctgctacgctgctgacttcaaacggccgccgaatctgcatacaacctccgctttcggcccgtgagtacttgatggaaagcccacggagtcctctttccaatggaaccacctcatcgccaaattctatccaagtcatccgcgaatgaacgatcaaggtgctacatcggttagatcgccggtttgctcgttacggaaccccaaacttatcatttgtactcaattcctatttgcaattcagattgcttttatcttgttcttgcttgtttcttcgatttgcttgcaggaataaggttgatctgcaccggcaagatcaacaacccatagagaggtgtatcgatcgctaaggcacaacacaacaacgtctcgtaaggttgtagtcgggtcgtcaacgtttctcccaaatcgtagttatcatcaactcaccgaaagatcgggccaacaacagccttgagtgtctctagtggaactcagggttcatcaggtggtatcagagctttcgttgctcgcgtttagtccgtttagagtttcgagttcttgtcacgtctattaccattgtcgtcatcgccgcggtgtctctgttgtcgtcaggacttacgaaaacggaatcggctcactgctacggttctatttttgtagttttcagaagtttctgtcggttagtttttgagttcttgagttgtatctaaggtttctgttcggtggctgtgccgtggttgtattcgtgatggtgtgcatgtgatgttgtgcgtgaggaagaaggaaggaggagattagattagatcgttttttggtagtagattggatcgaagcaaaaaaaaaaaagccgcaccaaaaaaaagaaaagaaaaagaaaataaagaaagaaagaaagaat

SEQ ID NO: 15240 - DNA, 1818 bp, Oryza sativa
  Clone ID: PAT_MRT4530_21101C.1
ttctcgatcgtcgtggcgttcgtccctccgtcaagccgcgttcgttctcgaagcgtggtttgcggtcgtcgccgaaggttcggaaggctgttctctctgagcaaggcaaaacttatagatggccataaggcccggggcccgacggcccggcccaaggcacaacaaattggcccggcccaggcacggcacggcccgactggggtcgtgcccgtgccggcccggcccaacagccgggccgtgcttgggccgctccctcggcacggtgggccggcacggcccggcacgaaagaggtcggcacggctccgacccctcagccctccacgcctccatccctctttgtaggcgtctcctatgaatgcctcgccggatctagcaccaaggatctgtggatctctatcatcaacggcaactccggtgctccggatgcgcaggtcgctgagcggcaggcggcagccaccgttgaggaaccggagtgcctgcgatggatggcgagggtgatggggacgcagggtgatgacgaagatgacttggaggaggaacgcatcgaggtgtttggcaacactgcttcacctctgagagatctgtcgcagccggagccacacgatgatggtaccggtgccgatggcaacggtgctccgtctggctcaagtgctagcaacaagaggtccaggtctgaggtatgggacgactttgaagaactctttgaagagcgcaatggcgctcaggttcgcgtttctgctaaatgcaattactgtcataaaacattgtctgctcgttcaactggtggtactggacatttgcttaggcatattaaatcgtgcaaacctagaaatgttggtgctttgtctcagtccatgcttaggtttaatgctgatggttctgttagtcaatgggaatataaaccggatgtggctagaactgagttggttaggttgattgctagagaggatcttccacttacttttggtcaatctgctgcttttgaggagtatattcagaatgctcacaaccctagatttagtgttgtctctaggcaaactatcagtagggacgtttttaaggtcttcgacaagagacgtgctatgcttattgatactttgaagtctgttagctctgttgctttgacatctgatatatggtctggtaatgctaaggaggattatttgagtgttgttgcccattttgttaattctaattggcaattagagaagaggattttgggactggtgctaattgatgtgtcacacaatgctgaaaatatttctgaacgtgtgctttctgttgttcaagaatatggtttgactaataagatcttctctattaccctggacaatgcctctgctaattcaaaagcaatggatagtcttaaacctgctctgtctggttatattggtgatttatatttgcatcagcgttgtgcatgtcatatcatcaatttaattgttaaggctggtctagaaatcttcaaacccatgcttcaagattttagaactgctatttcatttataaatgcatctaatcagcgcattgctttatacaaaaacttctgcattgctaaaggtattcgtcctcgtaaatttggtttggacatggataaaaagacagcttgggggaaaatttttggtgctgctgcttgtggttccagtcttggtgctggacttggtgctggtaatgctggtgctagtgccagtccaggttctggacttggtgatgctggtgccagtgcaggatctggacttggtgctggtgcattttctaggagaacttctgctaccgctttgattcaggctgtttcttctactgctaacatgaatgca

SEQ ID NO: 15241 - DNA, 2361 bp, Oryza sativa
  Clone ID: PAT_MRT4530_21102C.1
atggatggtgatccaacctcatgcaactacgaggcgagggtgatggggacgcagggtgatgacgaagatgacttggaggaggaacgcatcgaggtgtttggcaacactgcttcacctctgagagatctgtcgcagccggagccacacgatgatggtaccggtgccgatggcaacggtgctccgtctggctcaagtgctagcaacaagaggtccaggtctgaggtatgggacgactttgaagaactctttgaagagcgcaatggcgctcaggttcgcgtttctgctaaatgcaattactgtcataaaacattgtctgctcgttcaactggtggtactggacatttgcttaggcatattaaatcgtgcaaacctagaaatgttggtgctttgtgtcagtccatgcttaggtttaatgctgatggttctgttagtcaatgggaatataaaccggatgtggctagaactgagttggttaggttgattgctagagaggatcttccacttacttttggtcaatctgctgcttttgaggagtatattcagaatgctcacaaccctagatttagtgttgtctctaggcaaactatcagtagggacgtttttaaggtcttcgacaagagacgtgctatgcttattgatactttgaagtctgttagctctgttgctttgacatctgatatatggtctggtaatgctaaggaggattatttgagtgttgttgcccattttgttaattctaattggcaattagagaagaggattttgggactggtgctaattgatgtgtcacacaatgctgaaaatatttctgaacgtgtgctttctgttgttcaagaatatggtttgactaataagatcttctctattaccctggacaatgcctctgctaattctaaagcaatggatagtcttaaacctgctctgtctggttatattggtgatttatatttgcatcagcgttgtgcatgtcatatcatcaatttaattgttaaggctggtctagaaatcttcaaacccatgcttcaagattttagaactgctatttcatttataaatgcatctaatcagcgcattgctttatacaaaaacttctgcattgctaaaggtattcgtcctcgtaaatttggtttggacatggatgttagatggaatgcaacttatctaatgcttaagcatctcttgccacatagggtcattttttcagtgtttattgcatctcaccatccaatggctgatggtcagccattactgactgatttacactggacaattgctgaaactgttcttttattccttgaacaattttatgattcaactgttattttgtctggtgtttattatccaacatctccattaattatgcatcacattcttgagattgctggacatctaaatacttatgagaatgattggaaccttagaaatgttgttgttcccatgaaaaataagttcttgtcatactggtctgagattccatttctgtattcatttgcttttatcttggatcctagggccaagatcaggggttttagcaatgttctccaaattatgggacaacttattagtggtgattactctgcatatttaaatgaggttagggctgcattgtctgacatgtatgctaagtatgaaagtaaatttggtgctgtgagattacaaagggaaaccccaagctcttcttctggtaagaaaaagacagcttgggggaaaatttttggtgctgctgcttgtggttccagtcttggtgctggacttggtgctggtaatgctggtgctagtgccagtccaggttctggatttggtgctggtgccagtccaggttctggatttggtgctggtgccagtccaggttctggatttggtgctggtgccagtccaggttctggacttggtgatgctggtgccagtgcaggatctggacttggtgctggtgcattttctaggagaacttctgctaccgctttgattcaggctgtttcttctactgctaacatgaatgcatctgagttgtttgcctatcttgacagtgacactgtcaaccaatacgatgatgacttcaatatccttaactggtggcatgagcacaaccacacctatcctattctttccatattagctagggatgttttgactgttcctgtttctactatatcatcggaatctgcttttagcttaactggcaggatcatcgaggagcgacgacggcgtctagctcctgacatggtgcaagctttggcactaatcaaagattgggagcaagcagatgcaaagatgcaacataccatggagaatttagagcttataaactcttttgacaatttgtttcttgatgaagtaaccactgccactgggactggatga

SEQ ID NO: 15242 - DNA, 465 bp, Oryza sativa
  Clone ID: PAT_MRT4530_21103C.1
atggcggcggcgaggagggccctcctgagccacctgcgcgtgccggtgctggctcgtcccgccgcggcggcgggaagcgtccccgccgcgcggctcctgtcgtcggcgacggaggaggggtccaagggctcgttcctcgacaagggcgaggtcgccgaccgcatcgtctccgtcgtcaagaacttccagaaggtcgagccctccaaggtgagcacggtcgccgacgcgcaccgcacggcggattcggatctaggcgtgctcgggctgtgtagtgtattttttattcgcgtcgcattccttttgcttcctggaatggagaggattttcttcttccgaaaagagattctgtatatgcgtaagaagttgcaaagttttggtcttggtggatcaattggagccgagcctgaaacattaggggataggagtaggacaagaaacaaatcttgcactttgttagaagattag

SEQ ID NO: 15243 - DNA, 177 bp, Oryza sativa
  Clone ID: PAT_MRT4530_21104C.1
attgaatacgcttgtttctttatttgttattttcgaattctccccttatctttccttcataaaaaggattgaatggggtggatagatttcatagccgagccatcccagaggaaaaccgtgaatccacactttaaaagagagggttatttaagaggctaaactgtccagagctggctc

SEQ ID NO: 15244 - DNA, 408 bp, Oryza sativa
  Clone ID: PAT_MRT4530_21105C.1
atggctgggggttaccttttggtgagacgagggagcgtcggcacctctggtgtcgtcatcgtcgccgccgcgccggagaagagggagacggggggttggatttggaggcaaaggaaaaggggctattggagggagtcggaacgaatcgaggctgccgccgtgctccccttctccctcgtcgccgtgtttcccagctgcagctaccgcctccgggcgccggccaccgtcgcgtcaccggccaccgagcgccaccctcctctctcccgcctcgcttgctggcctcccgccgctttgcctcgcccagaaagagagaagaggagaaagaggagggcagagtgcacggtgatgatagaggtggcgcactgtgatgacaaggtcttaggacggcatcgtgtgtctctccactag

SEQ ID NO: 15245 - DNA, 418 bp, Oryza sativa
  Clone ID: PAT_MRT4530_21106C.1
gttctagatcgcgagcgggcgacctttttttttttttttaaacacctgctaaaaagttaacggagtcaaatatttagaaagggataaaggtcatatgtgccacggttattctactgatacaacgacggtatcatactattacatcagatatatatgtattatagccaaagaaaaacgatgtggatgtacttcattatagatgagtggagacgaggccactttgctcatagaagatccacttttccttatggtggacggcgatcatactctatgtatgacacactgggttcacggagtaagtcatactcatgttaccgtggttcccagtaccgtgggtgatctttatagcgttacagaatagagaggtcatgcttctatgaccattctgtttcaccatactatagaaagtgctattctg

SEQ ID NO: 15246 - DNA, 363 bp, Oryza sativa
  Clone ID: PAT_MRT4530_21107C.1
ctttttcttaagaaggaaagagcttgcatagcttcagggattgccccctacatcatgggggggtcatccaccaccggggctcccttccatgggctcaagtgcaccgacgacatgccctgcggccgccgatccaggaactacagcttcggcaacttcagcaaacgcggcaggatcatgtgcatgcaagtgtggcctattgctggcatcaatgaaaatcgagaccctctcctacctgccaccggtcacaccctatgacctcctgaatcagatcgagtacctgctccgttgcaagggggtgccctgacttgagttcaacacgggctgatttgtctaccttgagaaccacaggacccctggatacta

SEQ ID NO: 15247 - DNA, 147 bp, Oryza sativa
  Clone ID: PAT_MRT4530_21108C.1
atggcgatctttgcagaccatttcgcgcatgcgggccggccgaccgcatgcgaagatcgtgttcacccggctttcgccccggactccctcaaaggtgctggatctccaagaagcaagaggaaaggaactcttgcaccatgggggtaa

SEQ ID NO: 15248 - DNA, 376 bp, Oryza sativa
  Clone ID: PAT_MRT4530_21109C.1
taaagccggccggatcgatcgctttagaagccttcgcctccagcgacgaggtccatggacggcgcgaggaggccaccaccgtgacgacaaatgcgatgaggaggcggccggccggcgccggggccgacggaggtgccacggcgccgatactcgccggcgtagagccgatgggttactggggccaccgctggagccacgcgggcgacctgcacgtcctctccgccgcgttactgttgatcttctccggctactgagccgggcagaacctgcagagctcggtcaacaccgagggcgacctgcgcacggtgtgcatggggatcctgtacacctacttaacgctcttaagcggagaccgcgtcaaccgaggtcacgtggc

SEQ ID NO: 15249 - DNA, 169 bp, Oryza sativa
  Clone ID: PAT_MRT4530_2110C.1
aggccttcgcgccgcgtggtaccccaacgtcgacgccgcgaggttcgccggcatggacgcatggtctagcatagaaaatgcaacgagcttccacgagctgaagagtgaagacagctcaaagccagacttcaaagtgagcataattgggcaagccagagtgcccagttaa

SEQ ID NO: 15250 - DNA, 1020 bp, Oryza sativa
  Clone ID: PAT_MRT4530_21110C.1
atggtgaaggatgttgaggtggaggtagccgcaatcatagccgatggttggaggatgtcaagattgccaaaatttggagcaattcagagagcaccagcatcggctatgaatcatatcatcaaactatggccgttcagaggatggggaattgatatgatcggtcagattaatccaccttcaagcaagggacataagtttatattggtggcgaccgattattttaccaaatgggtggtggcagttccattgaagaaagttgattatggggatgcaatacagtttgtcaaggagtatattatctaccgatttgggattcctcagactattacaacagatcaggggtcaatctttgtatttgatgaatttgttcagtttgccgatagcatgggtatcaagttgttgaattcttcaccatattatgcacaagctaatgggcgagctgaggcatctaacaagagcttgattaagttgatcaaaagaaagatttctgattttcctcggcaatggctcacaaggttggctgaaacattatggtcttttcggatggcttgtcacgcatcggttcaagtccctccttataagcttgtttatggacatgaggcagttttaccatgggaaactacaagcggctcaaggagagtagctttacaggatgatttaacagccgataagtattacaatcttatagaagatgaaacagaagatctagttcaatccagattgagagcccttgcaaaggtgactaaggataaggaacgagttgctcggcattataataaaaaagtggtgccaaagtctttttctgaaggggagctagtctcgaaattgatcttgccaataggaactcgagataataaattcggcaagtggtcacctaattgggaaggaccgtttcaaatatacaaaattgtgtccaaaggggcttatatgttgcaaggacttgatggtgaagtttatgaacgagcgcttaatggcaagtatctgaagaaatactatccaactgtatggattaactcatga

SEQ ID NO: 15251 - DNA, 865 bp, Oryza sativa
  Clone ID: PAT_MRT4530_21111C.1
ccggccgggcagaaccaattatcagcttccaaacagaattctggtgcatctcgaggggtttatgttttttcagacatgaacccatacgttggtcaccctaatccaatgcaggaaggccaggaactgttccgcaaaggcctcctaagtgaagctgttcttgctttagaggctgaagttttgaagaatcctgataatgctgaaggttggagactacttggagtaacacatgctgaaaatgatgatgaccaacaggcaatcgcagcaatgatgcgtgcacaagaagctgatccaacaaacctggaagttcttcttgcacttggtgtcagtcacacgaatgagttggagcagggagaagcattaagatatcttcataggtggcttcagaatcaccccaaatatgggggtatcgcccctccacagccaactgattcaccttatggtcctgatgttattagattgtttaatgaggctgcccaaatgtcacctgaggatgctgatgtccatatagttctaggagtcttgtacaacctatcaagagaatatgataaagctatagctgctttcaagacagcgctgcagctgaaaccacaagactattctctctggaataagctaggtgcgacccaagcaaacagcatccagagtgctgatgcaatattggcctatcaacaggctctggacttaaagcccaattatgtgcgtgcatgggctaatatggggattagctatgccaaccagggattgtatgaagactctattcgatactatgtacgggcggttgctatgaatccaaagctgacaatgcctggcagtacttgcggattcttttagaacgcttacgagctgaatgaacgctgcatggatt

SEQ ID NO: 15252 - DNA, 585 bp, Oryza sativa
  Clone ID: PAT_MRT4530_21112C.1
atgtgtttttttttgcatcaacacgcttttggcacgcctggtaggaccgacttcgacaaggttttcatcatggttgatatcaaagcaaatgatattgacccagacaacatcatcccagtaacgttggataagctaacagaagaacaaaaggcgaatctggagcagatgatgaaccaattgcaaaataagtatttgctttcattcatattgacccggcaaggtacagtaattcaaagacacaaagtcactttcccactcgatgatgaaggaacaagttctcctaaagatgccgagcccaagggtgagaaaccagagggagatcctgaagagttccacactttacaagatcgcattgattatgctattcattatgcattgatcaatcagtcgggagtgcttgttaatactttaactaatatgatcaaatttgtagttgatggcacaataactgagcatcaagctaaggggccagttttccttcctaagggtgtttttccacaatacaggaccattagtactaataatggtggatcaaaccaactggcatgccctgaacctgaaagcaaatctttggacctgcactag

SEQ ID NO: 15253 - DNA, 2886 bp, Oryza sativa
  Clone ID: PAT_MRT4530_21113C.1
ggcgggcctcgcggcgctgccccacgcctctctctctcctcgacctcgacctcgaccggaacgcctctcgccggcggcggcggcggagatggcgatgcggcacctcatcaccgggcagggcaactgcgcgccggacggggcgtcgtcgtccaaccccttcgggaacctcgccaacgccatcttcggccagtcgtccaaggcgcagtcaataaaggaacttccagcgtctgcagttaatgttccaacaacatctgaattagggacagctgctcccttatcgaccatccctggttcagaaacaacatttaaattagagacagttgctctcttatggaccatccatggttcagggaatgggctcacgcaagatcaactgcaacttgtacggggcgctgatttcctccatgtgggtctttctcatgaataggttaaatcttttcggcctccaggtctcccagaatgtgcagccccagatgcacagcttaaagaatttgagcaaatttttaacagcacagggccaacctttggaccaccagtcatggatggtccaccacaaagggtcttatctggtgtcctacgttctttcctagcaagtggtaaagctggtgtgccatttcaacctgttccagtaccagcgcttggtttgtctgaaagtgacaagcaatgtatacgtgatcgtagttgcattatggcacgccacattttggctgaccagcctgaagaatatatccaagcacaggtaaacacattgctgcattcacttgatatcgacagtaattatcgaatgaaaggacccatgcacggaccatacccagagatggaggagtattggaatcagtcccaaagcgccatgagatctggtccaatgcacaatgctgcagacaaatggataactgagtttggcaagcaaaataataaccctgaagagtgggctcattcttttgagcagcaatatggttccaatggttgggcctctgagtttgaacagcatcaatctcagatggccatgacaggaggaatgaatatggcaaacctggcagccatggaacaatctcgtatgcttgcacagacattagctagtaataatgacccaaaatttcaggtctgtagaataccactcaatatagaacactcaatggaagagaactctaagttcttccagtttgtttcaaagatgagccgtggtgaacttattatagaagataatcaagtaaaacaaggttcagcatcccaatccagtggctgggctgatgaatttcaaacccagtacaatgctaatgcaaactcttgggcggatcagtttgttcatgaagagatgtcacaaggagcagataagtgggctagtgagttctctactgagtataatcagggtggcctcaacgagaactggattgatgagttctccaaaatgcgtgttgacgatgaatgggcagaagagttcagtggaggaacatttggtgaaagctctgctgatccatgggtagatgagttccagaaccaattatcagcttccaaacagaattctggtgcatctcgaggggtttatgttttttcagacatgaacccatacgttggtcaccctaatccaatgcaggaaggccaggaactgttccgcaaaggcctcctaagtgaagctgttcttgctttagaggctgaagttttgaagaatcctgataatgctgaaggttggagactacttggagtaacacatgctgaaaatgatgatgaccaacaggcaatcgcagcaatgatgcgtgcacaagaagctgatccaacaaacctggaagttcttcttgcacttggtgtcagtcacacgaatgagttggagcagggagaagcattaagatatcttcataggtggcttcagaatcaccccaaatatgggggtatcgcccctccacagccaactgattcaccttatggtcctgattcatttcgttttgtcactaagcagtttacctctgatcaggttattagattgtttaatgaggctgcccaaatgtcacctgaggatgctgatgtccatatagttctaggagtcttgtacaacctatcaagagaatatgataaagctatagctgctttcaagacagcgctgcagctgaaaccacaagactattctctctggaataagctaggtgcgacccaagcaaacagcatccagagtgctgatgcaatattggcctatcaacaggctctggacttaaagcccaattatgtgcgtgcatgggctaatatggggattagctatgccaaccagggattgtatgaagactctattcgatactatgtacgggcggttgctatgaatccaaaagctgacaatgcctggcagtacttgcggatttctcttagtaacgcttcacgagctgacatgatcgctgcatgtgattcacgcaaccttgacgttcttcagaaagagtttcccctgtgagtccaaacattctaggcattgcacttgctcctcaggcccgcccccatgataaagggtacaaggaagtagagaactagcgaaatgggggctgcacattttggaatgatgaaagtgcaaaatggcagtggccgttgtgttgtggttttcggttcgtgtatacgaattgttcattttaacaaggcgcgacatgtatataaaattcaagatgggcacccattcttccgtaggtgtgggaaacgcaaagcagaaggcagttgtcacatgtaattctgtacacagagagggaaagaataaaagaatatcgaacgaatatgtcaaaaggaggcaacacgttcttgtaattttctacagaaaataaagtggtagcaggtttcactgtttcaacaaaaaaaaaaaaaaaaaaaaaagggtttttaaaaaaaaaattatacgtaaaaaaaaaaaaaaaaaaa

SEQ ID NO: 15254 - DNA, 1288 bp, Oryza sativa
  Clone ID: PAT_MRT4530_21114C.1
gagcagcactgcactgaccaaagatcgctaggcaaaacagcgggacaagccgcgcgcgcgcctggaacaacaagaatccgctcgccggccgagagacagaccggcctcgcggcggctgcaacatcacgaagttacagtgtcaacagccagtttacttgcatattagattgtcctaaatacatacatttctttactcgggcgcgccggcgcgggggcgcgggcggtggtccggtgcatggcggcggcggcggtggcggcgtccgacgcggcgcagctcaagagcgcccgggaggacatcagggagatcctcaagaccacctactgccaccccatcatggtccgtcttgggtggcacgattctggcacgtacgacaagaacatcgaggagtggccgcagaggggcggagccgacgggagcttgagatttgacgccgaattgagccacggagccaatgctggtctgattaatgctttgaagcttatccaaccaatcaaggacaaatacccgggtataacttatgctgatttgttccagttggcaagtgctacagcaattgaggaagctggtgggccgaaaattccaatgaaatatggacgagttgatgtcacagcagctgagcagtgcccaccagaggggaggcttcctgatgccggtccacgtgtgcccgctgatcatcttagggaggtattctacaggatgggccttgatgacaaggaaattgttgcattatctggagcacacacacttggaagatcaagacctgacaggagtggctggggaaagccagaaacaaaatatactaaggatgggcctggtgaacctggagggcaatcatggacagttgaatggttgaagtttgataacagttacttcaaggacataaaagagcaaagggaccaggatcttctagtgctacccacagatgctgcattatttgaggatccgtccttcaaggtatatgccgaaaaatatgcagaggatcaggaggcattctttaaagactacgctgaagctcatgctaaactgagcgaccttggtgcaaagttcgatccacctgagggattttcactggacgatgaaccagccgcaccgcaaccagagcccttcgtcgctgcgaaatactcctacggaaagaaggagctgtcggactcgatgaagcagaagatcagggcggagtacgagggattcggaggcagcccggacaagcctctgcagtccaactacttcctcaacatcatgctcttgatcggagggctggccttcttgacgtctctgctcgggagctga

SEQ ID NO: 15255 - DNA, 1699 bp, Oryza sativa
  Clone ID: PAT_MRT4530_21115C.1
gcacgacctccttcccatgctgctccaccagcgccggcggcctccgcctccgctcccgcccgtctcgcttcccgcagaaggctgcgacgacgaggagcgggcgcgccggcgcgggggcgcgggcggtggtccggtgcatggcggcggcggcggtggcggcgtccgacgcggcgcagctcaagagcgcccgggaggacatcagggagatcctcaagaccacctactgccaccccatcatggtccgtcttgggtggcacgattctggcacgtacgacaagaacatcgaggagtggccgcagaggggcggagccgacgggagcttgagatttgacgccgaattgagccacggagccaatgctggtctgattaatgctttgaagcttatccaaccaatcaaggacaaatacccgggtataacttatgctgatttgttccagttggcaagtgctacagcaattgaggaagctggtgggccgaaaattccaatgaaatatggacgagttgatgtcacagcagctgagcagtgcccaccagaggggaggcttcctgatgccggtccatgtgtgcccgctgatcatcttagggaggtattctacaggatgggccttgatgacaaggaaattgttgcattatctggagcacacacacttggaagatcaagacctgacaggagtggctggggaaagccagaaacaaaatatactaaggatgggcctggtgaacctggagggcaatcatggacagttgaatggttgaagtttgataacagttacttcaaggacataaaagagcaaagggaccaggatcttctagtgctacccacagatgctgcattatttgaggatccgtccttcaaggtatatgccgaaaaatatgcagaggatcaggaggcattctttaaagactacgctgaagctcatgctaaactgagcgaccttggtgcaaagttcgatccaccctgagggattttcactggacgatgaaccagccgtcgaagagaaggatcctgaaccagcaccagcgccagcagcagcaccaccacctccaccagtcgaggagaagaaggaagctgaaccaactccagtaccagtaacggtaggagcagcagtggcatcatcgccagcggatgacaacaacggtgcagcaccgcaaccagagcccttcgtcgctgcgaaatactcctacggaaagaaggagctgtcggactcgatgaagcagaagatcagggcggagtacgagggattcggaggcagcccggacaagcctctgcagtccaactacttcctcaacatcatgctcttgatcggagggctggccttcttgacgtctctgctcgggagctgagagcgatggtctgatgacctcctctgacgagtgttttgagttgttctgcctgtgctaagatttgcgtgtttctctttccatgttttgagtcgttattccgtaaataaattgaggtaaaaggatgggcatgtgaatggattccagtactttctgaacttcttgagtaattcctctagagaaatatttgtcggagagaaatgtcacattatctagttgtcatggctcatgactacattctctatactgagggaaattatgacattctctaaactaaggagggaaataatgaggacaccccatatatcactcttttatggcatgttcagcctgcaaggaaagtgcattttcctctccc

SEQ ID NO: 15256 - DNA, 303 bp, Oryza sativa
  Clone ID: PAT_MRT4530_21116C.1
gaggaccacctgagtgtcacaacggagaccctggatgtctctgaggtgagagagggggacacacaggagaggcctacttgttgggtgtgcacacacactctggagaaaaattgtgtgtgaggtgccacagagggaagggataaaaagggtgctgaaaatggtgtgtgtgatatgtgtctgttgtgtgaccggctgtgatgtgtgccaccacattggacgccactgtgattgtgtctgtcgaggggaaattggtctgggtgtgacgccacatgctgacccacaacccctctgatgggcgtggtg

SEQ ID NO: 15257 - DNA, 512 bp, Oryza sativa
  Clone ID: PAT_MRT4530_21117C.1
tttcgcctcatttacgtcgcccccggaaacctctccagaggtattcccaagaagtccagctactggttcgctgacttcctcaagcgatgatgaaaaagaagaagaaatcaactagctcacttcactagcctgatctcctgaataaaatgatctcctgaataaaaaagttcctgaataatcttttggcctccaatgattcgactggctgcatgtgcccattgtacttgttagctctgagaaataaaagtgcagtcttgactctcgacgaatataaccaatttaacttgtgtactactactgctgacaaatactggggaatataaccagtaattcagagtttcagagacactgaatgatccattgtaagcagtatttcaccagtagtttagagacatgtaattcagagtttgcttgtacacaaactcagtaattcagagtttcagagacactgaatgatccattgtaaggagaaatggggcttttgtcgtctccaaaaaaaaaaaaaaaaaaaa

SEQ ID NO: 15258 - DNA, 705 bp, Oryza sativa
  Clone ID: PAT_MRT4530_21118C.1
atgatattggctacagatgctgataggggcgaacgaaaagcggcacgaactgccatgtccacagcggtggcagctgcatcctggatggggttctcttctagaccggtcgatgagccgttgttagaggatatggcgcaggtcagggagaacagtatggcaacaacacctagtgagagaagacggcgtgacagtcatgctagtacccgtgtctccaatgagctcggcgcggggaggcctcacgcagcctgtctagcggtgcgggtctccgtattcatggccatctcggagggcttggtgatagggttagtgctgatcagtgtgcgaaacatctggggccatgcttatagcaacgaggaggaggttgtcaaatatgtaggcaaggtgttgctggtcatttcagtctccaatttcttcgatggaatacaatgtgtcctttcaggtgtggctagaggctgcggatggcagaaaattggagcttgcgttaaccttggcgcctactacattgtgggcataccttcagcttacctcatagctttcatcttacatctcagcgggatgggactatggcttggcatcacctgtggcatcttggtgcaagtcgtgctactcatggcattcaccctatgcacaaattgggataaagaggcggcaaatgcgaagcatagagccctcaattcttctcttccttcagataccgcaacatga

SEQ ID NO: 15259 - DNA, 414 bp, Oryza sativa
  Clone ID: PAT_MRT4530_21119C.1
atggcgtcaagcggcgatttcttgcggcggtcgtcgtcccggctttgtcgtcgtcaagattggtgcggcgatgatggtctgagggcgtcagacgggcgacggcgtgccaaggcggtcgggcacgcgcgatcgatcccgagaccgacgcgcggcggctcggcgcgcggcaaagtcggacgccagggtggcgtgcgcaaggggaggaaaaggccaactaaaccacgggccggcagtgacatggttaagcccgtgaaggtgatcggggtagtgagagttagacaaggctcggggagggctcctagagcatctacaagcggtggtctgagagcgtcgtgcggctggcggcgcgccaaggcggtcgggcacgcgcgagcggtcccgaggccgacgcgcggcggctcggcgcgcggctaa

SEQ ID NO: 15260 - DNA, 300 bp, Oryza sativa
  Clone ID: PAT_MRT4530_2111C.1
attctcaatacacgaatttttttattcatatcttactcctttttttttatcgggttttttgtttaaattccaaaaacaaatttttattttccacaaattacttttaaacccatattcttcttaaattcacatccatttctcaccctttttttaaatatatttaccccgcccttacatttttttaattttcttattcctccccccacaacatatatcttgttcaaatccctcttttacattcaaacctaaaaatatcccgtcaaacaaaaacaaaagcccttccccgctaatttttaaaaa

SEQ ID NO: 15261 - DNA, 516 bp, Oryza sativa
  Clone ID: PAT_MRT4530_21120C.1
atggtggcggacgcggaagacagcggcggctgggccgcgcaactgaggcggaagacggcggcggccgggccacgcggcggaggcagaagacggcagcggctatgcggcgggcgacgggggcagcggcggccgggtcgcgaggctgaggcggaagatggcggcgacgaagatggcggcaactatgcgacgggcgacggggtagtggcggccgggtcgcgtctcacatggctgatgcggaagacggcggcgaccgtgcggcgaacgtgcggcgggcgacgggggcagcggtggccgggccgtgcggtggaggcagaacacggcggcgaccgtgcatgcgggcgtgacgggggccgtgcgccggatgtgggagatagcggtgcctgtgcgtcggcgccggcgaggctaagggtggcggtccagtggctgcggcagttggtgatggaggcaggcagcgttgcagcgaaaggcatggccgatgcgggagttggcgaggagaagaggcagcgcagggaatag

SEQ ID NO: 15262 - DNA, 228 bp, Oryza sativa
  unsure (1)..(228): unsure at all n locations
  Clone ID: PAT_MRT4530_21121C.1
ccgcggacgtcgtgnngggcagtaccaaacaagtgttgcagctgtttcctagtctttagaagtttctgactctctggcagtgaacttgtactggggaaatatgattaacttcctgcacactttaggatgaaggtctggtctcatttcacttgagcagttcttgcacttcttttctttcatttgcgggaatgttcaaatcgtgttttgctggggtacctttttctttct

SEQ ID NO: 15263 - DNA, 437 bp, Oryza sativa
  Clone ID: PAT_MRT4530_21122C.1
gggaggcaacaggattgtccgacatatgtagctcgagattttggctttggtgcggggcttgcagagaaaaaagcaatgcagtagcacggagatatccccatcacgacgaccggatggttcttctgcctctcaatgcgtgcgattcgcacgttaccgaggactgcatttcgtgtaatggagaagaccgtgcataaccagctttctcgcaaactctctgctactaacattttggatgagcagagattggaggcgcggcagctgaattgctgaaataactgcatcttctttcattctgtcaagatcacaaatatgcagggcagaatgggttattaacatgacaacgacaatgtgcatctcatcttctaaatgcctttctgatcaaccaaatatttttttctctctctttcaaacatgatctctgcgcaacatgtagttct

SEQ ID NO: 15264 - DNA, 1281 bp, Oryza sativa
  Clone ID: PAT_MRT4530_21123C.1
atgtcacttggctatgccgagaagctatcctaccgagaggatgtgggaaatgtcggcatgcctgagatcttcgactctcctgaactcctccacaagaagatagaagagcttgcagtcatggtgcgagagagtaagcatttggtggtgtttactggagcaggcatatcaacttcatcaggcatacctgacttccgagggcccaaaggcgtgtggacactgcaggtgcgttcaggaaaaggtgttcctggtgcatcactgccgtttcaccgagctgttccaaccttgactcatatggcactggttgaattggaaaaaacaggacgattaaagtttgtcataagccagaatgttgatagcttacatctccgctctggcctcccaagggagaagctggctgaattgcatggaaattctttcaaggagatctgcccaagctgtaaaaaggagtaccttcgtgattttgaaattgagacgataggactgaaggatactccaaggcgttgttctgataagaactgtggagctagattaaaagacacagttcttgattgggaggatgctttaccccctgaggagatggatgctgccaaggagcagtgtcaaaaagctgatcttgtcctatgtttaggaactagtctgcagattactcctgcttgtaatatgcctctgttgtcactgaagaatggggggagggtggctattgtaaatcttcaggcaactccgaaggataaaaaggcaagccttgtcattcatggacttgtggataaggtttcctttcctgaaagacctgacatgaagcctgtagtactaaaggagcaaccattttctttgcagagagaaacatcaatgaatagaccgtttgtcatgctattgacattcaactttagtgatggttgcggctgttcgagctcttccattgaatggcctgttgattttctgaagcaaaaagacagctttgtcagggatagaagtctagtcctgcaagagttgcaacatgctgcagagcatcgatcacgtgcagggcagcatgcaattctggagagggagggtgtgccaagagctgaaacgtcaattcatgcacttgtgaccaacatcgtcaggtatgatactgaagatagcaaggcggcagttcccatggctacatggatgaacagcaacggcagcctttcgaaacggcatatggatgccattggttgcaacccagcatcgtcaaaaaagcagaagttggttgctactcgtcatcggcgaaagggcttgaaccctgctactcagaaagtttga

SEQ ID NO: 15265 - DNA, 1888 bp, Oryza sativa
  Clone ID: PAT_MRT4530_21124C.1
gcgagcacggggcgccgtcgttcgccctgccgcatcagtttgggggttcaactgaacccccatgtcctatgttagatccgcctgaattttcgggagaagcttacttgattgagagatgtcacttggctatgccgagaagctatcctaccgagaggatgtgggaaatgtcggcatgcctgagatcttcgactctcctgaactcctccacaagaagatagaagagcttgcagtcatggtgcgagagagtaagcatttggtggtgtttactggagcaagcatatcaacttcatcaggcatacctgacttccgagggcccaaaggcgtgtggacactgcaacgttcaggaaaaggtgttcctggggcaacactgccgtttcaacgagctgttccaaccttgactcatatggcactggttgaattggaaaaaacaggacgattaaagtttgtcataagccagaatgttgatagcttacatctccgctctggcctcccaagggagaagctggctgaattgcatggaaattctttcaaggaaatctgcccaagctgtaaaaaggagtaccttcgtgattttgaaattgagacgataggactgaaggatactccaaggcgttgttctgataagaactgtggagctagattaaaagacacagttcttgattgggaagatgctttaccccctgaggagatggatgctgccaaggagcagtgtcaaacagctgatcttgtcctatgtttaggaactagtctgcagattactcctgcttgtaatatgcctctgttgtcactgaagaatggggggagggtggctattgtaaatcttcaggcaactccgaaggataaaaaggcaagccttgtcattcatggacttgtggataaggtcattgctggggttatgtatatgatgaatctgcgtatccctccatatattcgtactgactttgttcaaattagtctccggaactcggtcaaaaaaaaatgcgtgagatggactctccgagtaacaagcattcatggcttgcgagcacctttgccatttcttcgatcagttgaggtttcctttcctgaaagacctgacatgaagcctgtagtactaaaggagcaaccattttctttgcagagagaaacatcaatgaatagaccgtttgtcatgctattgacattcaactttagtgatggttgcggctgttcgagctcttccattgaatggcctgttgattttctgaagcaaaaagacagctttgtcagggatagaagtctagtcctgcaagagttgcaacatgctgcagagcatcgatcacgtgcagggcagcatgcaattctggagagggagggtgtgccaagagctgaaacgtcaattcatgcacttgtgaccaacatcgtcaggtatgatactgaagatagcaaggcggcagttcccatggctacatggatgaacagcaacggcagcctttcgaaacggcatatggatgccattggttgcaacccagcatcgtcaaaaaagcagaagttggttgctaatcgtcatcggcgaaagggcttgaaccctgctactcagaaagtttgatggctgtttgttctagttgtcagactagattaggatagatgcatgagatgttcacagtagctagagtaaggtgttaacaacttctagtgcatgtgaaagctggtagaattttaacttgacaagcccaacgtaattcagcaaccatctcaaaagaaactggttgtggggcttgatggtatgttttgtaaaggctcgggaagatgaagaaacctctaaatcattaaggatgatctagaggaactggaggtaaagtgaaccgtacaaagaaaataaatggaaggcgagacaattttttattgctgcaaaaaaaaaaaaaaaaaa

SEQ ID NO: 15266 - DNA, 227 bp, Oryza sativa
  Clone ID: PAT_MRT4530_21125C.1
ttcacaataatctgattttatcagttcgtcatgttgcgttcctgttagtcaatataacatgtactgtagctcagctcttgcagattgtttgtcatccttatttttagatttttgtacaattaaatatattaactgtatttagcatttttagctacagttttgctacgttttacatgcttagctgacgtatcagataccactatttagttgcatactttcatgatgtg

SEQ ID NO: 15267 - DNA, 286 bp, Oryza sativa
  Clone ID: PAT_MRT4530_21126C.1
acatacatattaatttttttcgtgaatttttattttatttttttttaaaaaaaaagaattgtgcaatacaaaaataaaagatgagcaacaacaacacccaccgggaaaaaacaactacagagcaaggaggaaagaccccaaagggggcacaaaaactaaaaaaaaaaagagaaaaataaaaaaaaaaacacaggaaaaaaaaagggggggacggcccccccaccctaaaaaaagggaaacaaaaaacccaactgtcaggcgaggggaaacatgaggtacaaaacca

SEQ ID NO: 15268 - DNA, 308 bp, Oryza sativa
  Clone ID: PAT_MRT4530_21127C.1
tttatagagcgcgagcggccgccctgccttttctccattgtatacgactgcatatacatataaccacagaagctaaagcattgctctcatctcataacgggtagtgccgtgcctatacgggggatcagcaaaagatgctactatgacacataacctcactctgctatattaccaattactcccaattaccagttgccgattgcaatatatatatactcactgacctaccttgctagagcatttagtaacaagctaaggagaaagagagaaaaaaaactaacaatgacccaagtttaagggaggaagaa

SEQ ID NO: 15269 - DNA, 387 bp, Oryza sativa
  Clone ID: PAT_MRT4530_21128C.1
ggacatgaatttttctactcgtataaaagaagggaaaggaatggatataggactaattaaaagaagagaaactagaagtggctagattcgactcctagtttgtgaggcataatataggggaagtaattacctttactacaaaaagcaacatgggaatgaattaataagatgaaccaacgttggtctatcaatgtgcatgcatgatcagttcctacctcttggtagggtgagagcacagcttgttcgtcttgccatttggtttgaacagttgggtgtttgggatggaccgcagctgagttcatcaatgcagcagccacttcctccacctctgacagacgggcatctccacatttcagtactatggtgactttctggagcgaacttctt

SEQ ID NO: 15270 - DNA, 476 bp, Oryza sativa
  Clone ID: PAT_MRT4530_21129C.1
catatgggtaaaagactcctgctccttcgcttcgcttctgttcgtctctccgccgtgcgccgtccgtcgtccgccatggaggttgctggccctcctccgttgaccagcgcttcccctagcccctgccgctcaacaccaactgtggccggatctagttgtttggcggctcgcgagaaagaagttttggtggtctagatctggtcagttcatcctccctttcgagctgatctctcaccaccgagccttttccccacatcccttctcgtcgttcggtttgaggtggtcagatctaccggcggcaaagctgctggatgccctcacttcgtgtggctgtgagatcatcggggttagaactgccagaatcgcttggactcgaggaggaaggagaagcgagcaagacgagggatgcaaatgggcgacgacctggggtgttgagcggtgaccccagctatcggatgcagcagtttgcacgcgcg

SEQ ID NO: 15271 - DNA, 477 bp, Oryza sativa
  unsure (1)..(477): unsure at all n locations
  Clone ID: PAT_MRT4530_2112C.1
ctggtcttagttaaaaaaaaaaaaaaaaaaaaaaaaaaaaaaaaaaaaaaaaaaaaaaaaaaaaaaaaaaaaaaaaaaaaaaaaaaaaaaaaaaaaaaaaagggcgggctttctggtgtagcggagcctagcttcgggtgcctgcgatgtaatggttttttttttgtgtcgcgtaacttaaattcagtgcccggggcttcactttgcagcggcgggaatgaccatggcgtgaccttacttaatttagtggcatcgcatcctattttcgtttggtgaggtgacgtattagcggcctggcccgatcgtttttcccttcagatgagctgccttgccggaatggggaacgccccctgccctggatcgttaccttcggcgggggggggtnnttaacgctacacgctaactatccttttcactggccagtaccctacggtcctttcgttttgtttccttcctttccgggcagggccggttggt

SEQ ID NO: 15272 - DNA, 210 bp, Oryza sativa
  Clone ID: PAT_MRT4530_21130C.1
ggcaaaggggacgccccctgtagcggcccattaaacccggcggttgtggtggttacccgcagggtgaccgttacatttgccagggccttagggcccgatctttaggtttttttcctttcttttgatagccaatttcggggggtttttccccgttgaagttttaaaataggggggtctccttttagggtttctatataagatgttttacgg

SEQ ID NO: 15273 - DNA, 1227 bp, Oryza sativa
  Clone ID: PAT_MRT4530_21131C.1
atggtgacgccggacaagaagaggaggaagaaactcgcggagccggagccgacgccgacgccggcgccggagccggtacctcgtctcctccgcgttcgtccagggaacaagaagaagaacaagggggcctcacctgagaagcagccgccggtgtacatggtgttggcgcacggagtcgaggaagagcccaccacccactccgtaatcgaggtcgccgcctgcgccgccgcccgccgcctgcttaacaccggcagcggccgcggccgcggccgcggcatgtcgttcgccgcggtggggacacgcaccgtgggcgtcggcgtggagttgaccaccgtctacgaccccgaggcctccacggagcgcggcggcccgcgactcgtcttccccaaggtgaaccccgtcctcatctcgatctcggacgacggcggcggcggcggcggcggcggcacgctctacgctctctcccgcaccccggccgtcgtgaggccgctggatttcgagccatggttcttcgtcctcgacgacctcagccacaccgtgtggcgccagctcccgtcgccgccgctcttcccgtgccgcctcaacccgctggagttcctcgacccgcccaaggtgcgcgtcgcggcgtacgccctcgtcggctcccacatcctcctctcggtctcggtgcagccgccgcagccgcagcagcagcaagatcacaagggcacctgcgccttcgacatggacaccgagcagtgggagatggtgcacgacaccaacctgcctttcgacggccaggccttgcctctcggcagcgacgacgaccaccgcttcgtcgccgtcgcctccgccgccgccgacgttgcggtgtaccgcatggtggtcgggatctcggccgtcacggggaagaaggagctgaccatcgttgcgctgcgggtggtggtggcatccaactccaagtgccgcattgttccgggcaaccttctgtgcgccatggggaaggggagcttcgcttctttcgagttccggtccattgctgctgcttccatgggaaaggtgggcagagcacgtattgttcatcgcacttactctctggtggatgatggtgaggacgattgggtcgtcatggtgaagaagcaggatcggcaggtttacaagctacgtgatccatccttcttgggcggttgctcttttttccatgtaaaaatttcagagcctttctttgcttcttccaacatcttctga

SEQ ID NO: 15274 - DNA, 1092 bp, Oryza sativa
  Clone ID: PAT_MRT4530_21132C.1
atggcggcggcggcggcgcctgactggtccatgctcccctccgaccccatcgtccgcatcggcgactgcctcctcgccgccgacgacttcgactgctacgacaacctgcgcctcgtctgccgcatgtggcgctccggcaccgacgacccgaggacggccgacttcgaggacgcccgcttcctccccaagaagctggccatgctcgagctcgacgtcaaccccggagaccaccgcgccgccgccgtcgccacgttcgtcaacctcgacaccggccgcttcctccgcaagcgcgtcccgggcctccgcggctgcttcctcgtcgccgtcacgtccgccgccctcgtcgtgctctccgacgcggcgccgccacacgggacccgcggggaaggtcgcccgtttcagggcgcccatccatgcggaggaggaggtgagggaggtggccgtgaagacgtcgccgctcatggtgttcgtctcgtggtaccaagggaggtgtacgtcaccaaccgtggatccatcgtatccaccgtcctcctcaccgacgacgacgaggaagaagaagaagaagaaggtgagcagcaacaaggtgttcgtccgcaaccccgcgccgcggacaccatcgcgatgatccccatcattcgtatgccaccaccagcggtgaagctgtacgcctacttccaccacctcgtggagtctgccgccgagctgctgctcgtggacaccgtgaacaaggtgttcgtcccggtccggagcctcggcaaccgctccctcttcgtcagccaggccaggagcttctccgtcgacgccgacaagttccccaccgtggaggccggatgcgtctacatcgtggagccgggcccggcgacgtacgagcgtttccatctcgccgacgggaggctggaggaggccataccaatggtgaacaggcgccgtgccgctgaaggagaaagctgcgtccttcctctcaccctggagcaagtcatggtgaactactgcgtcgacacggagaattattccgagctcgagatcgcgctcgacaccgatgatgacgaagagttcttcctgcctgaagctgaaggccacggaaccaactga

SEQ ID NO: 15275 - DNA, 110 bp, Oryza sativa
  Clone ID: PAT_MRT4530_21133C.1
tattcagtccttctacaagcccaaactaaccgtagtcatggatgcctgctcactggaatacaacttctagctttgcgtcgagtcctatggcctggtaccaagagctacgt

SEQ ID NO: 15276 - DNA, 802 bp, Oryza sativa
  Clone ID: PAT_MRT4530_21134C.1
gacaagaacaggatttaattacttcaatccaatcatttagaaggtttctggcttacccttaattacaaaatatttgctataacttgcatataacatgtaatttttggtggacatcgctgattaaccacatctaatgtacatggttaagtgtgatggttcatctatagtcttattgcaaaataataaaaacttagtctttcattctattcttcatattgcactagcatcgcatccttgatcagcactgaatcaatgcattgcacgccctcttccccttacacctcctcctctccttgcacgtcctcgtccccttgcactgaatcaatgtctcttgcagtacctctgggcacaatcaggaaaaactgctttgatggcatgcagcagcccctgcaagttttggatttacactatgaaatatttggtatggtgtgactaaatacgggggtttttgaagcctggtttatctgcctggggtactttgaaacttatagcttatacataggggtttttgttacaaaagcccatgtccacggggttctctgatatttgctcaaaaaagaaagataggacaagaaagaagcttggttatgaaaggcgcaagctctgttcatatttatttttgctggacacagatcaaattatgctaatatgatcccaaggcttgtgatgtcatgttatttttacaaacatctgatgaaaagtataaggactgctaatgtattttcctcagttaaataaatcatataatatcagatattttgatcgtggatctttgaagacagtattgaaatacaggccttga

SEQ ID NO: 15277 - DNA, 322 bp, Oryza sativa
  Clone ID: PAT_MRT4530_21135C.1
gttgtttcttttggatctatccattctggtcaccgtggctgttcggtaattttggcggagaggaggaggaggacgacgacgactacgacgtgatgggtctactctacaagttgtgggacgacaccgtcgcggggccccgacccgacaccggtctcggtcgtctctcgaagcacgccgtcgaccgtcccgtcgccgtcaagatcaacgacctgacaggggacgcggcgatggtggccgtaccgccgactactccggtcggggcggaggaggtgcctgtgaaggtgacgcgcagtatcatgatcaagccgcccgcggggtaccc

SEQ ID NO: 15278 - DNA, 2072 bp, Oryza sativa
  Clone ID: PAT_MRT4530_21136C.1
gcgctcacctgactgcaaaagcaagcacagcatagttcaccctccacttctatgaacgggataggctttagattacatggaggatactgaagcagactaaacttctcgttagtcaaacagaacctaagaaatgcattgggtggatcagggcaaagtggcgtatcaaaattctctaatcggaactagactctcagcataattaaatagatgcatatccgttacttctttctccagatatgcccagtacttattgttccttggatcatagcacgtgaagtcttcaacccctgaagctatcttttccattctacaggtttgaatgtcatactggtagacctgattccatgtcagtagcagcttttttccatgaagaaaaactataggaggccttgctacaggattattcacaactatatcaggtggaatctgtacagtgcagcgctgagtccattcagggttctgtgcataattgcaggtccagatcttcaacgcgctcaccatccagtagatggcgcctttcacatgaacaggagttaacccactaattggatatggcggatcctcagtttgcctccacaaattagtgcctagagtaagcacttcaaacttgcagaccaattctgatgtgtcatcgtccctctggtagaaaaatctagccaccttatacttgttgctgtgagggtcaaacccaaatccagcccttgggcccgcatgaaggttataactcccttttggcagggagacaatctctctagttgatgggttgcagacaatcatttcgtggttcatggtggaaatgaggagcatgccattgcagtggatcggacgactccatgtaccaatgccttgtggaaagtcttgtacatggatttgttccattatattaccaccctgatactgatagaggcccatcaggaaggaagtattctcgccattattctgcttctcgtaaacaccagggaccataaatatcgatggcttctgcttagagcactcgaggtgagcactgatgaaacaggggttggatattatggcgtgccaagccttacacacggacttaaatcggataagagatttggatggcagccgtaacagaatgtcgaagatcacatcgtcagggatgtaagggggcaagaaccttgaccaagacttaatagcaatccgcatcatctttcccggccggctgcacggactgccgtgttggccgcttccaccttcagctccggcgactgcggatcgccgacggcagaccgtcgtcttgtatcccgccaagctgtacagccagaagctttctggttgagaagacgatggccgcatgtcagccagcctgctgcttgtgttgcaggggcaacaggtggccttctcctcctcgtcatcgttctcaccgatgccgagctcctcagggatgcccaactcgagcagtgtcgagctggacccctccacgggagcgcccatgtcggacgcctctacgttgagcatcgacaactccagagccacccaggaccgaccagcgaggtcctcccccgcagctgcccagccgaccagcgaagtcctcccctgcgcgtggcacggctggccagcaaggtcctcccccacgcgcggcccgtcgacgaggtcctcccccctaggaggagaggggacacggacaacatagacgccacaaagccacaagccaatacaagcttcgagttcccgaacgttgacgacgccgagcgagcggcagagctcgaagtacgacgacagctgcgcgctcttctccgccgccttccggagcacctttatccccgccgcggcggtcgatttggtttgtcgtggtctcgtcgtcggcgcgggcacgccgacgaggaaccgcgcgacgccggtgcatatctcgccgtaaacttggaggatttcgatgagggcgcagtccatggcttccaggacgaggggcacctccatgccgtccgcagtacggggcggatttggagaagcagctcgagcaggaaccggtaaaggcggggactttcccggggggccgagcgggtccggaagcgggtgacctgcatggggactcttcgaccgggcgggctggc

SEQ ID NO: 15279 - DNA, 145 bp, Oryza sativa
  Clone ID: PAT_MRT4530_21137C.1
gagcgcactaggcctgaggcccgacaacccggcccaagcacggcatgggttgtgccggcacggcccgacctttgggttgtgcctgggcctcttcctcggcacgatgggccagcccggtccaatgatgaaggagtcaaatagatga

SEQ ID NO: 15280 - DNA, 433 bp, Oryza sativa
  Clone ID: PAT_MRT4530_21138C.1
ccgggctgcaggaattcggcacgaggggagccgaggagcacagctgaccatggcaccggcgacggcccgcggctctaaccctagactagggtttgagccggcagcggctggcggactgggacgggcaggcgcccgcgctttgtagtcctacgcaaggctacaaggggcgagagcggcggcgactgccgctgccggcagcgcgggcgggtcgggcaccagggtggcggcgtcagcggctggtggtggcgtgggccgtgtgatagccggtgtgagatgctggaggcagcaaggcgacaccggcatggacacaatgccgaccccaaaagcgaaaagggcaggagcttctctctacttcactaaagaggtgttccaatcagagaaaggacttttacttacgaagaaaggaagctactgaagttccaattcccagata

SEQ ID NO: 15281 - DNA, 757 bp, Oryza sativa
  Clone ID: PAT_MRT4530_21139C.1
ggcccgcatgaaggttatactcccttttggcagggagacaatctctctagttgatgggttgcagacaatcatttcgtggttcatggtgaaaatgaggagcatgccattgcagtggatcggacgactccatgtaccaatgccttgtggaaagtcttgtacatggatttgttccattatattaccaccctgatactgatagaggcccatcaggaaggaagtattctcgccattattctgcttctcgtaaacaccagggaccataaatatcgatggcttctgcttagagcactcgaggtgagcactgatgaaacaggggttggatattatggcgtgccaagccttacacacggacttaaatcggataagagatttggatggcagccgtaacagaatgtcgaagatcacatcgtcagggatgtaagggggcaagaaccttgaccaagacttaatagcaatccgcatcatctttcccggcctagcagatatcggcacttctgcgcatcttttcactgccatgacaaaaaattctcaagcggctgcacggactgccgtgttggccgcttccaccttcagctccggcgactgcggatcgccgacggcagaccgtcgtcttgtatcccgccaagctgtacagccagaagctttctggttgagaagacgatggccgcctatggagtggagcaaaccgccaggcgcccaggcgacggtgggagatcggaagcccgaaggagtttgggggaactcgggaggaaaaaga

SEQ ID NO: 15282 - DNA, 698 bp, Oryza sativa
  Clone ID: PAT_MRT4530_2113C.1
cggacgcgtgggcggacgcgtgggcatcatcggaaaattcatctcaaaaaatcaccagtgatcccaatccactactacggcgagagctagctcgatggaggcatcgccgccgacgtcgccgtcgtcgctaaggcacagactgaggacgacggtgtgctgctgcttcggctcgccgggggagcggcggagcggggagaagctgaggtggaggcggcgggtggccgcgggggagttcgggtacgacccgctcagctacgcgctcaacttcgacgatggcgacggcgacgacgacgccgcagacgacgccgccgcggccttccggtacaagaacttctcctcccggctcccgccctcgccggtggcggcgccggcgcggcggtcgacggccatcgccatctcatgaactgtaccccacctgtctcctcctccacgccctaactcttcttcactatagagagattaaactgtgtactcatgattaaactacagcatcaaaaattgtgagattattactacactattagcttagaggaaatgttcccatggtttcgacacatggtttcctatgtaattcgatacatatcgagatgtttgtgaaaaattggtgatgtatcccagaattggggcgattttagtcttgaaaaaaaatctctccctcctttttaaaaaaaaaacctgcagcccgggggatccactag

SEQ ID NO: 15283 - DNA, 855 bp, Oryza sativa
  Clone ID: PAT_MRT4530_21140C.1
gcacgaggacgagtcaggcagaggaacaggtgatgatcatggccgggagacgaaggatgctgcggcggcggcgtcgtcgtcgtcggggaagaaggtgccgctgttcagcttgttccggtacgccgaccgcctcgacgtgctgctgatggttgtcggcacggtgggcgcgctcggcaacggcatctcgcagcccctcatgacggtcctcttcggcaacgtcatcaactccttcggcgcgaacaccagcggcagcgtcctccgcagcgtgaccaaggtgagtgcccgcgggcgcttagtgatacgcgatggagacacaccggccggtagccaaattaactttggatcttctttctcctccaggttgtcctcaacttcatatatctgggaattggaacttcagtagcttcctttcttcgtaagtaaaagtcctttctctgattggaacacctctttagtgaagtagagagaagctcctgcccttttcgcttaatttgtcccagaggtatcatgctggactatggcaggagaaaggcagtctgcccgcatccgttctttataccttttggggtcggcattgtgtccatgccggtgtcgccttgctgcctccagcatctcacaccggctatcacccggcccacgccaccaccagccgctgacgccgccaccctggtgcccgacccgcccgcgctgccggcagcggcagtcgccgccgctctcgccccttgtagccttgcgtaggactacaaagcgcgggcgcctgcccgtcccagtccgccacccgctgccggctcaaaccctagtctagggttagagccgcgggccgtcgccggtgccctcgtgccgaattcctgcagc

SEQ ID NO: 15284 - DNA, 3971 bp, Oryza sativa
  Clone ID: PAT_MRT4530_21141C.1
actcgagggtgagcactgatgaagcagggggttggatattatggcgtgccaagcctcacgcacggacttaaaacggaaaggagatttaaatggcagccgtaacagaatgtaaatagtcacatcgtcagggatgtaagggagcaagaaccttgaccaattcttaatagcaatccgcatcatctttcccggcctagcagatataggcactaatgaacttcttttccctgccatgacaaaacgttctcaagcggctgcacggactgccgtgttggccgcttccaccttcagctccggcgactgcggatcgccgacggtaagtgtatttttctcgattttttgtttttttaatgttttttgaaaactgtagtagaaaaggtagaaaagcagtaagaactctagatgtacgcaagtcgcaccataccatgtacacctcgtgacctcaccctgcctatcaacagggcacccgaccaaactaactcaatccatgaataaaaaggtccttttctctgaacacaagctagtagggttcatcatcaacacaagctagtagggttcaacatcacaactaaacgcagcaggcaaaattgtttgttcctcacaccaagatctccaggtgtggctccttgtctcctgcggctttattttcggtttttttttatttatatggtgaacaaagggaggctgattgtcccaggcgaactctcgatgtcggtgcaggctgatcacaacagaggggaggggaaggagaggagcctgcaatgttgttgtcatggttgaaaacttgaaatggtgtgcattttctcctagttctgcgccaggttgcggatgacgtatgggaggatgcctccatggttgaagtatgccagttccacctctgtgtcaaagcgaagagtacaagtgaaggatttcccgttgtcggttgtgacggtaatgtcctgcccaggacggatctcgctgacgttggtcgggaggtcgatggtgtaccgctcatgtccagtaaggccaagtgagtcggcatcctcaccagccttgaagcagagaggaatgattcccatacccaccaggttgcttcggtggatacgctcaaagctcttagcgatcacagctttaacacccaggagcatcggtcccttggcagcccagtcacgagaactgccacttccatactcagcaccagcaagaacaatagtgtcatgaccctcagacttgtatttcaaggcagcatcaaatacatagagcttctcccctgtagggacatgaacggtcttgggtccaacttctccattcaaaaacttgttcacaatcctgatgttcgcaaatgttcctcttgccattacttcatcattaccacgacggctaccatatgaattgaagtccttacggtccacaccacgctcaagcaagtacttggcagcagggctgtctttgtgaatgctacctgctggtgaaatatggtctgtcgtaatgctgtccccaaagttcagtaagcagtaggcattcttcaccccatgggggccaggtggggacatggtcatgtccttaaagtatggaggctcatggatgtaggtggagtttggatcccacgaatagagcgatgcttcgggcacggtcagctgattccacatcgggttgccttttgtaatagcctcgtatgtacttttgaacatatcaggcagtacgctagattggaccacttctgcaatttcttcagttgagggccatatgtccctgaagaagacttctttaccatcctttccaactccaatcggctctttctcaaaatcaatgtcaacagtgccagcaagtgcatatgcaaccacaagaggcggtgaagcaaggtaattagcccgggtcaatgggtgcacacgaccctcgaagttacggttgcccgacagaacagcagcagcaacaacatcattttctgaaatggcagctgatacagattcatctagatcaccagagttgccaatgcaagtggtacaaccatatccaacaacatggaaaccttgcttgttcaagtattcttgaaggccactctgtaacaagtatttagtgacaaccccagatccaggggcaaggcttgtctttacccatggtttcacctcaagacccagttcacaggctttctttgccacaagggcagcaccaagcataacactaggatttgatgtgtttgtgcagctagtaattgctgctatgacaacactgccatgtttgagttcagcaggttgtccatggaagtcaaatttcacaactttatcttgttgttcctttggtacagcaaaacccttgaaaccaactctgttatccaggcaagaatgccagtcagatttcatttccttcaaagggacacggtcatgaggcctctttgggcctgaaatgcaaggttccacctcattaagatccaactcaagatacgaagagtaaaccctttctgtttgaggctcattgtagtctacaaacatcttgttagctcgcagatatgcttcaatcattgccacagtttcatcactccggccagtcaatttaagataatctagtgtcacatggtctacagggaagaaacccattgtggctccatattcaggcgacatgtttgcgattgtggccctgtcggccaaagaaagctttcccatgccttcgccatagaattcaacgaatttgccaacaacgccgtgcttccttaacatttgggtgacagtaagaacaaggtcggtagcagtgacaccattctgtaacttcccagtcaacttgaacccaacaacaccaggcaaaaccatgctcattggctgaccaagcattgtggcctctgcttcaattccaccaactccccaaccagcaacacccaaaccatcaatcatagtagtgtgtgaatcggtaccaaccacgctgtcaggatacataattccatctgtgttgaaaacaactcgaccaagatactcaagattgacctggtgcacaattcctgaaccagggggtacaaccaacatattgtggaaagcagtagaaccccatttaaggaaaccaaatctttcattgttacgcttaaactccaactccatgtttgattgcacagcatttggtgaccttgcaacatccacctgcactgagtggtcaattacaagatccactggaaccagtggattgatcttgttggcatcactgcccaacttggccatcgcgtcacgcatagctgcaagatctacgacagctggaactccagtgaagtcctgaagaagaactcgtgctggcttgaaaggtatttcagccagcttgggagatgtattctcccaatcaataattttctcaacatcattctggttgacttggaagttatcacagttgcggatagctgactctagaagaatacggatagagtagggcagcttatcaatcctgggatcatttagtgcaggaaggctgtagaatttcccatattcaccacccccaggcttagggagggtggtcaaaatgttcttgaagggatgctcagcagctgcggtggcggccatcctgcggtggacgcgctcgacggcaggcgcgacggccccgatctgcgccctgcaggcgccgcacccgacgaccggcgacgacgacgccctcccggaccaaccgcccgcccgccgcccacccgccgcgcgacggccgcgagaacgcgcgtgccctgagggagaggaggcgcgacagcgaggaggagggagcgggagaggggagggatctgaagcggaggagggaggaggagaggcgggcggaggcggaggagtatgccgctttatacatgggtcgcgcccacggtgcagaccgtcgtcttgtatcccgccaagctgtacagccagaagctttctggttgagaagacgatggccgcctatggagtggagcaaaccgccaggcgcccaggcgacggtgggagatcggaagaagcaaggagtttggcgcacgcgtgggggaagaagtaaatgttcctttgctg

SEQ ID NO: 15285 - DNA, 193 bp, Oryza sativa
  Clone ID: PAT_MRT4530_21142C.1
aattattgtggggataccccctttttgttttttttctttttaacatgggtgtttaacgtcaccgggggcaacaaaagaatgtcccgcaattttgccctagaggaaatcacaaaatgaaaaaccccccggggccgcaccctcctgagagggggaacagggactgacctggagggacagggacaacacacagggc

SEQ ID NO: 15286 - DNA, 396 bp, Oryza sativa
  Clone ID: PAT_MRT4530_21143C.1
ggggcaaacttaacggaggcttaaaattcttttccaataaacgggggggggcccccctttttccacaacaaacccaacccttgggggccgtaaagcttgccccccccccggtaaatttctttgaaatgaacccctccccagttcatgaaatttccccccttaaaatttcagccccctttatgcctgatcggggaaatccccttccaaaggcctttttttggggcccccttttttttttttgggaaataacacaatccccggcctttgggcattttaaataaaaaccctcccaccaataaaccccgaaaacaggccgagcccccagttttttcacaattttttaagccccgaatcccgcgggcatgaacaggggctgcccattttttttggtccggg

SEQ ID NO: 15287 - DNA, 732 bp, Oryza sativa
  Clone ID: PAT_MRT4530_21144C.1
atgaccgcctcgaggtctctcctcgccgtcatcctcctggccgcgaccgccgccgacgtcgacgccctggtgttcgacgtgccatcgggcggctccaagtgcctgaccgaggagctccgccgcggcgcgctctcccacgcgtcgtaccgcgtggccgaggccacgtcggcggcgtcctccgcggtctcggcgcgcgtggcggggccccgcggcgaggagctgcacctgacggagggcgtggaggccggggagttcaggttcgaggcggcggaggacggcaggtacaccgcctgcttctggacgccacgctacttgcgcggcgccattgtctccatcgacgtgcagtggaccaccgaagtccgcgaccacgccggtggtgccggctccccgccagccgtcgcagccgccaaggaaggccacatcgattgtgtacaggtgattttgatgtttcacttcattgtaattcacacaagcataatggggattaggaatgtagatgcacacgcttcttcgatgattggagagttgaagaaattggaggtttctactcggctcatacatgaagagatgatttctctccgacggagcgagggtgagatgcaaaagctcaacgaagacacgaccatgaaaatacactcgttcaccctgctatcgctggcagtttgcgttggagttgcagggctgcagctgtggcatctaaagactttcttccaaaaaagacacatactttag

SEQ ID NO: 15288 - DNA, 671 bp, Oryza sativa
  Clone ID: PAT_MRT4530_21145C.1
ctctcctttcctcttccacgcagcgcgcggcagtggcggggatggcggacgagtacaaccagggcggcggcggcgggggagggccgcgcgggggggcggcgccgcacgggctgctgctggcggtggtggtggggctggtggtggcgggcccgctcttcctcggcgacggcggggaggccgtgacggaggccgtcgcggagctgctcagccccgtggggctcctcctcctccccgtgtgcctcctcctcctcatccgcctcctctcctccgaccgcggcgccgccgcgctcgccgacgcgttcgccttcgggggctcccccgacgccgtccaccgcgtcggcggctcgcccgtcggcgtcgcgctcatgctgctcctcatcctcgccctcctctactaccgcaccgccctcttcggcggcgacggcggcgacgacgagtagagctccgccgtggtggtcgatctcggtaggaggctgggctggttggtggtggtcggttgtttgctagggtttgctcctgcaatatgaggatcttgagggggtctcttgtaaaattgcatgtgtaaattattttaccaggagtaccccgtttcgtcgggttgctctgcacaaggctgaagcttctgtgcccgcatcggtccaaaaagcaaaaaaaaaaaaaaaaaagcggcc

SEQ ID NO: 15289 - DNA, 560 bp, Oryza sativa
  Clone ID: PAT_MRT4530_21146C.1
aaaagggggaaaagcaatatcaaaggaaaaaatatttttaaattgtacagtagaaattgacagaatactgtcaaccaaccacaatggaaaaaataaaaattaaaaaaataaactacttctcaatctaagaaaaaaagaaaagaacactaatgaatgctttagctcacctttaagatgaatttgtcaataaaatatactttcaggttcaaatatgcaattatatatggcaaatcaattagtacaaatagagggatttagaaaatagacttttgtgataataggaaaatttaattgcctagtaaaaataactcatctttgtggatgagaattttggtcaacactctttttaaaaaatcatatataaggatttaaaactatttctcaggagagctattatggaagctttaaaaggaatctccttattctcatatatatttcctgatctgtttttctttctgctgttaaaattaagtggatgctgtattgaaacttatcctcaatagttcttattctccccagaattattcatgccatagtctatttttctccatttattatac

SEQ ID NO: 15290 - DNA, 593 bp, Oryza sativa
  unsure (1)..(593): unsure at all n locations
  Clone ID: PAT_MRT4530_21147C.1
ctattccactaatatatatttcaggagatgcaccgttccattaacaattcgtgtattcgtagatgtgccattgaaattttgcgaaattggaaccgtgccactgccgtcacgttttctatcctcttcctcatttgcatgtgggacccacatatcatattcatcttctttcccatcctctcctcttttccccatctctcttgatcctaaatccttcacgcaggcgacgagatcgcgcgcctcaagaaggggcctcccggcggactcggtagcggcggaggaggaggctgcggtggtcgagcggcgccacggccggagggagatggagctcgggggcagatggcagtgggggagggggcaggacgaagaggaggagaagagaggggaagaggagtatacggccgcggcggcggcggcggccaacggcggcgccatgggaggaaggtgaggtccgtgcacctccatatgcttcttcctccctcgtngcggctcggcttcggatgacgagcggcggcgncggtgggaacatccgaagcagctaggcaggcanccctattgaagaagaagacgcggcgcagggaggccacctttgtcgt

SEQ ID NO: 15291 - DNA, 136 bp, Oryza sativa
  Clone ID: PAT_MRT4530_21148C.1
atttgaaggcacattcacagcatatatgtatggttgctccaagaggaaaaaaaaagcaagtcatgctgatggcgtctctgattctagcagtcttttgcatgactgtgtttttcttcaagccttttcaatacacaac

SEQ ID NO: 15292 - DNA, 1484 bp, Oryza sativa
  Clone ID: PAT_MRT4530_21149C.1
gcacgaggttttttttttttttttttttttttttttttttttttttctcttaagcaccgtaaaggggtcgccatgaaacgacgtgtgtctcgcggttgattcattacgaatgtacaatttcctattctgatatcaatgatttctctttccctccaaaaaataaaacaagaagtttaaccgagacttccgatccggccgaccagacggctcgatcaagcggtgtcgtttgaccacgatccaacgcgcccgcaaccccacccggccccagaattggctggactcaacttagcccggatcactcattgactcactgttcatctcagctcggctcggctcggctccccggagtggcgcgcagatggccagcaataattgcgctactagctccgcgcccacagacccgatgatgcaattgcaattcgactggagatcgttgcgattgcgcggcaaaatctcactcccattctccccaattaatcccaagtaatcatgatccaagacaggaagaaaattcaatgtgtttcgaatcacatatacatgctgttttttttgtatatatatagtgtcaccggaaaattcttcgtcatgataccacccacttttttcttttttggctgtgtgactgaccatgcattggattgatgaactgacttgagtgatgacatacgtactgaacacactcgatcacccatggtgtttcttcttttttgtttttgtagatatactctcgaaatgaaaaaaggaacatgaagaaaaaagaaagaagaggaagaatgaacagaagaaatcaaagaaacaatggcgagcgctgctgatcgatcaggtgctagtgcgaccgatcgaatgagctcacgagatgaatggacaaagaaaaggtgaagtgtgtagtgtagtgtagtgtagagtagtgtacccatcggaggaggaggagagggagagcgagagcgagctagaagagctcccaatcgaaccgcgggatcggcgaggtggtggtggtggtcgtcgcggcggccatggtggtcgtcacggtggacgacgacgtggacggcatcgaggacagcaggtcgaacgactcccagctcgccgtgggcggcggcgccggcgcggcggcggtcttcgttgtcgttggcgcggcgggcggcggcgcctggaactgccgccgctgcgacaccggcggcgggaggtgcggcgcccggggcttggcgtggccgttgccgctggccttgttgtgcgacgccgcgttcttggcgcggatggcgtccagcgactccacgtacttctgcacccgcttctcctgcattcgcctctgcaccttgacctcgccctcggcggcgatggcgtccagcttgaccagctcgttcatcagcgcctccgtgagcgtgaccacgtcggcgtcgaccaccctcccgcccttgccgacgatggcctccagagccgtcaccttggtggcgagcttgtcgcggacgcgtgggcggacgcgtggg

SEQ ID NO: 15293 - DNA, 889 bp, Oryza sativa
  Clone ID: PAT_MRT4530_2114C.1
tcgttaataacttatcatggcccaatacatgtccatattttaataaaacacgtgatgcggatatcactccttcggatacacacaacaatcctccaccggtcattcaaggaccgataacaagcgctcgaacaatagaaggggaaaggagacacttgggaaaggacttagagtcatggaggatcatcgaggacatccaagtcaaggtggaggcccaaaccaagtcggcttcgagtgcaattcagagtctaggatcagtctgcactaaaatgggcacgcagcattactatctgtcattggattgtgtaccactcacatatatttagccttcctagctccacatattacttctggacagcacatgttcttgatccctacaatcgctgactacgccttccaggtatccattgctaaaattgctcaaaatgacatgacggaggccgttacaaaggctgtccaagatgccatcaataaaagtggcttcttaaaccacatggagaggctggacaagcggatatccacgctagctaatcgggttgctgcgttggagacacaagaaccttccagtgaggaagtgagtggcagcaacgctggtggccatcctgaggacacgatgtatgatttagtggcaatattgatgcagaagctacaaggcaagcacgactacgacgtcgtctatgcacataccgcacaggtatgggtggcacttcaaatgaccaccaccaacaaggtaataataatcgtgtgcccgatgacccttatgctaaggttaagtttaaaataccatctttttcgggttattatgatgctgagaaataccatgattgggagatgacagtggagcaaaaatttagtgcccatcttgtgcctgagtagcatagagttcgacaag

SEQ ID NO: 15294 - DNA, 621 bp, Oryza sativa
  Clone ID: PAT_MRT4530_21150C.1
atggcgcggaccggagcggcagtggctcatgcaagaacggacggcctactcgccaccttcaaccccatgaccgggaagaagtacgagctgggatactgcaccagctccgacgagccggagccacgggcgcatcgttgctcgtggcatggggatatgaatatgattcgaccgttaagagagagtccaactgcacttattctggttattattgagacattgagctcggctgttgtgggccttgtgggctgtcaggttgtggccgaatcaggccgaatggcctatcgggctgctattgctttgctatggttttcgacagcggcagcggcgggtgtaggcaacggcggcggcgatggcaacacggaagaagacgctgagaagtcgaaggaactctcgcgaagtagcgcgtgtcgatgtagaggaagtagtcgatcgcaccggctcgaccttctcctcctcgtgcgttctcctcgccgtactcccacgccgatcagcaccgcaaaccagtggcgcctctaccggtatccacacgaacaatgtcggataaatatcactactggagaaatgatctttggagggtcgagcgatttccacaatagtcccggttctaataagaaccgggac

SEQ ID NO: 15295 - DNA, 1037 bp, Oryza sativa
  Clone ID: PAT_MRT4530_21151C.1
ttttcgatccaacggtagtttacaagtttctattgcatatatggtttccaccacatattttccctacgtgcagtacaatgtactatcttgggtgatggaaaacagaccgagagcaaggtatgcatggatgatcaaaaaagttgattggggataaaaccaaaactttcctcaagtctactccttcaccaccacatcacttttgcatttttctgattggcacaattgctttcctttgcttcaataaatttggcctcctaagctccacatacatgcttctcgctcagtacagcttcgacccttttcaatcgccagatcatgccctccagtatcacgaaccagccatcggttataccatacttagcataattggtaaaacacccatccacaacttttcatactacgccaccgccagcgagcacacgaccatcctccgccactactacagcgcgtcaaccgccacttggagcatgagttttggattggccgatctgtttctaacatttggcaggtatctgataacaaccaaggtaataaggaagtgaagaaagacatacaacaggacgacctacccgttgttctatgcatgcttcaagaaagtttaattgagctagcacctacaatttctgaagatgagaacattgataatgataatggtactacatttactcaaggcgtgcatagttatgatgtgctaaatatgtcttgttcttatgctatattaaagcaacccataatggaaacaattgatgaaatacctttgtcacaaaataatttgtttgttgtttcaagtgataatgaagagtttagcgatatttcacttatattcataccacaactagtgaatgaacatgttaattccactataataccatttgtgttaagtttaaacatgttattcacattgatagcaacaatggagagcttagattgctatcttctttaaatacttggatctatatataatttaatgatccttgtccactcaattgtatagagaataaactattttgtcaatgctagtacagtggatgcaaatt

SEQ ID NO: 15296 - DNA, 365 bp, Oryza sativa
  Clone ID: PAT_MRT4530_21152C.1
gacgaggctattttccccccaaatgttgcattatatcctcaaagacaacggtgttatacatgcggagactgatgatggtattaattaatcatggtcatgatgtatatgacattcatcgtccgtacaggcaaggcattattacttttattagcctacactgcgacactggatgtggttcaaataaacattggtcatgcttttctttcacggaaagggtggctgtgcagcaggagattcacacaccagtgtctgactggtcttgcattcatgcttacaatttgattttgatggaaaattaaattttgcgttgaccatttatccagattattgtttcttgcgggcctagcgaatagatcatggaattg

SEQ ID NO: 15297 - DNA, 312 bp, Oryza sativa
  Clone ID: PAT_MRT4530_21153C.1
ccagctacagcgtaccaccagtttgctggcgtctgactgttggatcacaggctcaagctcatagccccagctatgttggccctaaacttggccgtgccatatcgccggtgatctaccccagctgaccaccctggctccctgtagcattcctaccgctcggtggtatctggtattgaattgtacccgtatagtagtacccggagagaaaaataaagtcactgcatcatcgtgtgtgaccagttgaaacactcggggtgatacccaattctgaataaaaatggtcactgcccaattgtaaacccaaaaaaaaaa

SEQ ID NO: 15298 - DNA, 492 bp, Oryza sativa
  Clone ID: PAT_MRT4530_21154C.1
atggcgagggatgagatccaagccggcatccccaagctcaactcgacaactcccccgagaagaatggatcatccaagaagaagaagaagaagaagaagaagaagaaggcacaagcacaagcacaagcccgacgaggtgaaagaggagatggtggtggacgccttacccaaggaggaagaggaggaggagcgcgggaagaggaggaagaagaagaggaagaagctggtgacggtgaagctgagcgacgagctgatgggatacctgcggaccaaggaggttatggcctacctcgcgcgcgagacgcctcgcccgctcccgatcgatcccagcatcgcgcagcacatgttcgtcggccaagaactcaggcaggaaatcgctgcccaagttcacgagaacagagaattcgacgccttcgtcctctaccagtaccgcaccaagggctacgccgagatccagcaggaggtcaccgatgacgacgacgacgacggctag

SEQ ID NO: 15299 - DNA, 132 bp, Oryza sativa
  Clone ID: PAT_MRT4530_21155C.1
atgcccaagcccaaccaccgcgtggcgcgcattaaccagctgcagatgctttgccgttgcatgcagcgccgcgccgcgccggggcaacagcgcaacacagtagagagggcacgggagaaagcgctgccgtag

SEQ ID NO: 15300 - DNA, 1269 bp, Oryza sativa
  Clone ID: PAT_MRT4530_21156C.1
atggacgccctcgtctgcaccaacgccttcgccaccgccatcgccgccggcaggtttcccctcccgcgaggccgctcgcccccgtacgccgcggcagccgtccccgccctccgctcccgccgctgcctcccgactcgagggctgctacgcctgcgctgcgccaggggggtggattggactgatccgtcgttcgtggcagtcgcggagaagcccgacgcgggggcggaggcatggaaggcgctcgcatccgcgggcggcggtggcatcgaggaggaggaggatggcccgtttgaggcgatcaacggtgatggaggatactcggtggaggagtctgtggtcttgccgccattcgagcagagcttggtggcggcggtggcggacagtgtcgaggacgatgcgctcagtcaggcgctcagctctaagttggatttcaaggagacgtctacttttgtcatgtatggcagtggtgctttcattgccggatggattttgtctgctgttgtttcagcaattgattccattcccttgttcccaaagatactgcaaattgtaggccttggctacacaatttggttcagcacacggtatcttcttttcaaggaaaacagagatgaactgtttgttaaagttgatgatctcaaaaggaaaattactgggtatgctaccgatcaagcgtgggagttcatggactcgccggaggaggagcgaggcgaccggcgatggcggaagaagaaggaagagcacggcgggctagtcgctgttttgtcgtcgcgtcgctcagcctccaccgctgcgtttcccctctcctccctggctccctccctctactctctctccactgaagaggacggcggagctatccgcgtggtggatgcggttatcggcccgctcatcgaccggggcagtagggcctgtggcgacgctgtcgcggtggaaacggatatggaagtgcgcgggttgtcactggcaagctcgagctccccttcgtccttccgacaacaggtagctccagatccccctctcttgtcattgcccccctcgccccctcccacgccgaccgttggtgagcacgagctcatggtccaactcccttgctacctccaggagcttcatcttctccgtgaaatcgtgtcggtaaagctcgagctccccttccccaagcgactcctcgtcctcgaccaggcggcggcgacgctgcacaagatgactcctccccacgcgggtggctccgatgaggtccacctttcccgctctgggaggcggcggtaa

SEQ ID NO: 15301 - DNA, 619 bp, Oryza sativa
  Clone ID: PAT_MRT4530_21157C.1
agagcccgtactgacaactaccgtaccaactgggtgcaaggcaccatcctcaacgctacctcgggtttcacccaaggcaccgttggcgtgagcactgaagtggcggtttacaacgctctggtcctggaccgcagcaagcgcgacatcaagggcggctccaaccgtaccctggccgactccgacggcgacgctgtagaccagtggagcaaactgggcctggccaacgtcaagttccgtgtctcgaacaccaccttgaccgccggtcgccagaacttcagcagcggcatcatcgacaccatcggtaaccgtgcgctgccttcgagcttcgaaggtgtgagcttcaacagcgaagagttcagcaacctgtccttccagggcggcgtgttcgaccgcgtttcgccacggaccgagcagagcctgtcgaaattccgtactgaatacggcaatggtcgccaggaaaccgacaaggtcaacaccctgggcgtcaactaccagccgttcaagagcctgaagaccagcctgttcgccgctaacgtggaagacttctggaaccagtactacttcggtgctacccacgaactgggtgacagccagaccctgtccctgaccacgggctctt

SEQ ID NO: 15302 - DNA, 376 bp, Oryza sativa
  Clone ID: PAT_MRT4530_21158C.1
aaaaacaagggttttggggacaaactgaccgttgtttgaaaaaaaacattgttgggggccttagggggccttaaatcagttcacccaaaatcaaaaaaagatagcaggggggacctgcaaaacaggggaaaccagcagcgggcatttgcccattttgatttttttaagggaccaaaggggggcctaacccgtttttaaagaaactcccttgaccttaaaaaaaatcgaagtaaacacctgtttccttggccatgattttaaggggaattttgaagtttttgaaaccccccttcctggggaaatcgggagggacatagcccaaaaggattttttttgaaaacatgtaacctcgccggaaacctgatgccaccaaaaa

SEQ ID NO: 15303 - DNA, 206 bp, Oryza sativa
  unsure (1)..(206): unsure at all n locations
  Clone ID: PAT_MRT4530_21159C.1
tnganccacatctatcaattctngtacttctcctatttcaaaatataaaactctaaggaaagtagatgtgttttatattttgaaataggagaagtacaagaattgatagatgtngatcaaactataaaacacatctactttccttagagttttcataatataanncatacatccngggtgngaaanaagcgggccccttttccccc

SEQ ID NO: 15304 - DNA, 467 bp, Oryza sativa
  Clone ID: PAT_MRT4530_2115C.1
cattagaactatccaaatatattgctgttgggtggaaatgagatataggcagctcatgagaaccaggaggtaattgcaacattccatgataagaaaaggtttgtatacatcatattttggtaaaaacttttgacaattccaagcgtagaacacttattcctacaaaactgaatgggctgcatttccctcttaacaacgttcgtgttcgcatcactaatcaaaaatatgcaaccatagcactaacgcacaaaatacatcagacctatcaccgtttctatgattagcactcttcagtttctgcatcgaccaaggacttgaccttcagctattcagacagttacaccgccgatcctcgcagaaacctatcaggagtcgtcgcatcaagttgctgatcgcaatttctgcagccacgactccgaatagcggatagcagcagcaacagcttaggttcagagggattattggtc

SEQ ID NO: 15305 - DNA, 1242 bp, Oryza sativa
  Clone ID: PAT_MRT4530_21160C.1
aaattcctcttctccctttgggccgctttcggcccaatcccctccttcctcttttcccctccggccaggctgcctccctcccctctcctctttgggctgctcggcccgcttgctcccctctccctctgaagttcacataacccctccaacggcctcccctctcacctttggccgataggtgggacccgcgaccccacctattagggccatccctaacctctagccagcctccatggcctccctacctccccacgtcgccacctcctccgactccctcgcgccctctcccgtgcgggcccgatgctgccctacttcctccactctcctccccaacttcccacgcaagaatcggctccagtttgcccccgccacgtgcccacgtcaccaccccacctcgccggccgttgccgcccatccaggccacgatttcccctcctagagctataaaaacactccccgcacctccctctctctttttccccaattcccccaagctgccatgccctctagccgctccctcgccacaagcctgagctccgccgcccgccggcgtcctccagtcgcgtaacaccaccgctcccgctgccgccgcactacggcgccaccaccaccagcttaaccgccgcgcgggcgagctcggccaccgctccatttccccaattccctgccgaaaccccgccgccaccactaacccgagtcgcggatctctcctcggcatctagtcgctccccgccggcgagacaggcctcgcccagtcgtgctgctacctcctaccgcgctgccacacctcgccgcacaccggcctttgctcggtttccccaaattgccaccgcaactaccataccaccacgaactcgaggtcatcaccgtgactgtcgcctctggccacctcttgccgccgtttccgacctcctcgtgctgcgccgtcggcttcgcaagggtgcgaagatcctcggtcaccacctcctcgccgccgggaaccgccgtaaccgtctcccatcgctccccggtgagtcccgtcgcaaacgccgtgctcggccagcgttccctaccgtgccgcgacgcctctccctcccataatccttcctttttgctccccaggtcctgccggtcctcggcggcagctccgccgcggttgggagtcgccggagcaccgtcctaggtttccagcgccgagcctttccggccgttgcccctcatcggcgccacttggtgagctcccctcccctttcctgccgccct

SEQ ID NO: 15306 - DNA, 333 bp, Oryza sativa
  Clone ID: PAT_MRT4530_21161C.1
gacggtgctccggcgactcccaaccgcggcggagctgccgccgaggaccggcaggacctggggagcaaaaaggaaggattatgggagggagaggcgtcgcggcacggtagggaacgctggccgagcacggcgtttgcgacgggactcaccggggagcgatgggagacggttacggcggttcccggcggcgaggaggtggtgaccgaggatcttcgcacccttgcgaagccgacggcgcagcacgaggaggtcggaaacggcggcaagaggtggccagaggcgacagtcacgcacgactgggcgaggcctgtctcgccggcggggagcgactag

SEQ ID NO: 15307 - DNA, 1014 bp, Oryza sativa
  Clone ID: PAT_MRT4530_21162C.1
atgagcgggttcttggcggtggtggggaaggtcgggaccttcctgctgtggctgctcttcctcgtgctgcagacggccaccaagatcgtcggcagcctcctcgccgcggggccaccaccggctgacgcccaggaagccgcggcggcggcggcctgcgcggcgcagcctccgctgacggcggtcgagacccggtcgccggcaccgtccagggcggcggcggcggttgggggtcccccgccgaagctggagaggaagtatttcagcttcgttgttcaggaaagagcatcgaacgtggttattgaagcactagcgcaagctggtcttgagtcttctaatttaataattggaattgatttcacaaagagtaatgaatggacagggaagcgttccttcaatggtatgagcctacatcatattggtgattccccaaatccttatgagcaggcaatcacaattattgggcaaaccttgtcagcttttgatgaggataatttaattccttgctatggttttggagatgttctgtttccactttccaaccgtgcagcatctacgcacgatcaagatgtgttcgctttctatcctgacgaaagaccatgcaacggttttcaggaggctttggcccgatatagagaaattgttcctcatcttcgtctttccggtcctacatcattctctccaataattgaaatggccacaaccattgttgaacaaagtggtggccagtaccatgtattagtaataatcgctgatggacaggttacacgaagtgtagatactgaatttggccagttaagtactcaggagcagatgactgttgatgctattgtacaagcgaggggactgtttcaatcatctagagaagcaagggactggtttattatttctttttttttaacaattgaagcaggagatctaccaataactagtaggacacaactaagactgtgtcatgtttgcttagaaacattcgacagggacattgtttcaagaatattatcaacatctgaataa

SEQ ID NO: 15308 - DNA, 915 bp, Oryza sativa
  Clone ID: PAT_MRT4530_21163C.1
gggaccatcactaccaccacttcaccaccaaacccaaccaagaacaagttttcaggggcaaattaagaagagcttggtgacgatatgagcacggcgaggttcatcaagtgcgtcaccgtcggcgacggcgccgtcggcaagacatgcatgctcatctcctacaccagcaacactttccccacggattatgtgccgacggttttcgacaacttcagcgccaacgtggtcgtcgacggcaacacggtgaaccttgggctctgggatactgctggacaagaggattacaataggctgaggcctctcagctacagaggagctgatgtctttttactagcattttccctcatcagcaaagcgagctatgagaatattcacaagaagtggataccagagctgaggcattatgctcctaatgtgccaatcgtattagttggaaccaagcttgacttgcgtgaggacaagcagttcttcctggaccaccctggtctagcacctatttccactgcacagggggaggagctgaagaggatgataggtgctgcggcgtacatcgaatgcagctccaagacgcagcagaatgtgaaatcagtattcgactcggcgatcaaagttgtactttgcccgccaaagccgaagaagaagaacaccaggaagcagaggagttgctggatcctatgagtgataaacagcaagattggcgtattccgcaggaaacctgtattatttttacagtgtgtgttgtgttatgtttgtgtgttgcagattagatgcagtttgggttacaaaatttgctgggtctgaaatattcagctcagtgcttcttgagtactacctctgatgattcttacaaaagtgttctttggttggttcagatatatatattatgattattataaaaaaaaaaaaaaaaaaaaa

SEQ ID NO: 15309 - DNA, 702 bp, Oryza sativa
  Clone ID: PAT_MRT4530_21164C.1
atgagcacggcgaggttcatcaagtgcgtcaccgtcggcgacggcgccgtcggcaagacatgcatgctcatctcctacaccagcaacactttccccacggattatgtgccgacggttttcgacaacttcagcgccaacgtggtcgtcgacggcaacacggtgaaccttgggctctgggatactgctggacaagaggattacaataggctgaggcctctcagctacagaggagctgatgtctttttactagcattttccctcatcagcaaagcgagctatgagaatattcacaagaagtggataccagagctgaggcattatgctcctaatgtgccaatcgtattagttggaaccaagcttgaagaaaaaacattggcaacaaaatctgataagaaccgaatacttgcagacttgcgtgaggacaagcagttcttcctggaccaccctggtctagcacctatttccactgcacagggggaggagctgaagaggatgataggtgctgcggcgtacatcgaatgcagctccaagacgcagcagtttgttagttcagagatattgctacctgacattgttcatccacacagcattatatatagtatggaccaagctggtgctacttttagattagatgcagtttgggttacaaaatttgctgggtctgaaatattcagctcagtgcttcttgagtactacctctga

SEQ ID NO: 15310 - DNA, 585 bp, Oryza sativa
  Clone ID: PAT_MRT4530_21165C.1
atgggcaacactgtgacccgaaggggcgacacagatgcagctcgatgtcgatgcagcggcgagaactccaccagtagggaggccatgctgaggagggcgcctctcagcgtgccaacaaccagtggaggtggaccacgggcgtcggcactgtggcccgagaggggtgacgcagcagcaacccaaagcttgatggctgccgacggcctcgatcgcgagcaccaccaggaggcaagcctacccgagcgccggccaaccggaggagccgagggcacggaagacggcctggacgacggagcacacgacggcgtcgtggcggaaggaccagacggcgacggtgagggagacagccagtcggagacgaccacggggtcgaccggtggagaggcgagaggggcccatccccttggctgcggcgctgcacgccgcgtggcggggccggcggaggtggcgtcgacggtggctagcggcgcagtggaagtcggggacggcggcatgttagaggacgacgaggaatgcaaccagatcggcgggacgttgggtccgcagcgagcctacctgtgctacttcagcgtgatcaagcagtga

SEQ ID NO: 15311 - DNA, 468 bp, Oryza sativa
  unsure (1)..(468): unsure at all n locations
  Clone ID: PAT_MRT4530_21166C.1
ggncctttatggaagnagggaagcccccnnccaacatntttcangctttnccttttttaaganttngnacngaggntnacccttgaaaaggccttnaggcaangnnattnagtgagttgcctcaannctgttangcnnccccgggnnncnaatttggntccntttnnnaagggtgcccgnattgttangcggaanncantttnattggggaancantccnnttncagngnttannccangggcttaactaancctccctaaagggaaccanagntggnnttccgangccngtggcttgncgttttagnactagtggatnctccggggcntcngagttnggcannagcnnntttgtaatnnnccattnnnngcntanccggangntttcantnttanngttctccannccncncnangtgaggatnttgtgnaaacaaaagtccggcnatananacaaaaaaaaaaaaa

SEQ ID NO: 15312 - DNA, 2728 bp, Oryza sativa
  unsure (1)..(2728): unsure at all n locations
  Clone ID: PAT_MRT4530_21167C.1
aaaaacgcacaaagggggccactcccatcagtaggcccacctgaaggaaggaatgtggggggttcttgttattcaccaaatgtgaagaggatattttccaagaattttattggggagccacggtttttcccccccaatttgtaaaaaggccgaggaggcggggataaaacccactaaagaggagattgtgggcgggcgccccccaccaaggaaaaaataagtatanagtatgaaccggcatccacaggaagggagagtatgagccgaaggggaggatatattaagaaatggtatattttagattatgtttttgtcttgttgctttgctctttctttctggtgattaaaaggccatacacttgagaatcacaccatataacatttttccgccccaggagagaatgcagtctcaaaacatctacaacttatctgcagttatgcagaagtagggattaaaaagccatacacaggagaatcacactatttaacattttcctgccccaggagagaatgtaatatcaaaacatctacaaccatatctgcagttatgcagaagtagggatacaaaggacaggtggcaaggaaatctagttaacaactgacatctacaattaaaaaaaaatcaatcaaatactagaaaaactaaactaaagagcacaagacccacgaatggggaaaactattggttatgtcagtgtggatcattgaaggtgccatctttcttcaaggattgatgttacactcccgcaggaagggctggtcataatcgaggtatgccgaccagtagtttcggaatttgggcagaccaatctccagccaaggcttcatattgccattgtaatgtatgaccgcggcacgttcaatatctctgctgctcacatgcgggttgtaaccaagaccaaggacatgccatgaacgattgaggggaagcgtcttattccagaatgtaatcaaacctggaggcagagtgccaagtttccatagtaatctgtcctgattaagcttttgccaggagtgatagatttcagttatgttctgccgcctccattcagccagatcaaagacattcattccaaaagcccatccacatgcatgggggtcaaaattcttcacaatgacaggatttgagaaattaaggtaacgatcaaaacgatggaagctctctccacaagtctctacaacaccaattactttccccttcatatcaattgaccagaggctggttaggtccttctttatcactacatcatcatcaagaaagacaatcttgtggagatttgggtaaatctcaggtagataaaatcgcaaatgattgagaatagaaagatattttgggtttctgtacttcaagtttgaatctgagtttgcacgatgtgtcctgaagtagtaatcaatcattgattgtgattcgagctgtttcagcactgggctgtagctggcatttagccatgtgaactcttcaatattccgtacttcaatcgttgctttcccaggagggttagagaggaaccacattctcattggagcatagtttagtctgtcagttactatgtggaagacatgatgagaaggatgcttggcatttaacactgttgaattaacaactacagctgctgccaatatattgtcagagaacaatgcatagtgatatagtttggggtcatcaagtttttccttgtttgggaattgctgatggctaggatccaataaaaaatattcattagctagcctcaaggggaggcagtgaagacccttgggaagggttttggctgcaagttgtgttaggaaaacagtttgcttcttgtgtgcatgcagttgctcctcagctgagtgaagcatagctcgaagctttttgacaacaacagaacaatcatcctgcatcagttttcccttgatcagtgtctgctcaagtgttttcaccttctcattggcattcttgggtagatcggagtccttggatgcatcaccaagaaccttttgaacttcccgaatccgctgcctcaagtctttgaggtactggggatttgctcgaatggctccaagaccaaggtagacctttgccttgattaacagatccctgatattgcggattctagtatcaagcaaagcaccatctttgtttccttccagagagttttccatggatgtctgttcaggcacattctccaatgaacttgcaggaaagttaaggaatggctcagaagcagatcgctgttgggatgccgtggttatctgctgctgatcaactgacaccgtcgccaagccatcatcttctccatccttgcttgtcacttgctcgatcaagtcatcgtcttccgatctggcactatcagcagccgtggcctcagagagcacccggttcttgtgctcccctgccttcctcaatagaaattcttggctatcgggttcggtcgatttgcttgcagattcgcgtgactcctccgagaagacgatgccaacgggttctttcaaagaacccacagtttccagaggaagtgcatttagcttgctagccttaacaccacggccctgattcacgatttcgccaggcaaatccctcctctggttggggttcagcgccgccgagagacggcgcgtgtagagcacgagcggcgagagcaccgtgagggcgaggaggagcagcagcacggaccgccgccgccgcctcaccatctcctcctcctcctcaatggggtttcctccctcccgccgcattcctgcagcccgg

SEQ ID NO: 15313 - DNA, 1136 bp, Oryza sativa
  Clone ID: PAT_MRT4530_21168C.1
tccccctttttgaagagtaggattttcattttcctctatactccttaatcaacatgctgtaatgtcacgcccggaaattcactagtaatttccgaacttatttgtgcataaaatcctcgtccaggaatcagccgaggcccaaccatcctgaacaaccatacccggctgtacagatctaactccaaaccaggagctaagcaaattattaccagttataacatctatagttatgtcttcttgaatacttccggcgcactcgcgaaccttcgcaacgacggaaacgacaagctatcacgcaaaatgaggaaaaagactaataaaaaccaaataaacaatacataaaaagatcacccaaatgatcaaccgaaaccggcgaacggaaccggcggctctgaactaaaggacgactcaacacggacgaacgaacgaagcacggggaacacctcattcgaacgaacgagcgaacgactcaacaacggctgcggctaaaccggctgcgacacggcggcactaagacaacttgactcagctaggcggcggctcagcggacaacagcgggtacggtgcacggcaatgaccggctcgacgctaggaccaaacaatattagattgaattaagaccctagggataaagtacaccggtgaacgacaaaggagcggcggttgccggcgaaccacgatacgacctcgccggagatagagcggccggctgcggatttggagggcatgcacacgtagaggacgacgaggcgaacccaacggtactcaccacaacgacaatcgacgtccgacgacggccggcaacgacggggaacgggcggcggctcggttgaccggcggcggcgaagaaggacgggcggccgggcttcctcactcctcggcgcacctcttggcggcggcggtaagcggcggcgacggcaggggcggcgctgcggcgcggctgcaacccggccggcggcggcgacgaactaaacgcgcgcggcgacgaggctacggggcactagagagctcgggagagggggcaaacgaaagaggaggactagggggtcctttatatagccataggaggccgggatcgagcccacatcgacgggaaaaactcgggaaagtttatcttcgccggaaaaaggaaagga

SEQ ID NO: 15314 - DNA, 502 bp, Oryza sativa
  Clone ID: PAT_MRT4530_21169C.1
gtgcgtgccttggcgatcttgtcgtaggcgtcggcgctcttggggacgatcccctgcagcgcctcgcggggcacgttgtccagcagccacgtcggccacccgtccaccagctcatcctcccgccgcggcgccggctgcggagccggtgccggagtttcctcctcatccacggccgccgccgccgccgtcgcctccgcctccgccaccgccgccgccgccctccccttatcccttgtcgccgccgccgcgtggccggtcagcgattgtgggacctcctctcccgcctcaccccggcgacctccccagtccccacccgctgcccggatgcaggaatggcccgccgtctcctcctcctccaccacctccgccgccgctactccgtctccgtctcctccgcccccccggccgcgccgccctccaccgtgctctctcatccacgggtaacaaaacactgattattcacaacgaaatttagtaacctactcgagttctacaaggttaa

SEQ ID NO: 15315 - DNA, 1749 bp, Oryza sativa
  Clone ID: PAT_MRT4530_2116C.1
ccccggcggcaggcatgcggcgcggggcgctctctccctcgtgcctccctctcctcctcctcttctccccattctgatctctgacaccgcggcggccatctcccccatctcgatggcggcgccgccgcagccgcagccggagccggagcccgccgcgggccggcgcggggctggaggcgctggaggggctcgcgctggacaccgtcatcgccaaggccggggcgcgccaggccgcggcgctggcctgcgccagcacgcgcctccgcgacgccgcgggcgacgacgcgctgtggcgccgcttctgcgccgacgacctcgccctccacgcgccgctcgcccccgacggccgcgcgctcccttccttcaaggatgcctataaagtttggttggagtcttttggcatgtatcctttacctctggtaaggagagtgaaaattttctggagttcgctgaagagctggctgtctgaaaacttccctgaagcacacaagacattgaataaaggtgtttctgaagctcagatacaatcagcagaggatgatcttggattcaagctccctttgccgacaaagctgctctatcgtttttgcaatggtcagctgccccttagtgaacatcatcacgagaatatgcgaatggctcatcttggtattataggaggctatgtgttttatgaccacttgatcaatgttcacctgtcaccacttgagcaaattgttgaagagacgaaagaattttatcgtgagttctatgaccaaggtgtttttaatatgacaaatctcattatagtggcaacttcatggtatcgtccaaaaacatttttccttaattgttcagatgaccaactctatgttggcaccatcaatttacaagatggagaaatgttgccatgtgtaccgaaatcactgataaggccaactaatactgatatgccccaagatggattgcttctgtggttagaagagcatcttaggcgtttacagaatggcatgatcaagatccgtatgcttaagacgtcaaggtatatcagcttatttccagaagcatccccatcatgtacgtccgcaatgacaaatggtgtgaaggtacgtgcatctgctgtctttgcaccagagcaccctgaaagtaggcggcctggggctaaatgtttatatgcatactccattcgcctgtcagttccagaggcatgcatgctaggtggtgtgtactattcctcgtgccagctttactcgcgccactggatcatccgatggagagaccgggttgtttctgatgtgaacggggaaggtgttattgggaagtaccctctactaactacaggccaggaagagtttgtgtatgagagttgcacgcctctgcctgacagtcccggatctgtggagggctctttcacgtttgttccggggaagttgagccggcctgaaggaaagccatttgaggtcacggtggctgcgttccctctggaaataccagagtacatcttctgatttctgaggattgtacatagtatgatgcaataatgcacctgcatagatttagtagtacttgtttcatgtagcagcaagaatgggatttgcttgtaatgatcttgtgaatgcggcataaattgtggcacctggaagtaagcccttttttttggcgcgttaaatgcgtgtttgatttaaaaaaaaaaaaaaaaacttttatttgttacttcctctatctataaaattacacattaccccggaccaaaaaaaaaaaaaaaaaaaa

SEQ ID NO: 15316 - DNA, 531 bp, Oryza sativa
  Clone ID: PAT_MRT4530_21170C.1
ttaacacgccactcctgctttggcttcgtcttctttagctgatgattgatttcttgctcaacttcctgaatgtcacgcccataaattcactagtaatttccgaactaatttgtgcataaaaccctcgtccaggaatcagccgaggcccaaccatcctgaacaaccatacccggctgtacagatctatctcaatccaggaatgtaccattctaaaccaggagctaatcaaattattaccagttatagcatcatttattatgtcttcttgaacacttccggcgcactcgcgaaccttcgaaacgacagaaactacatgctaacacgcaaaacgaggaaaaagactaagaaactccaaataaacagtacatataaagatcactcaaatgatcaaccgaaaccggcgaacggaaccggcggctctgaacggctctaaactaaaggacgacttaacatggacgaacgaacgaagcacggggaacacctcattaaaacgaacgagcgaacgactcaacaacggctgtgactaaaccg

SEQ ID NO: 15317 - DNA, 252 bp, Oryza sativa
  Clone ID: PAT_MRT4530_21171C.1
gcaggcactcgtacctccaaagctttatctgatgaaaggccaacaaatctcacatgccttattggaggacatgacaacacaactgaatgatactgattggaaccatcattatacaacaccttcagactatggtgagatgtgcactagaatggcgtataaccatatagggcaatagcttcctgtgaatttgaatcaaaatggaagaacatatcccggaacatgtggcgcaaaatgagtgaacctaacatgacc

SEQ ID NO: 15318 - DNA, 1148 bp, Oryza sativa
  Clone ID: PAT_MRT4530_21172C.1
ggcattcacagtgggttgagttggcattcagccttatcgatcctcaacaaatattgtgtgccacgtttgtgtcacgcccgaaaattcactagtaatttccgaacttatttgtgcataaaatcctcgtccaggaatcagccgaggcccaaccatcctgaacaaccatacccggctgtacagatctaactccaaaccaggagctaagcaaattattaccaattaaagcatcttttacaatgtcttcttgaatacttccggcgcactcgcgaaccttcgcaacgacggaaacgacaagctaacacgcaaaacgaggaaaaagactaataaaaaccaaataaacaatacataaaaagatcacccaaatgatcaaccgaaaccggcgaacggaaccggcggctctgaactaaaggacgactcaacacggacgaacgaacgaagcacggggaacacctcattcgaacgaacgagcgaacgactcaacaacggctgcggctaaaccggaatcggagaggaggcctcaccgggaaacggtagtgaacggagaggaagaggcgatggctacggtccgacgacaacacacagagacgatgatgacgctagggccaaacaagattagattagatggaattaagaccctaaggataaactacaccggtgaacgacaaagaagcggcggttgccggcgaaccacgatacgacctcgccggagatagagcggccggctgcggatttggagggcatgcacacgtagaggacgacgaggcgaacccaacggtactcaccacaacgacaatcgacgtccgacgacggccggcaacgacggggaacgggcggcggctcggttgaccggcggcggcgaagaagaacgggcggccgggcttcctcactcctcggcgcacctcttggcggcggcggcaagcggcggcgacggcaggggcggcgctgcggcgcggctgcaacccggccgacggcggcggcggactaagcggcgtcgacggcgagctacggtgcacgggagaccacgggagagggggcaaacgaaagaggaggactagggggtcctatttatagccatgggagctcgggtccgggcccaaaacgacgggaaaaactcgggaaagtttatcttcgccggaaaaaggaaagga

SEQ ID NO: 15319 - DNA, 328 bp, Oryza sativa
  unsure (1)..(328): unsure at all n locations
  Clone ID: PAT_MRT4530_21173C.1
cttgagtgagagtgagcgagtgacgactactggacgtcggaaatatatatggtaatgggaatgggtaggcgagccgccgcagccacagccggggcggaagaacgacaagacgtccaccaccacaatggcctccacgccgccgcagccgccggcgggcgnaacggaggcggcggcgtcgtcgctgctgctgcaagagctggaggagttgatcggcgcgtcggccttcccgacattggaganctgggggatgatctgattcttgacctcgatttctcctctctttttttttctcccataaaatttcaggggttttttttngtccgtccga

SEQ ID NO: 15320 - DNA, 1276 bp, Oryza sativa
  Clone ID: PAT_MRT4530_21174C.1
atgggccctacaacacgcgggagaggatgggatggccgatggcaccaagaggaggaagaagaagcttggggggtggagaagatgatgatgattgggtttggcattgggggcgtcgcaggagccttgcccttggtcctccgccgctgcaaccggtcccgtacccctcccccgccgatggtgatgaccccactccaccgcagctgcttcttcttccgaccacaaccctctagtctctcccactacccatccccatccccatgcgccgccgacgacttgttcaccgtcgactacgacccagaggaggaagaagaagaagaagacgaggagggttctccgtgggagggcgcggtggtgtaccggcgggacgcctcggttcaccacctcgagtacgccaccaccctggagcgcctcggccttggcgacctctcctcccctcactctcgggcacgtgctgccaccatgggaatcctcatcctctcctcccccaaccttaccggtaccaaggacgaaacgccagtgctcgtctctctcgacgttgccaggcgccggggccgcctgcgccttgacggcatcgtccgcactgtcatcaccctcggttgctatggttgtgctgagccagcgcctcaaggtatatttgcgaatttttccctgttactgaccgaaggcagagtagaggaacctgatgtggttgatctcggcacgatatttgaagaagaacaaaccaaagctcctgtgctaactggaagccaagaagatggagacgacgaagatatagattgggatgaccggttgcatttcccagctggagaaaaggaggttgatatctcgaagcacatcagggacatcattcacttagagatcacgctcgatgccctgtgcagtcccacctgcaaaggtctctgcgttggctgcggcgaaaatctcaacaccagcagctgcagctgcaacacagagaaacagcaggctaaggctaagaatgttcagcggcgagggcctctcaaaagacctgttgaaaccactgcaaaggtgatgtaaacaccgcacggcagattttagacagtgatatgtatgtaatacgttgtagcagtattcgaagataatatgtttagatgatacatttcattttttgagctcatatcctactgtaagacggaaaaattgatgccatgaagtgtctgtttgcgtgtgttcgaggtacctgaattctgacatgctatcggaggcatcgatttgtagggtgacagttttcttgtgccaaaaaaaaaaaaaaaaaaaa

SEQ ID NO: 15321 - DNA, 1218 bp, Oryza sativa
  Clone ID: PAT_MRT4530_21175C.1
gctctcatttatgaaattagtttttttattagtccatgtttaatactctaaattagcgtccaaacatgtcacgcccggaaattcactagtaatttccgaacttatttgtgcatgaaatcctcgtccaggaatcagccgaggcccaaccattctgaacaaccatacccggctgaacagatctaactccaaaccaggagctaagcaaattattaccagttataacatccataattatgtcttcttgaatacttccggcgcactcgcgaaccttcgcaacgacggaaacgacaagctaacacgcaaaacgaggaaaaagactaataaaaaccaaataaacaatacatgaaaagatcacccaaatgatcaaccaaaaccggcgaacggaaccggcggctctgaactaaaggacgactcaacacggacgaacgaacgaagcacggggaacacctcattcgaacgaacgagcgaacgactcaacaacggctgcggctaaaccgacagcggcgcggcgactgcagaacgtgcactagggcaacggctacgcggcggctagcagcggacaacagcgggtacggtgcacggcaatgaccggctcgacgctaggaccaaacaagattagattgaattaagaccctagggataaagtacaccggtgaacgacaaaggcgacgacgaacagcgacggaagatggccggcgacgagcttcaaagggcggcgaggtactgtccacggcggcgacgactttccggcgatgtgcggcgacaacagaggggtggccgggcttcacttcgcagctgcgaatccaatggagtcgacgacgaccaaatgcggcgacggacgacgacgaacagtgcagctggagacacggcgacgacggcggcgctctggttcacgacgacgggcaacctccggtgggatttggcgcaaaacaaccggtggccgaggtagctctcacccttgcgaagccgagggaggcgacggctcaaggcggcactgaccagaggggcggcgcggcgccgctggagatggtggcggcggtggagagagaagacaagcgtggggagagcgattccggcgaccgcggaggacgggacttgaggggataggtagaggacgacgagggggtcctttatataggcacgggagctcgggaaaaagcccacaacgacgggaaaaactcgggaaagtctagggttctcgccggaaaaaggaaggat

SEQ ID NO: 15322 - DNA, 497 bp, Oryza sativa
  Clone ID: PAT_MRT4530_21176C.1
gggagagaactagtctcgagttttttttttttttttttttgaagaaatcacagtggaggaggcctccacgttatagattatattaaagccaaagttatttacagcaaacagagaaaaggaaagaaaagaacaaaaaaaacaaagattacagaaggtcaatccatgattgcactaggggacgatgaatctccttgagcctaggtaaatgtagactcaaatctaactttaaatttcttttccaggaaagaacctcaggctggattccattgaaaattaggttatttctctccttccaaatattccaggcagccaaaagcataagttccatgaaacatggattagagaaagaggcactctgtgattgaatgtcatctgttgaagaatggagagagtaagaaggtagaacattattaatttcacaagccacttctctgaagtctcaaacacaagataatatgctctgctaatagaatggcagtaatatttcttataagcct

SEQ ID NO: 15323 - DNA, 132 bp, Oryza sativa
  Clone ID: PAT_MRT4530_21177C.1
atggcctccacgccgttcctccatgatggctcctctcatgttgctaatctccacgaacactattggggatatcctcttagcttgtttgcccaacagcccaatctccgccaggcttcgacggtgaggatgtag

SEQ ID NO: 15324 - DNA, 780 bp, Oryza sativa
  Clone ID: PAT_MRT4530_21178C.1
aaaccggccgggccgtcaccgcagaaaccctagagctcaccctagcgcgccgccgccgcagccatctccgccgccgctcgtcgggctctctccatctcccatccaggatgaagttcatttctgcctatctgatggcctatctggctggcaactccagccccactgcggaggatttgacaacgattctggagtcagttggttgtgaaatcgacaatgcaaagatggaactcctgttgtctcaagtgagtggcaaggacatcactgagctcatcgcttgtggcagggagaagtttgcttcagttccatctggtggtggtggtgtagctgttgctgctgctgctcctgctgccggtggtgctggtggtgctcctgcagctgaggcgaagaaagaagataaggtcgaagagaaggaagaaagtgatgatgacatgggcttcagtttgtttgactgagtgatgcggtcacctcttctatcatcaataccagactttgcgcaggaaactagagtgatgatgtttgggattttagcttttcttctttagttaagttgaaaacacttgaggaaagactatgcttcctactatgttttgatatgtagtaacgcagccataggttgctggttacttcactggtgaaccatgcttttgctatcaaaattcaatgcttaatggaggatgaattgtgctcggcagtagtttttagctgtgttcaattatgtgtccctatttgttcggtgttatcagctccccatttgattcatttgagctacgttatctgtct

SEQ ID NO: 15325 - DNA, 253 bp, Oryza sativa
  Clone ID: PAT_MRT4530_21179C.1
tccagggtgctagctgctgctcacgcaacaaccaaaggatgcagcaggcagaggagatgaacggattcttctccagggaagagagtggggataaaatacttggtaagcaggagctgaaatgaagcatcagcagtacaacttggcattagttgacttgactccaatataagttggatgtgaaattgtgattatgatatgcctggtgatatttatgtaatgaataaaaaaaggtggcatgttattttttgtaccc

SEQ ID NO: 15326 - DNA, 868 bp, Oryza sativa
  Clone ID: PAT_MRT4530_2117C.1
acatcccatcaaattgttagacacatacgtgaagcattaaatatagatttaaaaaaaactaagaaaaagtatgaattaccccccgaactatcgcggtcgtctgaattaccccccgaaccacaaaaccggacattcttcaccccgaactatgtaaaccggacgaattacccccctcgacccaaaccgtggtggatttgctctacgtggcgtacgcgtggcagtccacgcggaggtaggcgggcgacagggagcggcggcggcggtggaggcgagcggcgggggatgaggcggcgagcggcggcgggggcggcggaggaggcgagcggcggcggcatgcggcggaggagacgagcagcggcggggtgaggtggatgagacgagcggcggtgggatgtggcggaggagacgagcggcggcgggttgcggcggaggaggcgagcgcggcggcggggtgcggcggaggaggcagcagcggtggtgtcgcgggccacgcggagccgcctcgcctcgccacccccttgcctcctccgccgccgcctcgccttgccgacgcgctcgcctctccaccccctcgcctcctccgccgccgcctcgcctcgccgccaccgccgcctcctcgcctcccctcgccgcgctgctgcctccgccgcggccgtctaaaggagaagagagagagagagtgagagatagaacagagagagactgataggtggggcccacctattttttaataaataaattgctgactggaccgccacgtagaccaaaaccaccgcggtttggatcgaggggggtaattcgtccggtttacatagttcggggtgaaaaatatccggttttgtggttcaagagggtaattcagatgacc

SEQ ID NO: 15327 - DNA, 148 bp, Oryza sativa
  unsure (1)..(148): unsure at all n locations
  Clone ID: PAT_MRT4530_21180C.1
gcgcattttccggatttgcaagcacaacagggatattaaggcgtcggaggagactgggaaacgcctcaaggaagagttgatttatcacacttacaggaaatgtgtcgngcaaaatttgctgnggaatgattatccacttcgtatgaag

SEQ ID NO: 15328 - DNA, 373 bp, Oryza sativa
  Clone ID: PAT_MRT4530_21181C.1
aaaaaaaaaaaatttttatttttaaaaaaaaaaatttaaataaagttagaaaccaaatggatttccagccacgatttttgaaacctgattaaaaaatggttgaaaaaaaaaaacaaacacactgatggatttagtcaaacttacaaaggcatgagccattaaactggatggactttttatttattcataatgtaaacaggctggtgcattggcaattaaataataaatcgccttggccttaacaattgcaggggttgcacctgcaattggagccacaattgaagccatgggcagccttgcaaaatttaattgctttgccaaccccctaaaagtgcccctttttaggtgcaaaacctaggaaaggggttgcaaa

SEQ ID NO: 15329 - DNA, 210 bp, Oryza sativa
  Clone ID: PAT_MRT4530_21182C.1
atggccgtcgtgatctgcacgctggccctaatcctggcccagcagcagctgatggccgtcgacgcctcgccggcggagcagcacggccggcggctgctcggggactgctgggtctgggactgcccctccgctgaagccgacggctgctgcacaatgtcgggttgcacatctacgtgcgttgatggcgtaactgcgtgcgtttgcggctag

SEQ ID NO: 15330 - DNA, 1042 bp, Oryza sativa
  Clone ID: PAT_MRT4530_21183C.1
ggagtgtgtgttttctttggaatagcgtggggagattggattaaacggcttgccaaattagcaagcaccaaactgtggcactgctctgcttcaacaaatttaatatactactagtaatctgcaaaaaaaaaaggattcacaacttcgcaggcttggaaggtggaatcgacctatatagcagcaaactattcctacttgtgtttttttggggggagttctccttggcgcctatgtacaaatcaggacgcctatgtgcccgtgtgccgtagttgaggcagctctgtcatgccggttgcaacgaaattgaccggggcggtggattggcgggctcactggaaaccgcccaagccgttgagcagcagctcgtgtggtcgcagcagcgtcggggtgggcgccagcggcagcggggatgggtagtacgagaggtcgtagtcggaggggtcaggcaggccggaggcggcgggcaagagctcgtcggggatgagcggcgcgcggcagagcgggcaggtgcgctgctcgtgggccatccagcggtcgaggcagccgcggtggaagacgtggcggcagttggacagccgccgcacctcgtcgcgcccgcagatgccgctgaggcagaccgcgcagtcgccgccaccgcacaccgccgccggggcggacgccaccagctcgtcgaaccgcaccacggggagggcctcctcgatggccatcggcggaatcgccctgaactcgggccggcggtgctggagcgccgacgacgacgcccaaccctccgccatcccgccgccgcgcccctgcagcatcatgtcctgctccgtggccgccaggccgggcgggttgtcgatgaggtcgccgaggccgactgcgtggaaggcccagaggagaaagcgatggaggtggccgaggaggaggagcacctggagcagcagcctcgggaggagcagctccgagtagcccaccgggaagcccatggcgatcttggatacagccgaattgtgagctgagctgaggtgagcttgcgtctgtgccgcgtgcgccctcgtgc

SEQ ID NO: 15331 - DNA, 495 bp, Oryza sativa
  Clone ID: PAT_MRT4530_21184C.1
atggcgagtttgaagtttgtgcatcagtttcgcgtctctgctgggttccacaatgtcataccagtagattcaggatttgttcccaatggcgagtttgaaggctccaggccgagcttctgggattctcttcgactcttcctgcccctccttccacaactcctcgccaccagatccgccaccgtcggccaccacaagacacaagctcgctatgcccccgccaccaacaccggcccaccgcctgcctccatccccgcggcttcggcgccgccaccggcgcctcaccgcccgcctgttccgcctcccaccgccgggccgccgtctccaatgaccatccctctaagcccagcgaactcccccttcttcccccccctatccccctcctacccctcccacctcacccaccccaggaccctaattcgtcggcctacgccagaatttgggttgtcgcccgcgccagagaaggagaggagttcgtcggagttggagaagaagtaa

SEQ ID NO: 15332 - DNA, 478 bp, Oryza sativa
  Clone ID: PAT_MRT4530_21185C.1
ggaaaatcggctctcattcatgatatcttaacacagggccagactccaggattgggggaatcccgacgagaagatgaaaaaaacccgcgacaagtttctcaacgaccccaaaaaaaattagcagtaatatgggaacatgtttatatattcctgggggcccgggcaaggggcactggggcaggttcttctcatgagggctccggggcctttacaacagcttccgggacctggtccggggacgcttttttttttttttccttgggtgccccctccggctccgggttttcctttgggggctccgggacggggacctcggattcgacggggttctcggggggggggggggggggcttcaacagggtggcgtaactgccggactttttgaacagctgccaaaaggggttctggcagtaaaggatccccttgggcgaggcgtaggaggcgttcgtcaaaaggcacccgccatgggcgcccttga

SEQ ID NO: 15333 - DNA, 102 bp, Oryza sativa
  Clone ID: PAT_MRT4530_21186C.1
atggcagtagaacttggagttgtagctgttgcagatgcttcacttaaaggaaacgtggagaagccaaaattgccggtgaaatcattggagctgctgaagtag

SEQ ID NO: 15334 - DNA, 1507 bp, Oryza sativa
  Clone ID: PAT_MRT4530_21187C.1
atggccgccgccgacccgccgccgccgcccaccgggatgggcttcctcggcctcctcagcttccgccgcagcgccaccgccgtcgcctcctttgaccccgcgcaggacgacgagctgcaggtcctccacgccctccaggcccacgtcgccgaccgcctcgccgccctctcccatcacccgccgctcctctccctcgccttcctctccaagctgctcgacgcggtgctctcctccgacgacgccttccgcgaggttctcggcatcggccccgtcgccgccgcgctctccaggccgcccgccgaccgcctcgccgctgacctcctcgaccgcaccgtcaagacgctcgacatactcaacgccgtctccctcacgctcgcctcgctccggggctcgcaccgcgccgcgctcaccgccgcctcgtgcctcctcgccccgccgctgcaccgcgcccacttcggccgcgcgcgccgggccatctccaggctgttccccgacgccgccaagctcgccgccgcgccgtccccctcgtgcagggccggccccgcgcgcgcgctgtccttcagcgtctccaggaactggtcctccggccgccacgtccacgccatggcggcgcacctcgcgccgccgccgcagtcgcccacgtccgcctcccccggcgcgggttgcgggctggggctggcgctctacaccatgagctcggtgctcgtcttctccatgtgggcgctggtcgcggcggtgccgtgccaggaccggtcgtccgcggccaccaaccccccggtggcgccgccgaagcaggtgcagtgggcggccccgatgtgtgctctccaggagcggatcgccgacgagtggaggaaaaaggacaagaaggggtcgtcgtcggggtcggcggcggcgacggggctcctcgccgagatgcaggctgtggagcgcgccgcgcgggagctgagcagtctcctcgaggaagtcgcggaggaggaggaggaagagcagctggtgatgggcgcgaccgatgagcgcgcgcgtgacgtggtcgagcgcgccgaggcgctcgccgccgcgtgccgggctctggaggagggcctcgcgccgctggagcggcaggtgcgcgccgtgttccaccgcgtggtggccagccgcggcgaggtggtgcgcatcatggagcacagcacgcgcagcaacagcagcgccaccgccagcgccgcggcggcggcggcgtccggctccggcgcgccgcctcaccaccattccttctgaggtttccttccgtggagggaaacccacgatggtagttggctgttgatttgatttaattaggaggatgataaaaaaaaatctctctttttcccctttctgtactctaccattctttgatttttatgtgctgctgctgctgcctttgtgatcctgtgaagtgtacatttgcttgtaaaaactaactttttgtcgggttagtgtgtattgctgttcaatctttgtgctgaagagcaagcaaaaaaaaatgttgttg

SEQ ID NO: 15335 - DNA, 534 bp, Oryza sativa
  Clone ID: PAT_MRT4530_21188C.1
atgcggccatacaacctggccctccccccacatctcggacgacgcagaggcgcccggggggcctcggggtgccacatcacgcccctcgggccctcgggctacctcgccccatggcccacgcccgaccgccacgtggcgggaggaactgccgtttttccaactcctttcagcacctgcccaccgttggattttcacatttttgctgactgcggctgcagttcaagtgtgcaacccgtgttaggtccggcgcgtgatgggaaggcttcgttttgtaatacagaaaaatgtatcttacagagaaacggcatcggtcggcaggggaaaaaaaggaagaagaagaagaagaagaagaagaagaagaagaagaagaagaagaagaagaaaggagagaggaacagtaacccgctacattatcggatagacgaacctgaaacaaaccagccatgcatagctggtaataaagcaagttggaggggagaaagaacagtaaaatgcaggacgtgtcacacggagaaggcagtaggagggcggtga

SEQ ID NO: 15336 - DNA, 3030 bp, Oryza sativa
  Clone ID: PAT_MRT4530_21189C.1
ggggagttgggagcgagcttcgcggcgcgtggtagggcgatggaggcgtgctgctgctcgtcgtcgtcggtgccgtccgcgtccatcctcgccacgggcgccggcctccgccgccggttctcccctgcgggggccggcgggggtgggagggcggtggcggttgcggcagggcgaccgatccgcgcgtccgcggctctgctggccgcgcccgcgccgcggcggcgcgggggcgtcgtcgtgagggcggtgttcgagcggttcacggagcgggcggtgaaggcggtggtgttctcgcagcgggaggcgcgcgggatgggggacgagacggtggcgccgcaccacctgctgctgggcctcgtcgcggaggaccggtcgccgctggggttcctcgcctcgggcgtccgcgtcgagcgcgcccgcgaggcgtgccgcgccgccgtgggcaaggaagggctcgcgcaggcgccggtcgggctggccacggacgtgcccttctcgggggccagcaagcgcgtcttcgaggccgccgtggagttctccaggaacatgggatgcaacttcatctcgccggagcacattgcgctcggcctcttcaacctgaacgatcccaccacgaacaacgtccttaagagcttaggagtagattcaagtcagctagcaaagcaggcacttacccgagtccaaggggagcttgcaaaggatggaagagagcctgtcggattatcttcttttaaagtgcgtgagaaatttactcctggaggtgggaagtctgcaattgtcaaatactcgaataaaaataaagagaagagtgcactggctctattttgtctagacttgaccatgcgagccagtggaggattgattgatcctgttattggtcgcaaggatgagattgaaagagtagttcagattatatgccgccgcacgaaaaacaatccaattcttttgggcgaagcaggtgttggtaagactgccattgctgagggtttggcccataaaattgccaatggagatgttcctattttcctcgtgggaaagcgtatattatcattggatgttgctctactaatggctggtgctaaagagaggggtgaactggaagccagagttactagtttaatacgtgaagtgcgcaaagcagatccaaaacttccgttcttggtcttcaatcttcaaagagctccaaagtttcatgcaggtgatgttatactgttcattgatgaagtccatactcttattgggtctgggattgctggaagaggaagcaaaggagctggtcttgatattgcgaatttgctgaagcctgcactggctagaggagaattgcagtgtattgcatctacaactctggatgaacaccgattgcattttgataaggataaggctttggctcgccgatttcagcctgttttggtgaatgagcctagccaggaggatgctgtgaagatattacttggtctgcgtgagaagtatgagacctatcacaaatgcaaatacactttggaaagcatcaatgcagcagtttatttgtcagcaagatatattgctgacagacatcttcccgataaggccattgatctaattgatgaagctggcagtagagctaggatggaatcatttaaaaggaagaaggaggaacaatgctctattctctcaaaatcaccagatgagtactggcaagagattagagctgtccagaacatgcatgaagtggcactgactaacaaggtaaaatattctctaaatcagaatgaccaagaggatgctgttgatattgaactcgtggaccatctctggttggatcagaggaaattgcaagagtcacatcatttgtggtcaggcataccagttcagcagttgactgcagatgaaagaaagcttctagtaggactggatgatgaactcaggaaacgtgtcataggtcaagacgatgctgttctagccaatgctgcctgcaggaaatcagctactgttaggttagatatgagtgagtatatggagcggcatgctgtgagcaagttgataggctctcctccaggatacatgggatttggtgaaggtggtactttgactgaagcagtcaggagaaaaccattcactgtggtgttgcttgatgaaatagagaaagctcatcctgatattttcaatattcttcttcaaatattcgaagacggtcatttgactgattcacagggccggagggtttccttcaagaatacattaattgtgatgacatcaaatgttggttccacatcaatttctaatggaaagaggagcataggtttccagacacaaactgatactgaagaaaagtcatatgctgcaatgaaatctttggtaatggaagaactgaaggcatttttccgtcccgaattgctcaatagaattgatgaagtggttgtgttccaccctcttgagaaaactcaggcatgttgcttttatagatactgcacttgcatattgccttgtacttttgttaatacttattgaaatcatgctggctattctcaatataatgctgcaagaggtgaagggtaggattttagcccttgggattggcctagaggtgtctgattccatgaaggacctgatttctcagcatgggtacgacaagagctacggtgcacggccactaagaagagccgtcactcagctggttgaggatgttatcagcgaagcaattctgtctggtcagttcaagcctggtgacaccataatggtggacactgatgccacggggaaaccttgcttgagccgactgaatgatcagaccgtccaattatccgatccgacaccaacactttgaaggttcaaacaccctatgtatattcgtgatttactcatttattcttccacaccgataagcaagcttcttgtgcatgcataggttccatagttcatgtacatagcctccacatgctggaatttctccatgcatataatgtaaatttgaatctaacatcaactgtacatatcattgaatttcaaaaggtacttgaaccatttacatgattagatggtccaatacgc

SEQ ID NO: 15337 - DNA, 2364 bp, Oryza sativa
  Clone ID: PAT_MRT4530_2118C.1
gtagtttgtagtttggagtcgtactgcgatgctcagggcgctcaacacgccgacgccgccgctccggctccgcccggcatgccgcgtcgcctcgcagtgtggtgggcggccgagcacgaggcgcaggggggccggaggcgggccgcgcagggcggtgccgcagccgcccgtgcgccggccgtccggggaccgcgcgtgcacgccgtggcgcggcggggtgggtgccgcggcgccggcgccggtgacacccgtcgccgcggcgggggcgagggatgagctggaggcgttcttggaggtggtgccggcgaggatgaggcgcgggctggcgcggcacccggaggtgagggagctggtggaggtcgtcatggacctcggccgccggccgctcgcgcggttcccgtccggggactgggtgatctccgagcaggccgtcaccgccgatgatctccaccaggccgtctcaaaggtaggcgacttctctgaagacaaccgatccgggatcaaccactcgttgcacaggatcagcgccatccggaaccgcaaggctcatataattggtctcacttgccgtgtgggccgggctatatctggaagtgcagagatgatccgtgatctggttgtgggaggcggttcaatattggtgattggacctccaggggttgggaagactactctgatcagtttgagatgctttcaacaatacagggaaatagctagaattttggctgatgagggtaagaaacgtgtgatcatagtggacacgtcaaatgaaataggaggtgatggggatgtgcctcattctggcatcgggcgttctaggagaatgcaagttcccaaagttagcatgcagcataacgtaatgattgaagctgttgaaaatcacatgccggaagttattgttatcgatgagattggtactgagcttgaagcaatggcagccagcaccattgctcaaaggggtgttcaacttgttggaactgcacatggggtgacaattgagagcataattaaaaacccttgtttgcaagtgcttgttggtggaattgagagtgtgactcttggcgatgaggaggcgaaaaagcgtaaagttcagaaaacaattcttgagagaaaaggacctccaacattttcatgtgctgtggagatgatttcaaagactgagtgccgagtacaccacaagttagaggctactgttgatgctattcttgcagggaagcctcctaaatttgaagcacgtaagatggattacaaggctactgagtcaggaagatcgttggtgatacctgaaagagaatatgaaacagaacccttgccttcataccaggaacatcattttgccaaggcaatgccatccgaagataacttcgatgatgatttcagcacccggagaacagaaagcaagagtgtaccatcaaatgataatttcaacgatgattttggctctacaagaaaaacaaaaggcaaaacatctgtacctggaaaatctccagtccatgtgtacacgtaccagatttcagaagctgatatcttgcaagtagcaacagtgatgggattcgatgatgaattagatgtgacggatgacattggagctgccaatgtgattcttgcatcgagttctgagatgaagcagaatcactggattcgcaatgtcgccaaataccacaagcttcccatatttgttgttaagacaaacacaatggctcagatagtaaaggctgttagaatgattgttgggagggataaactcaatgcaccaacacgcaagcagcctaaggttgtggtgggagagatagagattgaagatgatgctccaaagaggaagccatcattggaggaaattgatgctctggaggaggcccgcctcgcaatcgagtacattgtaatcccaggtggagagcccgtagaactcctcccaagatgttcagaaatagttgcccggcaactggagcttgttgagagctaccagctcctggccgaaacctttggaactgactccaactcgaggttgcagattcttccggtgaaaataaccaagaagagctcaagcaaaggcagtgcaggatcgatgcccaagcaaggcagctctgacctgatcgtcagcgacaacggaggcggctccagtttttctcggctgccctttctgccgaaatgaccattgctagattgacactctgatctgatcaccgttgcccccaaactgtacatcattcttctttcctctgcattgtttttttgttgtacataatacatacctgtgcagtgttgtaaatagtgtttgaatgttgaagaatcgaaagagcaaagctaattgtaattgccttccattcttttacagaaataaaaatatcacatttctggtgtctt

SEQ ID NO: 15338 - DNA, 743 bp, Oryza sativa
  Clone ID: PAT_MRT4530_21190C.1
gaagaactgaaggcatttttccgtcccgaattgctcaatagaattgatgaagtggttgtgttccaccctcttgagaaaactcaggcatgttgcttttatagatactgcacttgcatattgccttgtacttttgttaatactgtgagtttagaaatgctaccactccataacgaaaacaaacaaaatattcatcttgttgcgataccttttgctcacatagagtagaatcgcccttatatccgttccttctgttcccttgtagcacgttgtgctataaatttctacatgttcaggcaaccaacgcaaatgcctgatgtaagccactgacacttgcctgacaatttgcagatgctggctattctcaatataatgctgcaagaggtgaagggtaggattttagcccttgggattggcctagaggtgtctgattccatgaaggacctgatttctcagcatgggtacgacaagagctacggtgcacggccactaagaagagccgtcactcagctggttgaggatgttatcagcgaagcaattctgtctggtcagttcaagcctggtgacaccataatggtggacactgatgccacggggaaaccttgcttgagccgactgaatgatcagaccgttcaattatccgatccgacaccaacacttttgaaggttcaaacacccttatgtatattcgtgatttactcatttattcttccacaccgataagcaagcttcttgtgcatgcatag

SEQ ID NO: 15339 - DNA, 563 bp, Oryza sativa
  Clone ID: PAT_MRT4530_21191C.1
ctctttttatttttcttttttcttttttatttttattttgtttttttttttcttttttttttttttttttttttttttttttttttttttttttttttttttttttttttttttttttttttttttttattttaaaaatatataatttattttttttgagggggggggggccggcccccccagaaaaagaaggggaaaaaaaaaaaaaaaaaaaaaaatgtctaaaaaaaaaaaaaaaaaaaaaaaaaaaaaaacaaaagcaaaacccccccaccccgccccttgcctggggggaggaaaagcaccaacccgccccccgaaaggccccctgcaaagggggggaaagaaccggtttcacccaccacggggacccccctttctttgccggcggccccccgaacatgaacagcagggctacattgggggacgccccccaccccctcctcatgggggcagacctgccccccccccccgcggaggagggcctcacccggcgggatttgttccatcctgccacctgccctgtgctcaattgtgccatccaccgggatagtatcgattac

SEQ ID NO: 15340 - DNA, 519 bp, Oryza sativa
  Clone ID: PAT_MRT4530_21192C.1
atggtgaggctggattgcgacgcttggtgtagtgcaagcggcggcggtggtggtggcagtgtaggtagcgggagcaatgagggcggtggggctggtcggttttgcaagctccagtggctttattgtggggtggtcagcggcgtgccgcttgcaaccatccaaaagggggttggtgtggccatcgcctcgtcatttgttctgctcttctgccctgtctcgtgctcaacgtcctataagtgtcttggtgatggtgactggatggttcgtcgaggcgacaactacaacaaggagcggcattggcaggatgaaggcaagctggttggcaatgctagtgatggatggggtgcgacattggatctggggcctaaatgttgttgtattgtatccgagctgtcgatagggatatggtggggaaaggagcgaatcaaatatggatgtaacgtggatgaggagtataggagtttggattccatatcaagatcgacttggtgtggttcttggtacggcagggctcgttaa

SEQ ID NO: 15341 - DNA, 408 bp, Oryza sativa
  Clone ID: PAT_MRT4530_21193C.1
atctggtcgatcgcccataactgcgggcacggctattcgaatagttttactctggccagtggtgcacaactgtacccagaagacacaatccaccggcatgtcaccgcgtcatcatgcacccatgatgaacacgtcaccatgtcgagtgattgtgacaagacccttcatataacccctctgaccaatcgcaccacacctcaggtttcacccccactcctcacaggcagcgggcaatcccccctcatgcctaggtgaatccggaagcgacaaaggccgtcgcaggacccatcccgctccatcacgcccacccttgcctggatgcgtcagccagagaaaaactatacttcaagtcaggcagttacccattccctcttgtggcaagcgctgtaagtcttctagtgcatcccg

SEQ ID NO: 15342 - DNA, 271 bp, Oryza sativa
  Clone ID: PAT_MRT4530_21194C.1
atggcatcacaacaggtgttgatggtggcagtggtcagcggcgtgccgcttgcaaccatccaaaagggggttggtgtggccatcgcctcgtcatttgttctgctcttctgccctgtctcgtgctcaacgtcctataagtgtcttggtgatggtgactggatggttcgtcgaggcggtgagatggaggtggctgttgtggccgacaactacaacaaggagcggcattggcaggatgaaggcaagctggttggcaatgctagtgatggatggg

SEQ ID NO: 15343 - DNA, 507 bp, Oryza sativa
  Clone ID: PAT_MRT4530_21195C.1
atggccgattctgccgctgcgctgcctgcctgctcgcatgtgtcgcgtcaaataaccgcgagaaaagcaaagcagccagtactcctccggtgtggtgtcctgcaactcggccggaagaatcttgcgtcacagatcgcccggaacagccacgccgatcctccctcccacacagtggcggagccagagatatgtcgtcaagtccggacgactactagcgttttccgaaaagatgccggcagcggctgccgcctgccgccgctagccactaggcccgtgcgcggcccagccggccgcctgctgcgtgggaggggaggagggggaggagagggccggggatgggaggggaaggagaggaggcggagggggaggaggagggagatcgatctgagagggaggaagggaggaggagagggagatcgatttgagcggatgggaagggaggatggggaggagagggccggggatgggaggaggcggagggggaggaggagagggagatcgatctga

SEQ ID NO: 15344 - DNA, 303 bp, Oryza sativa
  Clone ID: PAT_MRT4530_21196C.1
atgccgttgccgttgccgttgccgggccgcttctccggcgttttcctcagttcaccacatgccacctcctgcagctggtcctatacccttactgcagcagctcatgccggcatcagcagcgtccccatcaccaccaagaacagcagcatgctagtcttcgtgtccagctccggcggcacccatgggcagggcaaggaggcggcgagtgcgcaggagggcagagccggcgaagttgctggcagcggcgagagcgagacagaggcatgccgcgccgaccaaggcccgctcggcggctgcaagtag

SEQ ID NO: 15345 - DNA, 297 bp, Oryza sativa
  Clone ID: PAT_MRT4530_21197C.1
atgagatccccaacccgcaagagaaccctgtgtgagggcggcggcgggggaggggggggagggttgcgctggagaagcgagcgaagccccaagagcggcgggggctcggtcgcggcggaggcgaggaattcgccggcggcgaggccgcagccacctctgttcaccaccaccgccatcgaagccgctgtcgccgggctcatcacccgtctgctgcgcggtgcgggagcagcggggaggaggaggagggcgtggcggtggcgggtctcctcgcttgatggcaagtggatgcggtggtag

SEQ ID NO: 15346 - DNA, 231 bp, Oryza sativa
  Clone ID: PAT_MRT4530_21198C.1
ttatagcaatttctcactgtttaagcaattaagctaggaggttgcaattctgcgccttcttttccccaaggtgcctctggtgcctgttgcctgcacataagccaaaaatgacaaagtagacttgttatgaaaatatatgcacaacggagacacgaatttttacgtagaaaacacttacggggaaaaaccatgagcgtctattggcaatgatcactattgaggagttggtta

SEQ ID NO: 15347 - DNA, 1711 bp, Oryza sativa
  Clone ID: PAT_MRT4530_21199C.1
cccacgcgtccgcccacgcgtccgaagctcagctcagctactaatcgatgagctcgggaccatcacttcgctggtagctcagctgattcgatcgatcagccatggcgggggagaggaggtggagcacggcggcggcggcggctggatggctgcgagtggccgccgttgtggtggccgccgcctctgccgcctcgtcggcggccggcgagggggtcggccggcagacggtcccggcgatgtacgtgttcggcgactcgctggtggacgtcggcaacaacgacttcctgccgccgccggcgccgaggccgccggagccaccctgcggcatcgacctcccgcccgaggccgccgccgccgacggcggcggcggtggccgcttcaccaacggcttcaacctcgccgacgtcatcgcgcagcatgtggggttcaagaagagcccgccggcgtacctctccctgacgacgccgggaagagacggcgaactccggcgaggcctcgtcggcgccaactacgcctccagcggatccggcatcctcgacttcattgggaacggcacaatcagccttggagagcaggtcaagctcttcaccaaaacaaaggaggcaatgatcaccgccggcgaggtcgacggtgagaacatcgacaacttgctctcccagtccttgttcattacctgcaccggcggcaacgactacaatgccttcactgatggcatcgtccccgtcagcgacgcgccggccttcatcgcccacatggttgccacttacatcaagcatatcaagacactgtacaatctaggggctcggaggctggggatacttgacgtgctacctctagggtgtctaccgatctccagggtccccattgaaaatggttcatgcagtggcactgacaactggcaggcacggctcttcaaccgtctcctccgacgagagatgaccgccgccgccacagcctccatgccggacttggtgtactccatcggcagcatttactacaccttctacgacatgataaagaatccatcttcggctggggtgagggaggtggcgagggcgtgctgcggagacggcaagctgaacgcggaggccgactgctcggcgaccacccacctgtgcccggaccgggacaactacatcttctgggacaaggtgcacggcacccaggccgcctaccacaactgcgtccacgccttcttccacggctcgccgcgctacgccgagcccatcagcttcacccagctggtcgcctcgccggccgtcgatctggggcggccgtccccgggcacaaaccggacggccaggatttgatcacccaatggactcatattggtataagcattgttcattggtaaacaatgaaaatcgctgggtttcctttggttttgggagtcaggagatggagatgttgaattggggttgatgatggtatatatgtgcataattgaagtgtggtgatacctcacggtacatcctaaggaccacagattctcagataagacattgtacaagtttttgtgtttttttcctgaataattcctcctatgctatagagcacttgttgtcatgcctggaaattaagcagtgtctagttgatcactgcaggaagaaagaaatgcttggactagagaagaagaaaaaaaacatattgacctatctcaccagcacctatgaattatggactacaagatcttggatagaggctttacaca

SEQ ID NO: 15348 - DNA, 101 bp, Oryza sativa
  Clone ID: PAT_MRT4530_2119C.1
gtgcacgagctagatagcatagcaatgaagggcgcagggagaaatgcggtgtgttgattctgccatgagcagctgtgtgctgcgagagcagtgtgggagct

SEQ ID NO: 15349 - DNA, 584 bp, Oryza sativa
  Clone ID: PAT_MRT4530_211C.1
ccgcccggaggacggtggaaacgggggcaggggccacgatggtgagggcacgccggcctcgggccaccacgcctctgccggcgctgtgccgccgacgtcgccgtcgcaccccggcacggcgggagaacacgtggggcatcctctcgttgtatatactcttcccatccgttaggaatgctggcgttatagttggccaaatgggccgcccggcacagcacggcccaggccccgccgtgcctgggccgaggctagtcgggctagcacagcccgaccgacacgctgggccgtgccgtgccagcccatgtgctgcacacatggcccaggcacgacccaatacgactcgggccgtgccgggctggcccgaaggtacaacagtccattgtgctttatactttttttcttcaatcgtgccgtgccgggccagcccaccgtgccgaaggtgcagcccaggcatggcccgactgtcgggccaggccggcacgggcacgaccccagtcgggccgtgcttgggcctggccaaaacggcgtgtcttggcctggtccacgggcctcgggccatatggccatctatagctggcgtgctc

SEQ ID NO: 15350 - DNA, 509 bp, Oryza sativa
  Clone ID: PAT_MRT4530_21200C.1
gaggaatgatgctactaagcactgggattctccttgggcaaaacaaaagtacagaatcctgaatctaccttaccacaaggggaactcctagcaaaaagctctcaagattcaagaacaacagatcaaccagaagcagcagcccctccctgacctttgtactgaaccaaaatgcaataatatgtggcatgacagattagtcccccaaccagccaaaattcacccatcctaagatttacaaaaccatcgaaccaacatcgaaaaaacatgcccccatacaagtagaagctgaagctcccccccaattctgctgcggtccgaacccgagctaaggcggatcacacggaagggaaaaacttgttcaagttgaacggcagaaagtaaaacttctcgctccgggtgtccgtcttgaaactcctgaacttgtcccaccagtggtatcccctgtctctcctcaccccattgtcgcgcctttggatagtgttgtctaggaagacgcaatgagccctgcg

SEQ ID NO: 15351 - DNA, 1576 bp, Oryza sativa
  Clone ID: PAT_MRT4530_21201C.1
tttttttttttttttttttagaacaatgcaatttgcaaagaattggattaataatttattgagtttttacataatttacaaatcatttgttattgtatctacattatcgtctttgagcagctgttccaataatgattccattgtgcttatgtaactaggcatgtaatgctcctttatcatgtttggagctagccttattttcccatacaaatctcttggcgtttcataaatgctaatgatctcattgctgctggatccctcaccaggatttgggtcaggtgaggccattgcaaccatgtgaataattcttccaggagggaaaaactggcgcgaactgcaggttggtagcggttctttcagcttgtctttgatatcacagttctgcttcagtgattctggttcctcctgccctgtcaaggatgattgttcttgttcagtgtccagtgatccattgatgttcacatccccttgtgctgcaaagcctgatccagcaacagactttgtactgataacattatcgttgctagatagtacaatcttttcttcagaggtaacaactgatacagctgaaaagtcctgctctgtattagcaacgaggtccgtttgatgctggttgcagtctgtgcttagcccatttgttacaggctgcgtgatttcggggacatgtttgagcaagggctcagatatgctagaatcaggatctgtgttcttctctgttggatgagatactgacagcatatgagactttatgaaagctacacgcttacttattgccgtaaataagctaaagtgagcttgatcctgctcatcatctagctttgatgataccattacctcagctcgcaggttctcagcagaaacttttgaaaaggccggcaccacatcatttctcctggtcgcgtgccgtgtcaaattctttgcccgactccgccagctcccatgacatacaggcaggaggagcaaatgccagacacgtgcacgatgagaactcatgatgctcatgaagaatgtatgttagaattgctccgatacctgctccccttgaatgcccaatgacctcctcgtgctaatcagggaattcttgtactgccttgtgaagatggggcttagcaaggttagcgatccaacgagctgcagcaagcatcccacaatgtgcatatcctaaaaccacgttgctgatttgtccttcacttaaaactatatggtgaaaaggaacctcagcagcagttgcggctgttaggcgctccttagtactgatagcaccccgaatgaaaagcagaaagcacttggattttttgtcacacacaagcgcgaaagaaggttgcataagcctcgccctagccttgtgaataagaatgtcttcttgattgtacccaccaaactgaagaaacgctgaaaatgttttctttgagtagaacatgcaaatcttcaagtgctcaagtagataagctacttcagtgtgtgcgtcgtgaccttttagttgaaggcaatcatttccactatactcatgctgcaaatcaccctggcgcttcatgtggcgcttgatcccgaacccacgcgtccgcccacgcgtccg

SEQ ID NO: 15352 - DNA, 2709 bp, Oryza sativa
  Clone ID: PAT_MRT4530_21202C.1
atggacttttcgaagattgtgggggctattaatggcatcaatgagatttccactttatgtaaaatggtcaaagatatcattaaatcttgctggagtggcatacgggagcaggagctgcaagacaaagtaatgaagttggagaatgacttggaacgtttcagagatattcttcctgcaatgtacaacctcattgatcgagcggaatggacgatccacaaagaccatgtgccagagcttcttctgaaactcaaggatgcagtttatgatgctgaggaccttcttgatgagttgaaatggcatgaactgaaggtggccatggagggctccgcaaacaaatctcctcttattgacttccttgatagtgtcattcaaggtagtttcaacaaagtgagtggtacctatgaaaaactgaataatgtttctagtctgctggagaagatggggttacatgaagttacacaacactttgacaaatccttcaggcccgagactacctctttcccaactgaaacagaaatgtttggtcgtgacaatgaattggagcaggtgatgcaatcgcttggagtacctgctaaaggtagccgggtcctttccaaacgcaagaaaccaagcagtgcaattaatgcatcaccaagcacatcaaaaacaaaacaacataacggtacacaaatgagtgatgaatcaggaatcacatgtattcctgttctgcctatatatggaattgggggtgttggaaagaccactttggcccagcatatctgccacgattcacgggtcatgtctcactttgacccgattatttggatttgtgtttcagatgactttgatgtgaagaggttaactaaagaagccatacaatcctgttctacaaaagaagctgataatttggattatcttcagcgtgctctttcagaagaagtgatgaacaaaaggttattgatcatacttgatgacatgtggggtgatgtcttgagggagagtggacactgttggaagaggttttgtgcacctttgacgaatgcgctacaaggaagtatgatgttagtcaccactagatctccagatgttgctcgtgaggtgcaaacaatggagcccatccgattagaaggattgcaggatgatgtcttttgggatttcttcaaattatgtgcatttggatctaagaattctgaaaattacccagagttagtgcacatcggtaaaagcatagtccaaaagttgaagggtgtacctttggccgccaaaactctaggacgcctattaagaatgagccttgacactgaatactggaataggatactaaaaagtgaactatgggagctgaaacaaaataatactgaaattttgccagcgcttagattgagctacctgtatttaccaacccacttgaagagatgcttctcattctgtgctgtttacccaaaagatcacaaattcgaagaggataatttagctgaaatttggattgcagaaggctttgtgcaacctgaaggtaacactctaattctagatactggcaaacagtactttgaagaccttgtaaaccggtctttctttcagagtgttggtgtttcaaaggatgactgcttcattttaaaagacaaggatgattttgagaagggagtcggacttacattgatgaagaacgtgaaccaaatttgtggaggagtgacgataaataatcttggtgcaacaagcaaggatattgcagcagaaagtgcgataaagaacaagaaaaatcttgacagactgaacttgaaatggtcttctgtgagatcgcaagaccataatgacatcgaggttcttcaagtcctaattcctcctaccagtctcaagtgtctgaccctctatggttatctaggtcaatctcttccaaattggttttatcctcataatctgccaagcttaaaatcccttgagtttcatgattgtcatagactttgtagcttaccattttatggtatatcaccaccgtgcatcaacctaaatgaggtacccgaggttccaattgagaacggtatgggtagcattggcgtattctcatccctggtcgacctaaagattgtgaagtgcgattacttatcaaacctcgacaaatttatacaaccagcttgtataccggctatcaagcgaatcacattacaaagattaacatacacaaagacaaaggtattgcctctaccaattggtaaatttgattgcctcgaagaattggacgtggctggttaccagatattcaatgcttcagaaagtctgtccatgcgcactctcaaggagctcaagctatgcaattctggggacctcccatgcttttttgagttcccctcccttaccaacatgttcttagtcgtcttgcctgtaacgtccattccactacgagtgtggtgcagtaaccttccagctctacttcgattaaaaatttatagctgtgcgaaccttgaatttattggggaatcagtcttcactggcaatcgtcctcaaagagacagttgcagcactacaacattcgcatcccttatttccctagaaatttgtggctgcgaaaagctgacaagcattgatgacctcgtaacgcctgagtatcttcctgctattgagaaaattgatgttagctcttgtgtcaagctatcgtccctgccaggatggagcaactggcgagatggagctaatagatgcatgactgttggagagctaccggcacttctatag

SEQ ID NO: 15353 - DNA, 318 bp, Oryza sativa
  Clone ID: PAT_MRT4530_21203C.1
atgacggcgacgtcgctgttgctgttgttagtcgccgctccaacacggcctcctcctgctgctgatctcctcctcctcagctcgcgccaattcatttcgcccaggagggatgcaccgatcatgcatgcacctgacctgactcgatcgcgcgaagagatctcccgcgaatcctattcccggcccgaccctcccgcggcgcgacgcgtggcgacgccgacggcgacggagcgcgacggcccaccggccgggccgccgaacgtggcgcacatccagcggccgcgcccaggcacgtggcggcgaccgggcgacggccggtga

SEQ ID NO: 15354 - DNA, 4704 bp, Oryza sativa
  Clone ID: PAT_MRT4530_21204C.1
atgaagctatctgatttaacagcagtcaggcagaggcatgatgaaactgtacaagactatattcagaggttcagagagatgaggaatacgtgctacagtctggctttgactgattctcagttagccgatttagcttttcaaggtttgatagctcgaatcaaggagaaattttcatcccaagactttgagagcctatttcatctcgcacagaaggtgactatgcatgagcaaaggtttgcggaggctaagaagaatttcaagaagatcaatcatgtatatccttacatttatgactccgatgtggaggatgattccgaagtagcagcagccgggtgggttaggagcaaaaaggttgtgacatgcccattggtgaggagttctggaaaggaggaaagatttgactttgatatcaccaaggctgacaagatttttgatttgttgcttcgggagaaacagattcaacttcctgctagccatataatcccatcggccgaagaattaggcaaaaggaggtattgcaagtggcataattctggtttttattatactaatgattgcaaagtttttagacagcagatccaggtagccattgaaggggacaaaaatcaaatttgatgattcaaagaagccaatgaaggttgatggtaaccctttccctatcaatatggtgcatacttctgggaggacagccgatggaggaaggagccagaattctcaattgaattcggttaggattatcaacaagtatcagaagaaattttattggaatcaaggcatgaggttaccatcgattgaagattgccctgggtgcagtgatattgcaggagttcaagccgatcgtataacagaagctatcggccgagtcagaaaaggttgcctgttcatcagaggttgggcctgatcaatcaagaccgtcaccaggatgaagatgaggatggaaagacacagtggtgtcctcctgcagaattcgaagccaaggaagccgatgttgatgatgttgaagaagcttctgctagattggttttgtcacctaaacaaacaatttttgagaaaccagaggggacagaaaatcggcatttaaaaccattgtatgtcaatggatttgtcaacgggaagccgatgtccaagatgatggttgatggaggagcaactgtgaatttgatgccatgtgctacattcagaaagttgggcagaaattcaaacgatctcatcaaaactaacatggttctcaaggattttggtggcaatccatcggagactaaaggagttttgaatgtggagctgacagtcggcagtaaaaccgttcctacaacattttgttgtgattgatgggaagggttcctatagcctgttgcttggaaagggattggatttatgctaattgttgtattccttcaactatgcaccagtgcttgattcgatggcaaggtgacaaaattgagattgtgccagctgacagctaattgaagatggagagcccaagctattactttgagggcattgtggagggttcaaacgtctactcgaaggacagagtagatgatctcgatgacaagcaaggacaaggtttcatgtcggttgatgatttggatgaaattgacattggtccaggagatagaccaaggccgacattcattgatagagcttttaaaggaatttagagattatttcgcttgggagtattatgagatgccgggacttagccgatcgattgttgaacatcggcttcctattaaaccgggggttagaccacatcagcagccgccaagaagatgcaaagccgatatgcttgatgctgttaaagctgaggttgcacgtctatatgatgctagtttcattcgtccatgccgatatgctgagtggatttcaaatatagtttcggtcatcaagaaaaatggcaaagttagggtgtgtatttattttcgcgatttaaacaaagctacccctaaggacgagtacccaatgccgattgccgatcaattggttgatgctgcttcaggacataagatacttagttttatggatggtaatgcaggatacaatcaaatctttatggcagaagaagacattcataagacagctttcaggtgccctggtgcaatcggcttgtttgaatgggttgtgatgactttcagcttgaaaagtgctggaggtacatatcaaagagccatgaattatatattccatgacttgattggctggttggttgaagtctatatcgatgacgtggtcgttaagtcaaaagaaatagcagaccacatagccgatttaagaaaggtttttgaaagaactcggaaatatggcttgaagatgaatccaatgaagtgtgctttcggtgtatcggctggccagtttttgggattttttttgttcatgagagggggatggaggtgcctcaaaggagtatttacgcgataaaaaagattcaacctccggaggacaagaaaaagttacagaaattgatcggcaagataaattttattagaaggtttatttcttgagattgaaagccgatcaagagttaacctggggggcagaggaacggaaggctttggataacattaaagaatatcttagttctccttcagttttgattcctccacagaagggagtgcctttcaggttatatctattagccggtgagaagtcaatcagctcgattttgattcaggagcttgaaggcaagggaagggttatattttatctgagtcgcaggcttttggatgttgagacgaggtattcttctgtggaaaagttgtgtttgtgtttatatttttcttgcacaaagttaaggcattatttattgtccaatgaatgcactgtgatatgtaaggccgatgtggttaaatacatgctatcggctccgattttcaaaggaagagttggaaagtggatatttgctttaacggaatttgatcttcggtatgaatcactaaaggcagtgaaagggcaagctgtagccgattttattgtggatcatcgtgatgactcaatcggctcggtcgagattatgccttggactttgtttttcgatggatcagtgtgcactcatggttgtcgtttcggcttagtcataatttctcctcggagggcaagtttcgagtttgcctacatgattaaaccttatgcaactaacaatcaagctgaatatgaagcagcactcaagggtttgcagttgttaaaggaagttgaaaccgatgctgttgagattatgggagattcattattggtgatcagccaattggcagaagaatatgaatgcaaaaatgatacattgattatctacaatgagaagtgccgagaattaatggatagttttcggctggtaactttgaggcatgtgtctcgagagcaaaatgttgaagctaatgatttggcccaaggggcatcgggatagaagccgatgataagagatatcgaagtggaagttgctatgatcacagccgatgattggaggtatgatgtatttaattatttgcagaatccatgtcaatcggcttcgcggaaattgcgctataaggccttgaaatacaccttgttggatgatgagctgaattatcggacgattgatggggtattgcttaagtgtttaagtgccgatcaagccaaggtcataatgggcgaggtacatgagggtatatgtggtactcatcaatcggctcataagatgaagtgattgcttcggcgtgcgggatatttttggccgatgatgttagaggattgcttcagatattacaaaggatgtcaagattgtcagaagtttggagcagttcagagggcaccagcatcggctatgaaccctataatcaaaccatggccgtttaggggttgggggattgatatgatcggtatggttaatccaccctcgagcaaaggacacaagtttatattggtggcaaccgattactttaccaagtgggtggaggctattcctttgaagaaactagattcgagagatgctatacaattcgttcaagaacatattatttaccgatttaggattcctcaaaccattacaaccgatcaaggttcaatctttgtgtccgatgagtttgttcagtttgccgatagcatgggtatcaaattgttgaattcttcgccttattatgcacaagctaatggacaagtcgaggcatctaacaagagtttaatcaagctaattaagagaaagatttctgattatccttggcaatggcatacaaggttggtagaagcattgtggtcgattggatggcttatcatggttcaattcaagttcctccttgtaagcttgtttatggacatgaggcagttttaccttgggaaattagaatcggctcgagaaggatagatttacaagatgaattgacagccgatgagtattacaatctcatggccgatgaaaaggaagactttgttcaatcaagattaagagctcttgctagagttactaaggacaaagagagggttgctaggcattataacaagaaagtggtgcctaaatatttttctgaaggagagcttgtttggaaattgattttgtcgatcggaactcgagataataaattcggtaagtggtcaccaaattgggagggaacattccaaattcataaagttgtttccaagggagcttacatgttgcaagggcttgatggaaaagtttatggacgagcacttaatggcaagtatttgaagaaatattatcccagcgtgtggattaattca

SEQ ID NO: 15355 - DNA, 5303 bp, Oryza sativa
  Clone ID: PAT_MRT4530_21205C.1
atgaagctgggacaagttcatctcaaggtgttaagggtactgcagattgctcaggtgataaaggtgatgggcttcaagatggcttggtcgaggatcttggtgaagatggtaccgaagagcaacaacctctgaaattcaacagtttccaagatcaagtcgattatgctgtaaagcatgcgttgatgaaccaattaggagttattgtcaatactttatcgaatatgatcaagtcaatggttgatggcacgatagctgagcatcaaaatacgggaccagtttatcttccaggaggtgtcttcccaaattacagagagttggtaactggtaaccaacagcccgctatcagtgcaccaccagcctagccgatggcaccagcttcggctcctgcgccagttgcaccgtcatcggcacagaggcaaatgaccaatcccagattgctgaccagagaacgaccatagcatgctgcgcaaaatatcaatcggctgactcaggaacagatggtgcgacaagtgccaactgggttgaggacacctgacaatcggcaaagacaacagaatgtagctcaagttatccctaagcatctggtgcataatgtacaaccaaatcaatcggctgtggctcaagtcgttcctaaacatttggtacacaatatacggccgaatttccagaattatcaagggggtaatttgaactaccagtatcagcctccttcacctcatgtccagcatcaacaaggtggatcacctcaattgcagacattgcctcagttcagccagtttgatccgatgcagcaacagatgcaaggagtacctcaacagaaaccttgggcagatgtgatgagggagcaatttggccttaagccaaaggactctggaaatttgtatcggcacttgtatcctgaatggtttgagaaggtttcattgcctaaccgatacaaagtcccagatttttcaaaattttcatgtggagttcatgagatgaagctatctgatttaacagcagtcaggcagaggcatgatgaaactgtacaagactatattcagaggttcagagagatgaggaatacgtgctacagtctggctttgactgattctcagttagccgatttagcttttcaaggtttgatagctcgaatcaaggagaaattttcatcccaagactttgagagcctatttcatctcgcacagaaggtgactatgcatgagcaaaggtttgcggaggctaagaagaatttcaagaagatcaatcatgtatatccttacatttatgactccgatgtggaggatgattccgaagtagcagcagccgggtgggttaggagcaaaaaggttgtgacatgcccattggtgaggagttctggaaaggaggaaagatttgactttgatatcaccaaggctgacaagatttttgatttgttgcttcgggagaaacagattcaacttcctgctagtagccattgaaggggacaaaaatcaaatttgatgattcaaagaagccaatgaagaagaagcatgataaacagcaggaaaggtttgatgaagaagttgatgatggttttgattctcattgggattgtgaattcttcagattttattggaatcaaggcatgaggttaccatcgattgaagattgccctgggtgcagtgatattgcaggagttcaagccgatcgtataacagaagctatcggccgagtcagaaaaggttgcctgttcatcagaggttgggcctgatcaatcaagaccgtcaccaggatgaagatgaggatggaaagacacagtggtgtccttctggtattttcacaaagaatcagaagagaagagttcaacggatgaggaacagggagcgtttttaggaggtacaacaagaaattaaccatcggctgaagaagacaaagaccaagcaagagtggcgtgttaagagcacggtcacaacagccgatgaagttgaagccgacaagaccaaaagattgctcaagggtaaggctactgcatctgcatcggtgaacatggtttttatgctgcctgcagaattcgaagccaaggaagccgatgttgatgatgttgaagaagcttctgctagattggttttgtcacctaaacaaacaatttttgagaaaccagaggggacagaaaatcggcatttaaaaccattgtatgtcaatggatttgtcaacgggaagccgatgtccaagatgatggttgatggaggagcaactgtgaatttgatgccatgtgctacattcagaaagttgggcagaaattcaaacgatctcatcaaaactaacatggttctcaaggattttggtggcaatccatcggagactaaaggagttttgaatgtggagctgacagtcggcagtaaaaccgttcctacaacattttgttgtgattgatgggaagggttcctatagcctgttgcttggaaagggattggatttatgctaattgttgtattccttcaactatgcaccagtgcttgattcgatggcaaggtgacaaaattgagattgtgccagctgacaggtcagttaacgttgctagtgccgatttagctctttgggaaatggatggtattgattgcttgtctggaaaaggcattgtggagggttcaaacgtctactcgaaggacagagtagatgatctcgatgacaagcaaggacaaggtttcatgtcggttgatgatttggatgaaattgacattggtccaggagatagaccaaggccgacattcatcagtaagaacttatcttcagaattcagaaccaagttgatagagcttttaaaggaatttagagattatttcgcttgggagtattatgagatgccgggacttagccgatcgattgttgaacatcggcttcctattaaaccgggggttagaccacatcagcagccgccaagaagatgcaaagccgatatgcttgatgctgttaaagctgaggttgcacgtctatatgatgctagtttcattcgtccatgccgatatgctgagtggatttcaaatatagtttcggtcatcaagaaaaatggcaaagttagggtgtgtatttattttcgcgatttaaacaaagctacccctaaggacgagtacccaatgccgattgccgatcaattggttgatgctgcttcaggacataagatacttagttttatggatggtaatgcaggatacaatcaaatctttatggcagaagaagacattcataagacagctttcaggtgccctggtgcaatcggcttgtttgaatgggttgtgatgactttcagcttgaaaagtgctggaggtacatatcaaagagccatgaattatatattccatgacttgattggctggttggttgaagtctatatcgatgacgtggtcgttaagtcaaaagaaatagcagaccacatagccgatttaagaaaggtttttgaaagaactcggaaatatggcttgaagatgaatccaatgaagtgtgctttcggtgtatcggctggccagtttttgggattttttttgttcatgagagggggatggaggtgcctcaaaggagtatttacgcgataaaaaagattcaacctccggaggacaagaaaaagttacagaaattgatcggcaagataaattttattagaaggtttatttcttgagattgaaagccgatcaagagttaacctggggggcagaggaacggaaggctttggataacattaaagaatatcttagttctccttcagttttgattcctccacagaagggagtgcctttcaggttatatctattagccgagacaaggtattctttctgtggaaaagtggggtttgggtttatatttttcttgcacaaagttaaggcattatttattgtccaatgaatgcactgtgatatgtaaggccgatgtggttaaatacatgctatcggctccgattttcaaaggaagagttggaaagtggatatttgctttaacggaatttgatcttcggtatgaatcactaaaggcagtgaaagggcaagctgtagccgattttattgtggatcatcgtgatgactcaatcggctcggtcgagattatgccttggactttgtttttcgatggatcagtgtgcactcatggttgtcgtttcggcttagtcataatttctcctcggagggcaagtttcgagtttgcctacatgattaaaccttatgcaactaacaatcaagctgaatatgaagcagcactcaagggtttgcagttgttaaaggaagttgaaaccgatgctgttgagattatgggagattcattattggtgatcagccaattggcagaagaatatgaatgcaaaaatgatacattgattatctacaatgagaagtgccgagaattaatggatagttttcggctggtaactttgaggcatgtgtctcgagagcaaaatgttgaagctaatgatttggcccaaggggcatcgggatagaagccgatgataagagatatcgaagtggaagttgctatgatcacagccgatgattggaggtatgatgtatttaattatttgcagaatccatgtcaatcggcttcgcggaaattgcgctataaggccttgaaatacaccttgttggatgatgagctgaattatcggacgattgatggggtattgcttaagtgtttaagtgccgatcaagccaaggtcataatgggcgaggtacatgagggtatatgtggtactcatcaatcggctcataagatgaagtgattgcttcggcgtgcgggatatttttggccgatgatgttagaggattgcttcagatattacaaaggatgtcaagattgtcagaagtttggagcagttcagagggcaccagcatcggctatgaaccctataatcaaaccatggccgtttagggaaccattacaaccgatcaaggttcaatctttgtgtccgatgagtttgttcagtttgccgatagcatgggtatcaaattgttgaattcttcgccttattatgcacaagctaatggacaagtcgaggcatctaacaagagtttaatcaagctaattaagagaaagatttctgattatccttggcaatggcatacaaggttggtagaagcattgtggtcgattggatggcttatcatggttcaattcaagttcctccttgtaagcttgtttatggacatgaggcagttttaccttgggaaattagaatcggctcgagaaggatagatttacaagatgaattgacagccgatgagtattacaatctcatggccgatgaaaaggaagactttgttcaatcaagattaagagctcttgctagagttactaaggacaaa

SEQ ID NO: 15356 - DNA, 351 bp, Oryza sativa
  unsure (1)..(351): unsure at all n locations
  Clone ID: PAT_MRT4530_21206C.1
tccccgaagagataccaaatgcaacctcccgatacttcaacactgtcctacaaccactgacggcaaggactctaaaacggactctaacacataagccacacacctgcacggctaccctacatctgattgattggctagttattgaggaggtattatcaaagagtccggaaggtacttgccagaggcttccttaatgacgtccgggtagggacactcctctctggccttgtcaaaaaacatggctcagctcaccaccctaccatccgaaccatggggccggagttcanccatatgatcaagcaagcttcatccactacatgttctagggaagcgcacctgctctgcatggga

SEQ ID NO: 15357 - DNA, 639 bp, Oryza sativa
  Clone ID: PAT_MRT4530_21207C.1
atggcggcgtgcttccgctgcgcgcagtcggcggcggcggcgtccggccccgcggggcccaaccgccttcctcccgcgggacggcgctgtccatcgccgtggtgcacgacgccatggccgcctcgacggcgaggatctcctcctccgccatgcttctgggcacctggccgacgaacagccacatcctctcgccgtcatcatcctccgcatctccggtcattaccccacagcagctgtgcggctggaacagcggtggtggccccttctcctcctctttctcccccggtcgggggaggacggcgatgatggtgtgccacgacgtcgagatgccgttcctgcgggggatcaacgtgaaccggccggcaccagcggcggagacgacgacagtgaggggggcaactgtagcgaggaggaagaggagcccagcgcgacctcccccaacagcacgctctccagccggcagcgacgacgagaactgcggcggcggcggtggatctcgtgtaccgcggctggggcagggatgggagcagcagcagtagggagaagagaagagaagagaagagagaagagagaaaggagaagaaaataagatatgcagctgacatgtggaccccacatgctttgctaactaggatgtca

SEQ ID NO: 15358 - DNA, 2718 bp, Oryza sativa
  Clone ID: PAT_MRT4530_21208C.1
atgtcgcgcggcagccgcgaggaggaggatgaagaggaggtgtacgactcggaggaagaggaggaggaggagggggaggtggaggagaggggcggaaagcggtcacgcgggggcggcggcggcgggaagtggtccggcgtagagagcttcatcgacgacgcggccagtgaggatgaggatgaggaggaggaggaggatgacgacgaggactacgtgggtggcggcggcggccgtgcccgcaagaggaagagggcgtccatcctgatcgacgatatggctcaggtcgacgatgaagaggaggaggaggaggatggcgagttcgaggacggctttattgatgatactcgagctgacgaccctgaccaagatgtgggaagaagctctagacggcatccatcttctatgctggatgaagaggaggacgtggatgcacttgtgaagctaatacacgacaggtatataattccgtcatcacattttgtggatgatgacgatggtgtgactgaggttgaacagcaagctcttctgccatcggtgaaggatccaaagctttggatggtgaaatgtgcgattgggcatgaacgggagacagccatttgtttgatgcagaagtccattgatacgccagatctccagattaaatctgttcttgcattagatcacctgaagaattacatttatgtggaagcatataaagaagcccatgtcaaagaggcttgcaaaggtgtgcgcaatatcttcgcttcaagaaaagtaactctggtgcctataagagaggtggctgatgtactctctgttcagagcaagtctactgatatttcaattaacacatgggtccgaatgaagcttggtgcatataaaggggatcttgccaaggttgttgacgttgatgatgtgcatcaaaaggttactgtgaaactcattccaagaatagatttacaagccttggcaaacaaatttgatggacttaaggttgtgaaggagaagaaatcatttgttccaccaccaaagttatttagcgccaatgaggcaagggaacctgataatgacataaatgaggatgcggccagcttgtccaccctatttacaaataggaaaaaagggcacttcatgaaaggtgattctgttattgttattaaaggtgatcttaagaacttagagggctatgttgagaaagcagaggatgccactgttcatatccgatcaaaattacctggtcttctgaacacacttgtcttcaatgagggggatctctgcaaatgtttcaatcctggagaccatgtaaaagtggtgtctggtgttcaagaaggtgcaacgggcttggtagttaaagttgaaggccatgttttgatcattttgtcggacacaactaaagagcatatccgtgtgttcgctgatcatgttgtggagagttctgaggtaaccactgggcttaccagaattggtgattatgaattgcatgatcttgtacttcttggggaaagcaagggtctgtggaacatatacacagaggagtactttttatttatgatcgtcaccaccttgaacattcaggctttatctgtgcaagcgcacaatcatgcctccttgttgggggatcaactggtagccgccgcggaaatgggtatgggtacagttgatccacgatttggtgcttttagatcttcagcaaggattttgcaatctccaggaaggctcccccctaaagcacctcatactaattatggcagacggtttggaggcagagatcatggtggcaaagggcatgataccctggtgaatagatgtatcaagattaaatctggcccctacaaaggatatcgtggtcgtgttaaagaaatgacgggagcacttgtacgcgtggagcttgattcacttatgaaggttgttgcagttaagagagaagatattgctgacacagctactgttgcaactccattcggtgaatctcataattcatggggcaacgaaacacctgtgcacccatctagaacgccactgcgtccttttcagactccattgcgggaccctggagcaacaccagttcctaatggaatgcgaactcctatgcctagtcgagcatgggcaccaatgagtccaccaagattagctttgggttggcaatcaatgccaggaactccagttccccagccacacgaagcccccacccctgggtcaggatgggctgttacacctggagttagtttcggtgatgcctccggaaaaaatccaagctcatatgcaactccaacacctagtgggcaaccaatgaccccaaatcctgcatcatatctcccgagcacacctggtggtcagcccatgactctgggttatattgaaatggatataatgtctcctgccataggtgaggagggcggtaggaactggcttttaccagatgttttggtcaatgtgctcagggaaggttatgataccacctgcggtgtggttaaggaagtcctcccggatggatcttgccgcgtcgcacttgggtcgtcaggcagcggggatgaaataactgcttttccaaacgagtttgaggttgtcaagcctaagaagaacgacaagctaaagataatgtctgggtcttggcgtggactcacggggaaattgctgggagtcgacggatctgatggcattgtgaaggtggatggtctagagacgacggatcagacgaaaattctagacacggcgattttgggcaagctagcagcctga

SEQ ID NO: 15359 - DNA, 997 bp, Oryza sativa
  Clone ID: PAT_MRT4530_21209C.1
gctcgaggccccctcgtctcctctcctctcctctcactctcctctccacgccatgcacgagagacggagccgtctttcgtaagctaggttgagctgcttccgaagccaaagtcgggccaagatggcagatgatgactatccggtcaagctgcatatatacgatcttagccaggggatggcgcggcaattgtcaacaacaatccttggcaaggctattgaggcaatttggcatacaggggtggtagtctacgggaaggagtacttctttggcggcggcattcagaaggatcatcccggaagaacaccgtacgggaccccggtcagggtggaagatcttggggtcacccatgtccccagggagatctttgaggacttccttcaggatatcaacccaaggtacactcctgcaaactacaacctcctcagcaacaactgcaacaacttcaccaatgaagccgcgcaattcctcgtcggttccgccatcccgagctacatcctggagctgcccaatgaggtgatgaacagcccgatcggcgcgctcatattgccgatgattcaggggttggagacaagcttgcgagctggagttgctcctcagccgccgcaattcaagccttctccggtggcggcagtgacggcgacgcagtcaccaccatcgggtagcatccatgtcgagccgaaatcgaccgcctccgacaagacggaggttgacaacaacggcggcgggattccgccggcggtacaacctgctccggtggcggcggcgacgtcaccagcagcagtagccgaggcgagcatggcgccgccgcctccggtggatccgctccgggaggcgaagagccgggtgcaggaggagataaagagggagttcgcggcgatcatggcgacgggcgccgtacaggccggcgaggcggcggcgctcgcgacgaggagggtcatggagcggcacgggctgcgtcgcgccgccgtcgccggcggcggcatgcagcgagggtag

SEQ ID NO: 15360 - DNA, 478 bp, Oryza sativa
  unsure (1)..(478): unsure at all n locations
  Clone ID: PAT_MRT4530_2120C.1
gaactactaataaactaaaatgtcttgagttttcacttgaatcaggtgaaaaagaaggaactattagagacaacacagtgagcatagcactcatttgtgtactggtctcatagcctggtggccccatacatcaggctgtcaggctgtgagaccagtaaggggccatagccaccaccaccaccaccaagcaatatagatgtgttaggttgtaatttcataataagtatatatgacaacataaccttgcaatttcatagaagcatatatgatagcgaaacctatgttaaaaaatattttcacttttttntcatgacagtccacacagggttttagagaatatgctacagctgcttggctttagtcatgtcaaattgatgcacgtataacaaataaaaaatagacctcaaagtattttctgttactggttttcaccacaacaggttatgtctgtcttgaatgatcttgatatatactccct

SEQ ID NO: 15361 - DNA, 300 bp, Oryza sativa
  Clone ID: PAT_MRT4530_21210C.1
ccaaaatataaatatttttagctataaatctgaacaattgattcatagaaaaaaaatgttatattatgggacgggggagttactaccttacccccaactgctgcaacgatgaacagcaatcttttgtatcatgcaaaacaaaaccaaaatcctcaccgtgatacaatgaagtagtaggagctaaaatgctttgcctgcttccatcggttgagatggagcttttgcttgggatgagctcccagtttgagccacaccgtttgtcatctcttttctcgcaatgcaacgccagcttgtctcgtg

SEQ ID NO: 15362 - DNA, 1179 bp, Oryza sativa
  Clone ID: PAT_MRT4530_21211C.1
ttgccggccggggactgcgaccaaaaatcccccgctcgcttggccgctccggcgatcccctcccccggcagcggaggcgaagctcactgtcgcaatcggcgcagctgagcggagcccttgcccgccatgacggagtactgggtgagccaaggaaacaaatggtgtgacttctgtaagatttacatagctaataacccgctaagcatcagaacacatgaaatcggtaagcgccacaaggacaatgtcactaaaagattggcaaccatgcaaaaggagggtgctgccaaagaaaaggagcagcagcaagcagcccgggccctcaagcaaatagaagctaaagctaaaaagagctaccaaaaagatttagagaacagtcaaaggaatgtggacggtgacacttctgcggcacctggagatggatgggaattcgactctacttcaggatactattatgacaaatctactggactctattttgactcaaattctggtttctactattctgacggtttaggtaaatgggtcactcaggaagaggcatacgcatgggcaaaaacctcccaagctaatgctgggcaatcctcaagttcacaaacaaaaccaactgcttcagttgcgactgtccccacaattaaagggggccaagctccaggtttggtcgtcaagaaaccactgaatccgatgagaactgtaaagggtgctccatccgccattgctgttaacaagagaaaaagagaggacggcaagcccaaagtgatctcaaaggaggaggaagccgcccttaaagcgcgtgaagcagcaagaaaaagaatggaggatagggagaagcccttaatgggactatacagatcgtactaaggggcctccccataagaaatgctaatggatggattgttctgtaaaagaagatttgcgagattattagcgttgggtgtcttcaagagcgtcttctgcatcagggaagcatgtctgtagtgtacaatatctctggtaccaacaatatcctgaattggataaattccctttcctgaaactgttatctgtgaaacatgtaaagtactatacattcgtcagcatttcttttgctctttcacactggatacactgtagaaatgacgacctttgcgatcaactttacaggaaaaagaatatctttaccaaaaaaaaaaaaaaaaaaaa

SEQ ID NO: 15363 - DNA, 719 bp, Oryza sativa
  unsure (1)..(719): unsure at all n locations
  Clone ID: PAT_MRT4530_21212C.1
ccggccggggaccaaaaatcccccgctcgcttggccgctccggcgatcccctcccccggcagcggaggcgaagctcactgtcgcaatcggcgcagctgaacggagcccttgcccgccatgacggagtactgggtgagccaaggaaacaaatggtgtgacttctgtaagatttacatagctaataacccgctaagcatcagaacacatgaaatcggtaagcgccacaaggacaatgtcactaaaagattggcaaccatgcaaaaggagggtgctgccaaagaaaaggagcagcagcaagcagcccgggccctcaagcaaatagaagctgtaagtttgtaatgctgtttttttccccagtatgttggtatcctaatcacctaatgtacatattgttatgtcacaaactacagagcttgtgaagggtaaacacttctgcattgataaaaccatgtaggctttttctttttgaatttatccttntcccttattgctgtgttgtttcaatttatcttgcaattggttgatttatgaactaccatgccttgttatttgtaacttactgttcactgcagaaagctaaaaagagctaccaaaaagatttagagaacagtcaaggaaatggtggacggtgacacttctgcggcactgggagatggatgggaattcgactctacttcaggatactattatgacaaatctactgggactctattttgact

SEQ ID NO: 15364 - DNA, 173 bp, Oryza sativa
  Clone ID: PAT_MRT4530_21213C.1
tctcctgcgcggggaatggtagcctcctccgggggggtttattaaaagcactctgggcttcccgacgtagcgcagcagcgattgcattctgtccaactttaaggctgcagagaccgggcattgtcacagagggctccattccgcttaaggctggcgacagcttctcggtgccc

SEQ ID NO: 15365 - DNA, 2486 bp, Oryza sativa
  Clone ID: PAT_MRT4530_21214C.1
tctcgtacgcgcgacacgagtcaacgaccgacggcgatcgccggaggtggggggcggcacggcggggggtctctgctcagcgtggggggtggggccaccatggtgaggagcgggagtgtgcggcggacggccgcgtcgtcgtcgcccgccgcggcggcggtgccgacggccttcaccgcctcgcccggcgactaccgccttctggaggaggtcggctacggcgcgaacgccgtcgtgtaccgggcggtgttcctgccatccaaccggaccgtcgccgtcaagtgcctggatctcgatcgtgtcaacagtaacctcgatgatataagaaaagaggcacaaacgatgagcttgatagatcaccctaatgtcatcagggcttactgctcatttgttgtggatcataacctctgggtgataatgccattcatgtcagagggttcatgtttacacctgatgaaggttgcatatcctgatggttttgaggagcctgttatcgcctctatcctaaaggaaacacttaaggctctagagtacctccatcggcaaggacatatccatagggatgtcaagcgtaatattatacaggcgggtaatatccttatggacagtcctggtatagtgaaacttggggactttggtgtctctgcttgtatgtttgatagaggatggctccagaagttctccagcctggagcaggatataatttcaagtacgttgggtaagaactctaactaccataaaaatactgggaataaggttcttctcatgacccttcaaaatgcaccaccaggccttgactatgaccgtgataaaagattctcaaagtctttcaaggaaatggttgcaatgtgcctggtcaaagatcaaacaaagaggccaacggctgaaaagttactaaagcactcatttttcaagaacgcaaaacctccagagctgactgttaagagtattttaactgatttgccccctctgtgggatcgtgtaaaagcgctccagctaaaagatgcagcacaattagctttgaagaaaatgccttcttctgaacaggaggcactttctatgattcatgatgatgatccacctgaaataaaggaagatgttgacaatgatagaataaatgaagctgataaggagccgttttctggcaatcattttggacaaccaaaaattttgagtggaaagcacttcaggttgaatcatgaacaaacttgtgtcactgcagtaagtccaggggggaatatgcatgagacaagcagaggattggtttctgaacctggtgatgctgatagtgaaaggaaagttgatggatatagaaaacaaggggaagcggcagttaagttggcatctgataaacaaaagagttgtacaaaaagaaccacaaatctcagtggtcctcttgcactccctactcgtgcttctgcaaatagtctgtctgctcctattcggtcttctggaggctatgtgggctccttgggagataagtctaagcgtagtgtggtggagataaaaggacgtttttcagtgacatctgagaatgtggatcttgcaaaggttcaggaagttccaacaagcggcatttcacgcaaattacaggagggatcttcactgagaaaatcagccagcgttggtcattggccggtggatgctaagccaatggatctcatcacaaacctcctaagtagcttgcaacagaatgagaaagctgacgcaacacagtatagacttggtaatatggatggtgatacagaggttgaaacgtctatttccgagggagaacggtcattacttgtcaaaatatttgaattgcaatctagaatgatttcattaaccgatgaactgatcacaacaaaactgcaacatgtccagctacaagaagagctaaaaatactgtactgtcacgaagaaataatcgacactagggaggtggacaatgcttgacatgttaaggttgagccagattctttttattagtacaagcagtattcaggcgactaaaagttttgcctgcactggctcatgcctggaggcttggctaatcggattccaacaaggtgtttgaggtgcgcttttaggaagggaggaaaactgagaggtgccatggattcgacttgggaatctgcatcgaactgttgaggagatgagagctctttgagatgcatagcaacaaaggctgctcgatgatggccagcttgggtttatgtatgtttgtgtatatttgttcgatctacttaattacttgggtttatatttatttattcgggggactagtgtaaggtggttatgagagactgcggtatccatatagtatttcgggccgcacttatcattaagaattgagatggccatggatgccaatcttggccaatataatatagaaccaatgagctgcgagactggattattgtatttatagaccaccagaatatattgtttatatgttgttaaaaaaaaaaaaaaaaatatgctagctaaaaaaaaaaaaaaaa

SEQ ID NO: 15366 - DNA, 204 bp, Oryza sativa
  Clone ID: PAT_MRT4530_21215C.1
gcggccgggaggcctagctaccctactccgtccaatattgtcgccgataagctgaggagcgccgtcgatgctaggtgacgtggcgtcggctgcaggagaatgtctccgccgtgacgccgtccacgcagtacatcaatatctccatcgccgagcacctctgcgtcaagggcgtcgccgtcgtcatctcctcccgaagaagaagaa

SEQ ID NO: 15367 - DNA, 187 bp, Oryza sativa
  Clone ID: PAT_MRT4530_21216C.1
ccgtttcatttcacctatttttacatgtctatcttttttgtgtgtagtacataaatgcaaataatgcgtctcttttctctcatcatagcctttcgatcggtagaagctagaatgccagagatggtgagggcgtcaacagccatctctgcgggaagagtcgtcgtcgtcgccggagcggcggcgttgg

SEQ ID NO: 15368 - DNA, 318 bp, Oryza sativa
  Clone ID: PAT_MRT4530_21217C.1
tctctattttttttttctctctctttcttctccatctctcctccttccttcctaacctctccccacctacctccctgccgcctgatcctgatttccccaattgaggccagcgtcgagcacctgcacacacgcacacgctcgctgctgcgcctcgattctcgacccagatccgccactcccttccccaattcgccgtcacctgcagctgagtgttgtttgctcgagctagctggtggttcttgccttgcagggcgaggcagtggtagcttgcgagctttagctgcgggagcggttggctttggctttggtttggtaaat

SEQ ID NO: 15369 - DNA, 1031 bp, Oryza sativa
  Clone ID: PAT_MRT4530_21218C.1
tttttttttttttttttgagcaataatcatttttttggaaataaaattagtctacctcatggatttacattgatgattgataaagatctgaattaggggaataagcaagaaatctgctaaagtaaagaaaaaggatggctgaatgactgaatgatattatgataatgttaaatgaacttgaactgttcaagataggatagataggaggaggggagccggccggagggtggaaggcggcggcccaccaaaccctaaattcctttcattttccttttttttttcccgcatccgacgcatcgaggcaggggatattcttttcttatccttctaagttttcgttcttgcattcttctcgatgcaagagaagatgtcaatggcgtggcgtcgccgacgagttcagcaacggttgcgcacggacaacgccaccacctgcgcccactgcttcagcctcatcttcaccgtctccggcgtgtctcctggagagagtatggacatggggctcccgagcggcgactcctcggacacatccgacgaggaggcgccgcacgagcaggggctcgcggcggcgcaaacctcgcccgcgccgccgccgccgccgccggcgttgccgtgaacggcgtagtagaggtccagcgcggggagcgtctccaccaggcggctcctcccggcgccgcacagcgggcacccggccgcctcgaacccgaacccgagatccatgcacccgcgcagctcgtcgaggtcgtcgtccgtgacgctcctcacccgccgcagcgccgacgacgacgacgatcccttgttcatcccgcgccgccgctcccacgcctcgtccctctccatgtccggcgaccacgagttctgcttctgcagccctagccccacccccgccgccggaaggcccctcctcttccccacgccgccgcagccgccgttcatcagatggctaaccttctccatgacggcggcgagccctcggcccctccctctccgtcctcctccgcccgtacgccgtcgcgtcggccgccctcctcgtg

SEQ ID NO: 15370 - DNA, 296 bp, Oryza sativa
  Clone ID: PAT_MRT4530_21219C.1
gcacgaggtgctcctgcagggagagattcaacggctgcgcgacaagattgccatggccgagaagtctgccaatggcagaagcccagctgaatgacaagctcaggagtgaatgctcaaggcgttggaagatgacatgagaaatgaatcatccaacacgtctgctagcaataatggacaacgctactagcaagcaagccactccaaagaggtcatcgtctcagccaagacgaccaatcatctcagctgacggcgccgacaagagaaggccggcgtctcagcccactgggcatcggtgt

SEQ ID NO: 15371 - DNA, 186 bp, Oryza sativa
  Clone ID: PAT_MRT4530_2121C.1
atggcgaggaagccgacggcggcgcatcaatgcgatggaaatggcaagggatgtaatagcggcagtagcttctccaccggggtcggccgccagtccaccactggagaagacgccgaacgagcggtcaccgcaggggatttggtggcggcggcggctagggagagaggggaagagaagagcagttga

SEQ ID NO: 15372 - DNA, 386 bp, Oryza sativa
  Clone ID: PAT_MRT4530_21220C.1
cccacgcgtacgtggcaatgcggataaagaataactaaataaataaataaataaattgcaagcaattgcgttgctgcataaaaaataaaaaaaaaaaaaaaaaaaaaaaaaaaaaaaaatataaaaaatgatgtttataaaaaatgcatattgtctttcacgagaagacgatcacaggctcaatcataatagaggagatgagttctgtgcattcactccaatcaaatacaagagcatatgaaaaaacctataatttgccaagaattactcttagtgtcagcttgatgataaattaataaatatggaaataaatcgcaaacaattgaattgatggtatgtactaaccagtgtttcgactaatgatgataaagcatctctttattctt

SEQ ID NO: 15373 - DNA, 296 bp, Oryza sativa
  Clone ID: PAT_MRT4530_21221C.1
acggcggcggtgagcgactcgggagtggccgcgaggggcgacggcaattggcccccactcaatccggcggcagcggccatcccccgcccggatctagcggcggtggccatccctacccggatccatacggatacggcggcggtggctgccggcacaatggtggcggcggccgggagtggtgggcttgagagcggcggcagcgtggtgggcgggctcgacggcagctgcggggagcggtggcggcgtcgtgatgacgacgagttgcgctggcagctggttgcggcggcggcggccgg

SEQ ID NO: 15374 - DNA, 240 bp, Oryza sativa
  Clone ID: PAT_MRT4530_21222C.1
atgccgaaggaggaaacagtgacgaccagtgaagacgacaacggcggcgcgacggcgcacagcggctggagatcaaaacacattggcaacccactggttcacggcgaggacggcttccggcgatcttcggcgaatgaaacgtggaggccggtcttcctctctttgctgcggtcctgtggcggcggcacagtgcacgggcacgggagctcgggtcctggctggaggttgaagatgaactag

SEQ ID NO: 15375 - DNA, 1131 bp, Oryza sativa
  Clone ID: PAT_MRT4530_21223C.1
aagaccgaaacataaaaataccatctatcacacgcaatagaccgcgaatgcaaatacatcacaacaaccacacacacaaaaattacaccccgaacgccgaacatcaccactctgcagaaaccacacaaaataacaaacagacccgaaacaccaagcacaaccagaaccactatataaagaacccaaaccacaccacccgacccccaatcaaaaacacaaagaaccccacacaaaacacacccaacacaacctaacaaaaaacgcgccaaaaacacacaaccaaacgacagcacaacaaacaaaaagcagccaaacccgaacccccacacccttcacaaaacccctaccactaaccccgcccccgcacccacaccccccaccccccccctacaacacgcccacccaccaaccgaccaacacaaaacctaaccctaaccctagaatcgctcgccgccgctcccgtcgtcgtcgtcgtcgccgtcgtcgtgccgccacatcacccggccacacccggccgccgccgccgcaaccagctgccagcgcaactcgtcgtcatcacgacgccgccaccgctccccgcagctgccgtcgagcccgcccaccactgccaccgtcgtgccggacgccaccgccaccggatccgcacggatctgggcgggggatggccaccgccaccagatccgggcgagggacagccgccaccgccggatccgggcgtggaccggttgccgtcgcacccgagccgctcgccgttacgaccaaccgctgccgccgctctcaagcccaccactcccggccgccgccaccattgtgccggcagccaccgccgccgtatccgtatggatccgggtagggatggccaccgccgctagatccgggcgggggatggccgctgccgccggattgagtgggggccaattgccgtcgcccctcgcggccactcccgagtcgctcaccgccgccgtctaccaagccgctcgccgtcgcgcccgcccgatcgtcgcctcgtctccagccgccgcatcgcctcgcgcccattcccggccgccacctcgtcggcggcgccgccgagccggccgcgtcccgtggagaggagtttctcgcctttcgccaccaccaccaccaactcga

SEQ ID NO: 15376 - DNA, 550 bp, Oryza sativa
  unsure (1)..(550): unsure at all n locations
  Clone ID: PAT_MRT4530_21224C.1
cagccaggtaatgcggcttacccgacgtactccgtctgcccgcgatgcccgggcccgttcgtgtaagtctccagtgtcgtcgtcccccggcacggtgtgacgaagcaggntcctgcttaggtctttgctgccggctagcttctctcggcggtgggggggggggcgtggtnnctatgtgcccaatgcgcctcaaccactnatgctgaggtatcaatctacagggnagaaagcggcgccgcccgacgtctggtgcacctccatttggccgaggtgttcccgtcggctgccctggaaagggtgacaatcgnagtcgcgcccggcggcgaagcccttcccnnggcgttctgcaaaacgtggacatttccccagatgggcgtagnngcggtgtcttgcttacttggctannccgggaactgggcttactagncgcttctgtatttgtagcttagttatttggcttgttcatttgtgtgtgatttgggttacttaaataattnngtgttttccttttatcttggaagcatgtatgaatgaataaatgatgaacttc

SEQ ID NO: 15377 - DNA, 2670 bp, Oryza sativa
  Clone ID: PAT_MRT4530_21225C.1
atggcggccgctgtcctcctcctcctcctcctaccggccctcgccgccgcccaggcccaggcccagcagatgcggaccttctccgccaacgacaccaattggagccccgccgagagcaaccgcaccctcgtctccaacaacggggacttcgccgccggattccggccctccccctcctccccagccaagttctggttcgccgtctgggtgagcgccaacgccaacgagtccaggccggtcgtcatatggtacgcccacaacgacgaccactccgccgtggagggcgacgccaattccgtgctctccatcgacgcggcggggaagctgtcgtggagcgacaacggcaacagcaccaccctttggtcccgcaacttcaactccccgcgtgtccgtttgtctctgaacgactcggggagcctcgaccacggcgcctggtccagcttcggggagccgacggacacgctgatggcgtcgcaggccatccccagcattagcaacggcaccaccaccaccaccagcatcaccctgcagtcccagaacggcagattccagctgttcaacgccctcaccctgcagcacggctcctccgcctacgccaacatcaccggcaacaccgccctgcgcaacctcaccgccgacggcacgctgcaactcgctggtggcaatccctcccagctcatcgcctccgaccagggctccactcgccgcctgcgccgcctcaccctcgacgacgacggcaacctgcgcctctacagcctgcagtccaagaaagggcagtggcgggtggtatggcagctggtgcaggagctctgcaccatccggggcgcctgccaaggggaggccaacatctgcgtcccccaaggcgccgacaacaccacctgcgtctgcccgccggggtaccgcccgcagggcctgggctgcgcccccaagcttaactacagcggcaagggcaacgacgacaagttcgtgcggatggatttcgtttccttctccggtggcgccgacaccggagtgtccgtccccggcaagtacatgaccagcctgacgccgcagaacctggcggactgccagagcaagtgccgggccaacgcctcttgcgtggccttcggctacaagttgggcggggaccggacgtgcctgcactacacgcggctggtggacggctattggtcgccggcgacggagatgtcgacctacctgcgggtggtggagtcgaacaacgacccgaacaacttcacggggatgacgacgatgatcgacacggtgtgcccggtgcggctggcgctgccggtgccgccgaagcaggggcggacgacgatccggaacatcgccatcatcacggcgctgttcgcggtggagctgctggcgggggtgctgtcgttctgggcgttcctgcgcaagtactcgcagtacagggagatggcgcggacgctggggctggagtacctccccgccggcgggccgcggcggttctcgtacgcggagctgaaggcggcgaccaaggagttctcggacttggtggggcgcggggcgtacgggaaggtgtaccgcggggagctgccggaccggcgggcggtggcagtgaagcagctggacggggtgggcgggggagaggcggagttctgggcggaggtgaccatcatcgcgcggatgcaccacctcaacctggtgcggatgtgggggttctgcgcggacaaggagcagaggatgctggtgtacgagtatgtgccaaacggatcgctggacaagtacctgttcgctccaggcaccggcacccaaggagacgaagaagagagcaacaagcggcctctgcttgacctgcacacccgctaccgcatcgctctgggcgtggcgcgcgccatcgcgtaccttcacgaggagtgcctcgagtgggttctgcactgcgacatcaagcctgagaacatccttctggaggacgacttctgccccaaggtgtccgacttcgggctgtccaagctcaccagcaagaaggagaaggtgaccatgtcccgcatccgtggcacccgcgggtacatggcccccgagtgggtcatccaccgcgagcccatcaccgccaaggccgacgtctacagcttcggcatggttctgcttgagatcgtctccggccgccgcaactacggcttccgccaggactccgtcggcagcgaggactggtacttccccaagtgggccttcgagaaggtctacgtcgagcgccgcatcgacgacatcatcgaccctcgcatcgtccaggccgaggcctacgacgacgaccccgccagcctcgccaccgtcgagcgcatggtcaagacggccatgtggtgccttcaggaccgcgccgacatgaggccctccatgggcaaggtcgccaagatgctcgagggcaccgtcgagatcaccgagcccgtcaagcccaccatcttctgcgtccaggacgactgatctctcctaggagtactccacttcttgccacgagagacacacaaattatctttcttatttattatactagtactagttcagatcagatcagagcagagcactgcatatcctgcgttgtctgatttgcctgctgggctcacgacagcaactgagcaaggcaaatgtacatgatgagtggattacgcttcaaaatgatacgcaccatcaaattcgtcggcaaaaaaaaaa

SEQ ID NO: 15378 - DNA, 3946 bp, Oryza sativa
  Clone ID: PAT_MRT4530_21226C.1
atggaaggtgtgcacggtatagaatctctggctactggagatggttggcatcatctttcccgtacccttggaccggtgctcctgatctcgatggggtatattgaccttgggaagtgggtggaaacgatagatgccgggtctcggtttggctatgatcgcgtaatactcatgtttcttatcatcttggcggccaatctcaggcagtttctgtcggagggtaccggcatgtgcacggggaaaaatcttgcggagatataaggggtggagaacagtccgacaatatgagtaatccttggttttcagacgggattctcggtgctaaccgcgtacataaccatgggttcaggcgtatcaatcggattcatcctcgtcgttgaatatgatgattttatcgcgggcgtatagtatgctagtgttggggtcaatttgctaccttacactatgtcttatctgaaatcatttgtgcagggccaaagacaatctacaactctttcccttggtgctctgttccacgatcacctgttctcaatattgtttattttcactggggttttccttgtgaattatgtcctgatgggctcagcagcagttgaatccaataatactctggttacttttcaagattctgtagatttaatgaaccagatgttcatgaatccgatggcaccaattgtttttttagtgatccttatcttttcgagtcatgtcatctcattgacatctattattggcagccacgcaattttgaagaatttctttggtgtaaacttgcctcattctgctcatcatctgctactaaaggccgttgccatggttcctactatgtactatgcaaaggttgcaggttctgaagggatatatcagttactcattatctgcccagttatccaagctatgttccttccttcatctgttattcctgttttccgtgtttcctcatcaagagttataatgagcagatataaaatatctttgtacgttgaaatattggccatcctagcatttcttcttttgctgttcacaaatatcatttttgctgcggaaatcctgtttggtgatagtacctggacaaacaacttgaaagggaacactggaagccctgttgtacttccgcatgccattgtagttctaatttcttgtgcatcaattacttttacgctgttcctggctgtcactccactgaagtcagcaagtaatgaacctgaaactcaggagctatctgagcactctcagagagaagatccagatactacttatcaaagagaagcaagtaatgaacctgaaactcaggagctatctgagcactctcagagagaagatccagatactacttatcaaatagaagtaagtaatgaacgtgaaactcagcagctatctgagcactctcagatagaagatccagatactttttatcatagagaggagctttctctggttgaacagaaagaagatcatacgacttctactattaatgctattcccaggatttcatcagaaagttatcaaacatcagctttggagcataatgactttcctgacatcactgtggagtctggtcatggcactcagcagcttactgcttttgtgccaattattccggaggtctcatcgtctatcaaacataaggaaccaaaatcagtagttattgaccagacggaaccagtgccaaaggtttgtactgccacagtagtagaacataacactgctgagaacatcaaaatgaagagtacaacttcaaagcatgtccaagaagaagcaggagctagcatggactatgatactgaggcttcttataatgcggaagtcagcaagtcttctggaaacaaggcacctccaatttctgatgacccaacatctcttactttgagcaaggggagagactctgatgctggttatcgtggcagtaacctctcaagactgcctggtttgggtcgtgcagcaaggaggcaattagcagcgattcttgatgagttctggggacatctctttgattatcatggtaagctaacgcaagaagctaatgcaggaaggttcaactttctgctaggaccatacccgaaagcagttagaagtgataaccaagccatcgaagcttctaggagccccttgatgagagatgcaatacgaggatcagctaccatacagaaatcatgggactcacgtgctaaggaagtctctagtccaggctttaattttgtgcttcagatgggtcgcattggatcatcaaactggtctgagagcatgcgtttatctaatgctgacatcccaaggccaactagcaccttgtttgaacaaaatactcagttttattcaaattataatgtcccatcttaccctgacaatcagttctatcaacctgctaccattcatggctatcacctggcaacctctttgaaaaattctgcaaggtatgctcgtaaccaagatgtaattggttcacagggaaccgcttcgcaaaacacaacaatgagctgtttagatacaatgacagtggagagagctttttacaatcctgcctctgttaatgagattgaaggggttggttcatctgcttactcaaagaagtaccatagttcacctgacatatctgcactaattgctgcaagtaggaattatttgccaaatgaagtaaatttgggaggtgctgctggaagcagttcatacttcagtaatttggcatgtgaaagatcacaatatgtgaacttgggatccagttccacagctcaatttgcacttagcaagcactcacaacctaatttccatagagacacatcatctatgcagtcaagtgtgaacccaagtactgaatccatttgggcccagcagccgtttgaacaattactcggtgtatcaagagcagagttgaataagggcgagggtaacaccgaccagagatcaagtggtgtcaccaaacacgatttctctaacaaagaatatgaggtgaaacttcttcaatcactcagattttgcatcatgaagctcttgaaactggaaggatcaggatggctctttgagcaaaatggtggctgtgatgaaaaattaattgatcaagttgctgtagctgagagagtttcacaacataccactgaaaatcagttatctgctgatctccagctccatagttctgatgaagacttgcagccactgcaaaggaatgataacagggatgccaattgcatgagcctactgcccaagtgtggagatgattgtgtttggcaggcccccctgattgtcagttttggtgtttggtgcatccgccagattctgaacctgtgccttgtcgaaagtaggccagaactttggggcaagtatacatatgttcttaatcgtctccagggaatacttgatcctgcattttccaagcctcagaaacccatgaaaggatgcgtatgccttcaaaaagttgccaagcccatctctggtactttcaccactgctggtatgatcttggagatgattaaagacgtggaacaagccatttctagccgcaagggccgaagcggcacagcagcaggagacgttgcttttcccaaagggaaggagaacctagcttctgtccttaagcgatacaagcgtaggctctcgaacaagacatctgcaggacaatagcgtggcagcgagctttcttttgtttcttgtttgtatagggttcttggggctgctccacaaagttctgtttttttgtgctcctcaaaccttgggttttttcgatgcacacgatctccagagtgcctgagagcttcttgatctttggtcatttttgcacatgttgtttatgaagtggccaagggtgaatggtataccttgtttattcatcttatcagcgagatctcaacagtagatgatatttgctggagcagcaacattgtaaagttctttttccagatgaacattctgaagtccgctggcttggctttctgaaatctccactagactcgttgttccc

SEQ ID NO: 15379 - DNA, 784 bp, Oryza sativa
  Clone ID: PAT_MRT4530_21227C.1
agatgcaatacgaggatcagctaccatacagaaatcatgggactcacgtgctaaggaagtctctagtccaggctttaattttgtgcttcagatgggtcgcattggatcatcaaactggtctgagagcatgcgtttatctaatgctgacatcccaaggccaactagcaccttgtttgaacaaaatactcagttttattcaaattataatgtcccatcttaccctgacaatcagttctatcaacctgctaccattcatggctatcacctggcaacctctttgaaaagtatgaatgcaagtcacagcacgcactccagcatttcactagatccacggcgacttcctagatcatctgaatctgctggttctaactacgcagattctgcaaggtatgctcgtaaccaagatgtaattggttcacagggaaccgcttcgcaaaacacaacaatgagctgtttagatacaatgacagtggagagagctttttacaatcctgcctctgttaatgagattgaaggggttggttcatctgcttactcaaagaagtaccatagttcacctgacatatctgcactaattgctgcaagtaggaattatttgccaaatgaagtaaatttgggaggtgctgctggaagcagttcatacttcagtaatttggcatgtgaaagatcacaatatgtgaacttgggatccagttccacagctcaatttgcacttagcaagcactcacaacctaatttccatagagacacatcatctatgcagtcaagtgtgaccccagtactg

SEQ ID NO: 15380 - DNA, 440 bp, Oryza sativa
  Clone ID: PAT_MRT4530_21228C.1
gtttttttttttttttttgttgttttttttttttttttttttttttttttttttttttttttttttttttttttttttttttttcccaagaaaacccacaggaaaaaaacaaaaagggggattgggccccaggccgggaaaggtaacatgggggcggcccaaaccaaaaaaaaagggggggggcttttttggaaaacccgggggcccggaaaaaaaaaaaaaacgggcccaaaaaaaaaactggggccttttttggaagcccttgaacggccccgaaaaggggaaaaccctgccttcggaccccccccaagggtaatcccccccccccgaaaataaggggccgggggggacccaccataagccccccccccgggaaaacgagaaaacccgggaaaaggggttaaaaagaacccaaaaaaagggggccagaaggcccaccg

SEQ ID NO: 15381 - DNA, 441 bp, Oryza sativa
  Clone ID: PAT_MRT4530_21229C.1
ctaagcttcaatccttcttctagagttccacccaaagatagagaaaagctccatcatacgcttctctaaaagattgcatttcgcgattacttcaatgccttcgtcttccttaagaagcaaagaccaaagccttcccaactgagttgctttgaaaattaccatcaggtaccaatctaatctaactgttggtttaacaggggtaggattgtctaatgaaaatgaggtgcccgtgctaatgaccgcccactcggccaatagggagttcgtctgtgccgcccacttctcttccattctgccgcatcgtggttgcatcgaagcttccccggcgccgccgtatcgagcctgttctcccaccacggcgccatcgcatcgaccccggtgcggctgccgccgcaacgaggctgccgcatccagcccgccgtcccgcggccgccgtctcat

SEQ ID NO: 15382 - DNA, 552 bp, Oryza sativa
  Clone ID: PAT_MRT4530_2122C.1
caaaggaggtctcatggtaatattttttttccgattttgttgacgtggcatcctagtcagaaaaaaaaattaaaaaaatacgtagggcccacatgtcagccgaggctcgcggtaaaaaaattacgtcaacccgaggctcgcggggcgcctccgcttcatggactacctcgacgaggagcagcgccgcgccatcaccatcaaagtccgccacctcgtgctccaccacgggggacaccgcgtcaacctcatcgactccctggggcacatcgacttctgctccgaggtctcctccaccggcgccgcgaggctctccgactcgatcggcgctcatcctcgttgacgccgtcgagggcgtccacattcagacccacgccgccctccgccaggccttcctcgagcgcctccgcccctgcctcgttctcaacaagctcgaccgcctcatctccgagctccacctcacccccgccgaggccttcaccatcttcatcaggatccaacacagctgtaatcctttgtatacttcgtttgatgcacaaaagtaccttgaggtgt

SEQ ID NO: 15383 - DNA, 261 bp, Oryza sativa
  Clone ID: PAT_MRT4530_21230C.1
gagagctctagggtcactgctgccaaattttttttactaattcggtgggatagacttgaagaggctgcaccatgtagatgtaccatgatctggttaccggcgacgagctactgtctgattccttcacatacagagagatcgataccgggattgtatgtacagccgaagcaacgtgagtcgcacaaggagctattgatgtcgacatcggtgccaacccatatgctgacggtgatggtgattatgaggttgtgaccaaccaag

SEQ ID NO: 15384 - DNA, 497 bp, Oryza sativa
  Clone ID: PAT_MRT4530_21232C.1
ccaaaactaaaaccgccccatttcggggatccatcaccattttttcacaaacatctggatatgtttcgaattacataggaaaccttggggggaacccagggaaacattccctctaacctaatgggggggtaaaaatcccacaattttggaggctggagttaaatcatgagaacacagttaaatctctttatagggaaaaaaatttagggcggggaggaggaaacagggggggtacagttaatgaaatggcaatggccgtcaaccgccgcgccggccccgccaccggggagggcggaacccggaagaaaaagtttttgtcccgaaaggccgggggggagccttttgcggggtcgtcgtcgccgcccccatcgtcaaatttgagcgcgtagctgagcgggtctaacccaatttcccccggggccacccgggggctccacctaagtttttccccgttccgccgttccccgggggagccgaagcagacacacaccggcgcc

SEQ ID NO: 15385 - DNA, 207 bp, Oryza sativa
  Clone ID: PAT_MRT4530_21233C.1
ttggtacttttggtggatggccctacaaaatagcatatgcacgaactattttgcctgcaatctattatacgcttttatgaagattcttttgagcaagcagggagtcccaagaaagtaaaattgtgtaataaattttgtggcccattttttgtgactgaagtttttgattatcataactggatgagaaaattttggtgccacacatta

SEQ ID NO: 15386 - DNA, 324 bp, Oryza sativa
  Clone ID: PAT_MRT4530_21234C.1
atggaacgtgtcccggatgccctgactgctgaagctttggcggcgaaggaagctctagagctagcgatggaagtcggctgtgatcgtgtgatacttgaagtcaactgtgctgagttgaaggttattctggaggacagtgaagggactaagtcaattgccaacgagctcgttcgcattgacaagatcagatctaacgctagcgagctcttccatgccgacgagttcctccgctctgcgcgcttgtccatacttgagccactgtggccaccggactcgtcgctgtcctcaagctacggtagccgcggggctcatgatcagatctag

SEQ ID NO: 15387 - DNA, 1368 bp, Oryza sativa
  unsure (1)..(1368): unsure at all n locations
  Clone ID: PAT_MRT4530_21235C.1
ttttttttgctaaaaaatcagaattagtcaaaatgatgagtttatgtgtacaactgaaaaaagaaacctgaatggtccttggcctcgtactatttagtatagctcttggactttttttttcgcttctatacatatgttgcacttgcttgtnttcacatctacagaacctcagagcagttatttgccccagtgggctctctcagacagcgtgatacggccatcacagcagcttcaattgatgcatcctcccccttttctttccagaagaacatgtttccgtacttccctgaaacacgactccaaaagctccgaggaatgtctaaatcaactaatgcaccaacattgaaatttataatgtttccgaaggtgggatcggcgacaaacacgattgtctggtcatcaacttgccaaaaatctttgatagccaaccctggtgtatcaggataattttgtgcaagaactctcaacttgtatcctgtatctttctcaagatcttctatttcttgacgcagacggttttcctgacctggggagagaaaaccagcaacatcaatgacggtggtgaattccttgggaagcaattcgggtttgttgaccccagtctttgcattaactataccaacaactgcatgtgcgagattcacagcttgacaagctgctgtgactagtgacagaatcactgcagtaaataaattaatccaagccgtacagttttattcttattttatttttattttgtagatgcagttcccttcagttcctgcgaaacaaagacgaaggccaagaaacttacagcaagtgaaggacaaggcgacggcaagcgcgctggagaccgcggccttccatggcaccgctcttccgaggtcaccggcccaagaagcagcagcaaccctgcaagcggcggcggcggcgggcggcggagtccgacaagcggagcagcggccgccgagggaagaagcaaatattggtcttggacgagcagataatggcgacgacgcaaatgcggatgctccggaaggtgttatccgaagggcgtggcaaggaaggagaaccatgttcgtcgccatagaatggcggagaaggggggagtggctgcgcgcggggatgacgaggcgggccgcaagcccccgcaactggaggaggaggtggagaaggaggcgcggtgatggactagggaggataggaggctgcggcggcgaggggaagcggctgggagaggcggcggcggcgagccggcgggaacggaggaggtggcggaagcggggcctggaagaagacgaggatgggtgggatttgccggattggggattagagtttcaggtgacatctaaaccagcaatgatggatccaacggtcacaaaacaatga

SEQ ID NO: 15388 - DNA, 900 bp, Oryza sativa
  Clone ID: PAT_MRT4530_21236C.1
atgaagccatcatcatatcgtcttgtcaccgactcgccatgcgcatactcattctcttgccgtctcgccccgctgggcatcgtcgacgctcttcatcgtcttgccggagcagagcagcagcaacaacaggagtcatgcatcatcaacagctctcaccgaagcaaagcaacaacaggaggcacagcatcagcagtggcgcacgcggaggagaagacatggctcaaggagatggtgcgggaggaggcgataccatcccactcgctcgagacggtatcccgtggtataacatacaaccctctcctctcccatctccggcgccccgtccgccgccacgacgccaccgacgtcccagcatttcttcgtccccgccacctgatcataggcccacgatcaggcaactcctcggatgccacaaacggcgccgccggcgagatcgcggcgaagaagcacctgtacctggcgatcgatgaccggaagaacgcgtacaacaggacatctctacgacggcggcgacgccgtcgacccatgtttcggtcgggcggcgtcgacgtcgaggtcaccttcttctacagcaaggacagcgacgtctgctggacgcgccgcggcgactggctgctgccgttcagaggccacggccactacgacggcgagctcggctcgtgggtcggcctccacactactccgacaccaacaggctacgcaccgacgggcgcctctgcgcctgccacgtcgtgctgggtgcacgaagaggccgagctcgtggcgtacgacggcgacggcgagctcaccgccactgatcgccggctcgctggctgctacaaattctccaagtatgagatgaactcccatacgagcgttctggatataacggacagctacgagcctacgacagttcactaa

SEQ ID NO: 15389 - DNA, 1425 bp, Oryza sativa
  unsure (1)..(1425): unsure at all n locations
  Clone ID: PAT_MRT4530_21237C.1
atggtcgctggcctcgacttcggcctcctcaactcgtcccgcgccggcctactctaccgcagtgccgccgtcaagaccggcacacaccgcccntgtgttggccaaagcgtcgnccatgccagcacgnccgacctcttccgggcagacggcccgacagctccagnccgctcnccagccagcggcccagggacagcaggccgccacctcccggtctgccccagcatcgcctcaaggcccacccgcacgactggcctaggcggcccaagcgtcagctccagaccggcccattcacttgggccggtctccccgacgcacgccatcacaagtccggccgcccattcacgtgggtcggccgcccagctctctgacgcctctcctgccagatcgccaggaccctcccacgcctccacgctcaccctgccaccacatgtcgccatcccgacccggccacggtcggctcgtcttcccggcgtgcctactccaccatccctgctcggtgcgtcacccgtcgtcaacgaccatggcatggtgacccgcggcaagcacggcatccgcaaggcacggtgggttcttcggggcttcacgcagcgccccggcatcgatttcgacgagaccttcagcccggtggtgaagcctgccactgttcgcaccgtcctcagcttcgccgtctcctgcgactggccgatccatcagttggacgtcaagaacgccttcttacatagtacacttcaggagacggtctactgcatccaaccacccggcttcgtcgacaccgcccaccccgacatggtgtgccgcctcaacaagtcgttatacggcctcaagcaagcaccccgcgcctggtacagtcggttcgccaccttcctgctgaccctcgggtttgccgaggccaagtccgacacctcattcttcgtccttcggagcggcaccgacaccgtctacctcctactttacgtcgacgacatcgtcctgacggcgtcctccaccaggctccttcagtggaccatctccgcgcttcaatccgagttctccatgaaggacctgggcaccctacaccactttcttggcgtcagcgtaactcggcagccctccggactgctgctcagtcaacgtcagtactgcctcgacattctcgaccgtgccggcatgacagactgcaagccttgtaccactcccgtcgacaccgcctccaagcttccgacgcaagtgtgcctccacatgcatgatcctcgcgagcctcacctcgccgcgctcaagcggatcctccggtacattcgaggctccctggatatgggcctccacatacagcgatgtcccacgggcgacctcgttgtctactccgacgccgactgggcgggctgccccgacacatggcggtccacctcgggctacgccgtcttcctcggtgacaacctggtgtcctag

SEQ ID NO: 15390 - DNA, 1170 bp, Oryza sativa
  Clone ID: PAT_MRT4530_21238C.1
atgccgcgccgcgctcatgctcatgccgccgtcgccgcgcacttgctggtgtcggcgttcgttgcggcggcggcggcggcggcggcgacgtacaatgtcatcgactatggcgcggtgggcgacgacggcggggtgacggacagcgcgcgggcgttcgaggccgcgtgggcggcggcgtgcgcgggcgacgcggcggcggcggcggcgacggtggtcgtgccggcgggcggggtgtacctggtgtccagggcgaggttcgccgggccgtgccggagcggcgcggtggccgtgaacatgacgggcgccacggtggtcgcgcccgtgccgtacgccggcgtgcagctgtggatcgtgttccaggacgtggacggcgtgtccgtcgccggcgggacgctggacggccgcggccgcgcgctctgggcgtgccggcgcgcacgccgccccgactgcccgcccgccacgaggtcgctgacgatataccggtcgaggaacgtggcggtgcgcgggctgacgtcgcgggacagcgccgggatccacatcaccgtgcaggcgagcgccggcgtggcgatcgtggacacggtggtgtcggcgccggggcgcagccccaacaccgacggcatccacatcaagcagtccaccggcgtgaccgtccgcaacgccgtcatcggcaccggcgacgactgcgtctccatggtcgagggctcctccgacgtcctgatcgaggccgtcacttgcggccccggccacggcatcagcatcgggagcctgggggacacgccggagcaggtggcggtgcggaacatcaccgtgaagggcgcggcgctcgccgggacgacgaacgggctgcggatcaagacgtgggcgaaggcgaacgccggcgcggtcgccggcgtctccttctccggcgtcgtcatgcggaacgggtcggggatcgagatcagcggcgtgtcgtacacggacatcgaggggacgtcggcgacggcgacggcggtgaggttcgactgcagcccgagccggccgtgcgccgggatcgccatgagggacgtccggctgaggtaccagccaccggcggcggcggcggaggaggagcagccggcggcgtcgttctgccggaacgcgcacggggtggcgtttggggacgtcgatccaccgagctgtctaaccgagtag

SEQ ID NO: 15391 - DNA, 420 bp, Oryza sativa
  unsure (1)..(420): unsure at all n locations
  Clone ID: PAT_MRT4530_21239C.1
atggcgacatgtggtggcagggtgagcgtggaggcgtgggagggtcctggcgatctggcaggagaggcgtcagagagctgggcggccgacccacgtgaatgggcggccggacttgtgatggcgtgcgtcggggagaccggcccaagtgaatgggccggtctggagctgacgcttgggccgcctaggccagtcgtgcgggtgggccttgaggcgatgctggggcagaccgggaggtggcggcctgctgtccctgggccgctggctggngagcggnctggagctgtcgggccgtctgcccggaagagactgcgggcacttggccgcgtcctcctcggcagacggcgactcgaaggcggcggggtcgaggtcctcgagtccgcaaacacgtgtgtgccggtcttgacggcggcactgcggtag

SEQ ID NO: 15392 - DNA, 471 bp, Oryza sativa
  Clone ID: PAT_MRT4530_2123C.1
gtgcatgttctctcccctaagattgcactgtcaaaatggggaggcatacaccattatcagaagaaattagcattgctgtacccaagtcaaagtgaatggtttgaatacagcaattccatgacacaagtttaccaagattcgagaacaaaggagaaacagatgcaccatagtcttgtgactgtgtcagtgtcaaatcagcagtctcatgtagtgagatttaacattgatataaagcgtgccattattcaatctaacggaagtacccaagtaggcaaaaatgaactcatcaaactgcctacgcctgccattccatattgacaatagctattcaaaggaaggcccaaatatggaagttttcttgtatcaactatacgtgctaaaccaagcaaatatcatgtgctacagaaccttgcttctattgttcgctaaggtatacacatagtaataataaaaaaatgtgagaacatagta

SEQ ID NO: 15393 - DNA, 366 bp, Oryza sativa
  Clone ID: PAT_MRT4530_21240C.1
acctcggcgggtcagaccggccctatgtggccggtcagaccgccgtacctggtcggtcagaccgcgcatatagcgcgggtcagaccgccattttggtgaaggatatgcgtgcgggaggggaggaggtcgcccccgcttcgctccgcccgtggccctcctcgccggctgccacgtgctggcttggagagaggggagtcggcggcggcgttccaactcgaggagggaggcgtggtctggactagactggaggccgccggatccgcccgagaagcaagggcgggtgcgagcgagagtaacggtcagtttaacggtcagggagagcgaggttatgcaagtctttgaagcattcaagcaactgctgtcagg

SEQ ID NO: 15394 - DNA, 290 bp, Oryza sativa
  unsure (1)..(290): unsure at all n locations
  Clone ID: PAT_MRT4530_21241C.1
cacccccgtgcnaatctcctgcatttcagcgcttatgtattgagacagtgccttaattctcaactcttggaaaatngtctaaatagaccagtgtggttatgatgcttgtatctgtaataaatgtatcacttgaagaggaaggagagaaacctcttactggctcatctcaagttgggagggggtcaggtatcaactatgtcatatattttggtatgctcatgtttttagctgtacactttcacctttgtactgtactctaacaaaacaaaaaaaaaaaaaaaaaaaaaaaa

SEQ ID NO: 15395 - DNA, 344 bp, Oryza sativa
  unsure (1)..(344): unsure at all n locations
  Clone ID: PAT_MRT4530_21242C.1
cctctcgcacccaatccaacccaatcccctcctcatccactccgctctgggccatggccgcgtgctgctcctccctcgccaccgcgtctcctcctcctccggcaagcccctcgncggcatcccccccgncgcgncgcactccctctccctcccccgcgntcccgncgcaggccctccgnctctccgctcctcatcagatccgccgggcagcagttcgtcgccgagcgcggtgtgncgtggcgtggtcgngacaaggcgccgacttcgatggaggagtttcncagagtataacgtgagtgtcgctacatgggagagacgtatctttttcacngtgacttacttcg

SEQ ID NO: 15396 - DNA, 1008 bp, Oryza sativa
  Clone ID: PAT_MRT4530_21243C.1
atgaagagtgcatacagaagtgtcatgttttacattgggcaaaaggaactggagatgcagtacaagatgaacagaattgttggtcagtgtaggcaaaagtgtgaacttatgcaggcaaagttcactgagaagctggaagaagttcatactgcataccagaaaatggccaaaaaatgccagttgatggaacaagaggttgaaaacttgtcgagggataagcaagagctacaagaaaaatttgctgagaaatccaggcagaaaaggaagcttgatgagatgtatgatcagctgagaagcgagtatgagtcggcaaagcgttcagcaattcaacctgcgaacaactacttcccaagagcccagccagacctgttctcaggcgtgcccaacataatggatagcagcgaccctctgagacaaggttgtagaattggaagagctgatgtggcatcctgctttggaatctgtcacggtcttgtcatggacttgctaactgtaaatgcattacctaaaatgcacttaaccagttcttcattgagctatagtacagcacatcgtggtcctgaattgtaggagcccagccagacctgttctcaggcgtgcccaacataatggatagcagcgaccctctgagacaagggcggagagatgagggatgggctccaccaccaaggcaacgtcggtccacctctggaccatttgagctgtctgcgggatctcctgctcacaatgcggcgcctccggttgatattaggcccagacagccagcacggcccgtattcggcactgccatgaataatacttctgcagctctgcgaaatatgataatctcgcctgtgaaacgtcctcagctttcccgaaaccgtccacatatgttcacgttgtagaattggaagagctgatgtggcatcctgcttcggaatctgtcacggtcttgtcatggacttgctaactgtaaatgcagtaagatcaatctgtctctttcactcacttcaatttctgccccatcat

SEQ ID NO: 15397 - DNA, 498 bp, Oryza sativa
  Clone ID: PAT_MRT4530_21244C.1
atgtcttccacgttcaacggcgacgagttcgccccgttcttgggcttcatcggcgccgccctcgccctcgtcttctcatgcatgggggcggcgtacgggacggctcggagcggcgtcggggtggcgcacatgggggtgatgcggccggagctggtgatgaagtcgatcgtgccggtggtgatggccggagtgctggggatctacggcctcatcatcgctgtcatcatcaccaccggcatcaacccgacggcgatgccgtactaccacttcgacggctccgtccacctcgccgcggggctcgccacggggctctgcgccctcgccgccggcctcgccatcggcgtcgtcggcgacgccggcgtcagggccaacgcgcagcagcccaagctgttcgtcggcatgatcctcatcctcatcttcgccgaggcgcttggcctctacggcctcatcgtcggcatcatcctctcctcccgcgccggccagtcgcgcgcccactaa

SEQ ID NO: 15398 - DNA, 507 bp, Oryza sativa
  Clone ID: PAT_MRT4530_21245C.1
atggcgggtgatggggaggaggaggacgcgacggcggtgggtgaggaggaggacaacgcggaggcggtgtggaggaggcaatgcagcagcgtggcggtgggtggggaggaggaggacacggcgacggtggcaggtcagggagattcggcggcgcgggggtgtggcaggaaggggttcgagagcgtgggcaacgagaagaccacatccatggtcgcgtcgtccgcgagccatcgacttctcggcttcaactctcaagggagcgcagcggccgttggcttcccgcgccaccacggtcagatgccgaaccactccgccatccactgcatctttcaagtttcaccgctcttccgccgccaggcgccaaccggcctccgttcaccagcgccagcacggcccggcgggccccagtccatcgccctccgttcgtgtgagtccgcatctccgccaggatggcacgtggctgtgtgcatcgtcgcctcgtcggctggcaaagtggcgattcgatag

SEQ ID NO: 15399 - DNA, 3147 bp, Oryza sativa
  Clone ID: PAT_MRT4530_21246C.1
atgagggaggtagaagaagttagcaaatggagacgccgttgctgctacttctggatcctattcccgttggctgtgattgcaacatgcatgacaatcacagtagtcaccttctgctcctctacgatgtacatgacagaggtgatgggtgaggccaccaagggcgccatggattcggctttgatgcacatcgccggcaacatgcgacctcttcttgaagcaaatcgctcagttttcaccattgccaacaccttgcatgttcagggcaacatggcttccttttctcatgtgggacccaagctgttcttggccttctccatgcagccgctgcaagctcaaatctcctacgccgccgtcgatggcgccgccttcgcctactaccgcgccggcggcggcgacggcgaggcgagagcgatgttcgcgaggccgaacggcacgtggttcacccaggcggttgatccggcgaccggccggcccgtcgggaacgccacggcggcggcgccgcaccagcagctgccgcccaacgtgacgcggctcctgctcgacggcggcggcggcggcgcgtctctcgccgacgggtgggcgcgccccggcgtgcggatgctgttcctctcggccccggttggcggcggcggcggcgcggtctccgccgccgtggccgtcgacgacgtcgtcctccgtggcgccgccggccttaggcagctccgtgacctgggcatgtactacgcggtcgccggcaacggcggcgccaccgccgcaccaccagcaccggagccggcggcatatagatctttgctcggcgacggcgccgcggcggaggagatggcgttgttctcgagcgtgaagtgcaccgcgtccgccattgacgcgccgcccaagctcgacgtgcacggtgtcaagtctgacaagtacagattcgcgtgcaccaactttgacatatccggagtacaaatgggtttcagggtggtgctccggaagagcgcgatggtgggcgtgttccggcggggcggcgtgacgatggtggcggtggcgtgcgcggcggcggcggcggcgacggtggcgtgcgtgctgatggcgcgggcgctgcggcgggcggtggcgagggaggcggcgctgggcgccgacctcgcgaggcacagggacgcgctccggcaggcggagcgcaagagcatgaacaagagcaacgccttcgccagcgccagccacgacatccgctccgcgctcgccgccgtcgccgggctcgtcgaggtgtcgcgccccgaggccaaccccaacatcgtcgacaacctcaaccagatggagctctgcaccaacaagctgcttgatatactgaactcaatactagacacaactaaggtggaatcagggaaggtgcagctggaggaagtggagttcaacatggcagacgttttggaagaatccgtggacatggcgaatgttgtcggcatcaccaaagggatcgaagtgatctgggatccctgcgatttctctgtcatgaaatgcgacaacatcatcggtgatagtaagagattcaagcagatccttgacaaccttcttggcaatgccatgaaattcacacaagaaggtcatgtaattctccgggcttgggccaataggccgattgcgaggggttcaatcggtgctccttcgagatttgcttatcgaagcctcgagaacaatttcttcagcttcttctttggagcaaaggaagacagagtctcgcagaattctttcaatcctttgcagaatgatcccaactcggttgagttttactttgaggtagttgatactggcattgggatccccaaggagaagagagagtctgtgtttgagaactatgttcaggtgaaagaagggcatggaggcactggtcttggacttggaatcgtgcaatcctttgttcgtctgatgggaggagagataagtatcaaagaaaaggaaccaggggagagaggaacatgctttgggttcaatgttcttctgaagactagtggaaaccaagcagctgaagaagatatagaggaagggccatcaacagtgagtgaattagacatccgagcctcagtgttcagggagactaactgcttcaagggttggcattgcatcctctttgttcatggtgatgagaccagaagagtcttgcaagcttggatggagagcattgggatgaaagtttggatggtcccaggagttgagtccatctcttctacattggagaaggcgcgatcctcccgcgatgattgtgatgtcgatcgatgcttcagctccaaggagatggtcagccaggttcttccaactacattgaggaacaataatatcatggcacgcaatcttggagagcatcatccacttggcatgcttctcattgttgatgtgtcaaatgggcagcttgagaatattcagagacaggcaagagattttacccaaatgaggagtcaagttccatgcaaatttgtctgcttgactgatctgaggacctcttataaagattttagaaggtttgaggagatgagctgcgatctcatcttgcgaaaaccggtgcacgggtctcggttgtactctcttcttatgactctaagagatgtccagtcctcgcctatgcacagatcatctcttgttggccatgagaattatgtcactaggcatcaagattctgcaaatattgttgcattagctgaagttggacgcttggatcaggggctaaaaactgaagaagataggccattggatggcatgcatgtgttgctggttgaagacactttggtgctacaaactattcagagaaagatgttgaaccaactaggagcaatagttgaattggcaggggatggagctaaggctgtggatatgttcagagatgctattgagagagcaagtgtttcagaagagcatagtgtacccttgccctatgatgtcatcttcatggattgccagatgccgcgaatggatggctatgaagcaactaggcgcatccgcgaggaagaaagccgctacggaattcgcactccgatcattgcattgactgctcattctatggaggatgatcttcagaaggctattgatgttgggatggatctacacatgacaaagccgatagagaggagaagaatagtagaagctgttcatggtgtctgcaaaggcaaaaactga

SEQ ID NO: 15400 - DNA, 508 bp, Oryza sativa
  Clone ID: PAT_MRT4530_21247C.1
caggaccgtgatcatagacttgctgaacaaggcgttatcagcgccggggtcgatgatggactcgttcctggagagcttgatggtgtgggagatcatctggtatttggtggagcacatcgtggtggaggccatggaccacgtcgcgctgcggcgcgtgccgcgccatccacctgcactggtacctgctgctccaggaggtctgctacctggagctctccggcgccaagagctacatgacctaggactacctgaacctcgtgtggagcgagctcatgctgctgcagtgcgtcctggagctcgtgtacaacctcctcttcacggtcgttgacctgctgttgttcaagaacccgatggtgcacatcacgacgagcgcggacatgaccacgtcgagcgacttctacttcagcgacccgaacgacctgtagtactaccacgaacaccgagctgatgtacttcaaggacacgccgtgcatcgagcgcaccatgacgtactggaacgcggcgcggt

SEQ ID NO: 15401 - DNA, 399 bp, Oryza sativa
  Clone ID: PAT_MRT4530_21248C.1
atgggggaggacggctggagcggcggctcgttggggacagcctcacggatgagcaagggcaggaaggacaacgacggcggtggcgacagcgtgtcggccggccaattccctcctcgccgcctccatccccacctccctcccgctgccgccgtcttcgtcttctgctccttcctcaccctagatgggagtttaatcagagtggcgtcctcctcctctgcctcgccaccgctgctcacctccaactccccttcgctctgcccctatggtcccgccactaacgcccctccccgcttgcatccgccgatctcgtcggccgggaggcctttgatggggcacaccgcgtcgcggacgtcgtgctcgctgccgacccttggggcgaggagacaagggaggccatag

SEQ ID NO: 15402 - DNA, 294 bp, Oryza sativa
  Clone ID: PAT_MRT4530_21249C.1
atgtcgtcagcagacagccatgttcccacgtcgcgcctgctttcggcggaaagtgaaatccaccaaaacacaggagtagggtattacgcttctcagcggcccgaacctgtatacatcgcccgtgtcctgtgctttttccactctcgcgaaccttccacacacagaccaggagcttagaacctcaccagggcccccggccgaaccggcaaaggggggcctgcgcggtctcccggtgaggagccccacgctccgtcaccactatactccatatcttaggagaagtcgtaattacta

SEQ ID NO: 15403 - DNA, 393 bp, Oryza sativa
  Clone ID: PAT_MRT4530_2124C.1
tctgaataatacacatcaaaccaccaaactaaccggtggttccagtaacagtggaagggcaggggaaaaacactttctccagattgaaatatcatcatacgctggggaaaacatgccatcttacactttaaaagtatgaatacgatgtgtatttaaccacgaatgcctctagttaactggatttaggggatgattaacagactttataatggcaaacagataacaatatgtaggataagaaaatattgctccattactattctaaataaccccccattataaaatttatctctttcaaaaaaatgtatctcaaaggatgatcagacaccggagactagaaatatcacttcatgatactaggcgaagaatggggttatgtaattctctgtgaag

SEQ ID NO: 15404 - DNA, 596 bp, Oryza sativa
  Clone ID: PAT_MRT4530_21250C.1
cgggctgcaggaattcggcacgaggggaaaaaaaaactctcatgcttggtggagatacaataaattaactggagcagggctgctggagaactagataacagcttgtacatatctgtatttcaagacatctcttacctgattattgtgagaagtcaataggataaatgcatatttttggtatacgcacgatgcattgttttatctgaatagattggaaccggtgaactgttatgagaatctctttgttcagaaataaatctggacagtaaacatttccccatggctcaagaaggtggtgggctttagtcaggcggctcagcggctgggtggcgcctaatgtctaattgacgcctaggcagtgcctaggtcatcaactagtcaaatccaagaaattagcaagcatattacataaaagtatactatgtaacactaaaatagcaaccaaacaccacccaaagtagttcagccgcctaatgcaccatctaatgcctaatcatgctacccggtgcctagtgcataatggtcacctatcacctacttttaagaacactgattttgccaccaaaacataacctttttattatcatttttacttt

SEQ ID NO: 15405 - DNA, 786 bp, Oryza sativa
  Clone ID: PAT_MRT4530_21251C.1
atggctgagcgggttctgcggaacgtggctcaacggccggcatggaggctagctccaggagcatttggcttcgcggcgttcgtcgccggaaaaattctcgtgtgcttcgtctccctcatcggtgttgcgttcgtgagtgtgagtgagttcttgggcaaagccaacatttggtatcagagccggatgatgaagattggtgacagtccaaagggcgagggcggagatggctggacctccggtgccgccgtggagctcgtcgtgcccaattccagcatcgtggagctgccgatgctaaccagggctaactatcatcagtgggccttggttatgcgggtgagcttggaggcgctagagttgtgggacacggtggaggcggtcaccaagaaccgcgccaaggatcggcgagcattggctgccatcttgtgtgcagtgccattggagatgaaggccgggctcgccgtgaagacgtcagcgaaggaggcgtgggacttggtgaagaagatgcgtgccggcgacgaccgcgtgaagtcggcgagcgtgcaacgcctcatgaaggagtttgagaacatgacgttccgcgacggggagaccgtcggcgacttcgcgatgcgcatcaacgggcttatcgcgagcctgcgcgacctcggggaggagatggaagagagccacgtggtgaagaaggtcctacgcgtggtcccgaagagattaaagcaagtcgcggtggcaattgagatgctcgtggacatggatgatatgtccgtcaaggagatcgttgggccgctataa

SEQ ID NO: 15406 - DNA, 3660 bp, Oryza sativa
  Clone ID: PAT_MRT4530_21252C.1
atggcgtcagtggaggtgcggtcggtgaggaagtcggcggcgctgaggccgcgggggccggggaagctgcagccggcgaggtcgatgccgctggactacaggtactcggcggcgggtggtaggaaggcggcgaacggcgtcggggcacgggcggcggtggcgccggaggaggaggaggaggagggggtggaggtgggggtggtggggtttgagggggacgcggactcgccgtacagctcacaggcggcgacgacggaggaggtggaggaggagggggatggggagaggggtggaggtgacgcggaggtggattcggcggctgctgctactggtgctcgggccacggcggcgggcggcacgacaccacggaggcagtctccggcgggagctgggagcccctcgcagcgcgacgcgcggtggggtgacacgagctcctacggtgctagaaagaagcacagggttttttgccagcttccaaatagtgattgggccttatgcactgtaattacaacctccggtgacgattccgtactaaagcttcctgaaggaaaagtactgaggttgaaaacagagagccttgaagctgcaaatcctgaaattcttgacggggtggatgatcttatgcagctaagttatctaagtgagccatccgttctgtacaatttgcagtacagatactctcaagacttgatatatactaaagcaggtccagttttggtggcggtcaatccttttaagaaagttcctctatatggtaatgagtacattgatgcatatagaaataaaacaaaggatagcccacacgtttatgcaatagcagattcagccctccgtgaaatgaaaagagatgaagttaaccagtctatcatcataagtggtgagagtggagcaggaaagacagaaactgcaaagattgctatgcagtatttggcttctcttggaggtgggggtggcatagaatatgagatcctacaaaccaacccaatactcgaggcttttggcaacgcaaagacactaagaaatgacaactcaagtcgctttggaaagctcattgaaattcattttagtacaactggaaggatttgtggtgccatgattcaaacatataagttgaatatgaagaaagcggatgaatacaaatatttgaagcagagttgctgctattcaattgccggtgtggatgatgctcaaatgttccgtactgtaacggaagctatgaacatcgttcatatcagcaaagaggaccaagataatgttttcacgatggtttctgcaattctatggctaggagatgtctctttcacggtcattgacaacgaaaaccatgttgagattgttgtagatgaagcggcagaaacggtcgcaagacttcttggctgcagtattgaagatctcaatttagctttgtcgaagaggcacatgaaagttaataatgaaaatattgtacagaaactcaccctttcacaggcaatcgacacaagagatgcgttggccaagtcactctatgccagtttgtttgagtggcttgttgaacaaattaacaagtctctttcagttggcaagcgtcgaactgggagatcaatcagcattcttgatatctatggctttgaatcattcgataggaacagttttgaacagttctgtattaactatgctaatgaaaggctccaacaacatttcaatcgccatttgtttaagcttgaacaagaggaatacgttgaagatggcattgactgggcaaaggttgagtttgaggacaatcagaactgtttgaatctctttgagaaaaagccactggggttgttgtctctgctagatgaagaatctaccttccccaatgccacagatcttacttttgcgaacaagcttaagcaacatctgaacaataattcttgcttccgaggagaaagaggcaaggcttttgcagtccgtcactatgcaggagaggtggcttatgacacgtcaggttttctagagaagaatagagatttattgcacatggactcaattcagttccttgccaaatgcaaatcctcactaccacaaatgtttgcatccaaaatgctttctcaatctgataatccgttacctgttccatatagaaatagtgctgctgactcacagaagttaagtgttgcgatgaagtttaagggacaattgttccaacttatgcaaagactcgaaagtacaacaccacactttatacgttgtattaagccaaacaatttgcaactccctgcaatttatgaacaaggacttgtgcttcaacaactcaaatgttgtggggttcttgaggttgtccgaatttcaagatctggatatccaacaagaatgactcatcagaaatttgctcgacggtatggctgtcttcttcttgaggatgtcgcttctcaagacccacttagtgtttcggttgcaattcttcaccagtttaacattttgcctgagatgtatcaagttgggtacacaaaattgttctttcgaactggccagattggcaaacttgaagacacttcgaaccgaatacaacctggcattcgtggttgtcttgttcgaagatgtgctggcaatgttgatctattgaatgtgctaagagaattcgaatcaaagaaggaggcagagggtgaccaaattttgattaaggcatcattcctggctgagctacaaaggcgaatattaaaggccgaggcgacagtccgagaaaaggatgaagagaacgagatgcttcagcagcgacttcagcaatatgaaaaccgatggtcagaatacgagcagaaaatgaaagcgatggaggaaatgtggcagaagcaaatgcggtcattacaatcaagcctatccgtagcaaagaagagccttgctcttgatgagacgcctaggatgtccgactcatcggtcgaccagagctgggagagcaatggggttcacattggcagcgcgtcgcagctggttccacgcaccgttggacgggagatgaatgccagcatcagcgtcatcagccgcttggccgaagagttcgagcagcgcagccaggtcttcgctgatgatgccaagttcttggttgaggtcaagtccggacaggccgatgccagcctgaaccctgacatggagctccgcaggctgaagcagaacttcgactcatggaagaaggacttcggctcgcgcataagggagacgaaggtgatcctcaacaagctggggagcggcaacgaatcgtcgcccaactcggtgaagcgaaaatggtgggggaggctgaacacatccaagttttcatgagctaccatgtaatggtgtagaagatgcggcgctggtattttacaaagccggcgaggttggttgctagtgctagagtttcttctcaactgagtattggtgaaagcccagcgttttgggctggatttgtgatttgtggagggcgagtttgtatagttcttccactgaggccttctttgcaggggccaaaagaaccactgagttgtgatgtaattacttgttaagatagctgctaaacgggaggagattggagattgttcagtgccgtttccttctcttgtccgatctcagcttgtaggtctgtagttttgtagtttgtatcaggtattatcatcactgaataatgggaaaatgtatctgcctgtgcctacgcaaaaaaaaaaaaaaaaa

SEQ ID NO: 15407 - DNA, 189 bp, Oryza sativa
  Clone ID: PAT_MRT4530_21253C.1
gcgagaggtgagagccatggcgagcgggcgaggaggagggggtggggtggcgtcgccgacgccggcgaaggtggagggcggcggaggaggaggaggaggggggccgggatgccatggcggactgagcaggtgttccggcgtacgacgcgaacgcgacgggaagatctcgcgaggagctggcgtcgtgct

SEQ ID NO: 15408 - DNA, 369 bp, Oryza sativa
  Clone ID: PAT_MRT4530_21254C.1
atggatgtatgccaggcttgccagctgatgaacctgtatatggagctttgggacgacgacatgtacattcccatccgtaggctccggcgggtcatccaacacctcggccttgggagcgccgcattcgccgccgcggtgctcgacggcgatggcggccgcggcggcggcggtagtagcaggatcctcgcgttggtggtgctgctgcacggcgtcgcaatggtgaccctcagcgtcgtctgcgtgcgtgcgcggcgcccccgccgctgccgcatcgcgcgcgctgtggcccgggcgtggctggcgccgttcctgctgcttgccatggccggactcctcagggagacggcggcgaagaaagttgaaagttga

SEQ ID NO: 15409 - DNA, 189 bp, Oryza sativa
  Clone ID: PAT_MRT4530_21255C.1
atggagagggcgcccatagccgccatctctgctgccgccagcgcgcgtctcgcctacgccacagtattgatagttgagggtgaaaaatatcttattttcgggtctagcgcggatgtggcggcgatagagatgtggtgggggcggcggagcaagatgcggaagagggtgccgatgcgggtgtgcgactaa

SEQ ID NO: 15410 - DNA, 409 bp, Oryza sativa
  Clone ID: PAT_MRT4530_21256C.1
ggattacaatatcgttggctatcaaatccctagaaatctagaacataatggataaggtataccctctatccttgatatacgttgtatactgatacggtatacccgcgcatatacggatatttcctgtgtacgttaaggaaatttatcacgtgatagatacagagttcatagatggaaggagtcctacttgaatagaattgggtcgttactatatctgtgaggtccgatatctccgagttctacttggagatcgactgacccgtggtataaaagggacccccgggaggacctaaggcatcgaatcttaccgccaacacatccgccacagcttacaaagccggagcctacaggagccaagtcgccgggtgatctagtcgaaccaactcgactacggtctcgtcggtaccat

SEQ ID NO: 15411 - DNA, 489 bp, Oryza sativa
  Clone ID: PAT_MRT4530_21257C.1
atgactgacgaacttgttgaacgccgccgcaccgccacagctccctgtgacgcgcaggacgggcaccgacttccagacgtcgcaccagcagccgggggaacacgagaaccggagcacgcacgtctcattgcaagacggaaggagagcacgtaccggaggaccgcgttcgggaatcgggagggatccaatctgctcctcgccgctcgacgcggctgttcggctgcgcttctcgctcggaggcattccgtcgaacaggcggcgggcgccgatgcctgcgtgatcggaattcggaaagacttgagacaagggcaacaagtaccaccacgcgcggaaataggtcatacaatacaggggaagctcgcttcaactcacacatcggaatatctgacgccggcgggaacgcaagacgaccggaggagaagccgcctaagcaccaccctcgtcggcaactggaaggaagagcgatcggttggtttgcggcaggactaa

SEQ ID NO: 15412 - DNA, 141 bp, Oryza sativa
  Clone ID: PAT_MRT4530_21258C.1
atggaattatggaaggagaagaaggaggaggtgagaaactgtgttattgatgatgatccgacagcccctgcctcctctggaataggtctcaccacctccttgtttcaggaaacaaaagccatcatgggtctcagtgagtga

SEQ ID NO: 15413 - DNA, 364 bp, Oryza sativa
  Clone ID: PAT_MRT4530_21259C.1
atgcgtggcaatcatcatgaagcacatcaacctaaaccgacaacatatgctatgtcatattgtcggattcggctcaatcggctaacctcgtccgactcgaactttgccgatcttaatcatagccgattcagacttcaaccgatcctcactctgtttccgggacgatttccatctcgaattccatcttggtttcttcttcatctccgatccttggattaccaaatttggttgttaacacatgccccccaagtccctcgcgcttgccattttctgaccgttattcagcgctttaaatactaaccgttgtccccgagaaatctcacatcgtttcctccgttttcaccgtcgaagcaatgtcacgacc

SEQ ID NO: 15414 - DNA, 2178 bp, Oryza sativa
  Clone ID: PAT_MRT4530_2125C.1
attgcgacacttgtcgcctccatctcaagctcccgcctctcggccacgccctccaaccttctccgcgctttgcccagcatcccccgcctctggcctcgctcgactgcgaccggcatgacctcctcttccgcaagcaccaccgcggcaactcccgtcgctgccgccggcggcggttgtgggaccggcgagacggccgttgtagggtcgcacgtgtcatggcggtcgccaatcaccgccaatgtggcttacggcgccgacaaggggttggaggggcttgccgtcggcggagggtggctccttatctgtaacgagggtgtgaatgatgagaaaatgcgaattcaattattataagaatatgtcaaacctgtagaatggagagctggagcattttcttcaagtatccgagataaagaatattgaagtgattaatatccagttcactaaaatattcttgttttttcatgcaaaaaggatcatcttttgtgcaagtaaagtagtaaaactggcaatcctgatcctctagcacccgattatggtgggcctgatgacagtaatgcggttggagactttgatcctaacttcatccgatatgttaccatgaaagacgaccgtcagaagagtagcttgaatcccaccacaacaatcgcagctataagcttgagtaatggggttgttcaggaaccaaaggtgctgattagtggcaatgacttctatgcttttcctcgtattgaccataataacaagcgtatggcatggatagagtggagtcatccaaatatgccctgggataagtcagaactttgggttggctacttctctgaaagcggagacttgaccaaacgggttgagcacaccaacgaggttatttcagtttacacgctagatgctgagttcacaaggccattgtgggtttttggtatcagctcttatggttttcttggtgaaagcaatcacattgttttcagctacaggcagcatggaaggtcatatcttggtgttctggactctgatataggttctgtttcattgcttgacacccccttcactgatttatccaatgtggttactggaaatgattacttctatattgaaggtgcatctgcaactgttccaatgtcaatcgcaaaggtagctttaaatgaggacagaacaaaagtagttagtttctcaataatttggtcatcctcatcagatgttgtacaatatagttctttcttcagtgcaccagaatttgttgagttttcaacatccagcaccggccagaaagcttatgcatatttctacccaccttcaaacccaaattttcaaggtttgccagacgaaaaacctccattgcttgtcaaaacacatggaggaccaacagcagaaacacgtggaattctggacctgagtgttcagtattggacaagtcgaggatgggcatatcttgatgttaactatgggggaagcactggttttgggagggagtatcgagagaggctattggggaaatggggtatcgtcgatgttgatgattgttgcagctgtgcaagagtcctggtggagagtgggaaagtagatgagcgacgcctttgtattactgggcgatcagcaggtgggtacactacgttagcttcactcgcattcagggacacattcaaggctggagcttctttgtatggtattggtgacttatctttgttgagagcagagacacacaaattcgagtctcactatactgacaatcttgtaggaaatgaaaatgcttactatgagagatcaccgatcaactttgttgacaaatttacatgtccagttattttgtttcaaggcttggatgataaggtagtcccaccagatcaggcacgcaaaatatacaaggccttaaaagagaaaggtttgcctgttgccttggtggaatacgaaggagagcagcatggtttccgcaaggctgagaacatcaagtttactttggagcagcagatggtgttctttgctcgattagtcgggaattttaaggtggcagatgatataactccaatcaagatcgaaaactttgactgatcgctcgaagaaagtgtagcagtagcttacatttcgtggaacatgacctcttacagtttgcatctgtttgaattgtccatgtactccgactaaatgttcattaaaatcaatcaatgctcgagtctggggccttat

SEQ ID NO: 15415 - DNA, 1596 bp, Oryza sativa
  Clone ID: PAT_MRT4530_21260C.1
atggccggcgagatgcctgacgccgacggcaagccccgctcggcctcctccgggttccagccgtcggcgccgccgcagccgcaggcgcagcagtaccagtacggcacgttcggggccccgtcctccgcccccggtgaggtcccgcagccggcggtcgggttcccccagccggccccgccgccggggctccggcactacccgcagccgcccccgccgtcctacgcggtctaccctccgcttcccccgcagacgtacccggccgccgcgccgtactacgccctgggctaccaggccgtgcaaggttacattcccgttgttgaaggaaggcctgtgagaatgcgacgccttccattttgcggccttggcatgggctggttcctgtttatcattggcttcttcctcgctgccattccatggtatattggagcttttgttttgatatgcgtccgagtacatgattacagggagaaaccaggatatgttgcttgcactattgcggcttcgcttgctgccattgctatcctgcttggtgtcacaagaggagaagagatttggagctcatcgagacgtagctccgcccacgggtcgtctcccggcgacaagccgccgccgtcgtcgtcgtcgtgcgggttcatcatccacgaggcggacgtgtactccgccgaccccgccgacctcacgagggggttcgcgccggcggtggcgaggagcagcggcgacgaggcgtggtacttcttcagcgccgtgagggggctcaagggcggccgcaaggcgcgcacggtggacgacggcgccgggtgctggcactcggaggccggcgcgaagcccgtgctcgccgcctcctccggccgccgcctggggcaccggcagagcttctccttcatcaccaaggacgacgacggccagcgcgtccgctccgggtggctgatggtggagctcagcctcgacgtcgacgaagaggagcagctggtcctgagcaaggtctacttcagcccgcgcgcgcccggcgccaggaaacccacgacggcggcggcgatgtcccgccacaagaggaagctgtccaccaccgacatcgcctcaccgccgcggcgccagagacgccaccgtgtagtaccatcatctccaccggaggagccgaacacgtccccgtcgccggcggctgcgcctccggaccagcaggaaggcggcgacgacgaccccgaccgcgggagcatttcgtggtggctgcggagggtgttcggcctgaccgccacctttaccgaggaggagtccatcgagctcaacccatggctgaaggacatcctgaggccgttcccgcctcccttgccgccgacgccgccgcctccatgcccgagccctcgccggaagctgatcgacatgccggagatcagggagttcatcatgcgcgggtcgtacctcggcggtggccctgcacctccgcgctacgagtgcgatcatccggccatggtgatgaccggcggcgatgatcagcagcagctcgatgagcagcgcagagacgatgttggcgatgatcgagctcattacgatcgggtggacggccagctgcagttcgaacggcactacctgcagttgtaa

SEQ ID NO: 15416 - DNA, 669 bp, Oryza sativa
  Clone ID: PAT_MRT4530_21261C.1
atgtcgtcgcagccgccgacggccaccgcgggcttcatcgccggcggccgcatccggcgcccgctgccgagggagcggccgcacctgacgcgctgcaccaagcttctctgctcgtggttcctctccctcctcctcgtcgccggcgtgctcctcttcgtcgtctacctcgtcgtccgcccccaccggccgcggttccacgtcgccgcgttcaccgccgccggcgtccagtccggcggcggcccggtggcgctctccggccagctgacgatccacaacccgaaccacgacctcgccttcttcttcggccgggtgtacatgtcggtgcagtaccgcggcgacggcgaggtggtcgtcgacgggaaggacctcaccggcgggccgctgtacgagccgccgaggggcacgtcggcggtcgggttcgagggcgtcgccgtgccggccggcgccgccacggacatgatggcgagggacgctgccgccgccgcggcgggcggcggcggcggcggcgtggcgttcacggtgaaggtccggtcgaggatacgggtgcgcgtggcgttctgggggtcgcactggcacccggtgcacgccacctgcgacgtcgtggtcgggcccgacggccagctgctgccggagttccagcagaagcgatgcggcatcgacttcttctag

SEQ ID NO: 15417 - DNA, 456 bp, Oryza sativa
  Clone ID: PAT_MRT4530_21262C.1
gccgcggaacctccggcggcaaccgccgggcggtcgcgcggcccgacgcgcggctggggaggccagacaacgcgatacacctactgctatgagggcctcacgggaaccatcgatcggcgtccggcgcgccagcgggacatagatctatctgccaccaaataaccgctggtcaatatatataccctatttctaactcgctgagcgctcccatggtccgttctctttaattgcttatcgcgctgttacctatggcttatagcgtgttgggtccaatgtccttgcactggtgatccttgtttgctacttcattctacccgggtgtgcacactacctctgcacatacaagtcaattagttatgacttaccaaaatatcatgcgtggtaataacacctttctttatacgcatactacttctgtgttaccactcatgttctactgccttggacactatgtcc

SEQ ID NO: 15418 - DNA, 357 bp, Oryza sativa
  Clone ID: PAT_MRT4530_21263C.1
atggatgaaaaactgcacttcaagaagctcaagaatggcgaatggggcggtataacttgtttgctggcccgtgatagctcgccgggcctccatgtgcggcgatggaagctcgtcggagtccaggacgatgactcaacgagggtgatatggaggaggggacgggggatgggggcagcgggggttggggaagaggggattcctagagcatacctgatggaagtcctcggccggaggctcggtgagactggatggagcaccgcttccgccaaaggaacatgcaacagggatgcggccggctggcggcggccggcggccggcgaacagcggcggcggcgggtggcgattcggtcccgatga

SEQ ID NO: 15419 - DNA, 3115 bp, Oryza sativa
  Clone ID: PAT_MRT4530_21264C.1
atggcgcagccgtacatgaagaaggatgacgacgacgaggacgttgagtactcgccattttatgggattgagaagggagccgttctgcaggaggcaagggctttccatgatccgcagcttgatgccaggaagtgctcgcaagtcatcactaagctattgtatttactcaaccaaggggagacattcacaaaggttgaggccacagaagttttctttgcagtaacaaagctgttccagtccaaggatgctggtcttaggcggctggtgtatttaatgatcaaagagctttcaccatcatcagatgaggttatcatagtcacaagctcattaatgaaagatatgaacagcaagacggatatgtaccgtgccaatgctatcagagttctgtgtagaataattgatggcaccctccttactcaaattgagagatatttgaaacaagctatagttgataagaatcctgtggttgctagtgctgctcttgttagtggcatccatctgcttcaggcaaatccagaaatcgtgaaaagatggagcaacgaagtgcaggaagctgttcaatcaagatttgcacttgtgcaatttcatggcctagctcttcttcaccagatcagacagaatgatcgtttagctattagcaagatggtttctggcttgactagggggtctgtccgctcacctcttgcacaatgtcttctgattcgttacacgagccaggttgctatgacacgccctttggcagtgacaaactgcaatgtggacttggaaagtctgatgtcggaccagaataggagtatagcaaccctggcaatcactacacttcttaaaacaggcaatgaatctagcgtagaccgcctcatgaaacaaattaccaatttcatgtcagacatagcagatgaattcaagatagttgttgttgaagctatacgatctctatgccttaagtttcccctgaagtatcgttcaatgatgaacttcttgagtaacagtttgagagaagaagggggctttgagtacaaaaaggccatcgttgattccatagtaactcttatcagtgagataccagatgctaaagaaattggtcttttgtatctctgtgagttcattgaagactgtgagttcacctatctttccagtcagctgcctatgaattatcaggtagtattacttgatatagtgaaaaatgctgatgcaatgatattgcatcttttgggaaatgaaggaccaaggacatcagatccaagcagatatatacgctacatctacaaccgtgtgatactggaaaatgccactgtccgtgctagtgctgtcagtacattggcaaagtttggtgccttagttgatgccttgaagcctaggatctttgttcttttgcgtcgttgcctgtttgacaccgatgatgaggttcgtgaccgtgctacactttatctccaaactcttgatggtgaagttgctgttggtagcactgagaaggatgttaaggagttcctatttggatcatttgatgtgccacttgccaacttggaagcaagtcttaaaacctatgaaccctctgaggagccttttgatatttctttggtgtcgagagaagtcaaatcacaaccacttcaagagaaaaaggccccaggaaagaagccacctgctggtgctcctgctcctgcacctgttccagctgttgatgcttatcagaagattctctcgtccattcctgagttctccgggtttggaaggctcttcaagtcctcagaacctgtggagctgacagaggcggagactgaatatgcgattaatgtggttaagcacatatacagtagccatgttgtgttgcagtacaactgtacaaacactatacccgaacaactgctagaaaatgtgactgtttatgttgatgccactgatgctgaggaattttcagaagtttgttcaaagccacttagaagtttgccttatgattcacctgggcaaatttttgttgcttttgaaaagccagaacatgttcctgctactgggaaattttcaaatgtgctgaagtttattgttaaagaggttgacacatctacaggggaagttgatgaggatggtgtggaggatgaataccagatcgaagacctggaaattgtttcggctgattacatgctgagggttgcagtctccaacttcaggaatgcctgggaaaatatggacccagaaagtgagcgtgtcgatgagtatggacttggtgttagagagagcttggctgaggctgtgagtgctgtcattagtatccttggtatgcagccttgtgagggcactgaggttgtaccaaagaatgcaagatcgcacacttgcctgctgtctggtgtgttcatcggcgacgccaaggttcttgtcaggctatcgtttggactgagcgggcccaaggaagtggcgatgaagcttgccgtcaggtcagatgatcccgaagtcagtgacaagatccacgagattgttgccagcggctaaagcggggcgccctgcccctgatataaaatgatgtagagccggtagatagtctttttcacctttcgtgataaaatagttatactacacctattgatgcctcactttttacagacaacactcctgcctcgtgcgtattattgctcaggtagtgtattagtgtatcagatcatgtccccttgtgtagttgtgttcaccgctcggtttgattttttgtttcttttctttggacagtttgtttacttaatgtggatataattcattggtgaaccgtgaaaaaaaaaaaaaaaaaaaaacctgtgagttgtcacactaacagtaacaagttagttctcgtatgctcacggaaaaccagtaaataaagtgttgattagtttgagctaaaaaaaaaaagcaaaccccggttcctgctgcccccgggatccacctttgcgcaactgcgtaaaaaagagccacacgacccttataatattgcaactctagcaaaggaccccctttacgcactccgcgcgggtggggataccgacggatataataaaggcctgacgctaattgaattgcttaattctgactaagtgagacagaggcaagagctctctcatacatttttcatgcatctacaaatttagatcggcca

SEQ ID NO: 15420 - DNA, 478 bp, Oryza sativa
  unsure (1)..(478): unsure at all n locations
  Clone ID: PAT_MRT4530_21265C.1
tcatctctttgtttctcctcctctgcgtcctcgttctctcgccttcttcgctctggcgtctccccaccaatatcgctcctctacactcctcctcctttgtgtgctctcccaatccactttctgtggtagcctggtggctctatnccnatctttcctaaatcgcccttgcttgttcctcccctctcatactctagcttctccgtcaacatttctgccggccgttcttctccctcgtcatctgctggtgcttctgcgattcgctcctccacatgctattattcttctacagctagaactggctcctcccactctgctcatctctcagccgttttcttccgtgtctcccggttttttgtcatctagctcgcaccggggacccttttttttttttttttctnggacgtccccgatggccctacgcgttgtctgtttcttgcttccctgaccttgcctctagcccttatgttttttccctcct

SEQ ID NO: 15421 - DNA, 6425 bp, Oryza sativa
  Clone ID: PAT_MRT4530_21266C.1
caccgggccgcacccgcctcggccccgagggccgaggcgccccgacccctcgtgggttttcgctccgcgtgtatgggttagtcacagaccggtcagatcgcgggttaggtggcgacaggcgaatgaccgacgtgactggtctgactccggtcatgtcgtcagcaggcggccacgattccacgtcgcatctgctcccggcgaaagtggaggtagttgtgggccgtcccatcagaagattaggaacccagaacaagggagaggctggctcatactttgtagctccttcacacacgaatccaccaaaacacaggaggtccccggccgaaccggcaaaggggggccagcgcggtctcccgatgaggagccccacgctccgtcatctggcgcgccagcttttcctgttcagcccaatggccgagccagcaaaggcgcgcgacctctccccgagtatgagcggtgacgacggggagcaaaacccacgccaccgagctcgtactccaccgccccctccacgccaaagtcctaggcaggagaaggcgctcgagagggctgaaggatccgcgacttcgacatccacaggaggtggagaagggcggcgagatggggagcgtcacctccttgtctacggcgacggcagcacgccccagggcgcgctccaagctgcaggcgcgctcctacgtcacccgcccgtcgcccatgacccggagtctccagcccaacgttggctggacgatgtggccaaattggtcatgactgcacggcagcgcctagatgctggtgggcggtcctccgccaccaaggcctctggtgctgccaccaccggctccgcgtcgtcgagacggagggcgcggcgagcggcagccgctgttcgccattcggccgccactccttcgtcaacgcctccgacccgggatgatctgcgtggggaaccggatgcccgcgtcagtatcgagcgccggcgtaatggccgacgtgctccccacgcaacggagggcacctcctcgtccggagtgtcacctcaccacggacgcggggatcagccctccgtgcccccggttggtggtgtcggctgtagagcctttgtggcgagccttcggaatgtccgttggcccccaaggttccggcccaccatcgccgaaaaatatgacgggagcgtcaaccccgccgagtttctccaggtctacacgaccgggatcgaggccgccgggggtgacgacagggtcatggcgaatttctttcccatggccctgaaaggacaggtgcggggttggctaatgaacttgccacccgcatctgtccactcttgggaggatttgtgccaacagttcaccatgaactttcaaggcacatatccgcgcccaggtgaggaagcggacttgcacgcagtacagcgaagggatgatgagtcacttcgctcgtacattcagcggttctgtcaagtccgcaacaccataccatgcatccctgcacacgcggtgatctacgcgttcagggggggtgtgcggcacaaccgcatgctcgaaaagatcgcctccaaagagccccagactaccgcggagctttttcagctcgcggaccgagtggctcgtaaggaggaggcatggacctggaacccctccggttccggtgtggtagcttcgaccgcccccggatccgctgctcagacagggcggcgtgacaggaggaggaagaagaggtcagcccataccgacgacgagggtcatgtcctcgccgtcgaggccgctttgcgggccacccgaaaggggaggcctgcgggcgacaaaaagaaggaggccggcgctcccagcagggagcgcccaaccggcaagtggtgcaccgtccacaacacttcccttcacgacctcgcggactgccgcgcagtcaaaagtttggctgagcggacgaggaagtgggaggaggagaggaggcaggagcgccgagagggcaagtccccggcagttccttccggcaatcgacgaagtgaggctaagcagaaggcccccgccgaggacatcgatgacggcgatgatgacctaggtttccaagagcctggggccaccattgccactgtcgatgggggagcgtgtgctcacgtttctcgccggagcctcaaggccatgaagcgagagcttctggccgcggcccctactcatgaggcgacgcgccgggcgcggtggtcggaggttgccctcaccttcgaccagaccgaccacccaccgtgcgttgcccgtggaggacagatcgcaatggtggtttcccccactgtttgcaacgtgaagctggggcgtgtcctcattgatggaggagcagccctcaacatcctttcccccgcagcctttgatgccatcaaggccccggggatgatgctccgaccgtcccagccgatcatcggtgtgacgccggggcacacttggccgctaggtcatatcgacctcccggtcaccttcggtggacccgccaacttccgcacggagcgggtgaactttgatgtggcggacctcagtctgccctacaacgcggtcttggggaggcccgcgttggtaaaattcatggcggcggtccactacgcctacctccagatgaagatgccgggccccgatggccccatctctctccatggcgacctcaaagtcgcgctcgcttgtatggagcagcgtgcggactgcctcgccgtcgtaaccaagcccgagggtggcgatgagaggcttggcacatccgcccccgtcgccccgaggcagcggatagtcacgtgcgatgaggtcccggaagacgcgctcgtctctttcctgcgggcaaacgctgacgtcttcgcatggagaccggcggatatgcccggggtccccagggaggtgattgagcaccgtctcgccgtacggccgggcgcaaggccggtccggcagaaagtgcggcgccaggccccggaacgtcaagccttcatccgcgaggaggtggcgcgacttctggaggccggattcatccgcgaggtcatccatccggagtggctggcgaacccggtggtcgttcccaaggcgaacggcaagcttcggatgtgcatcgactacaacgaccttaacaaggcatgtcctaaggatccttaccccctgcctcgcatagatcagattgtcgactccacagcggggtgcgaccttttgtgttttctagatgcatactctggttaccatcagattcgcatggctaaggaggatgaggaaaaaactgcgttcattacccccataggaacttattgttatacaacaatgcccttcgggttaaaaaatgcaggtcctacttttcaacgtactactcgaatttctatgggtagccaaataggacgtaatgttgaggcttatgtcgatgacttggttgtaaagacgcgcaaccaagaaaccttactctcggatctagcggaaacttttgaaagtctccgctccgcccgcataaaactgaaccccgataagtgcgtgttcggtgtacctgcgggcaagcttctcgggtttttggtctctgcccgaggcatcgaagccaaccccgagaagatacgagctatagagcggatgcgcccccccagcaagcttaaggatgtgcaatgcgtcactggttgcatggccgccctaagtcggttcatatcgaggctgggagagaaggcgctacccttatttaagctcctcaaacgctccgggccgtttacttggacggaggaagctgagcgtgccctcactcagttgaaggcgtatctcagctctcccccggttctggtcgccccggagccaaatgaacccttactactctacttagcggcgaccccgcaagtgacttggcccgggagagagcagggaggagaggcccccgagccgaacggtggcccaaggcccccgacgaccggagttggccctctgcccgcttgtcagacggtgctaggagcccccgacccccaggaaggccctgaggccactgtgggaaggccgcacctatcgccctttgaccccgaggctaaccctgtgctgactcgacccgggaaagagcagggagaagaggcccccgagccgaacggaggtctaaggcccctgacgaccggagttggccctttgcccgcttgtccgacgatgccaggagcccccgacccccaggacggccccgaagccactgtgggaaggccgcccctgttatcctccgaccccgaagtcatcagcacagaagacaagtgcgccccgcgagactgcttggacgaagattgccccagggatgcggcccctagcgaagaggatcggcccaaccgaaaggtgcagcggcccgtctactttgttagtgaggccctccgggacgccaaaacccgataccctcaggcccagaagatgctttacgctattctgatggcctcgaggaaactgcgccattatttccaggcgcatcgggtcactgtggttacgtcttaccccctcggtcaaatcttgcataatcgagagggtacaggacgggtggtgaaatgggcaatcgaactttctgagttcgatttgcactttgaaccacgccacgctatcaagagccaggccctcgccgattttgtggcagagtggaccccggctcccgagcccgtctcgatccccgaggccagcacggacccctcgcagctgcctcacaccgcccactgggtaatgcagttcgacggctccctgtctcttcagggcgccggtgcgggggtcacgttgacctctccgagcggagacgtcctcagatacttggtccgcctcgactttcgagcgaccaataatatggcagagtacgagggactccttgccggactcagagtggcagctggactggggatccgccgcctcctggtgttaggcgactcccagctggtcgttaaccaagtctgtaaggagtaccggtgctctgacccgcagatggacacctacgtgcgccaagtacggcgtatggagcgccattttgacgggattgagcttcggcatgtgcccagacgggataacatgattgccgacgaactctcacggctcgcgtcctcgcgagcccagaccccaccgggcgcctttgaagaaaggcttgcccagccgtcggcgcgacccgaccccttaggggagacggatacgcctgaccggcccccaaggcctgtcggagtccaggcctcgggacccgaggggagtgctcccagttcccttagattgattgcttggatcgccgagatccaagcatacctcacagataagactctacccgaggaccgcgaagggagtgaacgcgtccatcacatctccaaacgatacgtgctggtagaagggaccctctatcggcgcgcggctaatggaatcctcctgaagtgcattcctcgggaacaaggcgttgtgcttcttgacgatatccatgaaggcgaatgcggagcccactccgcctcgcgcaccttggttggtaaagcttttcgccagggtttctattggccgacagctctcaatgatgcggtcgacctggtccggcgatgtagagcgtgtcaattccacgccaagcaaatccatcagccggcccaggccctgcagaccataccactttcgtggccatttgctgtctggggactcgatatcctgggaccgtttaggcgggccccgggcgggtttgagtatctgtatgtcgcgatcgacaagttcactaagtggcccgaggcttatccggtcgtcaagatcgataagcactccgcacttaaattcattaagggcatcacggcccggtttggagtgcctaaccgtattattacggataatggcacccaattcactagtgaactcttcggcgactacggcgaagacatgggcatcaagctctgcttcgcctcacctgcccaccccagaagcaatggccaagtggagcgcgccaatgcggaaatcctcaaaggccttaaaaccaagaccttcaacatactcaagaagcacggcgattcatggatcgaggagttgccagcggtgctctgggcaaaccgaactacaccaagccgagcaaccggggaaacgcctttcttcctcgtctacggcgcggaagcggttctcccatccgagctcaccctgaggtctcctcgggccaccatgtactgcgaggctgatcaagatcagcttcgcagagatgacctcgactacttggaagagcgaaggcggcgcgcggccctccgagccgcgcgctaccagcagagcctgcggcgctaccatcagcgtcacgtccgggcccgatcactctgcgtcgacgacctcgtcctacgccgcgtccaaacgcgtgctggattgagcaagctttcactaatgtgggagggtccgtatcgagtggtcggcgtcccccggccgggctccatacggctggccacgggcgacggcactgagctacctaacccgtggaacatcgaacaccttcgttgcttctacccctga

SEQ ID NO: 15422 - DNA, 142 bp, Oryza sativa
  unsure (1)..(142): unsure at all n locations
  Clone ID: PAT_MRT4530_21268C.1
gccaacaatgatgacacaacttacattgnggctgctacctagatgctgtaccaagagccatctaatcttgctcgtataacaacactcctctagttctatttcctgaacaatgtattcttagcccttggccaatgctattccc

SEQ ID NO: 15423 - DNA, 408 bp, Oryza sativa
  Clone ID: PAT_MRT4530_21269C.1
gggaacccgtaatgagtccataaggaccacaggcgtcgcagaactttttaatactgcatcccccgggctccacgaaaacggtaccagaagagcgcgggaccatcgatatatcccgtcagaccgtcctctattcatttgtttctgacccaccatggccggccaccatatactacccatctcacactcatggtgtaccaaacaccacccgtgtttttcaaaactagttcccccccgccccggggcacgggcgggcgagactctcagacgcaccacccgatccaaccgccgggcgcgggtatgccccgaccgccgggcggcccccatcccctcacccccgctcgcctcacaccacgtcctcgccgccttagcgccgccgcactggactccgcatcctcgcctctctcaaaa

SEQ ID NO: 15424 - DNA, 786 bp, Oryza sativa
  Clone ID: PAT_MRT4530_2126C.1
atgggccgtcggcccatttcccttttcctctccccccctcctccttgctgggccggccgcaggccgaggcccagcccagtagccggccgcccgcctccctcctctcggggtcgccgacaggtggggcccacctgtcgggcccgtctcccacctcccgccgaccccggcgcgccgccgcgcccgcaacggctgccgcgcccacgcctccgcccctcccgggccacgtcggccacgtccgcgcgtgcgccgcgttccccgcgcccgctcccctctctctcccgctcgcgcccgcgcccgagatggccgggattcgaatttcgaatcccgcctctctctccgccccactcccccacgtcggccggcgaatcccgccgctcccggccacgtccgaccccctctccccctatttaagcatcgccggcgccccctctctctttttccccatttcgccgacccctctcgagctccccatcgtccccgcgccgtgcaaccacccaccgccgcttctttccgctctccggccgccgctagccgccgctagactcgccgccgtcttgcgccgtcgccgccgttagcttcgcgcggccgaggtccacctcgtccgcccctcctccgtcgaggttcgtcgccggaaccccctccccaccttccttagggcacgccggagctcgtccgccggtcgccgtcgcctcccgtggcttgccgccgccgctcgccatcgccttcctccgcgccggccaccctcggtgaggcatctcctctcctctccttccccgtttccccgtg

SEQ ID NO: 15425 - DNA, 318 bp, Oryza sativa
  Clone ID: PAT_MRT4530_21270C.1
atggcccatgttcctgcagagaacaaatacaagaaggtacctgcatacctgggcatgcttgatgtgggtggtagtcttgtcccaggtgctctgtacaacagagtttggaggatggagttgtcgagctgtgaagtccatgaagatagaggttccagatttggtctgtatagaaggattcatctcaacacagtgcaaattaggagagaaaaatacatcatgacagattacctgttcaagtggggaggtagtgtccgttgtgttcaggtagaaggcacgactggcttcgtcaatggcatgccatcaagaactgacacttga

SEQ ID NO: 15426 - DNA, 817 bp, Oryza sativa
  Clone ID: PAT_MRT4530_21271C.1
gatggattcgagctgaggcgaagacctgacccaaacggagtcttctcctctccccttgctcagttcattcagttggcctcctcgatccacctccagcctctcaattcaatcgccattgacaacaatccgcgaggcgaggtgcttagtttctcagccaagactcgagtcgacgccggccatggctttctgggaggattggggcaagggcgactgcgactgcggctggaagaagtgcctcatctggacggcggccatcgccggcgtgggcgggctcatcgtgctcctcgtcttcgccttcgccctcgtgttcccgcccaaggccaccgccgacgacgccgtgctgctccgcctcgcgctgtccccgggctcgccgccgtccaactccaccgtctcctacaacgccacggtgacgctgtcgctgcgtaacccgaacctgtaccgcggcatcagctacgaccccgtcgcggtggccttctccttcaacggcacgcgcttcgacgagtccgccaccgtgccggcgttctaccatcggccgaggaagacggcgacgttccacgtcacggtgggcggcgcgggcaagcccgtccccaagctcaccgcggcgggggtggcggcgttcagggcggagaacgcgacggggaggttcgaggtggaggtgaggctggacacggtgatgcagtacaaggcgaggaaggcgcggtgcccgctcgccgtcatctgcccgctgcagctgcagctcgtcgacccggacgtcgccgccaccgcgttccagaggaccaagtgcaccgtcctccgggccaagaagtccggatgctag

SEQ ID NO: 15427 - DNA, 252 bp, Oryza sativa
  Clone ID: PAT_MRT4530_21272C.1
atggcttcattttgtaatgataagttacctgacatggtcatgaatcatatcaagcaggctgctgagcgtgcgacgggttttgcagaagcacaaggctggtacacagagatgctcgagtttccggtgtttgcggacagagtgatgctcttgatgcgcaagaagccgggtgctgcttactccgtgcgagttgtgacaggcacctttcatggaccaatcgcccatcaccgaataacgtggcagcagtctcagtga

SEQ ID NO: 15428 - DNA, 327 bp, Oryza sativa
  Clone ID: PAT_MRT4530_21273C.1
atgttcgagctgcaaacctgcaagcagcaagaaaaacaaatcaaatctgacctgcaaagcagaaaaagagtcttctcatggctggagccgagcgtgggggaggaggacgacgacgaggaaggagatagcgaggaggacgaggtctcggcggcggccggtggcacggtactggggtcggaggcgaagatccgggtggcgaactcgtcggaaggaggcgtcgagggcggtggagcaggcgaggtcgtgaagatggtgatgggagccgtggggctggccctcagcgccaaccgtgtcggtggtgccaacgggtcgagtgtcgaggcgtag

SEQ ID NO: 15429 - DNA, 2113 bp, Oryza sativa
  Clone ID: PAT_MRT4530_21274C.1
atgtccgcgcgccccccgccgccgccgcgcccgaggctcgcgctgccgccgcgctcggccgccgagtcgctcttcacgggcgccggcgacgccagtccgggccccctcaccctcgcctccgcgctcttcccctccgaccccgacggcggcggcggcggcggcggcgtcatgacgtcgtcctcctcctccgccgcgggggccacgagcttcacgcagctgctcatcggcaacctctccgcgcctcctcctcctcctcctcctccgcagcagcagcagcagcgtgaggcggcgcgaggaggcggggtcgcgagggccgggccggcgctgtcggtggcgccgccgccgacggcggggtcggtgttcaccgtgccgcccgggctcagcccctccggccttctcgactcccccgggttgctcttctcgccggccatgtttgatgcttttgatgtccttgatatgttcatacctgataagatccttccaaaacgcgctactcggattaagttggacatctactttgtaaagacaagtcctgaagggggttttgggatgtcgcatcgggaggctcttgcccaagtcacagcccaagcaagccattctccactcagaatgttcgatcacactgaacaaccatcattctcagcagctccaacatcatctgaagctatgcagcatatgaatgcagcagttaatatgacaggaatttcagacatggtcatgggtccaacaaacaatgagaatgtagcctttcaacctgctgaggcgtctcagaggtatcaagtcaatgcccctgttgataagcctgccgatgatggctataattggcggaagtatggtcagaaggtggtgaaaggcagtgattgcccaagaagctattacaaatgtactcaccccaattgtccggtcaagaaaaaggtagagcatgcagaagatggtcagatatctgagatcatatacaaaggcaaacacaatcaccaacgtccaccaaacaagcgggcaaaagatggcagctcttcagcagctgatcaaaacgagcaatctaatgataccgtgtctggtctgtcaggtattaagagagatcaggaagctatatatggaatgtctgagcaactatctggtttaagtgaaggagatgatatggatgatggtgaatcaaggccacatgaagcagatgacaaagagagcgacagcaagaaaaggaatatacaaatttcttcacagaggacttcagcggaagctaagattattgtgcaaacaaccagtgaggttgatcttttggatgatggttatagatggcgcaagtatgggcagaaggtggttaaaggaaaccctcatccaaggagttactacaagtgcacctatgctggatgtaatgttaggaaacacattgagagggcttcgtcagaccctaaggctgtcataacaacttatgaaggaaaacataaccatgaaccaccggttggtaggggaaacaaccagaatgcgggaaatgcggccccttcaagcagtgcacaacagaatatgcagaatttgtctagtaatcaagcttcacttacaatggcagacttcaacaacattaaccagaggccaattggggtcttacagttcaaaagcgaagaataacaccgtcaactgactttcttgggaccccggttgctgaagtggcacactggtatttggttgatttcttcaggcaaatattggatgcctgcaattctaatagtcacactgttccaaacgttcaagaagtaatacaacaatatcattgtctgcaattttcctaccgatacacagaattactgaaacgacacctagcctttctagcttgtacatgctgttactttgaagcataaactcaatataacaccagctaggtggatgtgcagatggacgggtcgtaatcatatacatgtttactttgtaatttgtttatcaatcaagctcctgcattgtaataagattgaatagagaagtgaaatgtacagatgctttcccgtatttctgtatatgttgtaatttgtagaagagtaaatcaacaaaagaaggtatactgtggacaatatattaagattctttctcaaactttaatccaaattgcttgtgctaggtatcc

SEQ ID NO: 15430 - DNA, 960 bp, Oryza sativa
  Clone ID: PAT_MRT4530_21275C.1
atgaactgggataatctgagcgataaaccgcagaaaaattcagggcgttaccagggccaaaagcggaccagcctccagccgttgccgacgccgaagccgacgcccgcgccggggcaaaccaaaatagagaagctaccacgtggaatcactaagatcaagaagctaaggcacctgctagctgatagatctgatggtgagaaacattcagagttccggtacttcaaaggagtgcaagcacccaatgatctgtctaagttggaagaacttcagactcttgagactgtggaagccagcaaggacttggccgagcagctgaaggaactaatgcagataagaagtatttggattgacaacataagttctgctgattgtggaaatatttttgctacactatcaaatatgccgcttctttccagcttgcttctttcggcaaaggatgaaaatgagccactttgctttgaggctctccagcccatttccaatgaactccacaggttaattatcagagggcaatgtgctaagggcacactagactacccgatatttcatagccatggtacacatctgaaatatttagctctaagtaggtgtaatcttggagaggatccattggcgatgcttgcatcacatttgtcaaacctcacttatctaagactgaacaacatgcatagcgcaaaaagattggttcttgacgcggcggctttcccatgcctgaagacacttgtgcgaaagcacatgcctgatgtcaaccagctaaaaattataagtggtgcacttccagtcattgaaggtttgtacattgtggctctgtcagggctggagagtgtcccttctggcattgaaacccttcggaccctgaagaaactctggctggttgatctgcactgggacttcgaagctcactggattgagagtgagatggaccaaaaaatgcagcatcttcaagagctgattttgtag

SEQ ID NO: 15431 - DNA, 504 bp, Oryza sativa
  unsure (1)..(504): unsure at all n locations
  Clone ID: PAT_MRT4530_21276C.1
tccgcacgtccatcccccgtgtcgtcctgtgctcaggagatgggatcgacagatacacaagctgatcaagctgagattgagagattggaagaacatgcatctgctttgagaaaggaaattgaaagcaaaaacaagcatgtaaagctccttatcgaccaactccatgatttaatatcggacatatcaatgtggcagagtccttgctcagtgtgaaaactcatcggcatttatcctttaggaatccaaaaatcatagctagaagtatgttaatgcaaattgtatcagctgaccttgagagagaaatctgaagggatcaccatcngtttgcaaatacatattgtaatgatttttctttcaagtattcagaaagtgtactatgagtagtgataaacacgaagtagctagtaactgaaacaacatctggtgtatattttcccaccatttgccttgctttcatttccaacgacttctgtatactctttgacaaccaaaaaaaaaaaaaaa

SEQ ID NO: 15432 - DNA, 726 bp, Oryza sativa
  Clone ID: PAT_MRT4530_21277C.1
atggcggagagctacgcgctggagatggacgacctgcacaggcggtggctgccgaaggagatcctcgacgacattggcttcgccgacgacggcgacgcgcccccgccccccgccgccatcgagggcctcgccgtgcaccttgccggcatcctcggcagcggcgcccgcaaggccgccgccccgcctccgaccgccgccgcctcccccgcctcgtaccacaaccaactccaccgcgtgccggtttgcgggcaggtgctcgtggcgtacggcggcgcggcggggtggccattcacgccgtactcgtcgccggcgcagtggcaggtcgcggccggtctcgtgaacggcggcgcggtggaccaccggcggcgtctcgggtccccgccgccgaagatgcgcggcggcggcggaggtggcaccggcgtgttcctgccgcgcacctacgtgtaccacgccaaggaggagtcgccggcgccggcggcgaccaaggcctcgtcgagagatgggaaagcgtccaatgatctcctcgtggaggagcagcagaagcaaccaggacaaggcgaggaggaggaggaagggtcaccggcggcgaaggcgaagatcgagcagcaatgcccgccgccgatgaccggaactgcctcgtcggaggtgatgcgggtgtggccgaacgcggcggcggcggcggcgttgccggagctggcggcgctgcctcaggaatggacctactga

SEQ ID NO: 15433 - DNA, 412 bp, Oryza sativa
  Clone ID: PAT_MRT4530_21278C.1
cgaaaaccaagcaaaatctcaagggggccttggctccagttgaacaactgcaaaacattcctggtgaacacattgtggagggaaaatacaagatgcccttggcggcttttgctgccaaatgtttctgttctggcggccggaagagacattggctgggctggaagaggagttttgcattgttcaaaaagaaaaaaaaagcatcaattgatcaatacatgggcgagggcaattgcctggtttcaaatccaaccataagtctcgatgtatagcatttcagtgtgttcaccatttctgcagcactcaaaatgtgtaccggaaagaccttttaacccatcagggactaggggtgtatagaagataaattcttggtcaaaactaacgttaacggatacagaaaatgcattacccttga

SEQ ID NO: 15434 - DNA, 1085 bp, Oryza sativa
  Clone ID: PAT_MRT4530_21279C.1
ggcgaccacaggagccataccccaaccaaaccaccccaaaaccccaccaccaccggaaaccgctagtgcctccccccccccctcccccgccctccagccgcctcccccaaccccgcgctcccctcattgccttatccgaatcgcctcgccgtctccgtctcgccatggaggccgtgcgcgcgtcggcggcgtgggtggccagccgctcctcccacgtcaaggtcgacatgttagaggtcgagaaggtggtggacaaaatccaaggaaatgttccaaaagttgaatgggacttcgaaggaattcactattttgacgatggccccctcactgtccagtacctcttcgtcctggatgctctgaacttctgcttctggccagataaggatctgagctatgaccatttggcttctggactaaagttagccttagagaaagataagacagcccttgatgcagatcgtctccagagttacactgggcctcagctccgccaactgctgaactggccacgcccactgccaattgaggaggaaagagtacggcttcttcatgaggttggtatggaacttgaaagaagctttggaggtgaagctgcaaatctagtgaagtctgctggaaactctgctgctactctaatcgaacttattacccgtcattttcctggttttcgggatcattcactttacaaaggacaccaggttttcttgtataagagagctcagatatttgttgctgatctgtggggtgcttttaagggacaaaactatggcgagttccacgacatcaagtccatcaccatatttgcagactatattgttcctgctgtcttgagggagcttggcatactgaaatatggctccaacttatcttgctcaattgattcgagcagtgagattgtgcctggaagtgaagaggaagtggagattcgtgcttgttctgtatatgccgtggaaaaaatgagagagctcatcaacaagaagtttggaaagcagcttctgagcattgacatcgatctatggctctggtcatgtggcgttcagaacatggcgttgtcacatcaccgcaccctctcaatatattactga

SEQ ID NO: 15435 - DNA, 1056 bp, Oryza sativa
  Clone ID: PAT_MRT4530_2127C.1
atggggaggacgctggacgtgttgctggggcggacgacgaagcagacggcgaggctcaagtcgatgctggggctggcggtgacgcggctcggcgtgctgcgcgggcacaggcaggtgcggtgcgcgcaggcgcgcggcgacgtggagcagctgctccgcctcggccaccccgaccgcgccctgctccgcgccgagcaggtcatccgcgagcagaacacgctcgacgccttcctcatgctcgagtcctactgcaatctcatcaccgagcgcgccgccctcgtggactcgcacagggagtgtcccgaggagctgcgtgaggcggcagcgggtttgatctacgcggcggcgaggtgcggtgacgtgccggagctgcaggaggtgaagcgcctcatggcggccaagttcggcagggagttcgtctcctccgcggccgagctccgcagcggctgcgggatcaatgccaagatcgtgcagaagctgtcgaccaagcagccgagcctggagagcaggcagatggtgctccaggagatcgcggcggagaaagggatcgccggcgtcgtggaggcgccggtgcgccgcgagaggcggcacagggtccatcaaccccaggtcgacctggaggaggacggctcttcgaggtacaggaacgtggaggccccggcgcaggccgcgttcgagtcggcggccaccgcagcagccgccgcgaaggccgccatggagctctcgcgaggcgaatccgggggccgcgacgacgacaggagacggccggaaggcgcgcagttcgacagggccgacgaagagacgctcgccgccggcgaggtttcgggtgatggcaagaaatctggcaggatcagacgtgccagcctcggccggaactacagttcagagatcgaggattcagctgaggatgatgaagtggtccgccatgagatcactgcagagagcgaggtgaaaccgcggggtctgaccaggagcgtgccggtatcagtcagaacaaagaggattcatcgttcgttagatcctaggcctgtaggccattgcatgcatatatattag

SEQ ID NO: 15436 - DNA, 273 bp, Oryza sativa
  Clone ID: PAT_MRT4530_21280C.1
atggctgcggcggcatcgcgggcgacagacccggagtggcaagtgacggtgccggagctccggagggtgcgacgcagcagagggagcggccgcctgcgcacgggagcgagcggcggggggcggcagccccccgcgcgggagcgagtagcggcggccacgggcgtggcgggcggcgcagtgcgggtctggaagatcggcgccgacgacccccgaagggtggtgcacggtgtcaaggtcggcctcgcgctctccctcatcgccatgttctactag

SEQ ID NO: 15437 - DNA, 412 bp, Oryza sativa
  Clone ID: PAT_MRT4530_21281C.1
aaacagcaaagctgttctaaatgatattctgtactccttccagtttcaaaattcttgaccttttagacataatctcacataccaaggagtgatttattagggtgcctaatccttgttttgcccatattaaatacggtcttgtcctaatagaaatcagaaactcgtgctgttccaagtggtttgggcctatcattagcgtctgtgcatgccgggttcgagttctattgaggctattttttttaaaaaaaaatcatagcgttatcttggtaatttttggctcgctcgcgcttgctttagcacacaacggttgctacatcatcactgtcatcacacccgctctcaacgagcaagcggtcgccgagagcacggcgccagcaagcagcccaagaagccaacaagcgattaattagga

SEQ ID NO: 15438 - DNA, 147 bp, Oryza sativa
  Clone ID: PAT_MRT4530_21282C.1
acacttcatcaaggcaatgcagtcctcccaacaccccaggtccacaatgtgataagccaggagcaacgtgttgtagctagcaaaccccttttctgcaactccaaggctgcattgcactgcactgcacaagccaaagggggtagagag

SEQ ID NO: 15439 - DNA, 459 bp, Oryza sativa
  Clone ID: PAT_MRT4530_21283C.1
atggttagtagatctggatttggctgtgtgagccacccgagatgggggatgagagatagggcggggaagcttactgaagttattgaagagggcgacgacatcggcgtggaggagcagcatgggaaggaagggagacggaggggtgtgtgggtgagaatcttggcccgccgctggcacgattttggcgaggtaccacaaatggaggtgtggagatgtggcagaaccactggattagcattcggggggttgtcatgggagatcaaggaggagaggtcggtcggggggatttggctagagctgaagaagacgatgagatgtcgacggatttggcggggattcgggatgagagagggagccgctggtgggcctcgcaaatgcttgccgatgaggggaggtggtggggagggtgtcggcaacctgacagatcaaatgtacaggacaaggaagggatatgtctag

SEQ ID NO: 15440 - DNA, 307 bp, Oryza sativa
  Clone ID: PAT_MRT4530_21284C.1
aggaggaactcttcttatttttatattcatctcttttttcctttttcgaaaaaaaaaaaacactaagcctgggcccttgggtctttccggaacaaaaagggtcacacccggtggaggattacgggtacaaaaccttttccccttggtgaacacagggcgaaagatttttaaaaccttttttttaaataaaatggctaagcgaagggcctcccccaaaccacccaatggcttaggttggctatttttaccgcgaatcctcccaagcccgcggtatcccccctacccggccccgttggtgaaacccccg

SEQ ID NO: 15441 - DNA, 886 bp, Oryza sativa
  Clone ID: PAT_MRT4530_21285C.1
ccggccgggaaaaattcctcctcctccatctcccaccgcgagtagcaacagcggcggtggcggcggcgacctgcgatctcgcagccgaggcagggcggcggctacctgccctaccatgagcagcaacggcaatggcggcgccctcccccaccgctagcggtggctgcggtggctcccttcgctacttccgctgggtggattcggcggcagcggtgtcctacgggtcgatggagcggcctcggcgatggcgtgtcttgagccgctggcgctcacctctcctccccatctttctcagcggtggccggtgatctcgcgaccaacgcagggcggtggctccttcccccaccgcgagcaatggcggtgccctccctgtcgtgagcggccgtggcggtgccctcgcccaccgctagcggtggcggccttccccaccgcgagcagccgcgatagcacgctcctctacttccgatgggtagatccggcggcagcggtgtccagcgggtcggcggaacggcctcgatgatggtgcgtcttgagccgctagcgctcgcctctccttcctatcctcctccgccaccaccgcccatcctctcgtcggacgacgagcttgtcatcgctgtcaagacgataaatcaaggttgctttgtgatttgctcgattccgttgatttcaaacttttaatcccgttgatcctcccagctgattttattgagttcgattcagagtctgttaggttcaatttttagctaattttgtatcaaactcttgttttttttgtttggccattgtactggatgtaattgcgcttggttggattgacggacaaaaaaaaaaatactgtgacgaaagaaaaaatacgaatcatttaattaggcttggtttagttccc

SEQ ID NO: 15442 - DNA, 294 bp, Oryza sativa
  Clone ID: PAT_MRT4530_21286C.1
atggctgccagatatgatagtggtgagcgagaggcctacccggaggttctggctggaacctccgggcaccaaagtttatttttccccgggacagagaggcctacccggaggttctggccagaacctccggacaccaaagtttatttttctccccgggatagagagggttacccggaggttctggccggaacttccgggcaccaaagtgttgggagaatttctctaagtgttgcccggaagttcctggcacttttgcccagaacctcctggcaggtttccagttcaaacttgtga

SEQ ID NO: 15443 - DNA, 317 bp, Oryza sativa
  Clone ID: PAT_MRT4530_21287C.1
gttcgttcgaagatgctactcatctagccaaagaatgccctttcacagctatggtatggaacaaaatttgcctttggcaaggacatactgcctatacccttcagagctcatcttgcaccttcaaaaattggtgggaatcattatgcaagctaaggcctatagctacaaggaagctaattcttaaagaccttgcaataacgtggtggaatatttggctagaacgaaacagaagaattttatgtcactcttcacaagacgagaaccaggtggcctccttaatcaaggaaaatataagccaaattaatttgtccagatgt

SEQ ID NO: 15444 - DNA, 1923 bp, Oryza sativa
  Clone ID: PAT_MRT4530_21288C.1
atgtcgctgtcgaagccgttctcggcgcgccgcctcgtcccggcgctcttcccgctcgcgcacgccgacgccgcctcggccgcggcgtcccgccgggcgcggcgccgcgacgcgttcgtcgcgacgccccccacgccgccgccgtccccgagcgccgtgcgcctcgcggagcccctcccgtcgctcgcgccgtcgcgcctcgcgctccacaaccgcatcctcgcgctcctgtccccctcctccaaggacggggagaagggggccgacctcgccgaggccgcgctcctcacccgccacgcgctccactccaactgccgcccttcctccttcacctgcgccgccgtcctcgccgcgctcctccgcgcgcgccgcctcgacgacttcttcgcgctccaccggttcgccctccaggccgccgtcccgcccaccgccgccacctacgcgctctacctctcggccctcgccgcgcgccgcctccccgacgccgcgctccaccacctccgcctcatctcgcgccctggatcccccgtgcccccgtccccgaccgcgtatcgcgttgtcgtcaagtccctcgtcgtcgaccatggccgcctcactgatgccctcgagctcaaggatgagatgctggcctccgggttcgtcgggcccgatccacaggtctacaaccttctcatggctgggttcgtggaagccggtgatggcgccaaagccgtggaattgtacgaagaattgaaggaaaagattggccgcgagccgattcttgatggcattgtgtatgggagcctcatgaaggcttacttccttatgggaatggaggagaaggcaatggagtgttacaaagaggttctcggtgcagagtcggaggtgaggtttggagctgagagttataatggtgtggttgatgcgtttgggcggaacagaaggttggatgatgcgatcgagctgtttgaaagaatgcttcgggagcatgatcctccactaaagattgctgttgatgtgagaagcttcagtgtgattgtggatgcttactgcgctgctggtaggttcggtgatgcaatttcttggttcaggaggatgggggagtgggaagttgttgctgatgttgcagcatataataatttgatccggcatctcagtcttcaagggttggtaagtgaggccgagttgctatacaaggagatgggagaaagtggtcttaaggcagacgaggaaacatatgtgctactgatgcaagggtgctttagggttgatcgcatcgatgaaggcattaattactttgacggaatggctgagttggggttgaagcccgacgcaactgcctatcataagattgttgatggcctaattggttttggtatgctggacaatgcccatgggtatctcgataagatgagggggaaagaaattagcccaagcattgcaagctatgaggcactgctaaaggcgtacattggtgaagctagtttggataaatcaatcgacatcgcaaaggatattcttttggatgagaaggtggtgttcagcgatgaaatgagggacctattggaaggcgcactccgtgaagcagggagggaaggtgacataaccaaactatacgaggatgtggaggagaaaaaagctgaggcagcggctcgggcagaagaagagaaggcaagggcagaagctcttgcaagggaagaaagggagaagaggagggcagaggctgctgcaaaggacgaggctgcagctagagctagtgccgctgccattgaagccatccttggccataaaaggaagactgaaaatgtaacaggagaacctgcacctgatgcaaactcactggatggtgtgtttcagagtaggtttggaatcacatcagctggagatggtgcgcttcaaggcacttcttcaggaggtgaaactaaacaaggagatggacactaa

SEQ ID NO: 15445 - DNA, 267 bp, Oryza sativa
  Clone ID: PAT_MRT4530_21289C.1
taaagaaaacggaataaacatttccgctggccttggacatgtcccagcaaccaccttagctagtctgggcatggacgccgccggtgctcgccctcctcgcttgctctggcctcttcttcctgttccgccgcgcccagggcggccccggcgctggacctggcggacgctgcggacccatgctcttcgtccgcaccatgagcatgttccaggaggtgcccgagactggcgtcaccttcgtcgtcgtacgcggcgccgaccaggccatgc

SEQ ID NO: 15446 - DNA, 1087 bp, Oryza sativa
  Clone ID: PAT_MRT4530_2128C.1
cgtccccacgcggccgggacactaaagcagtagtctagtctcccggccaagcaagaaccaaaaagcaattaagatcgaactcgagcaaacatgtcgtcgactaacaacagttcaggcgagccgccgccggcggtgcgcgtgctgggcggttgggcgagccccttcacgaaccgcgtggtggtggcgctgaagctgaagggcgtggagcacgagatgttgcaggagacggtggggaagaagagcgagctgctgctccggtccaacccggtgcacaagaagttccccgtgctgctccaccacagcaagcccctccccgagtctctcgtcatcgtcgagtacatcgacgaggtctggccggcctccaatggcggcgccccggccattctccctcgcgacccccacggccgcgccgtcgagcggttctgggcacggtacgtcgatgacaagattctaccagggcttcgggttttgagaggatcggtggccggagacaaggaccaaaccgcaggtgaaatgtccacgactctacagcgtctggaggaagcatttgtcaagtgcagccaagggaaggaatacttcggcggcgacagcatcggctacctggatatcgctctgggttcgttcctcggatggatcaaggcggtggagaagatcgccggcgtcgagctcctcaacgaaaccaagcttccgatcctggctgtttgggcggatcgcttctgcgcgcacccagccgtggtggacgtcgtgcctgacgctgataaattggttgagttcaccgttcaatatggttctgtgctgaatactgtgaatgttcttcccaagtgatggatggtatgctgctttgtgcctgacgataaattggtttgagttcaccgtgcaacgtgcttcgtgttgccatttagtatggtcactagtgaaagatgatggtcatttacgttgttttgtttcgtttcttcggaactgtagtttccctttccgtctgagtctgtaattttgcttgtaagacttctctctgagtcttttattactacttctctcagtcttttattaaaaaaactactactactggtgatgatgatgatattct

SEQ ID NO: 15447 - DNA, 182 bp, Oryza sativa
  Clone ID: PAT_MRT4530_21290C.1
gtacgtaacctgggatcttctagagggggggcccttttttttttttttttacgaaatactactatcatgccttagcattttatttgctttggagtgttgttagactcaatcaaaaacaagatgcattgtccagtcaggacacagacccgcacctacttatttccaaagtaattacttcctaa

SEQ ID NO: 15448 - DNA, 547 bp, Oryza sativa
  Clone ID: PAT_MRT4530_21291C.1
tcacccgtggcacggcaccggtgcaagtccgtctacggcgagaagtttgccgacgagaacttccagatcaagcacaccaggcctggactcctgtccatggccaacgccggccccaacaccaacggctcgcagttcttcatcaccactgtcaagccctcctgggtgcccggcgtgcgcgccgcctttggcgaggttgtctccggtttcgaggatgtcatcaagcccattgaggctcttggctccagcagcggtacccccaagaccaaggtcaccattgtcaacgctggtaccgtctaaatcggtcctttgaggtgacaggtttttttggtcctgattgcgtgcgtgcctagtcgggagtgcggggttcatgacttagtagtcgggtctactaggtggattcaaggcgaaacgtcgatgcggttggagggtagaaacagttgtgcgatacgatacgaatggttccaatcctatagcgttagttcccagtaacctaaaaagcaatcactcatgtctggttcaaaaaaagaaaaaaaaaaaaaaaaaaaaa

SEQ ID NO: 15449 - DNA, 355 bp, Oryza sativa
  unsure (1)..(355): unsure at all n locations
  Clone ID: PAT_MRT4530_21292C.1
cggctatctccctcctttcttctcttctctctcgtttcgaagccgacgcgtcgcggaggaggaggaggaagagggcaaagcgccgcggggatttctagggttagggtttcgaggttgagagggaaggagggagagaagagcgggtatcagccatggggatgaaatttctgaacaagaaggngtggcacacggtggagccttcggaacatcgagcgcgtgtngngtggccnaggagangnagangtagggagcagctggaagatccaggagctgangaagcagcaggnacgaggagcgntgagangtcccnccttccgcaagctccanggaggncgcntnncctcanncctaggca

SEQ ID NO: 15450 - DNA, 189 bp, Oryza sativa
  Clone ID: PAT_MRT4530_21293C.1
atgcctagagggaattctattgctcaatgtggtctcggaattccagcagcaggatggtatcccacaaaagtgatgggtgtcccaaaaaacagattcccaaaggtgaaaacacctgacattgacaatactcaagtatggtctgtgaatgttccacttggaaaagtaattaccaggttgctgccactttga

SEQ ID NO: 15451 - DNA, 156 bp, Oryza sativa
  Clone ID: PAT_MRT4530_21294C.1
agacaactacactgtgctgaacatcttctacgacaatcgcaccatcgtttcgcggacaccgatgccctccgcggggcagtgccccgagtgcgccacaacgtaccttcggccaggctacgagtggttcaatacacaggctccgttgacagcctcatt

SEQ ID NO: 15452 - DNA, 757 bp, Oryza sativa
  Clone ID: PAT_MRT4530_21295C.1
acggcgccacggcgagggccatcgtcaaggcgtacccgcacatcaagtgcacggtgctggaccttccacggttggtcgatcatgcccctcgtgacggtgtcgtcaactacgtcgctggtgacgcgttccagtgtaccatcccacccgcccaagcagtcatgctcaagcttgttctgcatcacttgagcgacgatgactgcgtgaagatcctagctcagtgcaaaaaggctattccttcacgaaaggagggcgggaagttgattgtcatagatatcttggttgaaccatctttggggcctgtaatgttcgaagcgcagctcatgatggacatgctcatgatggtgaatactagaggtcgtcaacggaacgaaaatgattggcatgacctgttcatgacagcaggattcagtgactataagattgtgaagaaacttggtgctcgagctgtcttcgaggtctatctgtaggattgcttctatctaatatgcgcaatggacgtggatcgtgtgatgtgacgaaataaataaatggtgcaccataataatgactttggaatggaatttcacagatcatgcatgaagcggactgaaatcttaagctcggatacttcatgaactgtgcaagggttcatttcaaagatatctagcagtcgttgcgctagctttactgcacccatggcttgtgtttgttgtcgtatatgtgtgtactgccacagtttattggaaatgaatcttaagcctacgttagaattgccaat

SEQ ID NO: 15453 - DNA, 954 bp, Oryza sativa
  Clone ID: PAT_MRT4530_21296C.1
atgggcttcggcgtcatcccgctgatggagtacatcgcccgccgcgccttcctcgccgccggcctccgccccagcaccgtcacgctcccctccacctccggcgacggtgaggcccggaccatccactactgggcgccgccgggggagccgcgcctcccgccgctcctcctcatccacggctttggccccatggcgacgtggcagtggcggcgccaggtgggccccttctcccgccgcttccacatcatcgtcccggacctcctctgcttcggcgcctcctcctcctcctcctccccgccgccgtccgagtcggcgcaggccgccgcgctgctcgacgcgctcccggcgctcgtggggacggcggcgcgcgtcgccgtggccggcaccagctacggcgggttcgtggcctacgccatggcgcgcaaggcggggcccgagagggtcggccccgtggcgatatccaactccgatttgctcaagacggcggaggacgacggcgcgttcctcgagcgcgccggcagcgggtggacgcacccggccgacgtgctcatgccgctggacgcgcgcggagctcgccggctcatggagctgaccttctaccggaagcaggccggcgccatgctaccggacttcgtgatccgagacatcatgaagaaacttttttcggacaagagggaagagaagatcgagcttatgaatgctacaactgtgggcacggatgcattccagcttacaccattggctcaggatgtattgcttatctggggagaccatgatcagatattccccttggataaggcatttgctgtcaagagctgcttgggagatcatgttagattggagatcatcaagaagacaggccacgtgcctcaaatggaggacccggatcggttcaacaagatcgtgttggacttcttgcttggatctcaaggttccccttcaaacgagcattag

SEQ ID NO: 15454 - DNA, 165 bp, Oryza sativa
  Clone ID: PAT_MRT4530_21297C.1
atggcgaaggacaagaggtgcacggaccgctccggatatcgcggccgcggccgcgactccaccgccctcacgacggcgccatccggcatgatcttgcgggggaggctaaggaagccaatgtctgatatggtgccgggggcttctgtcagagatatgggcccgggg

SEQ ID NO: 15455 - DNA, 301 bp, Oryza sativa
  Clone ID: PAT_MRT4530_21298C.1
ataacggttgtgacggttggaatggtcggaaataccctccaaccgccattgggggctaatccacaccgtccaggcgaagccctggatcggatggcgttgaggagggtttggccgaaccccctggttcggtcgaacctggggccgacccaatccagtccaatttcggctggtagcctcctccgttgttcttctatgcagacttgtgaattttggcccagtttgtcacgtcaattctgagttcttggcccattcatacataagtctggttctcaacatcatccgattgatttatcttctatgt

SEQ ID NO: 15456 - DNA, 192 bp, Oryza sativa
  Clone ID: PAT_MRT4530_21299C.1
aaaaagttgggtttggattacatttatacctggttttttcaacttgaaaaggaaaaaaattattttgtaccctttggctaccccatgggtcgacctctgtggcttcccctggtttaacccaaaaatttcgaaccggttccttgaggggttctaatttttctttttgggaggttgattaaagcttggcggaaa

SEQ ID NO: 15457 - DNA, 3200 bp, Oryza sativa
  Clone ID: PAT_MRT4530_2129C.1
atggagggccaattcagaacagtacttggtgtcacctaataaaaccaccctgatttctattttgagatagaccatggaccgttgaaaggcatgcagttgctcgtttttgtgtgtgagagaggggagaggccggcggcgatggggaggacgctggacgtgttgctggggcggacgacgaagcagacggcgaggctcaagtcgatgctggggctggcggtgacgcggctcggcgtgctgcgcgggcacaggcaggtgcggtgcgcgcaggcgcgcggcgacgtggagcagctgctccgcctcggccaccccgaccgcgccctgctccgcgccgagcaggtcatccgcgagcagaacacgctcgacgccttcctcatgctcgagtcctactgcaatctcatcaccgagcgcgccgccctcgtggactcgcacagggagtgtcccgaggagctgcgtgaggcggcagcgggtttgatctacgcggcggcgaggtgcggtgacgtgccggagctgcaggaggtgaagcgcctcatggcggccaagttcggcagggagttcgtctcctccgcggccgagctccgcagcggctgcgggatcaatgccaagatcgtgcagaagctgtcgaccaagcagccgagcctggagagcaggcagatggtgctccaggagatcgcggcggagaaagggatcgccggcgtcgtggtgcacgtcgtccacgagccttcttcccacgacgaggactcgggcctcagccacaggaggcgtcggtgcgacggcgagaggcggcaaggggtccatcaacccgaggtcgacctggacgaggacagcttttcgagttaagggcaacaggacaatagggacctgaacagccaccggccaatgggaccccgtatcgtccagcgcgaaggccgccatggagctctcgcgaggcgaatccgggggccgcgacgacgacaggagacggccgcgaggcgcgcagttcgacagggccgacgaagagacgctcgccggcggcgaggtttcgggtgatggcaagaaatctggcaggatcagacgtgccaacctcggccggaactacagttcagagatcgaggattcagctgaggatgatgaagtggtccgccatgagatcactgcagagagcgaggtgaaaccgcggggtctgaccaggagcgtgccggtatcagtcagaacaaagagggtgagttagctgcaaccagatggcaacaagagtgatgggagatgatttcttgaattcgtgatattagcagctgctattatatttttgcagattcatcgttcgttagatcctaggcctgtaggccattgcatgcatgtaattaagactgattcattggatatgagacagcgatttgctcttggtgcggcagaaatgaacagtgtcatctatgctactggtggatttgatggtttcagctacttacagtatgccattggagggtataatggggatagaatggtgtctagcgtagagatctttgacccacgtcgcaactcctggagggtgggtgatcccatgaactttccaagaggatacgcctctacagttaccctgggtgacaatgtgtttgtcattggcggtctacagtcgagtgaaaagtttatggattctgtggaagtttacaatgtgaaatgcggctggtcagttcctggtttcagctcgattgggggtttcccaaaccaccggggccggggttaccgcgccctggcggtaagcacggttaccgcgcgaggagaaatcgtttttaaccccgtccactcgccgactcgcctctcctcctcgctcgccgtcgccgtcgcgggagactccggcgagcgcgttgacgtggccatgtcggggacggggtgcttcccggcgggggagatggcggcggtggcgagggtgtgccgggacggggcggcggcggcgaggctcaagacgggctccctgctcgccatcctcgtggcgagcgccgtcggcatctgcctccccgtggcgctcacgggggcgttccgcgggaaggccgggtacgcgcgcggcctcctcctcgtcaagtgctacgccgccggggtcatcctctccacctcgctcgtccacgtcctccccgacgcgcacgccgcgctcgccgactgcgccgtcgccacgcgccgcccgtggcgggacttccccttcgcgggcctcttctccctcgtcggcgcgctcctcgccctcctcgtcgacctctccgcctcctcccacctcgaagcccacggccaccaccagcacgcggaggagggggagtcgccgccgccgccgccgccgacccaccaaccctacgccccaatccccaccaccaagaagtcccccgtcttcgagctctccggcgagatgagccccaagaagcgcgcgcactcagacgacacggaccgggacgacgtggcgctcttcggggccaagagcgcggtccggagcgacgaggtcgtcgtcgccccccgtgtcggctgccatgggcaccacgacgtggtggaggttggggaggaaggaggaggaggggaggaggaggaggcgaggaggaagcagaagatggtgtccaaggtgctcgagattgggatcgtgttccactcggtcatcatcggggtcaccatggggatgtctcaggatgtctgcgccatccggccgctcgtcgtcgcgctctccttccaccaggtgttcgaaggaatgggcctcggcggctgcattgcgcaggcaggttttgggattgcaacggtgggttacatgtgcgtaatgttctcggtgacaacaccattgggaatacttcttggaatggcaatattccatatgactggctatgatgatagcagtccaaatgccctaataatagaagggctccttggctcactttcttctggaatccttgtctacatggcacttgtcgatctcatttctcttgatttcttccacaataaaatgatgtcatcatctaataaattgaaaaaggtctcttatgtcgcattagtgcttggatctgcatccatgtctatattagctctctgggcatgggtcataggggcacccagagtgaaatccggggtattgatcctttgtaggaagaaatggatgttttgggggtcagggcttccctcatgtgaattaagcttccccataatggggaacttaaaaatttttgaatgccttttgatcctgtgggcccttttcgtctccc

SEQ ID NO: 15458 - DNA, 1388 bp, Oryza sativa
  Clone ID: PAT_MRT4530_212C.1
ccataatatctagcttgcttcaatctgtgatcactgaacttattcatgaaaatcaatatggtttcataaagcaaaggacaattcacgactgtttggtgtggacttttgaattccttcaccaatgtcatcagagcaaaaaagaaatcctcattctcaaaattgattttgaaaaggcttttgatactgtagagcatgcttgtatcctggaaattcttaaggcaaagggctttgacaatacatggatcaattgggtaaaagatattttaactacagcctcctcctcaattttacacaatggtgtcccaggaaaaaaaacttcaattgtctcagaggtgtaaaacagggagaccctatctctgctcttctgtttgtccttgctgctgatcttcttcaatctatgatcaacaaagctctcaacctgggagtcctctcccttcctattcctcaagttgacaccaagttccttataatccaatatgctgatgacacccttatcattatgaaggcgtgtcaaagagaagttttctgtctaaaaggcatcctgcaatcttttgccatgtccactgggttaaaaatcaattttcacaaatattctatgatcccaatcaatgttaatcaggatagaattgaaatcctggcagagacttttggatgcccaattggatctctcccctttacgtaccttggtctaccggttggaacaacaaaacccaaaatctgtgattttgcacctctcattgatagagtggaaagaaactcctggctataacaatgttttagaatcaaggacagagactaaccatggtcaactcagttatgtcatccctgccaacaaattacatgtgcacacttaaaatccctaaaaagattttgttgcacatcgatagagcaagaaggcattgtctttggagaaaatctcacgaaattgatgcaaaagctcattctttttggcagcatgggacaagatttgtagaccaaaaaaaagagggggactgggtgtcattaatttagaattccaaaactatgcccttttgatgaatcatctcgacaaatttttcaacaagaaaaatctcccatgggtaaaacttctttggacatcattttataataatagatccatgccaccgcatgcattaccagactttggatccttttggtggaaagacatcactcaactaatacctcactttagaggtttcagctctattcagatcaacacaggggacatagctcttttctagaaagatctctggtcagacactttacttcaaaactccttttccaccattttctcttttgtgaaagtgaaggcattcctctggctcctgtttatggatagattaaacgagacatgctacaaagaagacacctctctattcaggatggac

SEQ ID NO: 15459 - DNA, 1486 bp, Oryza sativa
  Clone ID: PAT_MRT4530_21300C.1
ggaaatcataatggttgggagccttttgcaccaaaaacgtgatcttttaccggggccaactgaagcagaaattactaaatatggcttagacttggcgtggaaacgtaaacttgtcgcacgagaacagcaagatagaagctattcattacaataccaattcttacctgaaaataacccttggattaatactgtcgcgcagctcagccactcgagcacttatcaacatgatacacgttcagaacaagcatcaaaaacatatttggcttcattaggtaatgaaagctggacgcgttataccgatttaacattcgatgtcaacaatactagtttgtttaatgtggcaaaaacatctcatacacttttagtcggtttacaatgggtaaaacataaacgacaaacgcttatttttgatccgagtaaactccaaaaagcagaatataaccatggatatttccaaccatcttacatgccatcagggcatcaatacacacacgcattttacgcacaggataagataaaaattcacaacctaacggttagcataggtgctcgttatgattatgtgaaaaatataggcaaacctaatatagctactatttataatgaccccactgcagggcatgattacagcagtaaacattatcctggctggtcttcttacttaggtttgaattataaactgaccccttacttaaatttattcagcaatataagtaacacctggcgtgcacccgttatcgatgaacaatatgaaacacagtacgcaaaagcaactttaagcccaacagcgagctcgttagacctcaaaaaagaacgtatcacacagctacgcgtaggaaagcagatacatttcgatcacattttatcaaataacgatcaattaagttttaactcaacttttttttactataaaggaaaagatgagatttttaaaactcgaggggtccgttgctttgaaagtgcacaaaacaacaataatgaagtttgtagcaaaaaaatcggcaattaccgcaatttacccggctatcaaattaaaggatttgagttagaggcgaattatgattcaacttattggttcaccaatcttagctattcacacacaataggaaaacgattagcatcaccaagaaacccttggctagccagtacaagctggattgcagaaattccacctcgcaaagccgttgttactttaggtagccatattcctgatacaaatttaacgttaggatggaaaagtgagtttgttcgacgtcaagatcgttctcctacagatcaagataaagatgcaggccattgggcattacctaaatcaagcggttatgctttacacggcatcttcgcgacttggcaaccgaaacaaatcaaacatttacgcattcaattcactgtcgataacctattaaatcgatcatatcgtccttatcttagtgagttagcggcgggtacggggatcctctagagtcgacctgcaggcatgcaagct

SEQ ID NO: 15460 - DNA, 271 bp, Oryza sativa
  Clone ID: PAT_MRT4530_21301C.1
aaacaacaaccccaaaacatcatgtaattacccttctgttggaaaactgtaacccccactttgattcaattcacttccacttaaatggggattattacaaaaccttttccaaaatggtcattttttaaagtttaaatattttcaaaagaaccccccaaggtccaatttttgttaacacccattatcttaccgttcgaagcccctaccgtacttcaacttggtagtttccacccccttttcagggtttagcccttggattttaccgcggact

SEQ ID NO: 15461 - DNA, 306 bp, Oryza sativa
  Clone ID: PAT_MRT4530_21302C.1
atgggtttaagagatggattctccgacaacaagctactcgacgacttcggctgtggagatctaacacgaccggagcctccgaggaacctaagggaacttcggctggggacgcccagagccgataaggccttatcggatcctttaaagacaaaagaccatgtcaaaggtccaagagcctcatcatccgagaacgattctccgacgacaaggctgggggctagggagagtagtattgatttcaggaaaattctattcgacattgacgaaggctccatgtctctatggttctacaccaagatcgactaa

SEQ ID NO: 15462 - DNA, 368 bp, Oryza sativa
  Clone ID: PAT_MRT4530_21303C.1
atcgtattgacatgccggatgctgaaattcgagatttagtatctatgaagagatgggatgatctcttgaagtctgatcagctaacaaaggagttgaccaatgggaatacttttgctggttggaaggaggggttgatcaactttccgcctacttacaagtatgaaacaaattcaagtaaatatgttggggagaaacctgacgaagtggggaataaaagatctccagcatggtgtgatcgcatactatggctgggaaagggtatcaagcaactatcatattggagctcaggtttgaacctctcagatcatcgacctgtcagctccaccttcatcgttgaagtcgaggtgtttcatcagagaaaactccac

SEQ ID NO: 15463 - DNA, 1774 bp, Oryza sativa
  Clone ID: PAT_MRT4530_21304C.1
ctaagcatattttggtacccaaatcacgttgggtccatggatgttagtcacaagagatttagggacccaaatggcctttgtgctagcatgtagcgaactaatcaccctagtagcacaagtgccatttttggccttcctaagcaaattgtgatgaaatgagaggtttggcttaggaattttaccaatgggacaatttttaccaatatgtccctttgcccggcaattgtagcaaagttgagttttgcttttatcttgcttcttgacttgcttgttgccggtttgcctcttgcttgatcgattgctatgatcatccttcttgtgcggacaaaatccaatttcatgccccttctcaatgcaaccgtagcacttccttctgttgattcttgatgtctttcttggaagtgtggcttcatcatcaatcttgcaaggacaacttgaggcaaagtgtccctctttggtggatttgaagaacttgtgagcaagatcctcattcttgctcaacttcttctgtttcttccaagggcaatctctcacatgatgtcccattttcttgcacttgaagcaagtaatggaagctttgttcttgctttgatcttgccccttgctcttgttgttggacttgttatcttcttgatagaacttggtgcaagctacggttgatcccttctcaagcttcttcagcatgctttcacggttatcttgagaaggttgagcattgcaaacaaatccatgatcgatgtatttatcctttttccctacataatccaagtcacatgtagtgcgcagaaaaatatttgcttgagagcaacaagagttagcacatgtaaagtcaacttgaacatgaggcacataggattttaccgttattatgatcacctcatgagttacttctagcatggcatgtgaatccacaagatttccatgagagcacaaaagctcatcatatttttcttgtaggtccacatgcttgctagtgagctccacaagttgagctttaagctctagattttctttctccaaatatgatttctccatgatgcaagaatattcatccaagtgtgaagatgagcatcttggagatgtaaattcttcacttggccattttttcccacatacttctaccatttcattacctttaatggagacatgtgttggtgaggaggtgaatgtggcaagactatcttgctcattggatagaatcacttgaggctctttacaaattgtcgatgaatttgagcactccacaagtggttcttctatagcgagctttgcctcatcacactcggacttgtcatatctctcctcgagtgtgttccaaatgagatgagcatcaagtttgaactggaaacctgccaggagcttccgggtaaaagtgccaggaacttctgggcagcacttatgaaatttttcaacctcaccttggtgccaggaagttccggacagaacctccaggtgggactctctgtcccgacttcaaatggcctcgcacggtccaccacgaccatcatgacaaagccttcactcgcccttcaccaccggattcggtccatcggcgccaagcctcttgcttgcccttcaccccccacatggtccattgtagccgagccttgcttgcccttcaccgttttgccataaatagccacttcataccccgcatcatcaatgtcttcacttgctcctcatcaaggtataatgtccatcttctagccgagccttgctttctcttcaccggtttgccatagatagccatttcataccccgccggacgcgtggg

SEQ ID NO: 15464 - DNA, 334 bp, Oryza sativa
  Clone ID: PAT_MRT4530_21305C.1
atacaacttccctatcatcctacctggccctccccccgcgcctcgcgagtcgcagaagcagccggggggcctcggggtgccacgtcacgcccttcggcccccccccctccctcgcccctggcccctcgcccaccggcctgtcaccggtcacgtccgattggatgggtggtcgtgcccccacgttcgcctctgtcttcagcggagtggaggcaggcggggggcggcgctaggtcccactcaaggacggactgctcttagcttccgggcgaaggcacggatcatggtccagtcaaggaggaccttgcccaccgagaaaagggacgacactcagtag

SEQ ID NO: 15465 - DNA, 549 bp, Oryza sativa
  Clone ID: PAT_MRT4530_21306C.1
aagccaaaacagtaggaggttgattttctttttctcggagcagagtagcagcgttccttctttaaccattacataagcttaagcctaaacggacagcaaatcctgctcgtcctctaggaaaaacattgaaacacgatagcccttagaagggcttattattaggaaagtagggagcatgggcataaatggcagcggggggcagggtaagaatcacaatgctgagcagcgaggaaacctaacaccataatgggacagagcagaagcctgcgaacgggagcttttaggcagaaggctgctcccacttgaggggctgcaccacctcccaggggagggatgggacgacccttgcgaagcgaccgaaggccgacgtctggaggaagcgctggctgccggctttcttgaggccaagggtgatggtgatcatgccaggccggaaatcgaagatcgccttcacagtcctgaggatctgcatgtcaggggtcctgccggcgccgaatgtgctgacgaatgcggacagtggctatgggacaccgatggcgtatgacacta

SEQ ID NO: 15466 - DNA, 1300 bp, Oryza sativa
  Clone ID: PAT_MRT4530_21307C.1
gcatatttccatgggagaaaatccaagtgaccacacccatggcagactcctcgttcaatccggagtttctgcaagcacatgcagagctttggaatctcacctttagctacctgaaagccatggcgcttgagtgtgctatcaagcttgggatccccaacgccattcatcgttgtggtggttctgcctcactatcggaactggtcatctccattccagtgcctgagactagaaagcctcatctgcctcgcctcatgaggtttcttgccgcggtaggtgttttttccctcgataacccaactattgatgaagaggtgaccgagaaaggcatgggcatataccgcctcacaccattgtctcgcctccttgtggatggtagcatcggtgggcatggaagcctctctccgtttgtgctctcccaaaccaccaagtatcatgtgtctgcagctatgaatctatctgactggttcatgactgaggacaaagaggttgccatagagatgccatttagggctgctcatggcacagacttgtggggtgttatgagtcgtgatgctaacatgaatgaggtgttcaatgctggcatgggttccgatagtcgtcttgcaatcaattttattattagcaaatgtggtgaggtgtttgaggggattagctcattggttgatgttggtggtggtactggcacaacagcaagagacattgctaaggctttcccacatatcaagtgctcggtactggatcttccaaatgtaatcgatactatcacggtggatggcataattgagtatattgcaggtgacatgatggaacaaatcccaccaactgatgccgtgctgctcaagtatattctacatgactggaacgatgaggattgtgtaaagatcctaaaacaatgtagaaatgctattcatgctcagaaaccaggaggaaaagttattatcatagacatagtggttggatccccttctaaagacatgtttgaagctcaagtttcatttgatctattgatgatggtgataacatcaggcaaggaacgtgatcagcatgaatggcataagatattcatggatgcgggatttagtcattacaagacaaggcctgttttggggtttttggccatcactgagctctatccgtagaaggaatcccaacatgtgtttgcttttcaatatgcatgttttagcttgggcccaataaagtgaatatgcatgcctccattggtttgcatatttactatgatcggttgaaagtccaagatggaaattaataaagacaatactttagcaaaaaaaaaaaagaa

SEQ ID NO: 15467 - DNA, 375 bp, Oryza sativa
  Clone ID: PAT_MRT4530_21308C.1
gtgggacgaagatcaattcattagtttcaccagtaataaaaggaactgggggtgcaaaatgagggcacttacagtagtgctgtccacaaatgaactgctatacagacccaatactcttctcggtccatgggtgccatgtatcactccaccccactcggttcttttttagataatgaccagaccagcccgtcgaaagggaagaaatttattttacaaacggcacatgtaatcactaagaacatctgcacaataaaaccaatagcctgttgctgcaaaccagcaatatcatatatgcgcgaatctttacattaaacggccgctatagtctgttcgagggtttgtttgctgctgctggggccactgcccgaataactg

SEQ ID NO: 15468 - DNA, 333 bp, Oryza sativa
  unsure (1)..(333): unsure at all n locations
  Clone ID: PAT_MRT4530_21309C.1
gcgcagtggaagaagacgctgagaagtcgaaggaactctcgcgaagtagcgcacgtcgatgtagaggaagtagtcgatcacaccggctcgaccttctcctcctcgtgcgttctctttgccgtactcccacgccgatcagcaccgcaaaccagcggcgcctctactggatctatcactcgggcctccaagggcccgtagactcctattcggattcttatccanngatcatatatactcggttgtaacccgaaaactccttttcggtccacgcgtcaacagcggcccctagcaaaacgtattgacccaccgggcatacataaagatcatatcggc

SEQ ID NO: 15469 - DNA, 145 bp, Oryza sativa
  Clone ID: PAT_MRT4530_2130C.1
atgcagttggcaacaccgagcaaaaatgacggtatccttccatctgtgacggcccataacaagactggaatttgcgggccgtcacaggaagtaatctcaattgggccgaagtttcgcccgattgagatatggtcgcacagccatg

SEQ ID NO: 15470 - DNA, 343 bp, Oryza sativa
  Clone ID: PAT_MRT4530_21310C.1
gcgcagcggaagaaggctctaagaagtcgaaggaattctcgcgaagtagcgcgtcgatgtagaggaagtagtcgatcgcaccagctcgaccttctcctcctcgtgcgttctcctcgccgtattcccaccccgatcagcactgcaaaccagcggcgcctctaccggatccatcactcaggcctccaaggcacgtaggagacctattccggcccattaagcgtgcgaccctgtaggttcatgtacactcggctgaaacccaaaaactccttttcagttcacgcgtcaacagcggcccctagcagaacgtattgacccaccgggcatacataaagatcatatcgat

SEQ ID NO: 15471 - DNA, 333 bp, Oryza sativa
  Clone ID: PAT_MRT4530_21311C.1
gtgcagcggaagaaagcgctaagaagtcgaaggaactctcgcgaaatagcgcgtgtcgatgtagaggaagtagttgatcgcaccggctcgaccttctcctcctcgtgcgttctccttgctgtattcccacgtcgatcagcaccgcaaaccagcggcgcctctaccgaatccatcactcgggcctccaaggcccataggactactattcggatccctatccgaagttcatgtacactcggctgtaacccgaaaactccttttcggtccacgtgtcaacagcggtccctggcagaatgtattgacccactggacatacataaagatcatatcggc

SEQ ID NO: 15472 - DNA, 333 bp, Oryza sativa
  Clone ID: PAT_MRT4530_21312C.1
gcgcagtggaataaggcgctaagaagtcgaaggaattctcgcgaagtatcgcgcgtcgatgtagaggaagtagtcaatcgcaccggctcgacgttctcctcctcatgcgttctcctcgccgtattcccacgctgttcagcaccgcaaaccagcggcgcctctaccggatccatcactcgggcctccaaggcccgtagaactcctattcagatccctatccgaagttcatgtacactcggctgtaacccgaaaactccttttcggtccacgcgtcaacagcggcccctagcagaacgtattgacccaccggtcatacataaagatcatatcggc

SEQ ID NO: 15473 - DNA, 332 bp, Oryza sativa
  Clone ID: PAT_MRT4530_21313C.1
gcgcagcggaagaagacgctgagaagtcgaaggaactctcgcgaagtagcgcgtgtcaatgtagaggaagtagtcgatcgcaccggctcgaccttcccctcctcgtgcgttctcctcgccgtactcccacaccgatcagcaccacaaaccagcggcgcctctaccggatccatcactcgggcctccaaggccgtaggactcctattcggaaccctatccgaagttcatgtatactcggctgtaacccgaaagctccttttcggtccacgcgtcaacagcggcacctagcagaacatattgacccactgggcatacataaagatcatatcggc

SEQ ID NO: 15474 - DNA, 333 bp, Oryza sativa
  Clone ID: PAT_MRT4530_21314C.1
gtgcagcggaagaaaacgctgagaagtcgaaggaactctcgcgaaatagcgcgcgtcgatgtagaggaagtagtcgatcgcacctgctcgaccttctcctcctcatgcgttctcctcgccgtactcccatgccgatcagcaccgcaaaccaacggcgcctctaccggatccatcactcgggcctccaagacccgtaggactcctattcggatcactatccgaagttcatatatactcggctgtaacccgaaaactccttttcagtccacgcgtcaatagcggcccttagcagaacgtattgacccaccgggcatacataaagatcatatcggc

SEQ ID NO: 15475 - DNA, 333 bp, Oryza sativa
  Clone ID: PAT_MRT4530_21315C.1
gcgcagcggaagaagacgctgagaagtcgaaggaactctcgcgaagtagcgcgcgtcgatgtagaggaagtagtcgatcgcaccggctcgaccttctcctcctcgtgcgttctcctcgctgtactcctatgccgatcagcaccgcaaaccagcagagcctttactggatccatcactcgggcctccaaggcccgtaggactcctattcggatccttatccacagttcatatatactcggctgtaacccgaaaactcattttcggtccacgcgtcaacagcggcccctagcagaacgtattgacccaccgggcatacataaagatcagatcggc

SEQ ID NO: 15476 - DNA, 306 bp, Oryza sativa
  unsure (1)..(306): unsure at all n locations
  Clone ID: PAT_MRT4530_21316C.1
atgtgaatgtnatcgatttgtgatttttttattgatttttttttttggcttggaggcatcggctcgaattgagccgagccgagcctttttttttttggcgatccatacacctcaaaggtgccggttcttgaagtcgngacctttgagagaactcaaaggtgctgcctgcgaggtgccggttgccaaatccggcacctatatggggtttggaactggcaccaaatagcctttatgtagtagtgttattctctagcctgagcattccgcgtgaaaaaaaaaaaaaaaaaaaaaaaaaaaaaaaaaaaa

SEQ ID NO: 15477 - DNA, 333 bp, Oryza sativa
  Clone ID: PAT_MRT4530_21317C.1
gcgcagcggaagaagacgctgagaagtcgaaggaactctcacgaagtagcgcgcgtcgatatagaggaagtagtcaatcgcaccggctcgaccttctccttctcgtgcgttctcctcgccgtactcccacgctgatcaacaccgcaaaccagcggcgcctctaccggatcaatcactcgggcctcgaaggtccgtaggactcctatctgaattaagctcatatgttcatatatactcgactgtaacccgaaaactccttttcggtccacgcgtcaacagcggcccctagcagaacgtattgacccaccgggcatacataaagatcatatcggc

SEQ ID NO: 15478 - DNA, 333 bp, Oryza sativa
  Clone ID: PAT_MRT4530_21318C.1
gcgcagcggaagaagacgctaagaagtcgaaggaactctcgcgaagtagcgcgcgtcgatgtagaggaagtagttgatcgcaccggctcaaccttctcctcctcgtgcgttctcctcgccgtactcccacgccgatcagcaccacaaatcagcggcgcctctaccggttccatgactcgggcctccaaggcccgtaggactcctattcggatccctatccgaagttcttgtacactcggttgtaacccgaaaactccttttcggtccacgtgtcaacagcggtccctagcataacgtattgatccaccgggcatacataaagatcctatcggc

SEQ ID NO: 15479 - DNA, 1479 bp, Oryza sativa
  Clone ID: PAT_MRT4530_21319C.1
ataaaacgtggcccattaggcccatcccatgctatatcagttacacataagtttatacaatttggaatgatttcattttccttttccagcccacatcatctatctcaggctctcaggctctcagctacgatgaatccaaacatcaggttccaaaccaagtcaccttagtttaaaccatcatcaaatttaaataatgtttacaggttgcctgacgttatagcgtacattaatttgaatttgatggtatatacttcaaaaccccaaaagaaaaggaaagaaaaaaacaagaaagaaactaagaaaaacaagtcaaacaaccgagcctgcaagaaccaccatcatcctcgtcgccatcgccggcggcggcgatctcacgacgacgcggcgtcggcggtggcggtggcgacggcctccaccttgggcacctcgacggggaagctgtcgatctcccccgcccacgggttgcgctcgtcggcgtcgggctcgacggtgcggagcgccctccacacggcgctgttgcacttgaacccggagccgaacgcgatctgccacgccgtctgtccgcggcggacgcggcccttggcctcggcgtacgcgagctcgtaccagagcgagctgctcgacgtgttgccccaccggtagagcgtcatccgcgacggctccatgtgccaggcgccgaggccgaggttcttctcgatggtgtcgagcacggcgcggccgccggcgtggatgcagaagtggtcgaacgccatcttgaagtccgggatgtagggcctcacgccggcgaggccgaacacgcggcgcgccacgagcgacgccaggaacaggatctgctcggacatggggaggacgaggggccccagggtggtgatgttggtgcggagggcctcgccggcgacggccatgaggtccttggagagcgcgacgccgacgccggcggcgtcgtcctcctcctggaacacgcagcggtaggcgcggtcggcggcgccgctgtgggtgcgcaccgtgtgcagcagctggtacttggcgcggcgggcggtcgccgccgcggttgctgaggaggatggcggcgccgcccatccggaagaggcagttggagacgagcatggagcggttgttgccccagtaccagttgagcgtgatgttctccatgctcaccaccaacgcgtacgagttccggtgaacctggagcagctgcttggcgaggtcaatggagatgaggccggcgctgcagcccatgccgccgaggttgtaggtggcgacgttcccgcggagcttgtagtggttgacgatcatggcggacagcgacggtgtcgggttgaagaggctgcagttgacgacgacgacgccgatgtccctggcccggacgccggtctttgccagcacggcgtcgatggcgccgaacatcacctgctccgcctcccgccgcgcctccgccatgcacgggttcggcggcgagttgagcaccgcccctcgtgc

SEQ ID NO: 15480 - DNA, 1489 bp, Oryza sativa
  Clone ID: PAT_MRT4530_2131C.1
ttagcggacatcagcaccacccatatgatttttacaggtgttaaattctatatttccatcgccgtcatgaccaatttttccaagcgtgcaactgttgccaagctccaatctcaatgcttgttcagagaccatctcggagcagaggttaactgtaactggatgagacggttccttcttcctcgtctccaagctgtgggaatcaggaacatgttcttgatcaattggtagtgctgtccactcgttgtctcgagctccagctcccaattccagtagagaacaaatcgaagaaactagtaacaagatgcgaccacagatgagcacccacagcccttccttggccgagagccgcttcaagaactcgtaggtggtgaccatggtggccgccgagagcgacatggatccccacctcggcccgagccctcggtagcacgccgcccacccgccttccttgagcaggccgcgcaccgtgctcttgagcgtcggccgcgccgccgccgcgccgtcggtttccattacctggatgcgcgtcttgacggtgtccagcggcatggtcacgagcgccgacgcgcccccggccagggcggcgctcgcgccctgcacggccatcagcgacgggtagctctccgagcgctcggcgccgacgacgcgccagatgaagcgctgtgccatggcgtaggacgcccaccacacggcgttggatggagcgtaggtcacgatggagaggccgaagccgcggtacaggccacggacgccgtcggcgaggaggatcttcttgaaggcgtccacgccgccgcggtagcggcaggtggaggaggtctggaccatgagccgctggctgatgacgtcgacgggtgtccacacgacctgcgcggcgatggcggcggagacgccccccgcggcggaggcggcggccgttgccgcgggctccgagacgccgagccggacggcggcggatccgaccgagctcttggttgcctcgagcgccgccatgtacagagcgcgcgccggcaccgtgccggccagcgacgcgccgaacccgcggtagaacccccggagaccgtcccgccggaggatggcggcggcggtcgcggtggccgcctgtggcggcggcgccacctgcaggtgcgtcttgaccacgacggccgggtacagcgccgcggagacgcccgagaagagcgccgcgccgaggacgaagaaccgcgacttgtccagcatctcccagttcacctccgccggcagccgccggatctcatcggccgccgccgccgccccgccctcctcatccatatccacaacaccaaagctcatccttccaccctcgccttccaaacaccttagtactagtactctcagaccaaatccagatcgttggcatgcgacccaccttttaatggaccatctccggcgaacaaccaaggaactccggtcagcatgggcaccaactccggcgatcgcaagaaatgctaaaaggaaaaatcgaacgcgtggg

SEQ ID NO: 15481 - DNA, 2538 bp, Oryza sativa
  Clone ID: PAT_MRT4530_21320C.1
atggagaaccacgcaagacggaaattctgtcttagcataccacaaaatctaatgcgaacttccccttgtcttggggtgcttgaatcacctactgagattgtggatatgctcttttcgattcaactgcaaatggctaggtgggatgaaattttgactcttccagttcagaatccacccacgccagagttttcggcatcagatatcatgtggtccagggtggagggatggaaggactcaatggacaggcttgcgcttattccattttcaagggtgaatgattttgttagaggagaatcaaacaacaaagagtgcccaacaagatttcatgtagaagcacggcgaaggcgtccaccaacaatgaactgcaaaccaaaagttgatgggatactcgagtatattctgtattggtgttcttttggtccagatgattatagaaagggtggctctgtccgccctagcaggaactcttcaacaaagaggaaaacacctgctggtcgtcctcatacaaagaggggctgtatttgccattttattgtgaagcgtttgattgctgaaccatctgtcgctcttgtgatatataaccatgataagcatgtagataagatagggaagccctgccatggtcccatggacaatatggctattgggacgaaggccatgtttgcgccttacatatcagatgaacttcgtcttcagattatgtctttgctctgtgttggtattccagtggagaccataatgcagagacatacagaaatgatcgaaaagcaaggaggaccatcaaaccgagatggtcttcttactcacagatatgttaggaggttggaaaggaaaattcgtcgttctgtttacgaacttgatgacgatgatgctataagcattaacatatgggttgaaaatcaccaaaaccatatatttttgtatgaggacttttcagataaggacacctttatcgtgggcatccagacagattggcagctccagcagatgattcagtatggcaaccgtagtttattggcttctgattcaaagtttggaacaaacaaattaaagtatcctgtacatagcctccttgttttcgacaagcagaaaaatgcaattcctgttgcttggatcataactccgaatttttcacatggtgaagcatatagatggatgggtgccctttatgatcgagttcgtacaaaagatccaacatggcagttgggtggctttattattgatgatccctttgcagatgtgcgcacgataagaggaaatggtggcatggaattatttgaagcctttctggaagattttgttgattgtgctggttttctagactacttcagagctctatggtttccaagacttgggtcatggataactatgttaagaaccaccccgttggctactactgaggttgcttcagcaatcgagagctaccatcacctgctaaaactcaggctattgaatgaggcaaatgaaagagtataccagcgtgcagattggttggttcataagctgggtacgaaggttcattcctactactggttggatgaatattctggtaaggacaacttttctcgttactggaggagtgagtggaaaagtggcccaaatccatggcagcagggattgcaaatcccagattctgatgttgttgtcgaaggcaattgcgccagagtggtttgccagaaaaacaaggagaggtcccatgtcatagtgaatccaggttctgatcttgcattgtgtgattgtagctggtccaggaagggaaacatttgcaaacatgccattaagtcaactaaagtcttccgccaaagggggctggcaccaccatccttggcactgtttcgctattaccaggcactggctaatgttgttcattgcccacccagtgacactttgattagtgaccatgcagttgccgtagcaatttttgttagaacacagttagattctctgttggatgcaaccaatggtaattcttcaaacaggtcaacttccaaggatccgcaatcagtcattgagccaagagaatctgatgttcgggagggcagcattgagaatgatgtatgtgcaagtcagtctcaggctgagtgtggtgatgaagtttctgatgagcagaatgatgatttagaccgttttgttttcaagaaaagaaagtccagggaagcatctgatgaagaaggtagccctacggcgacgcaaatcacacaaccttctgaaaccgaaagcagtcaagcaactgatctgcaggaacctcttgatcgtcgggaaaatcgtgctcccaagaaatcgaagtcaaaagaagcttctgatgggggaaaggctaatgcaaggcaagcgaagcaaccttctgaaactgagagtaggccagcaattgatcagcaggaacctcttcatcatcgtcaagaaaaccctgctcacaagaaaacgaagtcaggagaagcttctgatggcgaagaaactatggcaatgcaagtcatggaaccttctgaaactgaatgaaccgaatgattcttctgcttaggttatatgagatgttgtaggaat

SEQ ID NO: 15482 - DNA, 354 bp, Oryza sativa
  Clone ID: PAT_MRT4530_21321C.1
atgggcgaggatcgcggcgacgactacctgggcacgctgccggactacctcctccacaaggtcatgtcgttcctcccggcgcggcaggccgtgcagacgtgcgtgctgtcgcggcggtggcgcgacctgtggcgctccatgccgtgcatcgacatcgacggcgacgagttcggcggcggcatggccaaggtcaggtgggagaagctgatggacttcgccaacaatctactcgagttcggcgacgtgcacgtgatcgacttcaaccccccgtttcttgagaggatatcgaagccgaaggtttcggagacctaccctctcaattgctggtgcacaccagcagacgggatggagtag

SEQ ID NO: 15483 - DNA, 363 bp, Oryza sativa
  Clone ID: PAT_MRT4530_21322C.1
atgaggaaattttttttttattaaaggaacataccccggacgtgcattcaaaaaatgttaaacccccctggcaaagtgccaatagagaactgaaggccgaaataacacggtacatgccatttagcacacaactgctacgatgagcgcaagtggatccatgttcacatcagcttactcccacgaactcaagcttcgtcactatatgattggacactgcttatcgaggcgcacatggaccggataacagaacagctactggatgtccagcgacctgaccgcggtggtgaccacatccatctacgccatcaaattcagcgtgaacagcacctgcaccacccaatatgcaatgacgcccgcgctggg

SEQ ID NO: 15484 - DNA, 293 bp, Oryza sativa
  Clone ID: PAT_MRT4530_21323C.1
gcgataacgtgttgattttttttattttttttgaaatattttttgttgggttttttgctcggcggcgccgcggcggcggtggcggaggcggtgatgatggagacggcggcggcggcgatgctggaggccggggtggggaggttccgggggccgagcgtggcggcgctgctggcggagatgtgggcgccgctggccgtctcgcttgcggcgctggcgacactgcccagccttttgcggtgggtgcaggtgctcattcttctactccgctcatgcggtatggtgggcatcttctc

SEQ ID NO: 15485 - DNA, 357 bp, Oryza sativa
  Clone ID: PAT_MRT4530_21324C.1
atggccattagaccgctggcgaagggctggtccgaccaaccgtggcctccgtgctaccaagcaatttgggactttcacaggctcctgaacccgggcaccagaatggcggcaaagggctacggaggacctgctattgcctgttggcatacgccacctcgacggccgagcgcgcgacctgctggctgctactactccgtggtctctgccacttgcgtcgctcgtgctccgccgcccacaacgccccagcgctgtccagcggtgccatgctccgccgagcgccctcgacagccgccacttacattgcccctgcgccgtctagtgctgccccctgtgccaccggaagaagggaagaagtag

SEQ ID NO: 15486 - DNA, 825 bp, Oryza sativa
  Clone ID: PAT_MRT4530_21325C.1
atggaagggtatcgaattattagcagagtgccaatcaggcacaatgatgtcgagatcatcctagacttccacgtgttcgaacttcatgacttcgacctccacatagaccatctcatagaaaagatctacttagacgagcctcgaaccagagtcctcgacatcaaactcgggaatctgacgttttctttcatgatctcacaattgaaaaactctttggaacctattcccgagtccgggctaattgaggaagtgttggttgtctcttcatttgagtcccttggatacctccttgaagacaatgccattgcatttgtcaaggaagatgacaatcctgaagaggttgtgcctaagaaaggaggcatgacggtcgttgaaaactctaaaaatgagttaatgccacaacaaaccatcacgggatggagaatatgcatagactacaagaagctcaacaaggctactaagaatgatcatttctcgttgcccttcaatgataaaatgctagagcggctggcgaaccactcattcttctgtttccttgatggctattctggctatcacaaaattcccatccatctagatgatcaaacaagacaatgttcacgtgtccgtacggaccgatatgtgccacctagggagaacaagcaaaagctcatctatgaaagcagaaggcatatgcctgatgagccatatctatatcgagtctgctcagatggtctactcaaacaatgtgtaccaatagtcgaaggcatacatatcattgagaaatgccacacggcaccatatggaggacactatggtgcattccgcactcaggcaaagatgtag

SEQ ID NO: 15487 - DNA, 823 bp, Oryza sativa
  Clone ID: PAT_MRT4530_21326C.1
acgtttcgttcacgatatcgttcatgttcgcattctcgttaaggtcacgtttcattcacctacgtttgttcgttcacgttcattaacttacctataattgcatttcacgttcatgttcgttggctcgttcacgttcgtccgacaacgttctagttcacgttcattcaccttgttgtcgttcacgttcgttctctcgttctcattcacgttcgttggctcgttcacgttcgttcgctcgttctcgttcacgttcattcaccttgttatcgttcatgttcgttcgctcgttctcattcacgttcgttcgctcgttcacgttctcggtgtggcggtagcgggacggcggtgtggcggcagcggagcggcggcgggatggcgcggcagcagcgtggcgccgcgcgcggcattggcgtggcacggcggcagtgtgcggcgtcgtggcgtttcgtggcgcggcgtcgtcgtggtgcggcgtcgtgtcgtgacgaggtcggcgtcagcgtctgaaactcggtggccggcggcaaccgagagggagagagagagagatcgagatcggagagagagatcaagagggaggcggcgcgcggcggctctcaccccagagatgcggcggcggcggaggaggcggaggcggcggcgacgacaacgagcgcgagacgacggcgagatacggcggcggcgtcggcgcgaggatgccctaggcagtggcggcgaaggagaagccgagagagatcgatcgggcaaaaacttctaagtgttggtggagaagacgagggcgcgcatcgggaatatatatagccctagatctttagtcccggtt

SEQ ID NO: 15488 - DNA, 439 bp, Oryza sativa
  Clone ID: PAT_MRT4530_21327C.1
aattccaaaccccaaaacattaatacctaaatggtgggacccctgattatttattaccttgccacaaaaccatggaactttgggtttaacttttaaaggccttattccctttttttggtaaaataactccttcctaacctggaatggggttctaaaaaaaccttaagtggcttagattcctatttaacctgtattttaactatcaaaaccttttccagcacaacaggtgctggcggccaattttaactttggttagaaaaacccttaattgcggaggtcgtccaccagccttgtcatataattggcaccaattcggttggacttcagttcccgaatgcttgttttggctgggaagtccagttccttttaaaaaggaatttctcgataataactggcagttttcctattccttcaagggccttgcccaaaagcccttttt

SEQ ID NO: 15489 - DNA, 912 bp, Oryza sativa
  Clone ID: PAT_MRT4530_21328C.1
tctttactcccggttgttctcatcaaccgggattaaagatctagggctatatatattcccgatgcgcgccctcgtcttctctactagcacttagaactttttgcccgatcgatctctctcggcttctccttcgccgccactgcctagggcatccccgcgccgacgctgccgccgtatctcgccgtcgtctcgcgctcgtcatcgtcaccgccgcctccgcctcctccgccgccgccgcatatctggggtgagagccgccgcgcgccgcctccctttcgatctctctctccgatctcgatctctctctctccctctcggatgacaccggccgccgagttttagacgccgacggcgaccttgtaacgacacgacgccgtgccatgacgacgccgggccacgagacgggacgactccgcatgccggcgtcgcgccacgccgatgctgcgcgcggagccacgccgtcgccgagccagcccgacggcgattcgctgacggcactccgacgttccgctgccgccacaccgagaacgtgaacgagcgaacgaatgtgaacgagaacaaggtgaatgagcgtgaacgagaacgagcgaacgaacgtgaacgagccaacgaacgtgaatgagaacgagcgaacgaacgtgaacgagaacaaggtgaatgaacgtgaacgagaacgagcgaacaaacgtgaacgagccaacgaacgtgaatgagaacgagcgaacgaacatgaacgagaacaaggtgaatgaacgtgaacgagaacgttgtcggacgaacgtgaacgagccaacgaacgtgaacgtgaaatgccattataccccggttaatgaacgtgaacgaacaaacgtaggtgaatgaaacgtgaccttaacgagaacgcgaacgtgaacgatatcgtgaacgaaacgt

SEQ ID NO: 15490 - DNA, 528 bp, Oryza sativa
  Clone ID: PAT_MRT4530_21329C.1
atggcggtggggatcgccgcgtcggaggtggggatcgacacgacggcggaaggcattgatgcggcggcgacggatccacgcgacagcactcgagctcgagccagcttgtttagctcgcgagccagagaaagaggagaagggggagtcgaggggagtcgtttgttgtcgtggtcccgcggattaatcgacaatggattgatgaatccttccatgggactgtgggacatggtgctggtgaggagcttcttcctcgaggctgccatctcggagcggcggctcgtcatgctttcccagccgcgctcgtccgagtggtgcggccgcacggcaaccggtggtagcatgaaggaggtcctggccatcgtgcgcccgtgcggtcgggtggagccgtcgctatgggcgacaggcggtcttgctgcaggagctcccggcgcgcatggtggtggccgttgggcttcgaccgtgcggtggaggcgccgattctacgagagaaacttcgcgtcagatggggagggaataaggttggggtga

SEQ ID NO: 15491 - DNA, 354 bp, Oryza sativa
  Clone ID: PAT_MRT4530_2132C.1
gaaattacaagagtatgtacatgatataaatgagaacattgaaaagcttcctactcgtggtccggtatctaaatatgttcttcctgatgaaaacctccgaggaaggcttgagatcactattgatgaagatattatgaatggggtggcctgtaatctcgagtcgcgaggctttcaagcattatgcaaagcaactgaggaaattgtcggccacgtggaaccatattccattactgggagtctgcccctgattagggaattacaggatgaagggtttgatgttcagactgctgggtatggcttactcaagacataccacgcaaagaacgagtactgtctattttcagatatggccca

SEQ ID NO: 15492 - DNA, 872 bp, Oryza sativa
  Clone ID: PAT_MRT4530_21330C.1
tctttactcccggttgttctcatcaaccgggactaaagatctagggctatatatattcccgatgcgcgccctcgtcttctccaccaacagttagaagtttttacccgatcgatctctctcggcttctccttcgccgccactgcctagggcatccccacgccgacgctgccgccgtatctcgccgtcgtctcgcgctcgtcgtcgtcgccgccgcctccgcctcctccgcatctctgggtgagagccgccgcgcgccgcctccctctcgatctctctctctccctctcaattgccgccggccgccgagtttcagacgccgacgccgacctcgtcacgatacgacgccgcgccacgacgacgccgcgccacgagacgccacgacgccgcacgccgccgccgcgccacgccgatgccgcgggcggcgccacgccgccgcgccacgcgccggccctatgccgcgcgcggcgccacgccgccgccgcgccgcccgccgccgtcccactgccgccacaccgagaacgtgaacgagcgaacgaacgtgaacgagaacaaggtgaatgaacgtgaacgagaacgagcgaacgaacgtgaacgagctaacgaacgtgaatgaaaacgagcgaacgaatgtgaacgagccaacgaacgtgaatgagaacgacagaacaaacgtgaacgagaacaaggtgaatgaacgtgaacgagaacgctgtcggacgaacgtgaacgagccaacgaacgtgaacgagaaatgcaattataggcagatggctgatcgcgatgagaaacagatattggggttaccaaccgggactaaagatcgatctttagtcccagttatttcacccgggactaaagatagcgatctttag

SEQ ID NO: 15493 - DNA, 258 bp, Oryza sativa
  Clone ID: PAT_MRT4530_21331C.1
atgccgacggtggcagttccaacctatcctgatgccagggacggatccgtcgtcacgcagcttgccaccaacgtcgtcgtcattgtagcccacgctgccatcgctcccgagtctgtcaccgccggttctgccctcgcgtggcttgccgctgttgtcattgcccgccctagctgcagttgtcgccgcacggcttgccatcggctggcattggatccagacgtcgcggagctagatctgatcgtcatatctaatcgttag

SEQ ID NO: 15494 - DNA, 999 bp, Oryza sativa
  Clone ID: PAT_MRT4530_21332C.1
atgtcgacctccgctagcccttcgagcacaccaaccgccgattatgctgagtggaagaaacatttgtttcaccaattggcttcaacatacttgacagatctattccctgaagctgtccctcaaacaaccgagtcttctccccctcaccatagtgaaagtggcgtggagatccaatatgctctaggactccttcccagtggtggtggtctgacccgtccaatcatcggctatcatgcccccaggacctcaacgctgctgcatggtctgccttgtgtgccgatagcccctaatgttggcaagaagaaaagagcaaaatcggctgctgctccatcggctgcaaaaaataaacccaagaaacaaaagactactgctgatgatctgccaaccatagatccagacgtagaagaatttctggagggtgaagaattggtagaagatgtggatgaatcggctgaacatccccctcgtcccccaactctaatttctgaatccagtgagcacactccatcggctgcaggtagccatcatatagatgaaggggaagaagtagcaccagctctagctatccctgttttggccaatatgttttctttcgacatcaggcagttcatggatgaagaagaagataccacaagcaaggccttggagcccctagccgatgacactaagtctactttgctagatatttcaaaacggcttgagggttctctagaaactctagttactagttgtggatctatccgagatagatttcatgagatccatgacaagattccagatgagttagccgatgcaatcactctggtagcatacctcgagcaacatcggctcaagcttgaaaaggccaagcaaagaattagcgatcgtcgtgagagacaagatcttgaagcaactgtccaagctaacagggcttcaatcaatgaagaaaaagccaaacatgatgaactggaagctggtccggactccactcaagccaatatcaatcggctgaatgcctga

SEQ ID NO: 15495 - DNA, 246 bp, Oryza sativa
  Clone ID: PAT_MRT4530_21333C.1
ctcctctcctctcctctcctcagatcggatcgcgagagccccaatcccaccacgatctgtcgcggcaccggagaaggagagagagagagctcgacctcgtcaggcgggtgaaggatcgcagcagcagcagcggcggtagagcaggaggcgaggcgccgctgtcgtcggtgttcagcggcgatgagaccgaccccttcttcggcttcctcggcgccgcctccgccctcgtcttctcatgcatggggg

SEQ ID NO: 15496 - DNA, 505 bp, Oryza sativa
  Clone ID: PAT_MRT4530_21334C.1
caaggacaaagtgtcatgtgatcaattcccacgacattttatggctgtgctttgaaagaaaaacagagcattgaaggatcccccaatagtatcgcaaagtcaatgacagagacgccttaacgcctttcgtcaagccacccttgccacgggtaaataacctcaagtgattccgtgccactgcacaagttcgatgtaagtgggtctaatgcagtatcagcaatctccaagggacgcaaagctccgaagcctgcaaagaacaaacagggggaggatagagcatcaggtgccttacctgcctagatgttgccaacaatacaaatactacccaggattatcagaatgagtcacagaaagcgagactgtacagagtaatgtaacttgagaactagtatcggcgtagagtagaaataaaacacccaccacagtatgacacttcggtggtgattctattcagatatcagtagtaaataaagcgctacaaatttcttaaaaaaaaaaaaaaaaa

SEQ ID NO: 15497 - DNA, 3718 bp, Oryza sativa
  unsure (1)..(3718): unsure at all n locations
  Clone ID: PAT_MRT4530_21335C.1
cggacgcgtgggcggacgcgtgcaacccacacatctccattgcgccaaggaagaagaaaccctccccctccctctccccaatccaatccaatccaatccggcgagtcgcgtgagtttccgctcccctcttccgtcgattcggcatcgggttcgccgatcaggggggcttccttgtccgatttggtggttgattcgtgtttttgctcgtgttctccaggaccagctcagtctctcgaaggagcgccatggccaagagctcgttcaagctggaccacacgctcgagaggaggcaggctgaggctaaccgtatcagagaaaagtacagtgacagaattcctgtgattgttgagaaagctgaaagaagtgatattcctgacatcgacaagaaaaagtacctggtccctgctgatcttaccgttgggcagtttgtctatgttgttcggaagcggatcaagctcagtcctgagaaagcaatcttcatctttgtgaagaatactcttccaccaacagctgctctgatgtccgcaatttacgaggagaacaaggatgaggatgggttcctctacatgacctacagtggcgagaacacctttgggctgctctaggcgcggcagcaatatcgctctcaactcctgtaaataagacttgccaaacaagtgtatattctttgcttacctcgtggcaaatctttaaactctaatagtagtaatgccaagatcctctcagttgttctgaacatatatacgctgcttgataatactcccaagtaattaaagcatgcttcattcgtctannaaaaannnnnnaaaaaaaaaaaaaaaaaaaaaaaaaaaaaaaaaaaaaactcttgtcatctcggcggcggcgcggcgcggagcagcaggaggacgaagcagcaggcggcggcggcagagcacggcgacctagcccgacctcgcaaccatggcaaggggtttgaagaagcatctgaagaggctcaatgcgcccaagcattggatgctcgacaagcttggtggagcttttgcccccaagccatcttctggtcctcacaagtccagggagtgcctgcctctgatcctcattatcaggaacaggctcaagtatgctctgacataccgtgaggttatttctatcctcatgcagcgccatgtcttggttgatggcaaggtcaggactgacaagacctacccagctggtttcatggatgtcatttccatccccaagactggtgagaactacaggcttctgtacgacaccaagggacgtttccgccttcagtctgtcaaggatgaggatgctaagttcaagctttgcaaggttcggtctgtgcagtttggccagaagggaatcccctacctgaacacctatgatggtcgcaccatccgctaccctgacccgatcatcaaggcaaacgacacaatcaagatcgatctggagaccaacaagattgtcgacttcatcaaggtttgatgttggcaatgttgtcatggtgactggaggaaggaacacaggccgtgttggtgtgatcaagaacagggagaagcataaaggcagcttcgagaccatccacgttgaggatgccctgggccaccaattcgccacccgtctgggcaatgtgttcaccattggcaagggcaacaagccttgggtgagcctgcccaagggcaagggcatcaagctcagcatcatcgaaggagcaaaggaagcgggatgctgccgcccaggctgctgccaacgcttaaaatctgctgctgcgtctgcctggagttttgctatagcgagttgtttgcaaaggatatagaactatctgccccagactatccttttttgagctccttttgcctaatgttaatgttgataaattcgccgaactcatgtttgctgctagctgtaaatgcgactgtttaccttatttaaggcgccttttaagaacctccaaaccaaaaagtcattaactgttgctgagatggtatggttttgagcattcagcccataccctggccgcctcttgtcctctggccatctgcatggagaccttggtaataacattgagaactcaccagcacgcacattccatagatggattcagtgtgatggttgtggagtgcaaccaattgttgggcctcgatacaagtctaaaacaaaagaagattatgatttgtgtgatgcctgctttcatcgcatgggcaatgaggtcgagtacaccaggattgacaagccactcttaccccagagattactgagagaccctacattgtgtcgcaagatccattcacgggctgcgatgaagtcaaagcgggagaaacttgaaagtcgcttcattttggatgtaactgtcctggatggaacattgatggcaccttcaactccgtttactaagatttggcgtatgcataacaatgggtctatcatgtggcccttgggcacacagcttatatgggttggtggcgaccagtttgcactgcagacctatgttccattagagattccagtggacgggtttcctgttgatcaggagattgatgttgctgttgattttgtggcacctgcaaggcctgggaggtatatatcttactggaggttagcatcaccttctggccagaaatttggtcagcgtgtttgggttcacatccaggtggaggatccttcttttgtcagtaacaacaggactgccgctataaacttgaatttgcccccagaaagcaatatcacaaacacaagtaatttgattgatgtcaatattgagcctgtggatcaagtcttcaaccaacatgtcaatagcacaaacaaggagttacttgaacatttgatacaccaccagattgacgagcccaagaatcctgagcctgctccattacctgtgcccattgtttcttccacaacatctcttcaccccatcattgatgttgatgttccctccagttcaactgctgctgcttttgtgcctgtctttgatgagcctgcgcctgaacctgctgtgactcctgtgcctccaactgttaatgtgcctgctggtaatgcacctgcgtctgttggtgcatcatcatctgatcatcatggcattgacaatctcacagaagagaaactgctgaaggaacttgaggaaatgggttttaggcaggtcgatctgaacaaggagatactcaggcagaacaagtacaacctggagcagtctgtcgatgatctctgtggcgtcagcgaatgggaccctctcctggaggagttgcaggaaatggggctttgaggacactgagataaacaaggagatgctcgagaagaacggaggaagcatcaagcgggctgtgatggacctcatcgctagggagaagaaagaccagtgaagatcgtgtgctcttgagccatccctatctataacctaactatgtgtgtatatgcgtaaataatgtgacgaggtgtaaggctagcgccggccgccggggctgctgctacagtctcagggcctgcttgcttatgaactgtgtgtggtgttgtgcgactggtatatttgtcgcggagatatgtgttaagtgcgcgtgcgcgcctcttaaaaagcggttaccttgccaggtaaactgcgtgtaattactatgggcttagctgctctatgcctcttatctactgctgtgactggaacttgatggattaataagatctatgttgcgtatgttaaaaaaaaaaaaaaaaaaaaaaaaaaaaaaaaaaaaaaaaaaaaaaaaaa

SEQ ID NO: 15498 - DNA, 512 bp, Oryza sativa
  Clone ID: PAT_MRT4530_21336C.1
gcgcgactcttatgccaaacccacgcacgcaacgcaagcacatatgcttcgttttgactgctccctgctcaacaccacacacgctgtcgtcgcatataggcaggcaatacgtagctacaccgtgcgcgcgcgcgcacacgtacacgcacaccaccaccggccggcgtcgagcgctgtttgcgctgctcgcgcgtccgtacatggcggggctgcagcgatcgagcgagacgttccggcggtcggggtcgtcggggatggtgtgggaggacaagctgcagcagtcaggggagctcgggggcaaggccgaggcgccggctccggccgcgcgggcggcggcgcagcggagcggctcgagcggccacggcgggtacaaggcggggcacgtgcagccggcgctggacccgccctccccgcgcgtcgccgcctgcggcttctgcaacctcttcggcaaggacaagcatcatcaggcgcgcccgcgcggcggcgccagcgccaagagccggcgccgctga

SEQ ID NO: 15499 - DNA, 192 bp, Oryza sativa
  Clone ID: PAT_MRT4530_21337C.1
atggagacgagggcggtgacgggagtagtcgaggagctgctccttgaacatgttgctggctcgctgccggcagtgtacgtcaacactgaatgtgaagattgctgtggcggtgacgccgacggcgacgacttgcttcctagcggcgtcggcggctgtggctcggaggcggcgtcgatggctgattggttgtag

SEQ ID NO: 15500 - DNA, 556 bp, Oryza sativa
  Clone ID: PAT_MRT4530_21338C.1
ccggccgggaaaggagagagagaagaagaagaagaagaagagcggaagaggaggggaggagccatggatgcttcagcgctcagcaacccgcggctgcaggccatgctagaggaggagaagaggaaggcaatggcaaacgagttcgtggcgaagctgactgatgtttgctgggacaaatgcatcactgggagcattggaagcagcttcagcaacagcgaagcctcgtgtctgtccaactgcgcaaaacgctttctcgaactgaagatgctcaccatgcaacgagttagcagccctaggtgaaaattcgcataggtctttcctgcgtcgagaatgtagaatctactatagttgatgctagaaactatacctaaggggcatcacttgctttttgctgcattttatcagttttggtgtttttcctgctatacgttctcagtgaaaagattgcaagttttgctcttgcaaggagattaaaagcgctactgtactttgactacttttgacctgaaaagaatcagagacaagctcataggctggagcagcaaatgtgttaatg

SEQ ID NO: 15501 - DNA, 438 bp, Oryza sativa
  Clone ID: PAT_MRT4530_21339C.1
tacgcagcaatctctcgcaccgcaccttccatcggtgttcgagagataattccgcttgctcactggttcccgcaccagtacgcatcaatctctcgcaccgcaccttccatcggtgttcgagagataattctgctcgctcactggttctcgcaccacaatctctcgcaccgcaacttcagatggtcgaggtacgactacagcaataacgtagtggtcctccgtctctcccactacttccactttaagtggtcgagttacgactactgcctggtcctcgaccagcgatagatcccttaccacgacgacctagcgttgaaacctatcctactgtccctttacgccgtcttgacaaggcctccgaggaacctaagggatcttccgttggggatgcccagagccgataaggccttgtcggatccttcagagacgaaagaccat

SEQ ID NO: 15502 - DNA, 1776 bp, Oryza sativa
  Clone ID: PAT_MRT4530_2133C.1
tttttttttttttttttttactagtttgttcattcaaccatgttcagcggataatttcatctttcatgtagtatgtatacatgtgagccctttcttctacggtgaatttagtttttttccacaactatgaacaccctaaagcatctttgcaccgcgggagaggtggtgtgtccttccccttatgttcctcattttgggtagcttgcactgtgagtgcctttattagagcaacaagtaacaggaataagtaccagtgaacgctcatttttttcctccctaaaacaagactcaaacatctgcttccaactgtgaaatgatgctcagaaatacttgaaagccttgggccatatctgaaaatagacagtactcgttctttgcgtggtatgtcttgagtaagccatacccagcagtctgaacatcaaacccttcatcctgtaattccctaatcaggggcagactcccagtaatggaatatggttccacgtggccgacaatttcctcagttgctttgcataatgcttgaaagcctcgcgactcgagattacaggccaccccattcataatatcttcatcaatagtgatctcaagcctagcaagatcaatggtaagtaatggcgaattgataatcaatcttcctcggaggttttcatcaggaagaacatatttagataccggaccacgagtaggaagcttttcaatgttctcatttatatcatgtacatactcttgtaatttcttcactacagatgtcgtgctgtagaaaggagtcaaccttatatcccctgaaattgtacattctccaggaatttgattcagacccccaccaggatagctccattttgttggtttgatcgtagatggggtagcaaacttatagagcttctctttctcatgtggagggaaatcgttgtaaaacatagtctgtatttctttcagtgcttccatatttaactccatggcatttatggccttatgtgcgaggccactgtggaatagcttcccaattgccttcagatgccatgtaatcactccaccggtgccgatgcaaggctgcttatcggccgtatctatccaaaacaagggtccattcttgagcttatccagcaacccatccttcacaaggccatcgacaccaatgccagtgataagtgagttttcctcattggcaatgaacaccgcaatgaccgaatgtttcagcaccggcttgacctcaccaagtctcctcatgagctgagcaaccagcgccacatggccaaggcagtcggttgtcccacggcccctaagtttgtccttgtcttcactgtcaaacgttagtgagaagggatcgaaatcccattcgtcggggttggcggggacgacgtccatgtgcatgccgacgaaggagatggcgcggccggggacggtgccggggtactcgacgatgacgttgctccggccctcggcgtagctcaccttccgcacgacgagcgggccgcccccggtctccatggacaccgggaggagcgcgtcgaccacgtgctgcgccacgaggtcctcctgcgggacgagggccggcgggtcgttctgcaggcggcgggactcgccgatgagcttcccgaggagggagacgaaggggtcgcggtcgaggccgcccacggcgtccctgagcgacggcgatgccatctgatgcgcttccttgagcggcggcggcggcggcggcggcggctggggatcggtcagttgcgatgggaacctaggttgctattcgttgctgggagattgagtgagacctcgtgc

SEQ ID NO: 15503 - DNA, 289 bp, Oryza sativa
  Clone ID: PAT_MRT4530_21340C.1
ccggaatggggaggagatcagacttgtcgctgaagctctgagctaattaacactgattacagtatatgacggcttaattaattaatcaaaatcggtgatgaatccatgcatatgtcgtaggtagctagcgttggatcgagtactttgttgcgtctctggaaccgcgattgattgatttctagccaattgtttgatcgctaattcatatatataccctgatctttgagagagagatatatatagttcaataatatacatctcattaattcagtaaaaaaaaaaaaaaaaa

SEQ ID NO: 15504 - DNA, 902 bp, Oryza sativa
  Clone ID: PAT_MRT4530_21341C.1
ggccggagtctgccgggaactccaagtatctcgcggggatcccgaggagcatcggcaagcgtatcgacgaggccttgaagcaggagtgccgtcgatcgagccgatatgccggagggcacgtgttggcctgtatacgagataatcgtccgcagctgcacctcgagttcctccacgaaggtcacttgagtcatacactctccctaacccccagccttgtcatcggagaattcttctcggaagataaggctcttggacctttgacctgccttggatccgacaaggccttatcggctctgggtgtccccagccgaagttcccttaggttcctcggaggccttgtcaagacggcgtaaagggacagtaggataggttgcaacgctaggtgtcttctgtggtgagggatctctgggtaaaacacttggcgatcttgtgtacctgatatcaaatttgttgaagtagaggtagtaggagaaatcgctacatcgctggtcgaggaccaggcagtagtcgtaactcgaccacttgaagtggaagtagtgggagagacacttttctcgagtagtccagccatggccggttctatgagataggtcatcgatcttcgttggcaggttgggtgcgataactccgcatttgttgagaatgttctcgataatggagtgtactcgaccataacctactcgagtgctcaattgttccttgttgcgtactcgttcgacatcatacggtctgacatctttttggtacgccgcgaagcttgaggcttgaatgatctcgatagaccaagttgttgacgacgatggttccgatctcgtcgggagacatactccggtcgggttggatgttcccacagcgaagtcgtcgagtagcttgttgtcggagagtccatcttttgaacccat

SEQ ID NO: 15505 - DNA, 937 bp, Oryza sativa
  Clone ID: PAT_MRT4530_21342C.1
tctcggctggtacaccatctcttcactccatgttccttgtcgagatccagcaactgttctcgagcgatcgagaaggcgtagagtatggtcttttgtctctacaggatccgacaaggccttattggctctgggcgtccccagccgaagatcccttaggttcctcggaggccttgtcaagacggcgtaaagggacagtaggataggtttcaacgctaggtgtcgtcgtggcaagggatctctgggtaaaacacttggcgatattgtgtacctgctatcaactttgttgaaatagaggtagtaggagagtcgctacatcgctggtcgaggaccaggcagtagtcgtaactcgaccacgctggtcgaggaccaggcagtagtcgtaactcgaccacttgaagtggaagtggtgggagaaacgctacatcgctggtcgaggaccaggcagtagtcgtaactcgaccacttaaagtggaagtagtaggagagacgctacatcgctggtcgaggacgaggcagtagtcgtaactcgaccactagaagcaaatgtatgaggagggccgctacgctgccggtcgaagaccagtcgtagctgttcctcaaccatggcgcgagaaccagtgagcgagcagaattatctctcgaacaccgatagaagctgcggtgcgagagattgctacgtactggcgcgagaaccagtgagcgagcagaattatctctcgaacaccgatggaagctgcggtgcgagagattgctacgtacttttcttgagtagtccagccatggccggtgctatgagataggtcattggtctttgttggtaggttgggtgcgataactccgcatttgtcgagaatgttctcgataatggagtgtactcgaccataacctaatcgagtgctcaattgttccttcgaaagtactcgcacaacggatattg

SEQ ID NO: 15506 - DNA, 678 bp, Oryza sativa
  Clone ID: PAT_MRT4530_21343C.1
gccacagcccacaccacagtcacgcgcgcgcgtacgcgtacgcgtacgtgtgtggccaccgaacccccggatagaatagaatccacccgagccccagaaaccgcgtacgtggcggtggaccgcgacggccggcgcacgcacgtcggcgtcgtcgtcgtcgcgcgcgcgggcgtggcctcgcggagtcgcggtccccctgcgccacggggatctcgcgcccggggctctgctcgcccgtacgttcgcggtttacgcctgcctacgtatatacaccaagattggcagattgccaatcggatgatgagaccaacccgggccgcccggacacgtgtgccgcgctaccgccgccgcctgcgacgcacatgcatgcgtacggataaggaccaacttgttctgaattatgcactagtagtacagtacattgcaacaataggtgttcctttcgataccttaattcgcatttgcatcggcgatactaacgcatcatcgatgcagcttctatggttttatcctcatctacgaatgaatctggcctgcctggacactggactggctgccatgtactccgtatcacagatgctgggggcgcgcacgtacaggcgtaggacccgcgctggcccgaacgacgacgatgatgatgatacgatgctgtgcatgcgccacacactgttgctacct

SEQ ID NO: 15507 - DNA, 1096 bp, Oryza sativa
  Clone ID: PAT_MRT4530_21344C.1
tctcggcgggtacaccatttcttcattccgtattccttgtcgagatccagcaaccgttctcaagcgatcgagaaggcgtagagtatggtcttttgtctctacaggatccgacaaggtcttatcagctctgggcgtctccagccgaagatcccttaggttcctcggaggccttgtcaggacggcgtaaagggacagtaggataggtttcaacgctaggtgtcgtcgtggtaagggatctctgggtaaaaaacttggcgatattgtgtacctgctaccaactttgttgaagtagaggtagggggagaaatcgctacaccgttggtcaaggaccagacagtagtcgtaactcgaccacgctggtcgagaaccaggcagtagtcgtaactcgaccacttaaagtggaagtagccggagagacgctacatcgctggtcgaggaccaggcagtagccgtaactcgaccacttaaagtggaagtagccggagagatgctacatcgctggtcgagaaccaggcagtagtcgtaactcgaccactgaaagtcgaagtagccagagagacgctacatcgctggtcgaggaccaggcagtagtcgtaactcgaccatggtgcgagaaccagtgagcgagcagaattatctctcgaacatcaatggaagttgcggtgtgagagattgctgcgtactggtgcgagaaccagtgagcaagcggaattatctctcgaacaccaatggaagttgcggtgtgagagattgttgcgtacttttctcgagtagtccagccatggccggtgctatgagataggtcgtcggtctttgttggtaggttgggtgcgataactccacatttgtcgagaatattctcgataatggagtgtactcgaccataacctactcgagtgctcaattgttcaacggacattatataaaaaacatgctctaggtaaacataataaattattgatctgacaatgctgcatgatctggatagatacgataaattacatataaaatattgcgtatccggttgggttagatctcctcatagctaaagtcgtcgagtagcttgttgtcggagagtccatcttcttaaacccat

SEQ ID NO: 15508 - DNA, 363 bp, Oryza sativa
  Clone ID: PAT_MRT4530_21345C.1
atgcaaatgctgatgagcgtctttgtcattatcattggttgctacactgctattggctggatcaccgacatcgtcttcttcatcataggagttggtacaatgcatcttaaaaggtgtcaaacagtaaagctttatatagctgccccgctggcttttttatatagtcatggtgctgtttgggtttttaagcaattgattggatacaatatcattgctttttgccacccctccacagtcttcatatttggtaaaagtactcgggagatcatggtgaggatgattgaagcactcggctttggagtaatctagttcgagagaagattatctttccgactgtgaagtactacaagtgatttttttttt

SEQ ID NO: 15509 - DNA, 264 bp, Oryza sativa
  Clone ID: PAT_MRT4530_21346C.1
atgtgggaccccagcaccggtgccccccgccggccagccttcgtgcgccaaagaccgcgccacacccaccggcagctctccctcacaccgagccgctgctgccgaacgcccgtcaccatccacacctcgcacccgactccttccccgcctccactagctatcgccggcgatcgtctgcatgacgtcgccagccgctgccgcatccggcgaccagcgggggagcacatcggcgacggcagcggggagggcgtcggcgtccggtga

SEQ ID NO: 15510 - DNA, 1099 bp, Oryza sativa
  Clone ID: PAT_MRT4530_21347C.1
tctcggtgggtgcaccatctcttcattctgtattccttgtcgagatccagcaaccgttctcgagcgatcgagaaggcgtagagtatggtcttttgtctctacaggatccgacaaggccttatcggctctgggcgtccccagccgaagatcctttaggttcctcggaggcattgtcaagacggcgtaaagggacaataggataggtttcaacgctaggtgtcgtcgtggtaagggatctctgggtaaaacacttggcgatattatgtacctactatcaactttgttgaggtagaggtagtaggagaaatcgctacaccgttggtcgaggaccaggcagtagtcgtaactcgaccacgctggtcgaggaccaggcagtagtcgtaactcgaccacttaaagtagaagtagtgggagaaacgctacatcgctggtcaaggaccaggcagtagtcgtaactcgaccacttgaagtggaagtagccggagaaacacgtcgctggtcgaggaccaggcagtagtcgcaactcgaccacttaaagtgaggcaagagagatcactatgttttactggttcgagaaccaggagtaggagtctcttaatcacctataggggcggtaaagttggtttattatatatgcatatcatgtggccagcatgactcacatacccaacttacagcatatccggatgtccgctcgcaatcatgtggggtgatcaagctgacgacgttcgcgaggaattatccgttaacaaccttttctcgagtagtccagcgatggccggtgctatgagataggtcgtcgatcttcgttggtaggttgggtgtgataactccgcatttgtcgagaatgttctcgataatggagtgtactcgactataacctactcgagtgctcaattgttcaatactgtataaattggaaatataggtacgataaattgtgtataaaatattgcgtacctttgtagatacatgccggatgtatctacggaattagtagatcaattataaaaatcaatctactaaatacggattagacctccccacagccgaagtcatcgagtagcttgttgttggagaatccatcttttgaacccat

SEQ ID NO: 15511 - DNA, 418 bp, Oryza sativa
  Clone ID: PAT_MRT4530_21348C.1
acacaaatgctgatgagcatcttcgtcattaatatcggctgctgcatcgctactgactggatcaccaacattgtcattttcatcataggagttggtacaatgcatcttaaaaggtgtcaaacagtaaagctttatatagctgccccgctgacttttttatataagtcaaggtgctatttgggtttttaagtaattgaatggatacaatatcgttgctttttgccacccctccacagtcttcaaatttagtaaaagtactcgggagaccatgacgaagatgattgaagcacttggctttggagtaatctagtccgagagaagattatcttttcgactgtgaagttcttgttggatcgaaacatggactcttgtgtgcaatgtagctagcttattgttgtttatgtagggcctcatatgt

SEQ ID NO: 15512 - DNA, 438 bp, Oryza sativa
  Clone ID: PAT_MRT4530_21349C.1
gagccctaagcatcttttgggcaacgtatcgacgaagccctgaagcaggagtgccgtcgatcgagccgatatgccggagggcacgtgttggcttgcatacgacatcatcgtccgcaactgcacctcgagttcctccacgaagggttttctcgttctcggtgaactccggtggagatagatcacctggcgaagtcgatggcgctgctggcagggaaggacttccagtctatggactggcattggccttcctgcgacttcgatcagtcatttgagtcatacactctccctagccccagccttgtcatcggagaattcttctcggaagataaggctcttggacctttgacctacctcggatccgacaaggccttatcggctttgggcgtccccagccaaagatctcttaggttcctcggaggccttgtcaagacggcgtaa

SEQ ID NO: 15513 - DNA, 1218 bp, Oryza sativa
  Clone ID: PAT_MRT4530_2134C.1
tcacaggtaccggctatcagtatctgtggctgttccatgagcccaaagtagaagaggacttgacatggctggagacggtactagaaccacaatttgcggtggggcaatcacgggaccagtgcccgctcttaccacacttgaaacacgcatcgggagagcttgcagaagtaaatgttctcccacctttgtcaggataaggatctgaagattgatttgggcagtcctttgcccaatggttctcttgcccgcatttgaagcaggcggaggagctcctcttgctgggaatttggccacttgaagcaacatcagtatgatattgtgttgaagcttgcagtggagcagctgtcctaagctgttgttcatcacaccacttgaaatagccacaagagctacctccctggagatatgtcccgatcgtacattaagaaagagatatgaaatgccctgattagctgggcaacgataaaactgccttccaacattctttcctgtctttgtggtgagaattaagcaagctccagcaccacaggggcaaagcatatgcgcaactgatgtatctgactgaaaaacagtattgccactgacatttgcaggacctggagatgggttatcacaccactcaaagtagttgcaacctccattgtcccgcatggggcacctgtagaacttgcggcccggattcctgggcgtgttggatgtgagcactaggcaactcccggcgccgcaggggcaagccttctcctccaccgccccacccgcgtccccatacccaccaccccctcctccgcttccaccaaaggccccgcctcctcctccgccgccagtagctggcacggattgcgggcattctcttgcccagtggcaagagtccccgcacttgaagcacgcgccgcccctcgcgacctgcgcgccgccgctgccgctgccgctacctggggtggctagggtttgggacccaccgggacgcttgcgcgcctggctcagcgtctcctgctgctgcttccaggcggagctgtggcttcccttgagcgcggccaggtagggcccctcggggacggcggcggggggaggagtggccgaagtcggtgacgaggaggtcgacgaggtcatggagaggcggcggcgcttggaggagtcggaggaggccagcgccgcttcctccgtggccgctacggcgaggaggaaggcctcgtcctcctcctcgtcggggaaggacat

SEQ ID NO: 15514 - DNA, 360 bp, Oryza sativa
  Clone ID: PAT_MRT4530_21350C.1
acgcaaatgctgatgagtgtcttcgtcattattattggctgctacaccgctattgactgggtcaccgacatcgtcatcatcatcataggagttggtacaatgcatcttaaaaggtgtcaaacagtaaagctttatatagctgccccgctgacttttttatatagtcatggcgctgtttgggtttataaagcaattgattggatacaacatcaatgctttttgccacccctccacaatcttcatatttggtaaaagtattcgggagatcatggcgaagatgattgaagcactcagctttggagtaatctagttcgagagaagattatctttccgacttaggaaatgcccgtggtaccttca

SEQ ID NO: 15515 - DNA, 1123 bp, Oryza sativa
  Clone ID: PAT_MRT4530_21351C.1
atgggttcaaacgatggattctccgacaacaagttactcgacaacttcggctctgggagatccaacctgtccaaatacatcttccgacgagatcagaatcatcaccatcgactattcgatcaggcgagatcgaccaagcttcaagacgtcgccgtcgcggaagaccttgacgaattaccgccggaccagggtcaactacaaggaacaattgagcactcgagtaggttatggtcgagtacactccattatcgagaacattctcgacaaatgcggagttatcgcacccaacctaccaacaaagactgacgacctgtctcatagcatcggccatcgctggactacttgaagaaagtacgcagcaatctctcgcaccgcacctttcatcggtgttcgagacataattctactcgctcactggttctcacaccagtacgtagcaatctctcacacctcaacttccatcggtgtttgagagataattcggctcgctcactggttctcgcaccagtacgcagcaaactctcacaccgcagcgtccattggtgttcgagagataattccgctcgctttgcttcaagtggtcgagttacggctactgcctggtcctcgaccagcgatgtagcgttcctccgactacttccactttcagtggtcgagttacggctaagttacggctactgcctggtcctcgaccagcgatgtagtgatccttcgactacttccactttcagtggtcgagttacggctactgcctggtcctcgaccagcgtggtcgagttacggctactgcctggttctcaaccagcgatgtagcgatttctcccactacctttacttcaacaaagttggtagcaggtacacaatatcgccaagtgttttacccagagatcccttaccacgacgacacctagcgttgaaacctatcctactgacccttaacgccgtcttgacaaggcctccgaggaacctaagggatcttcggctggggacgcccagagctgataaggccttgttggatccttcagagacgaaagaccatactctacgccttctcgattgctcgagaacggttgctagatcttgacaaggaatacggactgaagagatggtgtacccgccgaga

SEQ ID NO: 15516 - DNA, 335 bp, Oryza sativa
  Clone ID: PAT_MRT4530_21352C.1
atgcaaacgctgatgagcgtcttcatcattatcattggttgctacactgctattgactggatcaccgacatcgtcatcttcatcataggagttggtacattgcattttaaaaggtgccaaacagtaatgctttatatagctgcccgctgacttttttatataaatcaaggcgttgtttgggttcataaagcaattgattggatacaatatcattgctttttgccacccatccacagtcttctgatttagtaaaagtactcggaggtcatggcgaagatgattgaagcactcggctttggagtaatctagttcgagagaagattatcttttcgact

SEQ ID NO: 15517 - DNA, 408 bp, Oryza sativa
  Clone ID: PAT_MRT4530_21353C.1
cccgctctcgtccgccttctggctgcccgccatggctgctggcggtccaccaccaccacctcctccctcctcgcctcctctccgtccacccgcagcctccccgcctccgcctccggcgcccgctcccccgccgcgcggccgcgtccggcgcagcggccgggacgtcgtcgtcgaccgcggccgcgccgccgggcacggacgccgcgctgcaggagttcaggcgctgggtgtcgtcccacggcgcggacgcgggggccggcgcggcggcgcccgccgccgtccccgagggtggcctcggcctcgtcgcggcacgggacctgccccgcggggaggtgctcgccgaggtgcccaagaagctctggctggacgccgacgccgtcgcggcctccgacctcggcggcgccgtcg

SEQ ID NO: 15518 - DNA, 2163 bp, Oryza sativa
  Clone ID: PAT_MRT4530_21354C.1
atggcgtcgtttctttcccgcgccgccgccgtctccctcctcgccatcgtcctcgtcctgactgccgccacgtccacctcccctgcggccgcggccgctcggttcccggaggaggcgcgccccacgaggtcggggtacctcaacgtcacgtccaccaactcactctacttcgccttctacgaggccaccgacccggtcaccacgcagccggccgccgtgccgctcctcgtttggctccagggcggccccggctgctcctccctcatcggcagcttcgccgagctcggcccctacctcctcctcgactccacctccgccctcgcccgcaacgacaaccggtggaaccgccgcttcggcgtgatcttcatcgacaacccgctcggcgccggtttcagcgcgcctgcctccggcgacgacatcccgaccgacgagcgcaccatcgccgcgcacctcctcgcggccctgcagtcgttcatggcgctcgatccggccttccgcgcgcgcccgctgttcctcaccggggagagctacgccggcaagtacatccccgcggccgcgtcgcacatcctcgacgccaacgccaagctcacggacgaccgtagggtgaacctccagggcatcgccatcggcaacggcatgacgcacccggtggcgcaggtgaccgtgcacgccgaccaggcctacttcgccgggctgatcaacgccgagcagaaggccaaggtcgaagaaatgcaggacaagacggtaagcctgatcaaatccaagaagtgggccgcggcgaggagggagaggaacaggatcatagcgttcctcaagaacgccaccggcgtcgctacgccgttcaactacgcgcgggagaaggggtacccgacgcggccgctccgggacttcctcaacaccggcgaggcgaaggcggcgctgggcgcgaggagcgacgtggagtgggcgcgctgcagcgaggccgtgtcggcggcgctcgccgacgacatcatgaggagcgccaggggcgacgtggaggccgtcttcctggcgccggatggcgtccgggtgctgctgttccagggcgtgttcgacctgcacagcgggccggcgtccgtggaggcgtgggtgagggagctggcgtggcctggcctgggcgcgttcctcgccgcggagcgcgccgtgtggcggctcggggacgagcagctcgccgggtacgtgcagaggtcgggggcgctcgcgaatgcggtcatcgtcggggccgggcacatggcggccggcgacaaccggccggcggcgcaggcgatgatcgagggatgggtgttgcagacggggccgttcgacggaagcgcggccgtcgccgactgccgttggatcgccctcagccgccgccaccgcctccggatccactcgccgccgccaccgctgccgccggatccacccgacgccaccaccgccaccgaaggcagaagagaggcggcggccgtcaccgacgccaccaccaccgactgccgtcggatccgctcttggccgccgccaccgctgccgccgccgccaccgctgccgccgccgccaccgccggatccacccatcggaaagaccgcgccgcgccagcacgcacgccctggcacgtattaccgtcgcccgcgccgtgctcggccctcgctgtcgcacggccacactggcgccgtccgatcgttcctctcattgctcaaccgctgcacatggcaaggaaccatgaaaaaggaggaagatggaaaaatgatgaaaaaggcgctcatggacgtcgcgcacgccgctaccgcatggttgaacggcaccgtcgcccggcccccacagccacacatgcacaaagccatcgccctgtcacgcctgcgcgaacccatcgcatccaatcgcgccacagttcccggttgcatccgcgcccgccgcatccagccgcgtcgccatgcccggcgccccggccgtgctcgccctccggccgcttgcagcgccggccactcgcgacgacggccccccaccatggccacccgcccgctccgtcgctcgcacagcaccagcatccgtagcgtcgactgtccgcctcgcccctggtgtccactggccgccgtgactccccacctcgccccccctcccccctacgcgaacagagctggcaggtgcagctggagcggcgtcacgtga

SEQ ID NO: 15519 - DNA, 470 bp, Oryza sativa
  Clone ID: PAT_MRT4530_21355C.1
atgcaaatgctgatgagcgtctttgtcattatcattggttgctacactgctattggctggatcaccgacatcgtcatcttcatcataggagttggtacaatgcatcttaaaaggtgtcaaacagtaaagctttatatagctgccccgctgactttttaatatagtcatggtgctgtttgggtttttaagcaattgattggatacaatatcgttgctttttgccacccctccacagtcttcagatttggtaaaagtactcgggagaccatggcaaagatgattgaagtactcggctttggagtaatctggttcgagagaagattatcttttcgactgtgaagctagtgttgcaatttattttcgtacgttcacttggaattcctgtgttgatatttctttggctagtattatgttctatgtatcttcagaatatcatttaatattttggcaaatcgttctttggtgatgca

SEQ ID NO: 15520 - DNA, 345 bp, Oryza sativa
  Clone ID: PAT_MRT4530_21356C.1
acgcaaacgctgatgagcgtcttcgtcattatcatcggctgctacaccgctattgattggatcgccggcatcgtcatcttcatcataggagttggtacaatgcattttaaaaggtgcccagcagtgaacttttttcatagctgtcctactgacttttttatatagttaaggcgctgtttgggtttataaagcaattgattggataaaatatcattgctttttgccacccctccacagtcttcaaatttggtaaaagtactcgggggaccatggcgaagatgattgaagcactcggctttgcagtaatctagtgcgagagaagattatcttttcgactgcgaatgt

SEQ ID NO: 15521 - DNA, 390 bp, Oryza sativa
  Clone ID: PAT_MRT4530_21357C.1
atgcaaacgctgatgagcatcttcgtcattatcatcggctgttacaccgctgttgactggatcaccgacatcgtcatcttcatcataggagttggtacaatgcattttaaaaggtgccaaacagtaatactttatatagctgcccgctgacttttttatataagtcaaggcgctgtttgggttcataaagtaattgattggatacaatattattgctttttgccacccctccacagtcttcatatttggtaaaagtactcgggagaccatggcaaagatgattgaagcacttggctttagagtaatctggttcgagagaagattatcttttcgactacgtacatgttgttgtgttgacttgacttgtagttgactaggtattagctgctt

SEQ ID NO: 15522 - DNA, 622 bp, Oryza sativa
  Clone ID: PAT_MRT4530_21358C.1
gtggatccccgggctgcaggaatcggcacgagggcctaatggtgcatacttctgtgcctcaaggactgttgtctttgaaccattgatggatatctatctgcatccattgttttaatccttggaagcaccatgcgtggcctaaatagtgtgatctgaacagtgagcatctaagctagccatggccctcccaagcatttgccatggtggaagctgcagtgcagagtcagcatgtggtgttgttgctgggccactgttggtgaccgtcctaccaccttttgcatgcagcagcagccagcagcagcttcggatgccggtgcttgggtctctaggatggagttatggccggggggatcacctcacctgagctagtcatgtgattcagatatgggagctccttagaccaaaccattttcttgtttcacttggccttgtgtttggttgtcccctagcctttttttggcatgtgagataaacattcagaggtggaacatggtttattttgcaggaccacggcgatgctgattttttttctcaatattaccggtgcatttttcttgtttagtttttggtacaaaagaaaaaaagcttacgttgcatgttctgttttaaatttgtatgcttt

SEQ ID NO: 15523 - DNA, 335 bp, Oryza sativa
  Clone ID: PAT_MRT4530_21359C.1
acgcaaacgctgatgagcgtatttgtcattatcatcggctactacaccgctattgattggatcgccgacaacgtcatcttcatcataggagttggtacaatgcatcttaaaaggtgtcaaacagtaaagctatatagctatcccgctgacttttttatataagtcaaggtgctgtttgggttttcaagcaattgattggatataatatcgttgctttttgccacccctccacagtctttagatttggtaaaaagtactcgggagatcatggcgaagatgattgaagcactcggctttggagtaatctagttcgagagaagattatctttttgact

SEQ ID NO: 15524 - DNA, 398 bp, Oryza sativa
  Clone ID: PAT_MRT4530_2135C.1
tttgttgtttatcaaaggcacgagagttaccttcctctaacatggggtaagaccatgggataaaaaaatcagttgaagttaactctgcaccacatcacatacgagagatcgctatactaagaccccaatgtctgcgactaactgataccgtgtcaccaaacacgactgacaatatttcttgagggtattatgacacgatcccgccggcactaacgagacagcaccatggatgtcacagagagaaacatagtgtgccccactagaccccctcgctgggttgttcttataagcaaaggattaaacccactacttacactacgacgacggctccatttgtccaatgagcgcgctaggggaatttaagccttttgaccatgcattcttttagccagataaaa

SEQ ID NO: 15525 - DNA, 912 bp, Oryza sativa
  Clone ID: PAT_MRT4530_21360C.1
atgctgcttaatccggcgtcgagagaggtggccgcgctggacagcatccggcaccacctcctggaggaggaggaggagacgccggcgacggcgccggcgccgacgcggcggccggtgtactgccggagctcaagcttcggcagcctcgtggccgaccagtggagcgagtcgctgccgttccggcccaacgacgccgaggacatggtcgtgtacggcgccctccgcgacgccttctcctccggctggctccccgacggctcattcgccgccgtcaagccggagtcgcaggactcctacgacgggtcctccatcggcagcttcctcgcgtcgtcgtcgtccgaggcggggacgcccggggaggtgacgtcgacggaggcgacggtgacgccggggatcagggagggcgagggcgaggccgtggcggtggcgtcgagggggaagcactaccgcggggtgaggcagcggccgtggggcaagttcgcggcggagatcagggacccggccaagaacggcgcgcgcgtgtggctcggcacgttcgactccgccgaggaggccgccgtggcgtacgaccgcgccgcctaccgcatgcgcggctcccgcgcgctcctcaacttcccgctccgcatcggctccgagatcgccgccgcggccgccgccgccgccgcgggcaacaagcggccatatcccgacccggcgagctccggctcttcttccccttcatcctcttcctcctcgtcgtcgtcttcctcctccgggtcaccgaagcggaggaagagaggcgaggccgcggccgcgtccatggccatggcactggttccaccaccgccaccaccggcgcaggcaccggtgcagctcgccctcccggcccagccatggttcgccgccggtccgatccagcagctggtgagctaa

SEQ ID NO: 15526 - DNA, 624 bp, Oryza sativa
  Clone ID: PAT_MRT4530_21362C.1
cggcagctatggctctgagttgagccctagcccgggatcactatatgccataggtgcggctctaaaaaagaccaaataaaataaaaataaataaaataaagcagatggagaaatgtaccctggaccagggaaatagcatgaacgaagccttggcaactgaactgagccagtgaggagcccgaagtaggtggaacaaaggttgcgatgttatgtgtgatttcatttccacaaacatcatcaggctctttatgatcaatataatgccctaggtgttttttcctgcccccttctttcttctccatgcgccaatctgtcatactctagtctgaaaaaatatcctaaataccacatgaaaagtaatcaatgtcccactcaaaagctttccatggctcgccactgcctgccaaatcccacaggtcattgaatccagatcctcccaccctgtggcttccttggagatcagagggtacttccagagttggattgaagggcagttggatcaaggggggtagcaaactggggttgaatctcagcttagccatgagccagctatatagacccctaaggaacacagttcaggttcttcacacctcaaacccatgcttcatagggttgttgagggaa

SEQ ID NO: 15527 - DNA, 442 bp, Oryza sativa
  Clone ID: PAT_MRT4530_21363C.1
ggatggtctacttgacgctttcatatacgctctctggcgctagcgtatgacctgcagatggtctgggtcctgtcagcaataacgactggaaatgttactgcgtcttagattctccgaatagcactgttgcttatgtatacattaatccatatacgataccatctgaaacgcgctgaagggctggagataaatagcggaatgtgtagaaggcctagactaggtcgctgtgtgagacctatcaggatttctgttgcgcatatggtgtgttatactaccaccagcaggtgatgataaaccaacgagttatgacctctacctgagggagaaactgatgtgcataaggcatgatcatgcgcttgataacatgtttagaacacacgatgatggaagcgtccatggtctatgctgactacaacgggatgatgtataactctcatttcaa

SEQ ID NO: 15528 - DNA, 362 bp, Oryza sativa
  Clone ID: PAT_MRT4530_21364C.1
gttgtttttttttttaagcgcaatttattacatttgaacagaaagcattgaaagaaagggaccataaccccctaggtggcacgcaattaacacaccaggaaactcggtgtatggatcacggggcacaaggtacaagggactgacaaacccaacaagcctttttacctggtacaggaccaataaaatataggaagctgcgaaaacatatatggcgtgcaaaagaaacacttgcgcggaattgcagatggagcctgaccgcctccaggaaggcataagaggttcagcgatgatctaagagagctaaaatggggggatgcttagaatacccagcataggaagccctaattgcacccaaggtgccg

SEQ ID NO: 15529 - DNA, 2548 bp, Oryza sativa
  Clone ID: PAT_MRT4530_21365C.1
atgcgacgggacgacgccggcgggggagggttcggcgacctgttcgactccgtgcgccggtccatcgccttccgcaccagcacggccccggagacgccggggcctctcgggggcgggggcgggatcggggtacggatcagctcgtgcctccggaagtcgagggggatgggtctgctcgggctcatctccaagagcccctcgccgccgcgccgcctgctgccgccggcgcccgagttcagcggtggcggtggcggcgggggaaggggagggggagggggagaggagagcccgcagatccggtggcgtaagggcgagctgatcgggagcggcgcgttcgggcaggtctacctcgggatgaacctggacaccggagaactcctcgcagtaaagcaggttttgattgggagcaacaatgcgacgcgggagaaagcccaggcgcacataagagagctcgaggaagaagtgaagctacttaagaacctgtcacatcccaacattgttaagcggtaccttgggacagtccgggaggaagatactctgaatattttgctcgagttcgtgccaggaggttccattcagtctctccttgggaaactaggttcatttccggaggcagtcattagaaagtacacaaagcaaattttgcaagggttggagtatttgcataacaatgcaataatacatagagacataaagggagcgaacattcttgttgataacaaaggatgcattaaacttgctgattttggggcatctaagcaagtggcaaagttggctactatcacagccgctaaaacaatgaaagggacacctcactggatggcacctgaagtcattgttgggagtgggcataacttctctgcagacatctggagtgtgggatgcacagttattgaaatggctactggtaaaccaccatggagccagcagtaccaggaggttgcccttctatttcatgtcggaaccacaaagtcacacccgcctatacctgaacatctctcccccgaggccaaagattttctgctaaaatgcctgcagaaagaaccagagttgagatcgacagcatcagatttattgaagcacccatttgttacaggagaatcggagaacctgcagccactcaattgtgctgcacagcaggaaacttgcgtaaatgagcttcctgcacatgatgtgtccagtggcttgggtttaaatcattctgtcaactggcccactatcagttccaacaggtcttcaaaaatcaaacccttgtgggagggtagctgtgatgaggatgacatgtgtgagtttgctgacaaggatgactgcccaggctgttggatctagctacaatcccatgtctgaaccatttgataactgggaaagcaagtttgatgcgagcccagagcaaacttctcatcaatcaatggaatttggtggattagctaaacatgctgaaagcagcatgaccgaaaatgattttacttttccttgcgaaggaagttgtgaagatgatgatgtacttacagaatcgaaaataaaagcatttcttgacgagaaggctcttgatctgaagaagctacaaacacctttatatgaggagttctacaacacggtgaatgctgggaattctcaggtagctgaccatacttccaacggaattttctcaaatagtcccaaattgccacctcggggaaagtcaccaacgagtaagatgagaggaggtgcagcagcagcatcaacttgtgataactcaaataatacgaggcctgaaagctgcagcaaccaattatcagaagacactgtacagagcagccgaattttgagagaaatagcttctccgcaacttgatgagttaggaaacaaaatccattctgatgtccaagatagcccaagtgtgagcttcgctgaaaggcagagaaagtggaaagaagaattggtccaggagcttgagagggaaagaggcaagaccggacatgtccatggtcaccatggagtaactaaaagttcaggcgtgacgtcatcctcaaggtctggtccaggattgcacacggtgatagtacctagggtttcccaaaccgtcggggccgggattaccgtgcctcggcggaggttactgcggtttttctattaccgtacccccgcgttctctttaagaccaacttgttttgtccgcaccgacgctccgaactctgacgacgcgtccaagaaaaacgacctcgccgagcgtgctcatcacctccagtccaccttggaaggacgagcattattcaccggaacacttacaacaatgttgatgaggaaaactaagtttaagtggatgcggaacaagatatatcttccaaggctctataactggcctgagaccatccatgttgatcttgttactaaagacggtgaaacaacttttgtaccaaagttacaaggtgcaaataccatggaggatacgtatggcatacatttgtgttcatacgaactaggccaacaacaagaagcaagggagttttggggaacagagagagtagagtatagtatgtgggttgattttggtggaaattatgtgtag

SEQ ID NO: 15530 - DNA, 193 bp, Oryza sativa
  Clone ID: PAT_MRT4530_21366C.1
aacaaaagaatctgtgcatattgcacaaaggggacacaaacaggcaaactttaacagaatatatacagctccccatgcaaactcctgtcatggttacatgcctacaaggttacaacactagcagatactactggtcggtgatacgctacatgcagatgaacggtctggctacacaataaaaaatgttagcctg

SEQ ID NO: 15531 - DNA, 1428 bp, Oryza sativa
  Clone ID: PAT_MRT4530_21367C.1
gggtaactcatcacgtcacggacatatgggcaaaatcatctgcatattacgtagatgcgatgtatgcattgtggccaatggggggtgcctggctgtgtacacatctttgggaaaactaccagtattcactggacaaagaatttttggagaaaagagcatatccattactggagggatgtgcaatgtttttaattgattggttgatcaagggaccaggagactatttggaaacaaatccatctacttctccagagcatcctttcatagctcctggtactggtggtcaccttgctagtgtgagctattcaactacaatggacatctctattatccgtgaagttttcctggctgtcatttcgtctgcagaggtcttgggaaaatctgatactaatctggttgaaaggatcaagaaggcactcccaatgctccctccagttaaaatttctaaagatggcacgatcatggaatgggcacaagatttccacgacccagaagtccatcatagacacctgtcacatctgtttggtctttaccctggtcatactagtagccatgcagaaaaatcctgaggtttgcaaagctgttgccaatagtctccacaaacgaggggaagatggccctggatggtcgaccacatggaagatggcactgtgggcacgccttctgaatagtgagaatgcatacaggatgatcctaaagttgatcaccttggttcctcctggtggcaaggttgactttgagggaggattgtataccaatctttggacgctgatctctacttgctaccagcatcaccatgggtgctctggagcagcatttcagcaattgcagctccagagcacccatggtgatgctgatctctacttgctaccagcactgccgcgcgaaaagtggcccaaaggctacgtgaagggattgagggctcgcggcaatgtgactgtgaacatcagctgggagaaaggggagctgcaagaagcaacggtgtggtctagcaacccaaaatgcaccctgaggctgcactacggtgaacaagttgctatggtgacagttttagggggcaatgtttacaggttcaatgggggtttgcagtgcgtggagacatacatggccccttgacaattgaacgccctctgcatttcagtgtttacggtttttcatcgttttagagtattttgtgtggacatgatgatgaattgatgcgtgcattggaataatttgcttttgtaaaagatggtgcatgctcttcaagatagtcaaggagctgtgcatggatgtctctgctgtatatggctatgatgtagtattgatttctggtgtatggcaactttatctgttgtatatatgtctaccataatcttttactaggatttagtagaaagaatgtgactatttcagttatagattacctttttcaaaaaaaaaaaaaaa

SEQ ID NO: 15532 - DNA, 519 bp, Oryza sativa
  Clone ID: PAT_MRT4530_21368C.1
taaggagtctgcattctatctaggcatcactaccggaggatcattcatgcaataaactccatctgaaggaaaagtaagtctagatcggattctagaaaatacttccttcatggatcaatgtaatgaactcctcccggaagcatcagtgtctaggattgaggaacctccgacacccgaatcttagtctgaaccatctacctcaaccgattcggccgaggaaccttccgccgagccattgcctgttgagaacgaagaaattcaaactccgggatgtgctccaacgttcagggatgatctttatgaagattatggaaacaccttgaactattttagtaaaaagaaaccacctattcccttgccacctcctgatccgatagaatatcaatatctgaaagaaacggttcgggagctgacatccatcatgagtgacgaatggttaaaggaggaaaatgttgatgcaaaaaacgccgtcgcccggccctccaccagccctctgctagccggccacgccgccgcctc

SEQ ID NO: 15533 - DNA, 172 bp, Oryza sativa
  Clone ID: PAT_MRT4530_21369C.1
ccccgccgtctcagagcccttccagaagcttccggagtcccgcgccgccgatctgatcgccgccgcgtgccatggccgacgaggcgaaggcgaagggtaatgcggccttctcggccggccgctacgaggaggcggcgcgcacttcactgacgccatcgcgctcgctgcccgg

SEQ ID NO: 15534 - DNA, 458 bp, Oryza sativa
  Clone ID: PAT_MRT4530_2136C.1
cttaatttaataaaaaaactcgatctcttttcttctcttgtcttctcttgttgcggccaagggggagaggaaggtccaggccgaccagatggtcggcggcattgggcacaagtcgcagctggcctgggagaggaacatggcgaagaacaaggtcgccctggtgagccagctcgaggccaacatgaaggccacgaccatccagtgcaagatatgcatgcagactttcatctgcaccacctcctggaccaagtgcaaagagcctgctgctgcgatgcttcccaatagcgacctcaccgcgtgcttgcctcacctccagaaatcctggcggtggcacttttctgctcaatccgatgagaaaaagagtagcttccatattccactatgttaatctttgatgaatgactggttgccctatgtatgggtctaaacttcggccagctgccgcttgctctttggtt

SEQ ID NO: 15535 - DNA, 130 bp, Oryza sativa
  unsure (1)..(130): unsure at all n locations
  Clone ID: PAT_MRT4530_21370C.1
gatcgaaacatgtnctnttattggggagtagcatttatactgacgaagcaacacattattacaacgccaggaagtcactaattatgcgctatcacgtaaatatgaatcgatttttttcgcataataacag

SEQ ID NO: 15536 - DNA, 281 bp, Oryza sativa
  Clone ID: PAT_MRT4530_21371C.1
gcacgaggcggcacgaggcgccatttacggcagcaaccgcggcggagagagacgaccgaggagagagagagagagagagagagagagagagggagagctccagtggtcgccgccggcgaggaggagcagtgaatggtgcggcgcgtggggttagccggcgctcgtggatcgatctgagcgagaggggagctgctggagacagtggtgcgtgcgtcggcggcatggcgttggcggcgaaggagaggaagctgagtaggcttgggagtaagggcagtggcgga

SEQ ID NO: 15537 - DNA, 384 bp, Oryza sativa
  Clone ID: PAT_MRT4530_21372C.1
gggaaaaaaaaaagcagaaacccccggaaaccttggccacccaacccaattaaaatggacaattccagaacaggtaagaaaaattccgtttttttaaccccagaaacccgaaactttggttcccccaaaacgggaaaaagggggggaaaaagggaacaaatccttggttttatggggggggtttacaaaaaaaaaaaaccctcccgggggggccggaatttggcaccctatcgggaagcaggaacgggggtttaagggggggactttgggtccgggcccagggacccccaccccacccccttgggggttcggaacctttgggcgggatttacaaaaccgggtgggggggggacccctccacaggggcccgccggacccgggggt

SEQ ID NO: 15538 - DNA, 231 bp, Oryza sativa
  Clone ID: PAT_MRT4530_21373C.1
ctattgttgagtccagctccatatatcaaccttccacaaggccaccaatggtgctgctgacactgctaccttcttcatcgggaccatcagcgtcaccccgacctccatcgctactccccctcctctccaacctccgctgctactctccctcttcttcgacatccgccacttattcctctcctccccgacctccgctgctaccccttctatcctcccgaggtccgccgtcat

SEQ ID NO: 15539 - DNA, 1805 bp, Oryza sativa
  Clone ID: PAT_MRT4530_21374C.1
tttttttttttttttactagtatagtttatatctaatagtatatatcttctctaaagaaaacaaacttcatgtaataaagtaacaaccactactactaatcctgaatccctctcccttctctatcactctatctgcaagcatatatgctatccaatcttgaaagaaattctaggtttaaactaatctccaaagaataaatgagatatatatataggttagctaagagactacagggagagcagagagagtcttgttgcgaagtgatcatgaagccgcgtccgtctccggcggcggcgtcttccggcggcgttccggcgaggctccggccgcacctcacccggctcaccgtgttcctgatcgtcttctccgccgggtactcggttggcatcatgtcgtcgtccatccggccgcctgcgagcaagccgtcgcagacggtcatacggccgcgcgccgcgcacctctccggcaccgcctcctccacggatgtcccggcgagcaacggcagcgctgcggcggcggcgaactacccgcgctcgccgccgcacgatctgttccggttcagggaggagtgtggcgaggcgatacccagcgacgccgtcgtgcggacgctcctcgacaagctgttcgacggggagagcccgtacgagagcttcccgccgccgcacaccgccgcgctgctgcacccggctgcggcgaggccgcgcgggtggggctcgaccggcgcggtgttcgcggagctgatcgaggaggtgcggcccgacgtcatcgtggagctcggcgccttcctgggcgcgtcggcgctgcacatggcggccgtgtccaagaacctctcgctgtccccggccatcctctgcgtcgacgacttccgcggctggccggcgttccgcgaccgcttccgccgcgacgtcccgccgccgcgccacggcgatgcgctgctgctgccgcagttcatgtcgaacgtggccgcggcgggcgccgacgcgacggcgcgggtgctcccgctccccttctcgacggcgtccgcgctcgccgcgctctgccactggggcgtctacgccgacctcatcgaggtggacgccggccacgacttccactcggcgtgggcggacatcaacctcgcctgggccgtgctccgccccggcggcgtcatgttcggccacgactacttcaccgccgccgacgaccgcggcgtccggcgagccgtgacgctgttcgccagggtgaagggcctcaccgtccggccgcacggccagcactgggtcctctccccgaagccgccgctccgccgcgacggccggtgactcctcgccggcgaaaagctcgccgtcgccggcggggccacgcactcggcgacgtgacgtcggcgcccgacacgtgttcgtctcaaaaactcccaaccaccacccttttttcaaagctccattcttacacaagaatcaattcaagaatttggttcttctactttgtactgtgaatttataccaaattcatacacacgagatcatacgtactacaatgtattcaggtgagcagatgacatgttcttgtcggtattacttgtttcatttttttttgtttataactacctaatttatccattcaagagtacattaatttcaatcaaacaattaggtaagttaaattctagtgagaccaagtatttgccgttggtttccgtctctctgaatacgtgggtattaacgcgtggtgcatgtacatagcggtgcgcgtgcgtatgcgtctttcgtgtaataaaaaaggtttaaatcttttgctatgaatgtatcttgatcagtatgggcac

SEQ ID NO: 15540 - DNA, 438 bp, Oryza sativa
  Clone ID: PAT_MRT4530_21375C.1
atggaggatttgcatgactgggaatgccgctttacaccaaggaagctagccagtctaaacaagtggtcaagcagagctgggttgtcaccgatggagctgcagagctgcgccggggaagtcactgataaggtcaccgccatcgcttggggcggccgaatccgctacctccatcttgccttcggtggtagcagctgctggcgatatgtagtggggctaagagaagggaacaagaacgtgggggccatcgtcaaaggattccacgatggggtagcgatgggagtcttctccttggtcgatagccgggaggcggcggaggctccaacagcttctcatggtgatggtctggagagccagtgcgggggaagtcatgcagcggtgcagggggagcataaccttgagccttgggcagaagcatgtgtatgctccatagcgttctga

SEQ ID NO: 15541 - DNA, 801 bp, Oryza sativa
  Clone ID: PAT_MRT4530_21376C.1
tgcctcgtgcacgtcggcctcgtctgctccgactcccgccgccgcccggcccatgctcggagctccgacgtcgagtccgccgacggtgacgccgcgggcgctgggaccgacagctcggacagcgacgacgacgacgacgagggtagggagcagaggagcagttttgcgaagcgttgtgagtcgataaacacgatggtgtcatttctgtggtggataattgggttctactgggtggtgtctggcggggatgtgctcgagcaagatgctccaaggctgtattggtattgtggccctaaacctgtacccatcactgactactttatgatcgtacaatcaaatgttcacatgctaagtgttgtttttctagcatttgatgtcttcttcgctgtgttttgcgttgctatggcctgcttcatcgggatcgcattgtgctgctgcttgccttgtgtcattgcaattctatatgcactggctggccaggagggtgcatcagatgcggatattggctttcttcccagatatagatattctgatcccagtgaggatggacaaaaaggaactgacgagggagttatgatccctgttctgaataatagcggaacatcaaccagtgaacgtattctccttcatgaggatgctgaatgctgtatctgcctctcatcatatgaggatggagcggagctatctgccctcccttgcaaccatcacttccattggacatgtattaccaaatggctacgcatgcatgcaacctgtccactttgcaagtacaacattcttaaaggcagtgaaagtgcatga

SEQ ID NO: 15542 - DNA, 387 bp, Oryza sativa
  Clone ID: PAT_MRT4530_21377C.1
atgaaccacaaaaccggacattcttcacccccaactatgcaaaccggacgaattaccctcctcgaaccaattcagagcggttttgtccaacgtggcgcacatgtggcaatccgcgcgcacgtgaggacggtcggcgaggacggcgcggggacgggcggtcggcatgggcggtcggcgacggaggaggcatcgagcgcggcggtgacaaggcgaggcagcggtggaggcagcgagcgcggggaggcaagcggcgggagtgatggggcaaggcagtggaggaggcaaaaggcggcgggagctcgcgttgctcgaggcgaggtggcggtggaggaggaggcgagtggcggcggggtgtggcgaaggaggcagcggcagcggtggaggtag

SEQ ID NO: 15543 - DNA, 1757 bp, Oryza sativa
  Clone ID: PAT_MRT4530_21378C.1
gagaaagggacacgcaaacttcaggcacaagaaccctccccttaagcttacacattagctaccatcctgttgcttaccttgaaagggtcacatactacctatttgcatcaaaggataggaagaaccaaccaaatcttagctttgttcctagaattgatcgtcttctcttcttgctaagtggttagtaatatggcgcaatgcggcggcggcgacgtttcacgacaccggaagggtcaccttgacaccgtcgagagcctctgccaggggctactcgacgacgtcatgctcgacgacgacaagtgccgcgccatgttcggctacctccaggagtggcaggacctggcaagcatgtgttacgggagcttaggcggcgagccgccgctggcgccggaggccagcaacggcagcggcagcagcggcggcggaggcagcttccggaagaggagaccggacgacgcaaagggtgagagcaacagcatctgcaagaggcagagagggaagcagcaacagcagcagcagccgtgtcatcccgatcagatggcggcggcggtggggaaaggaaggccggagagggcacggccaggagccaagaagaaggcggaggtggcgtcacccaaggattccccggcgacctcggcgtcgacggtgaccgccggccagaagaccgactacatccacgtcagagcccgccgtgggcaggccacggacagccacagcctcgccgaacgggtgaggagggagaggatcagcgagaggatgaggtacctgcaggagctggtgcccggttgcaacaaggtcaccggcaaggccggcatgctcgacgagatcatcaactacgtgcagtccctgcagaagcaagtcgagttcttgtccatgaagatcgcggcatcaaacccggtggtgaacttcaacatcgtcgaggacctcttcggccggcagctcagccaggcggcgtgcaaccctgcggctctgccggccatggcgctgccgatggcgcaggtcgagccttcctgcctccagatgagccccttgcagcagatgcaaacttctgcaggatcctctggctatgggctggagatggtcgtcagtaaccagtactcaccaccgggcgggccgatgtcggtgccggccggtgcatcggtggagccatgcctcaacgtgaatggagctgcaggttgggacattggctctcacggtttgttcagtggatttgatgcaccgtttcagtcagtacagagtgattgtttgctagacaatctcaaaatggaaatgtaagaaggaatgaaggaaggagaagtccgcattccaagagttttaaccacatcaatatttgtggctgaagattctttattcatagaaactgtactaatgtcatcaatggcaatacaagtacatttgtgtgtttatatttaccttgacaactccaccaacttctaaacaatccatcatcccgcgtctcgcctcctgccgataccaatccagtacaaatatgctaacaattcacaacactacgtataaaattacaataatgaaagcacaaaccataccgacgcaccatcatctgaacctatcttcattcttccgcctttaaagcacagacgtgttcaccagcttcttgtgctggaacaatgataacgggggctgctttacagttgtggaagcaatattcactgacacttccctgaacacactctgaattagacctcttccacgagtggccagaatgactgtgaggctttagccgctctgctctcgga

SEQ ID NO: 15544 - DNA, 522 bp, Oryza sativa
  unsure (1)..(522): unsure at all n locations
  Clone ID: PAT_MRT4530_21379C.1
tttcaaatataaacacacaaatgtacttgtattgccattgatgacattagtacagtttctatgaataaagaatcttcagccacaaatattgatgtggttaaaactcttggaatgcggacttctccttccttcattccttcttacatttccattttgagattgtctagcaaacaatcacctgcaggagaaagcagaagctggattcagtcacttaagttaaatataaaagggactctttcaagctttaacactttcatcactcacaggtacaaaaacttggttaaggttcagcacaaagtaacctgcaagcttgattctcagaatcagttactcactctgtactgactgaaacggtgcatcaaatccactgaacaaaccgtgagagccaatgtcccaacctgcagctccattcacctgcagcagcatacagaagcccccctaagttcagaaatgcagttactagaaaaccacacaccccgtcaaggaggactnaattttacagccacctacgttgaggcatgg

SEQ ID NO: 15545 - DNA, 1641 bp, Oryza sativa
  Clone ID: PAT_MRT4530_2137C.1
atggctggtcacaccccgaatcctctcttcctcctcctcttcctcggatacctcctcttcgcggcggcgcagccgccgctgacggtcaccgtcggcctcatcatcgacggcggctcgccggtcggcaagatcgccaacaccaccatccccatggcgctcgacgacttctacgccgccttcccgcggtcccccgcccgcgtccgcctcctgcaccgcgactcccgcggcgacgtcgtcgccgccgcctccgccgcgctggagctgatggaggggcggggcgtgcgcgccatccttgggcctcagtcctccgtggagtcggcgttcgtcgccgacctcgccacgcgggcggaggtccccgtcgtgtcgttctcggcgaccagcccgtcggtgtcgcccggcggagggaggttcttcgcgcgcgccgcgctgagcgacgcggcgcaggcgggcgccatcgccgcgctcgcgaggctcttcgggtggcgccgcgtcgtgccggtctaccaggacgacgactacggcgccgccttcgtgccgttcctcgtcgacgcgctcaccgccgagggctccgaggtcccctaccgctgcgcgctcccggcgggggccgacgccgacgccgtcgccgccgcgatgtaccggatggagtcgctgcagacgcgcgccttcgtgctgcacgcgcgcccggacctcgccgggcgcgtgctcgccgccgccgaggccgccgggatgatgggcgagggcttcgcgtgggtcatcaccgacgggctcacgggcctcctcggctccatcaacgcgccgcagggggtgatcggcctcgccccctacgtgccgacgacgccgcggctgcgcgacgtcaggcggcggtgggtgcgccgcttcatggccgagcacccggccgccgacgcggagcacgccgagatgggcagctacgccgtgtgggcctacgacgccgcgtgggccgtcgcgtccgccgccgaacacctcaccgccggcgacctatcaccgccgcagggtgggctcgtggggggcaagggcggacccaccgacttcgccgggctcggcaagtcaaggtccggcaagaagttcctcgaggcgatcaccagcacgacgttcgacggcctcggcggcaggttccagctcgtcgacggcgagctcgcggtgcacgccttccgcgtgctgaacatcatggacagagggaaggagaggagcatcgggttctggaccaaggacggcgggctgacccggcacctcggcgttggcggcggtggcgggggcgagctcgcgccggtgatctggccgggggagtcgacggtggtgccgagggggtgggtggtgccgacgagcgcgcggaggctgcgggtggcggtgcccggcagcgtcaaccccgggtaccgggcgatcgtgcacctggacgtggacgcggcgacgaaccggacgaccgccggcgggttcgtcgtcgaggtgttcgaggcggcggtgcggctgctgccgtacgcgctgccggtggagtacgtgaaggcggagtcgatgccctacgacaagctggtgcagatggttgctgatgggttctcggtgatcagatcccatgagatgggtaatttatgggcagataatgatctggcgtcgagaaaattgacttag

SEQ ID NO: 15546 - DNA, 404 bp, Oryza sativa
  Clone ID: PAT_MRT4530_21380C.1
tcgtccacgcgtccgaacaacatctacgtgcttgatgcggtgacggcgaccatggaggaccaccatcaagtgtacagagcacggagagcaatgtttagccaccaataatctatccgacatcctcactcacgatatgtccaacattgacgaggcgccgatgcgctggccgcggcagcggccagagccgacaacaaacaagtcatggaggattgctggcggcagatcgccggcggggtcgaccgctggcgcatgagcggcgcgctcgatcacatgctgaacagcatctacagggagctcgcggccatcgaggccgcgcactccatggacgaggcgttcaccatgtgacggagaggggactagctgcgcgcggcggcgagcatcgcggcgatctgcaacgaggacat

SEQ ID NO: 15547 - DNA, 639 bp, Oryza sativa
  unsure (1)..(639): unsure at all n locations
  Clone ID: PAT_MRT4530_21381C.1
cnggggnggcaggacttcttgcacgagctccatgccnaccccngcaacnaggncacatagttgacncnaagacnngtncntngatctcncaaaaacnggcaatgaggtccnactngcngcatctnctnatgtcananatannnaccgngtcgncgagaatatcannaagcaaatggtatccactgntattgtttcaaacaagcagttcancnacaactgcngtatcgacgagagtcnngaacactgcagaagtncagcaaatacaaactaacgccatagctcncaagttacaaaagacgtnnagatttnacacccgnntntattgcnagcncnnanttntagatcaattcnaaanttcngtntcaagcntcccgcctntaatcgcgattcnnattcnantctatgcnnnattttggttacgnaaagaactcnngtctctctgccnttnttgtctcggggtggntcaaactattnggaggcggctgnntaaggcnacgggcgcncanntncangtnnaanntggaaatcncnganaacctgcgggggagntntggtggngcngngggagcgnggaagcccccnctgangntggtcnggncccggncaggnnaaanccccgaggggggggggcgggtgccn

SEQ ID NO: 15548 - DNA, 280 bp, Oryza sativa
  Clone ID: PAT_MRT4530_21382C.1
aaaaaacgaaggtgcgcgcgccataaaaaactgtggctccggacgcctgattcggagtactataaagtattacatccgtgctggggttggtttactattatagcgggggagtacaagccaactgtgtgtaactactatatttagagcgagactaatacatctatttctgcatgattattaagatgaagaagtgggggtgatggacacgagctatttgcatttgatgcacgccttcctgactaccactgggtagaacaccggggcacatccggcggtggtg

SEQ ID NO: 15549 - DNA, 1380 bp, Oryza sativa
  Clone ID: PAT_MRT4530_21383C.1
atggaggattggctcttctactccctcacctcgctgctctgcctcgcgtgctcgctgctgctgcgcgcccgcgcctcggcggcgagccccaaggcggcggcggcggaggcggcgccgctgccgccggggccgaggacggtgcctgtgctgggcccgctgctgttcctcgcgcggagggacttcgacgtcgagccgacgctgcggcggatcgcggcggagcacgggccggtgttcacgttcgcgccgctggggccgtcgcggccgacgatcttcgtggcggcgcgcggcgcggcgcaccgcgcgctggtgcagcgcggggacggcgttcgcgtcgcgcccccgcggcggcggggggcccggcgtccgcgctgctctccagcggcggccggaacggccctccggcgatgcatctcctccggcgtgctcaacccggcccgcctccgcgcgttctccgacgcgcggcgctgggtgctcgacgtgctcgtctcccacgtccgcggcgagggcggtgctccggtgaccgtgatggagcccttccggtacgcgatgctctgcctcctgttgcacatgtgcttcggcgaccgccccggcgacgcgcgggtcttcgccttcctcccgccgatcaccaagctcgtgttccggaagcggtggaacaagatggtgtcgctgcggcggcggcaggaggagctgttcgtcccgctcatgcgcgccaggagggaggccggcgccggcggcgactgctatgtggactccctcgtgaagctcaccatcccggaggacggcgggcgggggctcaacgacggcgagatcgtcagcctctgctccgagttcatgagcgccggcaccgacaccacggccaccgtgctgcagtggatactagccaacctcgtcaagaacccggcgatgcaggacaggctcatggaagagatcgccgccgccgtggccggcgacggcgaggtgcgagaggaggatctccaggcgatgccgtacctcaaggcggtggtgctggaaggtctccggcgacattcgcccggcctttacgcgctcccgcgcgccgtggaagacgagacgacgctggacggggagatcgggctcgacagcgaggtgtggacctcgccggaggtgttccggccggagcggttcctcgccggcggcgagggcgaggacgtggacctcaccggcagcaaggagataaagatgatgccgttcggcgccgggcggagggtgtgccccggcatggcgctggcgctgctccacctcgagtacttcgtcgccaacctcgtctgggagttcgactggcgcgaggtcgccggcgacgaggtcgacctcaccgagaagatgctcgagttcaccgtcgcgagacgcgtatttttgtattaa

SEQ ID NO: 15550 - DNA, 2878 bp, Oryza sativa
  Clone ID: PAT_MRT4530_21384C.1
atttataatttattaaatgaaacctcaagcccaaatcatcaaacattcacatctgccacctagcaaaaggtggttaagattaaatatttacaactttacatacatgtgtaatataatgtaaaaaggcactggtatagcagacatattacaagcccacaacgatacacacccagaatattgtctatactctattgctctgtatcaacaacatatgcaggggacaggaaacaacatacccagacacatgaggaacttagagctgttcgcatgcttaggtcatatatacctaaagaatgcttcaaatgaagtaatggaatttgtacgacaatttgtcaactttgaatgagtaagtggtaaatatatataaaaaacaggtcgtcttaggtactcgtgtattactgttgctgcacactcaagcttcaagaagtacaatctaaaggcttcttccatgccacaatccaatttaactcccttgacagcttttacgtggaaatgagtttttgcaaagcaagggaacatcatcagagccagagagctaacttttctcttcagggacgtgcatgccaaatccacgttttaacttctcaactgtaggagcaagctttccaagctttcgtaattttttgccagttgtttcatcaatcacatttccattgatctcaacagaatatgattttccagatatccgtgggagacctcttcctgcaagcaattcaaagtctttctgatgaagttctctaccattgacaataactcctgtgttcccaccggcacaatttttcggcattggataattaaattcctttataaatggagggatgatgccactacactcatgtcccatgacaccccaaaatccagcgcggtagtcataccaatatgaaccagggccaactggaccagacttcttctcggccttccgtaggacacgttcggagattgaatggccattgattgaaaccttagcactgtccactgattgattgaacaaagaaatgtccttcaaacctttcttcaaaaaaccagcaaaaaactttgaatccccgttcttagtagctgcagactgaacttcgtctagttcagcctcagaagaaacacgagaactagaatttgtgcgctcattaactgatgactcaagcttcgatggcattatggcatgttcagaatttggggagagcaattcactataacaatcatctaagtcatcttgtttgcatatcgtagctatagtttcaacttgaatgacactgttattatcttctttgctgcatttgctatatcgctcagtaatgaattctgattgaaagttgttgtcatcttgtttgattttttcttcatactttttgctcacgtctccatcttcaaggctgctggtatcatcattatcagccgtcagcttgtctatgttacccatgcttccatcatcacaaaagccacttgtactttctttgagcttttgctcatgtctactgctgacagtttcttctccaaatccttctttatgatctttgctgttctgctcatatgtcacgtccgatctttcatccctaacattagcatcaacagaatctgccatgatatttaggctacattccttgcttgtgcgatctccaccactacaatcttttagacgactggaaaatggatcgacacatttgtcctctataactggggcctgtagattgcctgtattaaatgctgaagtttctacttgactgtatgcatctccttgacatagtatatcctttgggatatttgcaagtctggaccttctaacagatactgatagtaactgactgctcctgtttgatccacactctttgtctattctgtcataactagaagtagaagacacagaaatattgtctgcaagatccttgttctgctgccatctctcttgtgcttgcagcttatggaaactagaatttccttcatcctgatgttggtaccacccaaaacttttgttaacctgacgactggaactccccactgtttttgatgcagggaaagatgtcggcgcaaccaaaggatgaattttcacttccttaagcttgaaactaacgatctccgagcacgaaccacaccgaacttgaatctgcttccgagctgtgcatttcccaggaggcagctgcagcagctggttacaagaactgcatacaacgaaaggagcggcgcctctcacaggacgacagaaactctctgccttcttcctgaaaaactctgtcctcctcttcgacaccgagaaatgagagtacaatgacgaagcgacagacctccggtcaagctccgatgagactgatggggacctatcgaacaggtgagacccctgctggcctgcaaagtacctcgtcatgggaatgtgctcctcctgcatcacagctctctggccatgaaggcactgtgcacactggcaggtgctctgatggtgattccccccaagatacccagaattctcccactgcctctccggccattgccggaaccgcccactcggctgcctctcatacctatctctatgcatagaccgatgcagctggtcattcggactgtgcggaaagccagacccgtaccttcccgtgtagcgtgagcggtagtgctccggcccacggcctagcggcggcggctcggcgtgcgaggggcgcagcgaggccgtgcggcggctcatgcggtggcgctcccgcggctggtcggtgatctcgcaggacctggtgatgtggtcccgcagctcgtcgagcttccggagcagctccacggggttctccttgagcgcgccccaatccagcacgccactccggtcgccgccgcattgcccgtaatcgaagggctctggaaccctagcccttctcctgtacttcatctccttcgcctcgctccccat

SEQ ID NO: 15551 - DNA, 711 bp, Oryza sativa
  unsure (1)..(711): unsure at all n locations
  Clone ID: PAT_MRT4530_21385C.1
accttgaaagcagagtgtgcatcccatggttgcctcccctttctgagttgatctttgaaatgatcagaaatgcatgttattgtaggancnaactagcaacattagactccctagnactataggaggggagatgccccaatacttatctttattggcttcttcttctcatcctttcctttttctttctgtctttaattgagacggccccaccttctagtcagtcaacgattcaatgaacagtgcattgactggtgtctttcaatgttaggagaagagaagaaaagtcatttacttcaattgcctcttgacaacggtataccactcaactncctgtacaatttgtcggctncagttcaagaaggattggtagacgttgccgcttctcattgttggcttgttgcacatgggcatcctcggtaaatttcaanccttgaaaattcagcacaacagtaacagttgatggccattcatgaaaatgacagtaacagttgatatgcactcatatgtggatgtgtcagtgtcaatggccataaggaaatgcgcagtgagttatggacttcacatagtattaatctggccagtcatcggatgtgatttctgaaatagtaatgttaatatgtttttttttcatggagaagtgcaaatgttcttgtccaagcattttctgcaccttgaatattagagaatctttcatctaaaaaaaaaaaaaaa

SEQ ID NO: 15552 - DNA, 2990 bp, Oryza sativa
  Clone ID: PAT_MRT4530_21386C.1
atggcgcgtccgagaggcaggaagcgtgcggcggcggcggcggcggtggcggaggaggactccagcaagccggaggctgcagaggcgaagaagccggccgcgcgggggcgggggaagcgtgccaaggcgtcacccaagcccaagccggagacggagtacttccccgagaagcggaatctggaggatctttggctatcagcatttccggttgggaccgagtgggaaaacattgataagataaaggagttcaactggaactttgaaaatttggagcatgacataaggtttcctgttggtgagcagaaagcactagaagaaggaggggagctttatgggaaaacagtttacttgtttggaagcacggagcctcaactattggaggttaatggtgaatcaaagatagtgcttattcctatagttgttgctgttgactgcccttttcctccctcagacaaaattggcataaattctgtccaaagggaaaatgaagagatagtgccaatgaaggccatgaagatggcctgggtgccttatgttccgctggaggatcggcttagtaggattgacagtttgaaaacaaaaatatttactcttggctgcacccagcggaggtctgcgctgaggcacctcaaaactgagagagtcaaattgtttgactactgcatgccatattatatgccactgaaccctcccgaagacgaagatgatacagttgtcaacatcatatatcccctagaacccccgatagtatgtgacttcgactgggagatggatgattacgaggactttgctgatgagaaagttaaagatgaggtgctaccagaggatgagaaagaaaaatttaaggaattcataaaggagagggttagagaaaggaaaagagagctaaaacaggctaaggaagcaagaaagaaagctattgatgatatggaccctaaggtcaaagaggcatttgaaaatatcaaattttacaaattttatcctgtaaaaactccagacacccctgatgtaagcaacgtaaaggcaaagtacatcaatagatattacaggcatgcacatcatctgatgggaggggaatctgccgctttcctcatcgtcggctccacttccacttcctcttcctcctcctcgaggacgaggaggaaattggcagctggaggcttggagcgcgctgcatcatcccgcccgccctgctgctgcggcgatcgccggagcagggctgcaggggatccccacggccgcagcagctgttgttatctgaccttgaactcatacttggaagcctgcagattctgtgtggggatggaggtggttctgcatgagggggatgccaaagattgggtttacaaaggagaaggtgcagcgaatctaatcctcagctacactggctcgtcaccttctatgcttggcaaggttctgcgagtcaaaaagattctaaaagacaagggacaaccggcaccaaactgtatagtcttctcaagtcatgaggaacatctgtggggcaagatcccaggattgttggaatctgttaaaaatgattgcttgccacaagcctatgctacaattgttatgagccaacatttgggtgccaatcatgtttgatggcggggtccgtgtacgtgtgtctaagacttttttccgagctttgctgggaaagaatgtgcttgacaaccgtcctgcatggagagtgaatgctagtgcaattgatgcctggagctgattctgctcttctaatttctgaccacacattattttccggtaatcctagaggaagcagttgcatagcagtggagataaaggcaaaatgtggatttcttccgtcatctgaatacatatcgaaggagaattctatcaagaaacaagtaacacggtataagatgcatcagcacctaaaatttcatctgggagagatatcgaagacaagtgaatacgatcccctagatttattttctggatcaaaagaaagaatacatatggctatcaagtcatttttttcaactcctcagaacaactttagaatttttgtggatggttctttagtttttggtggcatgggaggtggcgcagatagtgttcatcctaatgaaacagagaaatgtcttgaagatctgagcaaggttactggcttacaactatctgactttattgagctcctgtcagaggcaatctttaagtctggagtgttgggtaaacttttagccactcaaaaactggatgatcatgacatcgaaggggcgattcatctgtactataacatcatttctcagccttgtttggtatgcaaaagtataactgatacagaacttctgcgcaagtactccaccttgcattctcttccattggacaagagtgagaagattgtcagggactttcttatctctgctactgcaaaagattgtagcctaatgatcagctttcgaccaagacagagtggaacaacagattctgagtacgattctgtatttcttgattcagtgaaccaaagctatgattacaaggcatattttattgatctggatgtgaaacccttggataagatggtacattactttaaattggatcaaaagatagtcaatttctacactagaaatggagaagttgggggagatccacgtgatcctccaaagggatgtggccctaggtgacacaaaggttcagctccaaaggttcagctccaacattgacgaccttgaaatataaagggcataggacaagtgtctgttgtatcttggtgattgttgtgtttctacaagtgtgcatgtccaatgtgcaggttctcctcccttctagggaaaacgtgtaagagagtggtagttgttgtagtacatcctgtataccgtgtggtttgcctcagcagtaggccgaattttcagtagacaaacattaagaagagttaataaactgtatactgaggcatccacgtttaccttggaaatctatgataaattcccgtatactcagcttgctgtgaatctgtgatctgagttctg

SEQ ID NO: 15553 - DNA, 303 bp, Oryza sativa
  Clone ID: PAT_MRT4530_21387C.1
atggcctcgtggccgcagccaaccttccccttctctcaagaacaagatcgagcgccgccaccgcttggtcaaggacgagatcgagctcaagctccgcatccgttgccgcctagtcaagcttgcgttcctcgtccccaagctctgtcgcctccaccgaactctacgtccccaagtagctcaagctccgccggcgagctcgatttcatggtgaagacggagctcttggaggtggcaggagaggcgaaccttgagctcgtgctcgccggtggtcggcgcggaagggaaggctggggatatgcttga

SEQ ID NO: 15554 - DNA, 1083 bp, Oryza sativa
  Clone ID: PAT_MRT4530_21388C.1
atgtcggagctgccatcgccgccgccgccggccgccggcaaccagtacggagcggagcacgccgccgccaagaaggccgtcgccctcgccgcccgcctctgcaagaaagtgcagcaggacctcttgaaattggacgttcaaactaaggctgacagaacaccggtgacagtcgccgattatggatcacaggtattggtaagtgtggtcctgaagattgaattaccttctaactccttttccatggtggctgaagaggattctgaagacttgaggaaagatggagctcaagaaatgttgggacatatcaccaaacttgtgaacgaaaccatcataaatgatggttcgtacagcatcacattatctaaggaagatgtgctggtagcaatcgatggtggaaaatctgagggtggaccttctgggcgatattggatattggatccgatagatggaactaagggtttcataaggggagaccaatatgcaattggacttgcattactggacgaaggcaaagtagttttgggagcaatggcatgcccaaatcttcctttcaaatcaatagatcacaatggtggatcttcgggagatcaagttggtgccctcttttctgctacaattggctgtggatctacagttgagtccttagaaggctctcagccacaaaagatcagtgtctgttctatcagcaatccagtggatgcctcattctttgaatcttatgaaagaaaacactgcatgcgtgattgcacttcctccattgcagagaaacttggtattcaagctcctccagttagaattgatagccaagcaaaatatggtgctgtagcccaaggtgatggcgccatttattggcgatttccacacaaacgttccaaagaagcagtatgggatcatgcagctgggtctattattgtcacagaagctggaggtttggtaaaagatgcttcaggaaacgatttggatttctccaaaggtagatatcttgatcgtgatgctggcattattgcaacaaataaatatttgatgccattagttgtaaaagctgcccaagaggctatgaaggaggaaggaatactaggctga

SEQ ID NO: 15555 - DNA, 291 bp, Oryza sativa
  Clone ID: PAT_MRT4530_21389C.1
atggaggggattaggagaatttttcagggtgtcatctgcaaatgttgcgagagcgctgtgagccttttgggtgggtcccacgcgcacgtaatcggcgagtcgtcgcctcgtttcgccccggagcgcaacaaatatttttctgttcccgattctacccttcgctccgtaaggaaaaaaccagaggcccgtgcagttattcgcggggggcaaaaccgcgtccgtccatccgcagggcgtagcgtatctcactcggcgtccagtgtgcgcatcgagatccgtgctgttccttga

SEQ ID NO: 15556 - DNA, 1641 bp, Oryza sativa
  Clone ID: PAT_MRT4530_2138C.1
atggctcaagatgccagcgacgcagtgcttccagcatcgcgcattatggcggataggcaccttagtctcccccgcaagatcatgccggaagacgccgccgtgagggcgggggagtcgcggccgcggccacggtacccggagcgatccgtgcacctcctgtcctttgctatggcggggttgatcccgccattctccggattattccacgaggttttggatttctacgaaatccatgccttgcatctcgcacccaacgtcgtgatgacgctggccatctttgcgcatttgtgtgagatgttcatcggggtacggccgacgatgcggctattccagtctttcttcgtcccgcagctgctgcaagggccatcccccgtgtcaggcgagggacggcgctgggccccgctcaaggataagctgtggtttagtttccaggcgaaggcacagaagctggcgagccggtggtgggacgaggggcggctcagcctgccggtgacagccgccgacccatccctcggccttggcaacaacgacaccaccggcgccggtgacgacgacatggcgtccaaggagccaagcggcgaccacgaccacgagatgaacgggaccagcgccgggggcggcgagcccaaggacggcgcggtggtgaccggccgcaaccggcgcccccgcggacggccgccgggctccaagaacaagcccaagccgcccatcttcgtgacgcgggacagcccgaacgcgctgcgcagccacgtcatggaggtggccggcggcgccgatgtcgccgagtccatcgcgcacttcgcgcggcggcggcagcgcggcgtctgcgtgctcagcggggccggcaccgtgaccgacgtggccctgcgccagccggccgcgccgagcgccgtggtggcgctccgtgggcggttcgagatcctgtccctgacggggacgttcctgccggggccggcgccgccgggctccaccgggctgaccgtgtacctcgccggcgggcaggggcaggtggtgggcggcagcgtggtggggacgctcaccgcggcggggccggtcatggtgatcgcctccaccttcgccaacgccacctacgagaggctgccgctggatcaggaggaggaggaagcagcggcaggcggcggaggacacatgatggcgccgccgccactcatggccggcgccgccgatccactacttttcggcgggggaatgcacgacgccgggcttgctacacctgcatggcaccatgcccgccctccgccgccgccgccctactagctctctagctagattaattaattaagcttcatgaattaaatccttgcttaattaattggcatatatatatactcacatgatatatatgatcaacaagctatatatagctagccagctcgagctaattaattaacaaaaggtgagccaatataatgcaagatcgatccaagctatataagtacgtttatacaggtaaattttagtggttcaagtgccagggccatatatatttctctttctttagcatttgtgtgtagtatagcagcaatagcttaatcaaacatcaccaagtaattgctgtgttgtgtgtttggtttacttcacatatctatatatgagtgctaattaaacagattaattctg

SEQ ID NO: 15557 - DNA, 646 bp, Oryza sativa
  unsure (1)..(646): unsure at all n locations
  Clone ID: PAT_MRT4530_21390C.1
aaatagacttatttcgtcccttgtcggtcggcccacaggccttatgaaaaccctaaccctaaccctaacccttccccaccccctcccccccaaccgctcgaccgcctcccccactcccgatgccgcctctccccctccccctctccctaccggcgccgntnccctctnctcccctccgggggggccgctccctctccccatttcccgccgctccccctccccccagctggccgcctctcccaccaccggcgccgcttctcttcccttctccctcccttctcgccggcacggcgcggtgacggcgggctgtggcggcggctttccccacgctagcgtctcgccggcatggcgcagcgacggcggggtgtggcggagacggccgtccctccccctctccctctccctctccccgtcggcgtcgacagcgacggtggcgtcgacggcgacgacggcgtcggcttcgtctgagggtggatccgtcggcggtggcggccaccgcgggcggatccggcagcggcgctccctccgccgcctctcttctcctccggcggctcttcgaattcggctgcttgtaatggcctcgccgctgacaagaacgagcacgcaagcggccaacctcggagaagatgcatgggtggtgaagtag

SEQ ID NO: 15558 - DNA, 773 bp, Oryza sativa
  Clone ID: PAT_MRT4530_21391C.1
agatcagtttgtgcgagtgtctatttcaactctttgagtgttctggttctcaattgaatactggtaactcagactgttgttacagctcagtttagccatccaggaaatcaagcttccatatctactccctattaatctagtttggttatacacagcttcagttgttcaagtcaagaacaagaaaatcctaaatggggaattcaatacctacctgacccaattcataaagagtgatcaaatgatttctggacctcaaattgaagagaaattgatatgtgctgtgaataggagtccagcaacatgccaagttgatcattaatatggaattaagtcccatggaagtcatgagtatgtcatgtctaaccatggagaatgaggattgtggtgtgaaatgacaaacccagggcctcagaataaaggcccaaggctagttagcaattggaagaagtgaataagttccccatgggattcacatgaacagggatgaagcaggaagagcaaactttatggtagtgacacaggacgtcattccagcataagaatataaagttaaatgggtattgcaggtttagttttctgctgtaataattggtaagataagattaaaagcagagcaatcaaatatttatcgataagccttcagtaccagatgactcatttttgttgccccttgttgcctcctgagcccgtgattgctgtgtgctgcctttgctttgatgcccctccttacccatatttacttcagatcattcttcattgaagcggacgcgtgg

SEQ ID NO: 15559 - DNA, 1566 bp, Oryza sativa
  Clone ID: PAT_MRT4530_21392C.1
cgatcaaccaaacctgttgcgttgcacgcgatctccaactagaagaacatggcgtccaactctccggcgacctccgacgccgccaccggcgacgtgccggagccgagcaggtcgtccagcgtcgtcaaggcaatgtccgggtaccacgtgctcaagatggaggggtacgccgccggggtcaagggcctcggcgttggcaagttcatcgactccggcagcttcgacgtcggcggccatcgctggtgcataagatactaccccaaacgcagcccggcctcccccggcgacggcgactggatatccatctacctgaacctgtgtagcacggccgccgccatcggcgacgccaatgcaagtttcaccattagtctcctcgaccaggacgacgacgagcatcagccggtggcggcgcacagccggagctgctcctcaacggttaccttctcctccgccgccaccaaggcttggggtttcccccgattcgtggagaggaagacgttggaggagtcgccatacctgagggacgacagcttcgtcctccgctgcgacgtcaccgtcttcaaggagaccatcatcgagccagctgctccgacgccgctcgtcgccgtgcctccgccggacatgcaccggcatctcgggagcctcctctccggcgggcatggggcggacgtcacgctccaggtcggcgacgagacgttcgcggcgcaccggtgcgtgctcgccgcccggtcgccggtgttcatggcggagctcttcggcccgatggcgacgagccgtcacaacgacagggagacgatccgtgtccacgacatggagccgagggtgttcgaggccatgctccacttcatctacaacgactcgttgcccaaggtagacgacgacgaggtggtagccatggcgcagcatctgctcgtcgcggcggacaggtacggcatggagaggctgaagctgatgtgcgaggacacgctgtgcagccacgtcgacgccagcacggcggctacggcgttgacgttggctgagcagcatcactgtgaggggctcaaggatgcttgcttcaaattcatggcggatcctgataatctcaaggtcgtcatggagagtgacggctatctgcatctgacaaggagctgctcttatgttcttaagaagttggctacttgaattgggagctgttaattaatgaggttcagtggcataccttttttataattaataaagttgatcatactttattgtaattacgtcctgattactgtatacattttgtgtacaagcttcattatgatacgagtctccatatatggataatgcatctttgaaaaaagaaaagtcttcagagtccctccgttccatgttataagacgtttggtttataaaaatttacacatatatttctttagataaatagggtcttcctatttcgggggctttagtagggtttactattattcaggggttatgatctgcgcctgctagagatgcttttgtgtgtactatccataccatacatgtaaattttactcatataaagtggattcgaactaaaaaaaaaaaaaaaaaaaaaaa

SEQ ID NO: 15560 - DNA, 431 bp, Oryza sativa
  Clone ID: PAT_MRT4530_21393C.1
tttgtcgcgtgggtcgtcttcttgctggtgtgggcgaggtggaggaggaggaggagaagctagccgcggcggcggcaatggcgacaagcgggctgaggagctgcagcgcggtgcgcgatcccagcctgctggacgccgacgtggacaggagccgcctgccagtctgcgcctacgccaccacctacgggcgcgctaccaggtcctccgagtggatgccgcatcagccacgccccgtccacctagacgggtcctctcaccgtgactctgggggcgacccgctgggcctctccaccggggcccagaacatcgagcggatcacggagcctgacgggtaccactgacggagcgccacgctcactgtgcctggggtctcgacaacggaggcgctcgggccgatcatcttggagcaggccctacctgggcgggctccc

SEQ ID NO: 15561 - DNA, 393 bp, Oryza sativa
  Clone ID: PAT_MRT4530_21394C.1
atgcagacgaccaagatggatcgtgtggtccgtgtatattctggtggaaccgttagtgcaaatggaaaatttgatgagatgaaagtaggtgttttagtgtttgcgagcagtcctacgtgggcacaattatgtgatcgggttcgttctaaaatggaacatgtcgtacctacgaacgtgatgagaatggaagggcagtatgttgcaagctggcttatagcctgctattgtacctgctcgcatcatagtacttgtcctgaggagactttgacacaggatcccccattagcggagatagctggacctggtgagacaacgaagtttggcatgaaccggaggatggggtatgcccacatgggcgacggccttgtttggatcctccgggctattaaatag

SEQ ID NO: 15562 - DNA, 167 bp, Oryza sativa
  Clone ID: PAT_MRT4530_21395C.1
acgagcacaacctgactggggaacaggcccaggtgtgggaaggaacaggggcattccattggtggggagaagttgcaagtctttacaggcatggacccgaggagcgaggagttctactctctcgccagtatggcactcaagcaagtgactgtcccttcagtgtgctg

SEQ ID NO: 15563 - DNA, 333 bp, Oryza sativa
  Clone ID: PAT_MRT4530_21396C.1
tgcccgaataccgggagagacccacgcgttcgatagagcaaagaatgagagagctcgttgagctgcacaaatggccctctctgcgatggcctcaagtgccaccaccgtatgtccgttgcaggggcgttaagtccactgccggtatgcccgcggcccgacggtccggcaaatccagctcatgcaacggcagcaaaggcaggaggatcagaagcatgcaagtgtggccgatcgaggacatcaagaagtgcaagaccctctgatacatgtcaacgatcaccgtggaggaccgtctgaagcatatcgagtacctactacggtccaagtgggtgacct

SEQ ID NO: 15564 - DNA, 152 bp, Oryza sativa
  unsure (1)..(152): unsure at all n locations
  Clone ID: PAT_MRT4530_21397C.1
acacnctacgcccgcaagcctcaggaatttattaacaataagactaaactcaatctaccatcccaattttctaattacaattcatatttattatcatcaaatcccaaattccctccacctgcacaatttattattttattccccaaaataca

SEQ ID NO: 15565 - DNA, 1659 bp, Oryza sativa
  Clone ID: PAT_MRT4530_21398C.1
atgccgctgctcctgcgcggcggctccctcttccgtctctacgggtgtggctgtgggcttccaagcgcaaatttcagtcccagcaaactagcactgataagactaagcttgatgatggcagaaacacgagccacctattcgcgtcgagctgcctctaagaatactgatatcaagaaagatgatgaacatgtccttgaaaaggaggatgttgctgaaagcaaattggagatagagcaacttaggaatgaccccgatcgactccaatccatgacagtgaaggagctcagggaaatcacgaggatgatgggaattcctgtaaaaggcaacaagaaagatttggtatcagccctgatggattctctgggtaaggaaagaaatggtgtaaattacttaggggtgccatttttactggatgctggaatcctttctgcaggtaaagtgggaacttcatcagttgagaagattggtgtgtctgaagtaccttcaaaaagaaaaggtgcttcagtagtagttgaacaaaacatagatagttctgaggtcatttctgaaactcctagtaagagaagtagagcaaagaacaaaggaaccgctgaggagagttctggggctaatgtcaagcaaagcaagacatcagtccagaagaaaaagctagttgtccaaggtgccagtgtggaccatgaagaaccttggactgtacttgtacacaagaaaccacaacctgcctggattccttataatcctaaggtcatgaggtctccatctcttagcaaggatacgaaggctctaaagattctgtcatggaatgtgaatggattaaaagctttacttaaatcgaggggcttctctattcatcagttagctcagagggaggacttcgatatactatgcctacaagagacaaaaatgcaggcaagatatgattttagtttttcttatgcaaaattaccatctaaaattggacaaaagtttattaaccaggaattacgttattttgagcaggagaaggatgtagaagtcattaaggaaggtctacttgaaggctatacccatagtttctggacatgcagtgtatcaaagcttggctattcggggactgcaataatttcaagggtgaaaccactctctatcaagtacgggcttggtgtgccagaccatgatactgaagggagggtcgtcacagtggagttcaatgatttttacctcctgactgcttatgtaccaaattctggtgatggtctaaaaagattgacttacagggtcacagaatgggatccaagccttggtaactacatgaaagacttggaaaaatcgaagcctgttatactaactggtgatcttaactgtgcccatcaagagattgatatacatgatcctgctggaaatcgtagaagtgcaggctttacaattgaagaaagggaatcattcgagactaattttttgtccaaaggttttgttgatacatttcgaaaacagcatcccaatgttgttggatatagttactggggttataggcataatgcccggaagaccaacaaaggttggcgtctggattattttcttgtgtctgaatccattgcagaaagagtccatgattcatacattattccagacatatctgccagtgatcacagcccgctaggcctcgtactgaagctctag

SEQ ID NO: 15566 - DNA, 1461 bp, Oryza sativa
  Clone ID: PAT_MRT4530_21399C.1
atggacatgtggacatctaaccaaaataaaagttatatgtgcatcacagttcattggatagatgacacttggaagatgcaaaagaggatcattaagtttatgcatgtagaaggacatcattcaggaagtaatatgtgcaaagagttttatgacagcatagttgattggaatcttgatagaaggcttgttggacttactttggacaatgcatcgtctaatgatgtttgtgttaaggatgttattttaaaactccgtaaaatctctcctttaatttgcgatggcatcttctttcattttgaggcatttcagaagtgtgccttggaagttagtttggataacacaaagggcctttccatggatactcctacaagatggaactccacatttctcatgttgaagaatgctatctactacagaaatgcttttgataggttgtttcttcggcatggtagaaagtatgcaaagtgtgctcccaccaaggtagactggtctatggcaatagcactatgcaagtgcttgaagccatttcatgaagcaactgaactattctctggtactacatatccaacagcaaatcattttttcggtaagttttgttccatcaagctttatattgctgattggtgtaacagtacagatggaacaataaaaaccatggcaaacgccatgcaaactaaatatgataagtactgggagaagtcgaatatggctcttgctgttacatgcttccttgatccacgttacaaaacaagttcaatagagtactatggtatgaagatttatggtttagaagctgcagaaaaatttgatgagttcaatggggttatcaaaaaattgtttgatgtttatgctactagtgcgtgtgcaacatcaaagaagaaaggtgctgaaatgcatgtgcatcaacttcaaattcaacctgatcctgttcataatactgatgagtttgatgatatctttaatgagaatgacagtagccatgatcatgagcaacattttcaaagatttttgcttgagagaagtcagccaatttgtagtgataaaactgagttacaaatttacatggaacaaccactgttactatggacttccaaagatccatttgatattttgtcttggtggaagctcaaacaagcagaatttcctatcctctgcaaacttgctcgtgatttcttatgtattcaagtgtcaactgttgcttctgagtcggcatttagtgctggtggccgtgttgttgatccatttcgcacccgtcttgatccagaggctgtgcaagctttagtttgcaccaaagattggattaaagcagctaacaatagttataagactcaggctatcatcaatgaattggacattgaaagcgtagagaggcatctggcaaacttattgatagtggaaaaagaggagaataatgatgacatggaacaggatgatgttctgatggatgaaatggatgaataa

SEQ ID NO: 15567 - DNA, 663 bp, Oryza sativa
  Clone ID: PAT_MRT4530_2139C.1
ttagttggcactgagatctttagggtcattgccaattacgttggcactgagatttgacggctcagcgcctctgggccgcccaacatatgagttgtgttgggtggcccaactgcgagcagctaagtcccaaagctcagcaccagaaattggcactgagattagtagcttagcgccaatgcggttggtgttgagcccctgccatgtagacgaggggattggctcggctgccacattggcaagggagtcggcgctgatcagtgtaacctcagcgcaaaggcggttggcgttgagccgacggtctatttttggtaagtttttttgcacggtttggcagtgcaccatcacttggaacatctgtgacacatcaacaatgtcattagctgttgttgcgattttcactatatcagctccaactgcttgtattctagccacaagatctgcaagctcctcacaggatggagtactttcataattatgtgccgagacaataagtttgcacttctctggcttactcccataaataaagctgataaatttgtcagcaaccttcaattcaatatcgacataatttactcctagctccattgctaaacggagtgcttcaaatcttgtagcatcatcaccttcatattggcctccttcccaattgggtctgcattgcat

SEQ ID NO: 15568 - DNA, 153 bp, Oryza sativa
  Clone ID: PAT_MRT4530_213C.1
atggggaggggagggagaaagcggaggggcggaggggattatgattcttaccaccgagatattttaagtcaaaggggtgttgcagttctgatggaaggggtaatgcgggtagctcgcctgttaattgagcaggagccaacaacccaactataa

SEQ ID NO: 15569 - DNA, 891 bp, Oryza sativa
  Clone ID: PAT_MRT4530_21400C.1
tagattcaatttttaagtaattatttttacaatagacacttctcctgctgctggtgctttggtaatgaagttttgttccatcaagctttctattgctgattggtgtaacagtacagatggaacaataaaaaccatggcaaacgccatgcaaactaaatatgataagtactgggagaagtcgaatatggctcttgttgttgcatgcttccttgatccacgttacaaaacaagttcaatagagtactatagtatgaagatttatggtttagaagctgcagaaaaatttgatgagttcaatggggttatcaaaaaattgtttgatgtttatgctactagtgcgtgtgcaacatcaaagaagaaaggtgctgaaatgcatgtgcatcaacttcaaattcaatctgatcctgttcataatactgatgagtttgatcaacatcttcaaagatttttgcttgagagaagtcagccaatttgtagtgataaaaccgagttacaaatttacatggaacaaccactgttactatggacttccaaagatccatttgatattttgtcttggtggaagctcaaacaagcagaatttcctatcctctgcaaacttgctcgtgatttcttatgtattcaagtgtcaactgttgcttctgagtcggcatttagtgctggtggccgtgttgttgatccatttcgcacccgtcttgatccagaggctgtgcaagctttagtttgcaccaaagattggattaaagcagctaacaatggtacactttgtgtctgtgctattatcaatgagttggacattgaaagcgtagagaggcatctggcaaacttattgatagtggtgagctattttcttattttacctctatgaatatttttcttaatataacaaca

SEQ ID NO: 15570 - DNA, 1837 bp, Oryza sativa
  Clone ID: PAT_MRT4530_21401C.1
agtggatcccccgggctgcaggcgaactagacgcagactctcgactttgtcactagcatcattgcttgatgagctgcaaccaagcaccagcatatcccttccttcattccgccctgggcccgcgcgaagaagaacaagctagctagagtgataagagatcgatctccggccagcgattgatcccatccagtataataatggcggccatcacgctcctacgttcagcgtctcttccgggcctctccgacgccctcgcccgggacgctgctgccgtccaacatgtctgctcctcctacctgcccaacaacaaggagaagaagaggaggtggatcctctgctcgctcaagtacgcctgccttggcgtcgaccctgccccgggcgagattgcccggacctcgccggtgtactccagcctcaccgtcacccctgctggagaggccgtcatctcctcggagcagaaggtgtacgacgtcgtcctcaagcaggcagcattgctcaaacgccacctgcgcccacaaccacacaccattcccatcgttcccaaggacctggacctgccaagaaacggcctcaagcaggcctatcatcgctgcggagagatctgcgaggagtatgccaagaccttttaccttggaactatgctcatgacggaggaccgacggcgcgccatatgggccatctatgtgtggtgtaggaggacagatgagcttgtagatggaccaaatgcctcgcacatcacaccgtcagccctggaccggtgggagaagaggcttgatgatctcttcaccggacgcccctacgacatgcttgatgctgcactttctgataccatctccaagtttcctatagatattcagcctttcagggacatgatagaagggatgcggtcagacctcagaaagactagatacaagaacttcgacgagctctacatgtactgctactatgttgctggaactgtggggctaatgagtgttcctgtgatgggtattgcacccgagtcgaaggcaacaactgaaagtgtgtacagtgctgctttggctctcggcattgcaaaccagctcacaaatatactccgtgacgttggagaggacgcgagaagagggaggatatatttaccacaagatgaacttgcagaggcagggctctctgatgaggacatcttcaatggcgttgtgactaacaaatggagaagcttcatgaagagacagatcaagagagctaggatgttttttgaggaggcagagagaggggtgaccgagctcagccaggcaagccggtggccggtctgggcgtctctgttgttataccggcaaatccttgacgagatagaagcaaacgattacaacaacttcacaaagagggcgtacgttgggaaggcgaagaaattgctagcgcttccagttgcatatggtagatcattgctgatgccctactcactgagaaatagccagaagtaggaggcgggaagaggagataaagggaagatgatgagcaggttaggcttagataggaaaaatcagacagcatctgccttccgattaatgttgaggaaattatattattgtgtgtatcatacatagcatgtatagggaaaatgctgcaggcaggcaggcaggctaggtgatggttgaatatttccttcacatcatgtatgtatatccttccttgatgctacagcacatatgtatgtatgactctgaagaaagagcaacctgtatagtagctaaccggctatggcctatgtatgggccgcagaggtgagcaaacaaaaatcatcatccatggattgattgattgattgattgatacagtaaaaaaaaaaaaaaaaaaaaaa

SEQ ID NO: 15571 - DNA, 2226 bp, Oryza sativa
  Clone ID: PAT_MRT4530_21402C.1
atggagtctggtagtgcaagtagtgcaagtgcagctgcaagtaccactgcatcatctccagttttgcaactcccagcacctccaagccatgctacggcagctacgcaggacacttctcctactgctggtgccttggcacacaatgatgcaattgatttgacaaccaatgatgattctgaggttttacctcctcctggtaagaagcaaaagaagtgtagttctgaagtttggcagcactacactaaatataaggtaagcaagaaagggtcagatgacactgtgattgtagaggagtatgctaaatgcaacaagtgctcatataaacgtcggtgtgagagtaattgtggcacttctgttttctggaatcacttgaataacaagcacaacatcaagtcaggtcaacaacaactacagatgaaaaagagtgaagatggtactgaaggagctgttgagacatacaggtatgatgagacggttagcctgaaaaagttctatatggcaatcatcatgcatgagtatccctttaacattgttgagcatgattactttgtggattttattaagtctttacgccctacttttccaattaagagtcgcattactgtgagaaaggatattctaaacatatatgaagaggaaaagaagaaattgtggcagcatttgcttacactctcatgccgttttagcacaaccatggacatgtggacatctaaccaaaataaaagttatatgtgcatcacagttcattggatagatgacacttggaagatgcaaaagaggatcattaagtttatgcatgtagaaggacatcatttaggaagtaatatgtgcaaagagttttatgacagcatagttgattggaatcttgatagaaggcttgttggacttactttggacaatgcatcgtctaatgatgtttgtgttaagggtgttattttaaaactccgtaaaatctctcctttaatttgcgatggcatcttctttcatgtgagatgtttcaatcatatcttgaaccttgttgcacaagatggtctgaaacaaatcacaggagctgtattaaagatcagaaatactatttcaattctaaagcactcgccactgcagtttgaggcatttcagaagtgtgccttggaagttagtttgcataacacaaagggcctttccatggatactcctacaagatggaactccacatttctcatgttgaagaatgctatctactacataaatgcttttgataggttgtttcttcagcatggtagaaagtatgcaaagtgtgctcccaccaaggtagactggtctatggcaatagcactatgcaagtgcttgaagccatttcatgaagcaactgaactattctctggtactacatatgcaacagcaaaatcattttttcgtacagatagaacaataaaaaccatggcaaacgccatgcaaactaaatatgataagtactgggagaagtcaaatatggctcttgctgttgcatgcttccttgatccacgttacaaaacaagttcaatagagtactatggtatgaagatttatggtttagaagctgcagaaaaatttgatgagttcaatggggttatcaaacaattgtttgatgtttatgctactagtgcgtgtgcaacatcaaagaagaaaggtgctgaaatgcatgtgcatcaacttcaaattcaatctgatcctgttcataatactgatgagtttgatgatatctttaatgagaatgacagtagccatgatcatgagcaacattttcaaagatttttgcttgagagaagtcagccaatttgtagtgataaaaccgagttacaaatttacatggaacaaccactgttactatggacttccaaagatacatttgatattttgtcttggtggaagctcaaacaagcagaatttcctatcctctgcaaacttgctcgtgatttcttatgtattcaagtgtcaactgttgcttctgagtcggcatttagtgctggtggccatgttgttgatccatttcgcacccgtcttgatccagaggctatgcaagctttagtttgcaccaaagattggattaaagcagctaacaatggttataagactcaggctatcatcaatgagttggacattgaaagcgtagagaggcatctggcaaacttattgatagtggaaaaagaggagaataatgatgacatggaacaggatgatgttctgatggatgaaatggatgaataa

SEQ ID NO: 15572 - DNA, 1556 bp, Oryza sativa
  Clone ID: PAT_MRT4530_21403C.1
tttgagccggagcgagttggctttgttgtgttgagccctttcctgggcccacgcattcggcatcacgctccaacgcatccgcccacgcgtacccagctaccaaatcgaacctaccaactcattcccgatcgatcgatcttaaaaaaaaactaatcgtaacttttctctctctctcctatctttagaactagcaggtagcaactgcttcgagtgtagtctggtgaacgtacgatctttcgttcgttcatcaagatgaccgtgatcgacggcgccgtcgctgccgacgccggcggcgcagccgcggcggtggtgcagccggggaacgggcagaccgtgtgcgtgaccggcgcggccgggtacatcgcgtcgtggctcgtgaagctgctgcttgagaagggctacactgtcaagggcaccgtcaggaacccagatgacccgaagaacgcgcacctgaaggcgctcgacggcgccggcgagcggctggtgctctgcaaggccgacctcctcgactacgacgccatctgccgcgccgtcgccggctgccacggcgtcttccacaccgcctcccccgtcaccgacgaccccgagcagatggtggagccggcggtgagggggacggagtacgtgataaacgcggcggcggaggccggcacggtgcggcgggtggtgttcacgtcgtcgatcggggcggtgaccatggaccccaaccgcgggcccgacgtcgtcgtcgacgagtcctgctggagcgaccttgactactgcaaggaaaccaggaactggtactgctacgggaaggcggtggcggagcaggcggcgtgggaggcggcgcggcggcgaggggtggagctggtggtggtgaacccggtgctggtgatcgggccgctgctgcagccgacggtgaacgccagcgtcgcccacatcctcaagtacctggacggctcggccagcaagttcgccaacgccgtcggccgctacgtcgacgtccgcgacgtcgccgccgcccacctcctcgtcttcgagtccccttccgccgccggccgcttcctctgcgccgagtctgtcctccaccgcgagggtgtcgtccgcatcctcgccaagctcttccccgagtaccctgtccccaccaggtgctccgacgagaagaaccccaggaagcagccgtacaagatgtcgaaccagaagctccgggacctggggctggagttccggccggcgagccagtcgctgtacgagacggtgaagtgcctccaggagaagggccacctgccggtgctcgccgccgagaagacggaggaggaggccggcgaggtccagggcgggattgccatccgagcatgaggaaaacagcagagcaaaagagcaggaaaaatgtccatatcgtgttagtgtttaccgtgctgtaaaaccaaagtagtagtgttcgctggtttgtctggtctgaagccctgtaatacacccctgttgttgttacatgtgcaccagagtgaccgaataagtatttctatgaagttctctatgttcacaaaaaaaaaaaaaaaaaaaaaaaaaaaaaaaaa

SEQ ID NO: 15573 - DNA, 3866 bp, Oryza sativa
  Clone ID: PAT_MRT4530_21404C.1
cgaaatgtcagcctctagagaaaacgacactttattccctactctcatttctgcagcggacgaacaggttgcttgtttaagggttaacatggcagcgtagaggccgtcgccgtggccggcgaggagggcgtcatggccgccgaactcgacgaccctgccggcgctgacgacggcgatgcggtcggcgtcgcgcacggtggagaggcggtgcgccacggtgatcgccgtggcgcgccgcgaggccctcctcagggcctcctgcacgtgccgctcggactccaggtccagcgcgctgctcgcctcgtccagcagcagtatcctcgcctgcttcacgatcgcccgcgcgatcgcgatcctctgcttctgcccacctgacaactgcaccccactctccccaacctgggtttcgtagccttgggggagggcggagatgaacttgtggatgttggcctccttggcgtcctcctcggtttcacgacactggcccggcgcgcggcggtccccacgctttgcagctacagccccctgccgccaccgccgccgcgtgtgtgccccggcgcacacatgtcgcggtagtgcgggcgcgtggaccggcgcgacaaggagtcgtcccaccccgtccgcggcaacagcgcggggcaggcgggggtgcggcaggaccctgatggcgacgacggcggagggcggcggggtggaggagtcggagtgaggaggagccggaaggaggcgatgcgggccggcggttggcgtccgagggaaggaggcagccacacggcggcgccagcggagctccacgtcgatgggcttcccgtccttgatcgtgatccttcgcttggtggagtctccggtgatcgccggacgtcgcttgaggatggttagtatgccggcgatggccgccggggcgccggaggtgtcaggggcgaggccggcgagctggccgacggagaaggagctgaggacgaggatgaggaagatcttggacacgtcgccgaaggtggacacgccattgttgatgaagtgggcgccggcgcagagcgtcgccgtgtaggcgccgtacatggcgccctgggagagcccgaggatgacgcccatgagctgcgatctccggctggccttggccgccggcccgtccagcgcgcggttgaacgtgccgacgacgctgccctgggcgcagagcgccgcgacggtgcgcacgttcgacacggcgccggcggcgatgccgctggcgcgggcgtacgcgccgtcgtcggacctggcgcccacgttgatgagcaggttgaggtagctggcgccgagcgtcagcggcgtgcacgccgtggccaccagcgtgagccgccagtccagcccgaagcaaatgccgagccccacgccggccgagccgacggccatgagcagcacggcgtagcggtcgccgaacatggagcggaacgcgacggcgtcccgcgcgagccgcgtcaccaggacgcccatcgcgttgtcctcctcgtcgaaccacgcgggctcctgccgcatgatggcgcggaagaggcggtcccggacgcgcatggtgagccgggcgcccgcccagccgcacagcccctgctgccccgtcatggtcaggatgcaggccacgccgaggccgaccaccgccatggccaggtactccacctgccgcttcatcctcgccgtgtcggcgtcgaagtacacctccaccgcctggcccagcagcagcgggaacaccgagaacaccgcgccggcgtgtatgcccatcaagaaccccaaaatcagcaatggaccttcccgccgctgcagcctccatatctcggagaccctcaccttggcgtcctgcgaatccttcttctcctcctcttctcgaatcgtctggaagccgtacctcgacttggacaccgacacgtcgtaccccgactcgtcggtgaagctggtgtacgccgctgcagcgccggcgaggtctggcctggcgccgccgctgtcggaggcgaggctgaccagcgcggagtagggcccgcggcgggccatgaggtcggcgtggcggccggactcgacgacggcgccgcggtcgagcaccgcgatggtgtcggcgttgcggacggtggcgaggcggtgcgcgatgacgacgacggtgcggccggcggcgaggcggtcgatggactgctgcaccacggcctccgactgggtgtccagcgcgctggttggctcgtccagcagcaggatgcgcgggtcgcggatgatggcgcgcgccagcgcgatccgctgcttctgtccccccgacagctgggccccacggtccccaacctgagtgtcgtagccgtcggggagggcgaggacgaaggtgtggacgttggccatggcgcacgccgagatggcgtcgtggcgcgtggcgttctccttccccatcatgacgttctcgatgatggaggtggagaagaggacgggctcctgcccgacgagcccgatctgcgaccggagccaccggaggttcagcgacgcgaggtcatggccgtccaacgtgatcgaccctcgagtcgggtcgtagaagcgctcgatgagcgcgaacatggtggacttgccgccgccgctgacgccgacgagcgccagcgtcttggcggcggggatgaccaggttgaggttgtacagcaccatggcgtccggccgcgacgggtacgcgaactccacgtccttgaactccatccgccccttcaccgccggcagcgcccgcccgccggcgccgtacgcgtcgatctccggcacccggtcgatgacctcgaacacccgccccgccgccaccgtgccctgcgcgaactgcgccatgtacgacagcgtcagcgccaagccccttcctccgaccatgacgccgaagaagcaggcgatggcgtcgccgcccttgatctcgccgttggcgacgagcctggagccgtaccagagcgccagcgcccactgggagtaggtcaccaggtagatcacccccatgccggcgcccttggcgaaccccatcttgacgccgatcggcgccgccttgtccagccactcggcgtactcgccggcgagccgctcctccatgacgaacgacatcaccgtcctgatcgagctgatcgcctgctgcgccacgtcgccggcacgctggtacgatgcctcttccttggcggtgaggccgccatagatggccttgtaggccatgccgcacgccatcatggcaggcgtgacggcgaagacggcgagagcgatcctccacgatttggcgaagccgaccacgtagccgaagacgaaggtgaagacgtggtgcacgaatcctggaatcttctctcccatgacttcttggatttgggcgacatcgccggagatgctgtgcatcacctcgccggtgctcacctccgtgtcgaagaatccgatctcctgcctcagcaccgccttcaggtactctcgccgcatccgcagcgccgacctctcgccgatgatcctccagcaggtgatctcggatttgaatcgaagctgagaaatcgaagaaatgatcatggcgatgcacgcggcgagacctgcttgacgtccttcatcatctgcgtcttgtcgacgttgacgatcttgttgacgaagttaccgaacaggtaggagtaccatggcagcgagccgccgttgatcatggcgccgacgcacccgagcacgaggaggacgatgtccatggccgtcgagtacttgaaaagccccgcgacgccgacgggttctggccgtggtcttttaacttccttagctcctttcttgtccttacgaaaaccttctctcgagcatacaaaggttcttgaccttgtgatgttttcagctgatttgtccgatgaacttttacgaacactgaatcccacatgtccagcgtacct

SEQ ID NO: 15574 - DNA, 600 bp, Oryza sativa
  Clone ID: PAT_MRT4530_21405C.1
atggccaacaagagcagcagcgcagcagcagcggaatcaccatggtggcagcagcagcaagagctcgagccctctcccaacgccggaccccgtcgcctcctccaccaccggggggacgtgccgcgcagtgctccccctcgccgtccatggccgccgggagagagagggggccgacaagcctcttccaacgtgctgctcacgtcgtcgctgcgcgccaaggtgggcgatttcgggttcgcgagatgggcgtcgggaagagtgacgccatcgtcgtcgtcgacggcgtcaagacgaagcgtcagctacgatacgctcgtggggttgtttcgtccgccggcgagcggaggcgatgaggcggcgtccacggcggccggcggcgggagcctgcggtcctgtactgccgaagcgccgccgccgtccgagaagggagaggagagaggcggcgtagcgaaagggggggaaggggacacagacgacgacgatgacatggagatggcgcggagctggaggtggtcgcctgcacgccgccgctgccgatccggtggggaagagaaaagggggagagaagagagagaagggagagagagggaggaggaataa

SEQ ID NO: 15575 - DNA, 900 bp, Oryza sativa
  Clone ID: PAT_MRT4530_21406C.1
gtggtgtttttttttttttttttcaaagggatttaatgaaaaacgaatgcgattatttggcaactcgtctatgccaagaacaaagcctttatcaaatctcactgcgaggaacacatcatcatgcttcatgcatgcatcaacgactcaacatttgcactcctccttagctcggctctgccgtcgccgtgcgcagcgagagcttgcagtgcgcaatggcgctctcgatgccgtcctgcaagtgctgggccgagccgtctataccgcggcgcggcggcggcggcgccgccatggaggagcggctcgtcttcgtcttgccggtcgtcgtcggggcagcgaccaccattgctgctgggtctggacctccgcggcggcgcgcgaggctcgtcgcgatcttgttcaggtacttccgtgcggcctccttcgggttagtagtagtggcggcgcgccgctcctcctcgccgccggcgatcgcgcgcgcctccagccgcggcatcgagtccgcccggaccttcgccaagaatcggccgctctgtccctccggcgacaccgcgccaccgccgccggccgccttcggcttcctcagcttgcgaagaagaagctcgcggagcctagcagccggcccgagcgccgccgccacgccgccgccgcgaccatcttcgtcctcgtcggacgccacgttcaccgccccgccaccaccatcatcggcaccagcaaaatcaacctcctcctttcctcccgacaccacccaccggtcgccgaacgcagtgaggtcgaggtcaaagagcgacgacaacgacgacgaggacgacatcgacttcacgtcggcatcatcatcgacgaagttttcttcttcggtggccatcgcatccgccgcgctctggctgtggatggatgtcgtcg

SEQ ID NO: 15576 - DNA, 372 bp, Oryza sativa
  Clone ID: PAT_MRT4530_21407C.1
catcacaaatagaacataattgattttgatgcaatagtccataaagacatgcttcacagaagtttacatacaacatatcaatagttccaccacagggggggcaattgatataattatagaactgagtgcgaatatttcattttcctttagaaatataacaccaaataaccatgaaagatacgaagtgggcgtactgccaaagttgaatttaaatggtgctgtgcagaatgccaatgttggttcataggctttggagcggtaaccaattgtttacagccaggatttttgaacactgggggaataataactgctctttgggcatattcaatgctgcattatttaattttgggttcaacaaacttgctccatttt

SEQ ID NO: 15577 - DNA, 275 bp, Oryza sativa
  Clone ID: PAT_MRT4530_21408C.1
gtgcctaagccccacctatttacatattgaaataatggatgggaaacattactgttaggccgttggatgaattgatactacagatggacttctactaagactgttctgtgattgataagaatgaataggtataacgggcacatggtccaacaggaatggtcagtagaatggcacagctgccttcgatattgagatggcagtcgtctcctattgcaagagcttggatctccagaggggaaataaatgtccattattctgaaatttgacactgggtt

SEQ ID NO: 15578 - DNA, 275 bp, Oryza sativa
  Clone ID: PAT_MRT4530_21409C.1
attgttattgtttctgtttttttttggtttctctgttagttgccacacaggtatgttcactctccctgctcaaatttgatgtttgaagaggaaggatggatgaaaaagctctgtcttaatccaaagtctttacaagaatgacgctaagaagaaactgggggaaacccaccattactgtcagctgatgctcctgctgctgctagctgggtcactttctagctgagaagaggccgaggacgggatccatgaacatatgctggttggtcagtggtgct

SEQ ID NO: 15579 - DNA, 678 bp, Oryza sativa
  Clone ID: PAT_MRT4530_2140C.1
atgccacgtcatcaccctctctctctttcccctcctcttcctcctctctctctctcactcttctcttcccttctctggccaagccgaccggcggctggggaggaggacgccagggcgaggcaggagaggagaaggcggcggcggctgcgacgcgggacaaggcgagggtggcgggcggttgtgaatggcgtcaatagcgcggtgtcgccaccggtgttgggcgggaggcggaggcggggccgggcaccacagtggtggccgcggaggtggaggcagggccaggcgccgtcgcaaatggtgtcgacggagcgctcgccgccggccagcgggagcgagagcaggccagccggtgggggaggcgagagtccggcagttggcgatgggcgacgaggcggcggcgatgacaacggcgcgagagcaccagagcaggaggaccttcccccacagcacccccaccgccaccgcagccgatgctcgtcctcggctcggcaaccacgtgctcgtccaacaagtggctcgccaaaccacgcgcttgtcctcagtggcgccctcggattctgcaccaccttcctcaagtgcatggctcggcttcttcgctgtcgtgatgaggtgctcctcctctccgacggcaacggggaactcgcgatgcgagagttcgcatcaattacacaaatgtaa

SEQ ID NO: 15580 - DNA, 415 bp, Oryza sativa
  Clone ID: PAT_MRT4530_21410C.1
cggacgcgtgggtgcatatagttccttatggtataatatcagctaccaacctgccaatatgttctacaatctcataatgcatacaatgtctcacaatatcagctgatggatggcacagcctaacaatatgatggaaattgtgtggtcagaagcacaacacagaagctggagcaattttccttccacttctaccttgacagagaagttctgaagactgattttcattctctgattccaccagccactatgacagagcataccttgcttccacttttttccttgatgaggttgtagtgttcccttccccatatttttttgttgttcaacttaagattctcgccgttaaaaaattgcaaacaagaaatttggttccatttgatactgtgcatgtaatacaggaggtttcatttggtct

SEQ ID NO: 15581 - DNA, 359 bp, Oryza sativa
  unsure (1)..(359): unsure at all n locations
  Clone ID: PAT_MRT4530_21411C.1
ggccnttggcangagctcgtgccagccccngcacgaaatgatctagtaacggntgtnnccgtcatttagaatcgantncaaccctgataggaggatgggggagtaggctgcgattcttatggcgtgaagccccatgcaagattggaatccataacgaggatggntcttcccacctanggatctccgctcccntaaggtttccaatgngctaccaggggtatcattcaactcccgagtatgctgtcctccctgtctcctagtgccctgngagtgatntactactcnttctgaatcatccantcgacgattgtcatacttcaaanccntaactcttntgcaccattattgggatctggcca

SEQ ID NO: 15582 - DNA, 510 bp, Oryza sativa
  Clone ID: PAT_MRT4530_21412C.1
atggctatcagtccatcactttatttgctccagacggcgcccctgcagttcaggtcaggcaaaccatcgaacggctggggaggcgatcctgactcggggcgggggacctggccggaacagggtcagccagggcgtcgggctcgggatcaggcagctgccaaccagctggtccagcgtcgagtgctcgacgcaggcgcagccgtactgcactggtactttggcttgttgagctcgtggttgagcatcccctgcagcacaacgaggatcacgcacatgaagactggcaacaccgtgatgaactcgttcgtcttcatattcctcctctgcatcaagaacaagacacagtcagagatcagaccaaacatagcaagaagaacggaagaaggaaggggaagtcagacctggaggaggtattacgaggcgagtccggaggcgacgcttgacgaagaggaggtgtcatcgtcggcgaatgagcagcggctgctgcctacaggaagaggcgctgtttag

SEQ ID NO: 15583 - DNA, 246 bp, Oryza sativa
  Clone ID: PAT_MRT4530_21413C.1
atgccgccctggtcccgtcgtgtcccgtggactgtagcgacgacgtcccactcgatcgggcaaccgccacgaaagcccaccaacgctttggacggaggcgcatttacgtgccgcgtgagcgggcccgtcgtcctcccgtgcacatggcacgtgggccccgcgcgggtcgctcgctactacgcctacgtgaagttgctggtcgccgcagcgctggcttttggtgttggtggtctctggctgcaatgc

SEQ ID NO: 15584 - DNA, 1281 bp, Oryza sativa
  Clone ID: PAT_MRT4530_21414C.1
ttttgggtgtttcagagaacttatatataagcctgaaaaaaaaattacaactgtggttttctcattgggtgaatcattgtacaaatgaacaaaaggtgagctaagaaatggtttcctttttctttttacagattttttttttctgacgagtagtagtatcatacagcgctatggcagaggcttgatttccattgagattgtctcgtctccaaccatgccaagaatctgtagaccttgccgaagacgctgaggaagacgaggccggcgacgaggctgtacgccagcacggcgacggcgccgccctcgatggcgacccagccgacgaggtagacggcgtcggccgccacgaacacccagccggcggcctccagcgccgaccgcgtccacgcgctgagccgctcctcgccgtaaatccggcacaccatccgcgagcacagcgcgaagatgatcgccagcgccgtcttggagaggccgcggtaccgcaccgccgtgccgccgacgacgaggggctccatgcggcagaggcaggtcgcgcactcgccggaaaactgcgaccaccggagcgcctccagccccgtgtagtaggggagcacgacggcgtcgaggtacaggctggcgtgcagcacgccggagacggtggacgcctccagcaccgcgtaccggatgtcgccgtcggcctcgttccggaacgccagcgccgacgcctgcagcagcagcagcaatgccgggccgagctgcgcgagcgggaacacggcgttgatccgctgccccttggcgagcacgagcagcaccagcggcagcaggaacggccccgacgggagcaggtacttcctcctgatccccctcaccccgcccgcgccgccgccgccgccgccgctcctcgccaggtcgagcaccgtgaacgcgagcgtcgagaggaagcagtacgcggcgaaggcggcgacgagcacgccgacggcggcgtggtagtcgcccgggtacgagctgtcgcagtagtagtggtacgggcaggtgacgaagtccgtcgtctcctccagctgccacctcgtgcacttgagtatctgcctcaccacggcttctccgccgccgccgccgccgtcgtgcgccgtccacgccgaccggccggcgccaagaagcggcgcgagcatctggtcatacgacgacatggcagcagctgtctcctcctcctcctcctcctcctcttcttcttcctctgattcttgtcctgtcagctatatgatgcatgcctgcatttggtggctaatgatggcttgtctctct

SEQ ID NO: 15585 - DNA, 346 bp, Oryza sativa
  Clone ID: PAT_MRT4530_21415C.1
tgacagaaaacacgaggcttgggagatctgcttaactccagtgcaggttcaaaactcgccttcggatgtatgagcgtgacagttgatttgatcctacaatcaacaagaaataaagacaaagaaaccgtgattaaatccataaatgatagccgatcggctaggactctatccatatatggcaatcatcttgaagcacaccaactcaaacccgatgttggatacgagtcatattgtcggaatcggctgtattacctaacccagtctgactcaaacttagccgatcctagtcgtagccgatccggactccaactgattcttgctctgcttccgcgataatcctcatctt

SEQ ID NO: 15586 - DNA, 408 bp, Oryza sativa
  Clone ID: PAT_MRT4530_21416C.1
atgaggccggcctgtgccctgtggttcccgttcgtgctcgccaactcgctggagaaggacatcttctcggacctcttctacgaggcgcccgtcgcggcggcggcatcggctgcggctgctggcccgggcgccgatggcgacggcgacggtgaaggcaagccttgcaaggacgacacggcaatggcggaggagtgtggcgggccgagcgcggcgtccgaggcgccgcgcgacctgatgccgccgcctaagtcgatgcacgcgtcctgctcgaggcagcaaacgagccttgcgaacggcggcgacaacgccggggacctgtcagagcttgtccgggcgaggacgtccggcggggcggggtggcgcggcggaagccggaggccggtggcgccgcgtcgtcgtcgatgctga

SEQ ID NO: 15587 - DNA, 285 bp, Oryza sativa
  Clone ID: PAT_MRT4530_21417C.1
atggcgcccgacaccacgtcgaagccagcgttgtttcctgatgcagctaacgccgcgatcgatgaggctgtcaaagccgtcgccgacgccgtacgcaattccttcacaccctcctccggatccgacgttgacccaactactggagaagcggtcgctgctgccgctgctcggcgcgcatccaaggctgcccacgacacactctccaccgctcttgcgtcgttctgctccacctcgcattataacattgttgggattgtagatctattatactccatccgtacataa

SEQ ID NO: 15588 - DNA, 387 bp, Oryza sativa
  Clone ID: PAT_MRT4530_21418C.1
atgctcgacgagagcggctgcggtgatgtcgacgtggcgggctcgagtggcggcgaagcttggaggggatctcccgatccagccgcggcgacgatggtgggccagcgggttgggtgctccgacggtggtggccgtcctgctgctgccactaacgacgcaagagcggtggagagtgtgtcgtgggcagccttggatgcgcgccgagcagcggcagcagcgaccgcttctccagtagttgggtcaacgtcggatccggaggagggtgtgaaggaattgcgtacggcgtcggcgacggctttgacagcctcatcgatcgcggcgttagctgcatcaggaaacaacgctggcttcgacgtggtgtcgggcgccatggagaagaaggaatag

SEQ ID NO: 15589 - DNA, 574 bp, Oryza sativa
  unsure (1)..(574): unsure at all n locations
  Clone ID: PAT_MRT4530_21419C.1
ccggccgggaatcttattctacatatttctatcttatatagaacaactagcatagctctcgttgcccagccaggttgcccagccaggttgcctggtgcacaatgagagctggctagggcggactcattctgctgttggtgcccaacgatgctagctgctactcatactagtgaagcctgccatggttctgagaaatttttggatactccgctgcgtagatatgcactaaaagcttgtatgtttcgctgactacatactatggatatcacctgtttgacaagagaaggattacataccacgatgaagatgaattggaacatgatgcaagtgatgtagcgccccatataggagtcactcaggaaagcacagaagagggagaaattnagnacgggtgcccatccacatgctgacgctattggcggcctcggcgttctcctggtggagcacctgcctgaggaacaccaccaggcccacggcgacgccaaaaaatgcaaagntggccaacacatagctcactgcatcgncaagnagagctgcntaatcactgagggatatccatttannntggncttct

SEQ ID NO: 15590 - DNA, 395 bp, Oryza sativa
  Clone ID: PAT_MRT4530_2141C.1
ccggaccggacaacccgggacgacccacgcgtttgtttgccacaaccatgcatcatcacacgaaggggactgcgtgaacatcggagacagccgaaacaaagcgcccgcccagagtgctatgctgcaacgatactctgtcaaaatccaagccccaaacgaaagagaggaccacgatggcaaacacaccgatgagacagaaaaccgagtggctgcaggaaacaacccagccacggaacgatccaacaacgaaacctgaagccagcccatacaagaacacccgagggagaaaagcgggaccccagagcaaccggtgaggacaaggaccgcagataagcccaccgagggcgcggaacacacgtgaggaacgccgaaggggatatcgaccgacccaccct

SEQ ID NO: 15591 - DNA, 622 bp, Oryza sativa
  Clone ID: PAT_MRT4530_21420C.1
gaatgggtacgggcccccctcgagtttttttttttttttttttattcaaatgtagcccataaaaaactctaaaacaccagcaatgtcaaatatcttgtagtgtcctggagaaaagaacaagtttttgattttaaaaatatttttttttttttttttagcatagcaggcaataagatgataagcctaatggcatcaaacatttcgggtccaagcctccaaggacaaacaaactggcaattttataagagaataaaagggagcatatccattgcactaaattcttggaagaccatccaagggctaatgcctccattgaatctatcgctgctttttgacaaggacagactcgcgactccattatttggtgaatatccccacaacccaacacacttatatgtaaatcagataaccacacttattccaaagcttaatttctcttgacaattgcaatataacaagaatgataggagtgacatgtgtagcaaacacctaccgggtgtcaggatttgtccttgacatgaccaggtttttggcagcatgtcatgtggcttatcctgcaaatcagtaggaaatcgctcaaattgctgataaaccagctgtttgttacagtttccaaaacctg

SEQ ID NO: 15592 - DNA, 473 bp, Oryza sativa
  Clone ID: PAT_MRT4530_21421C.1
agatttcgtatttttggaaatgtgggcgaaataatggatttcaataatctggtgaggaggctgaaaagaaaagagcctaattgaatgaaaaattttagaagtactaaaaaatttctgacgaaaaaaactgaacaaaatttggccgaatttaaacatgttgtgctgtttccaaaacaaattgtgtaaatcaaaaacatttcagaggcctgtataatggatcttcccccgcaaaagttttagcaaaatttggctgaattcatacttatttcgtaattaagaaatgtgtgttttttttaggaagcatatcctacctggtggccaaaagaccaaaaatttcggaaatgtcagtttaaattatagaacccgaacttataacttggcatgggggtagaacgccatttccaaaattttgtcatcagttaagccagaaatcttgaaataatgccatcagtggtttagcaaagacacatttt

SEQ ID NO: 15593 - DNA, 362 bp, Oryza sativa
  Clone ID: PAT_MRT4530_21422C.1
cagagggagagggcatgcctgggcagagggagtgccaggtaggacctagtgccgggattgaagctgcagaccacatatgggtcacaagatatacttcattgagagagtaacggtagcacgctaggtgtagagctgacccttcaccccaaaccaagtcaggccgactggagtggagctgggcgccacacaaactacagcaccaagagtctgcttgaagagagcagattcgaggtgaacaagaaggcaatcctaaacctattactgcggcatgactagcatataactgcatatgggtgaaggaaatgaaagggggctgacaggcatacacgagacacctagcatggacatttggtcatggggtg

SEQ ID NO: 15594 - DNA, 394 bp, Oryza sativa
  unsure (1)..(394): unsure at all n locations
  Clone ID: PAT_MRT4530_21423C.1
ggccagaacgcacaaaacatatatagtactttatcaccagctattttgttttcaaaacatttcattattcattatttgttttgatcactatctcgttgcatgcaacacagcaacggggtgatcctactagctatgaggcaagccagctaagcctagtactggccggcgggaaaaatgctgcactggtggggctcaacccggcacatcgacggcagctgcgccgcgtactgcctcgccctggtcagcctcacgcgggtcatccccgggtgctggtggtgctcgccgtaatagccctcctccgacgacccctcgccgtagtacccctgtttagaaaaaaaccccttgccgncggagtactcngaagaagacaacgaccagtcttgctccaggggga

SEQ ID NO: 15595 - DNA, 122 bp, Oryza sativa
  Clone ID: PAT_MRT4530_21424C.1
atattgggtggaccacacgagtccggtctaatagtgttcacgtaggttgtagagagcacagcaacgttcgtacacagcagcaaagactgagactagttagcttagttgacatggttctaagg

SEQ ID NO: 15596 - DNA, 606 bp, Oryza sativa
  unsure (1)..(606): unsure at all n locations
  Clone ID: PAT_MRT4530_21425C.1
atctatcatccncncagcacgcagccaggagcctgtagagcggacacccttcgttttttttttttttttttttttttttttttttttttttttggggcagagggcacaaattcatttttgggcctttttcaccagcttttttgttttcaaaacatttcattattcattatttggtttgatcactatctcggtgcatgcaacacagcaacggggagatccttctagctttgaggcaagccagcttagcctagtactggccggcggcaaaaatgctgctctgctggggctcaacccggctcatcgacgggagctgcgccgcgtactgcctcgccctggtcagcctcacgcgggtcatccccggctgctgctgctgctcgccgtagtaaccctcctccgacgacccctcgccgtagtacccctgctccgacaacaacccctcgccgccgtagttctccgacgacgacgacgaccagccttgctccaagggcatcggcatgctctcctcgtagctcctcaccatccggcggatggcggcgcagcggctctcgcggctcacgtcctgcagctgctggcagcactgcatccgcaagccgatcgcgcccgggc

SEQ ID NO: 15597 - DNA, 347 bp, Oryza sativa
  Clone ID: PAT_MRT4530_21426C.1
gcacaaaatcatatatagtgctctatcaccagctattttcgttttcaaaacatttcattattcattgggctgttcggatcactatctcgtggcatgcaacacagcaccggtgtgatcctactagctatgaggcaagccagcttagcctagtactggccggcggctaagatgctgcactgctggggctcaacccggcacattgacggcagttgcgccgcgtactgccttgccctggtcagccttacgcgggtcattcccggctgctgctgctgttcgccgtagtagccctccttcgacgaccccttcgcggtagtaccccctgcttcgacgactacccctttgccgtc

SEQ ID NO: 15598 - DNA, 798 bp, Oryza sativa
  Clone ID: PAT_MRT4530_21427C.1
gcacgagcggagactagtggcggcggcggcacacgagtgcactcggcgcgcgatggcttccagctccaagcgccggtgaggcggacggtggccggcgatgggacgcgacgcgcggcggcggcgcgccggcactgcagcagccagggcacgcggctcaccggccactggccgctggggcatgggggcgccgggcggcagcaaggcagccaggcagggcgcggcgcgcgggcgggctggcggggggacgcggcggcgcgccgacacagcagcagccaaagaggcaacaaggcaagcaggcagcagcgccgggcagcaacaaggcaggcggcaagccggacagcaccaaccaggcaaccaccaaggcagcaaggcaagcaacagcgccaagaggcaaggcaacaactcaacaattgaggatttgagcaagtgagattacccctgatgaagaataattggcgatagggtgtgctagtgtcgcacatcgtgtcatcatctattggatatttcaagattgttttggtatggataatacttatttctcgttaattctatatatttacactttgtattagatatatagtcaatttacataagacatgtctcgatttttgtcggccaattttagttcagcccccactataatgtaattctggctccaccactgatcaccgttgactgcctaagatcgttggatcttgctgtagctagaggaggaggacgggtatgaattgccgagcagatcctaagatcaaaatttgtaagattttgctcataatttcccgtccaatgcgatttagc

SEQ ID NO: 15599 - DNA, 2254 bp, Oryza sativa
  Clone ID: PAT_MRT4530_21428C.1
tcgattcacgccaaaatattgccgcacccaaagccggctccgctcctccgcgtgcgccgccgccgactcgatcgaattcgatcgctttcgcctccttcaccacctcgacgcccgtcttccgccggggggggggggagctcccaaatcctagggtaggctaaggcccccaacaatcaaccacagaaacccacgggggtcttcctttccttcaattccaccgcctctcatcgggccgcgggaagaaattggtcggaatcccctccgcccgcgctgccgccgggaggtccttagctttaaaggtctagctggagtatcctgaatggatttgaatgcttcaccatcgcctgaggaagatggccagtcttatgaagagcatgctgttttcttactgagtcaacattggcctcctggaattgataaaattcgatgccatcgagcaatcgaaggaggaaactaaaaaaggacggaacatgttgattgacccccgatgaaactacaccagattcactatgatcgtaatattcatgataaaactatgaaacatgaagaagataatgggccactcaagcgcagtcgaacacataatccatctggtgatcaaatcaatactaatgtaaatgttatagggggcgtcgctgataacgtcaatgaagatttgctcccggggaaaagatatgagttccatgaagttgtccatataggcagataagatggcaaagattcaggttcggagtttgactcaacaaagagcgagaggtttaagattcggagaaagcgatcgtgttacgctactgaataagcgaatgttgcgcgccacctaacgcttgttgctcgagacaattactctcttaacaatcgtatgtatggctttagtagatttctgatccgtgttacccttagaaagtctgataattgttttctccattataggtttcttgagggtaatcttattggtgatattatagtgcattacctaatgcatacacaactcattagctttactgaggcactgaacatatttgctcaacggcgacctcctggaatatataaaaatgactatattcaagctatctattcattttaccatgaaattcctgaaaatatcgtatgccctccaacaccagaatggaagaggccctctgatcttgatttgaatggtgaagctaagcaagatgatgatgatgatggcaatgtagatcgtgcaccatcacctaatcacgaagatgataaagtcattactaatgatgatatcttaggggatgctgtaccttatgaccagcaagatttcctgcgcagtatatgttttaggttacttgaattagtgcccagtggtagagctaatgctcagtttcccggatctcatccagtttctcttaacagcgagaatctgcaaattctgagacagcgatattattatgctacgtggaaagctgatggaacgcgatacatgatgcttataacacgtgatggttgctttctaattgatcggaacttctgctttagaagagttcagatgcgttttccccttagaaattcgaatgaaggttttcaccactatacgttaattgacggagaaatgattgttgacactgtaccggatttgggattgaagaggagatacttggcatatgatctaatgtcaattaattcccaatctgtagtcaaggtaaggagaaaggatttctggcaactttctgcagtgaacaagatactgaaggagtttattccaaagctttgtcatgaatctgatgggcttatattacagggctgggatgatccttacgtgactcgtacccatgaaggtcttttgaagtggaaatatccagagatgaattcagtagactttctgttcgaggtaatgaggagcatcactgataacattactgaagacaagctcctggaggaaatatatgagatcatgaccttcctatgtatgctgataggaaagcaaaggctcacgcgcgaagtatggctcaacaacgaaggagatgattaggattggttatatgcattcgtcttacttcttagaattataaagagttgtaaccctacaaccaacagatggcaaaggctagctggcccaggctgtagcatgcatagataatgttactatatcttcatagcgagccttatgcaggccgagaatttttttttcaatatgatctttctgttggtcattcacatgtgtcatttcagaatgctgtaaatcttcaattaatcctgtattctgtatatccctctttttttgggcttt

SEQ ID NO: 15600 - DNA, 449 bp, Oryza sativa
  Clone ID: PAT_MRT4530_21429C.1
cattattcattatttggtttgatcactatctcgttgcatgcaacacagcaacggggggatcctactagctatggggggggccagctaagcctagtactggccgggggggaaaatgctgcactgctggggctcaacccggcacatcgacgggagctgcgccgcgtactgcctccccctgggcagcctcacgcgggtcatccccggctgctgctgctgctccccgtaatagcccttctccgacgacccctcgccgtagtacccctggtccgacgacgaccccttgccggcgtagtactccgacgacgacaacgaccagccttgctccaggggcatcggcatgctctcctcggagctcctcaccatccgggggatgggggggcaacggcactcccgggtcacgtcctgcaattggtggcaacactggatccccaggccgagccccccccggc

SEQ ID NO: 15601 - DNA, 799 bp, Oryza sativa
  Clone ID: PAT_MRT4530_2142C.1
cgtactggaagcaacgtgggaagatcagaaggattaagctggggattgataacactaatttcttcaaagcccatgcgtccaacaatcatcgcaaaacttatgtacgcttgattaaagttcagggtgtcgaattctctgatcatgctgctaaggcgtcgatcatgcatgattattacagtgcaattctatggtctacctcaaatcctgagtggcattttgatcttgcagcgttgtatagtcatcgcatttggaattgtgacagtctgatcgctctattcacccagactgaaatactgttggcaatccggcaaatggacaggaacagtgcgccgggcccggatgggtttggaccggggttttatcaggctgcctggggaacaatatcatctgatgttatgctaatgatgcagagttttcacgcaaatgaggctgatctggagcaaattaatagagcctatattgtcctgtttccaaaacctaggaaggagaacacacctgatggataccgcccaatttccctgcaaaactgtttagttaaaatcattgcaaaagcgcttgctaacaggctgcaaatggtactccccgagctcattgatgctgaccaaactggtttcttgaaaggaagaagtatatctgaaaacttcatttatgcaagtgagttgattcaatgctgtcataagaggaagttacccactgccatcgttaaattggattttgccaaagcattcgactcggtgacctggatcagtctccttgaaattctccgcgtaagaggcttccctgagctgtggtgttcatg

SEQ ID NO: 15602 - DNA, 411 bp, Oryza sativa
  Clone ID: PAT_MRT4530_21430C.1
ttctagatcgcgggcggccgcccttatcatggctggtcgtcgtcttcgtcggagtactacagcgaaaaggggtcgtaatttgaacaggggtactacagcaaggggtcttcagaagaggtctactacggctagcagcagcagcagccggagatgacccgcgtgaggctgaccactgcgaggcagtacgcggcgcacctgccgtagatgtgccgggttgagccccagcagtgcatcatcttcgccgccggtcattactaggcttagctggtttgcctaatagctagtaggatcacaccgttgctgtgttgcatgcaacgagatagtgatcaaaacaaataatgaataatgaaatgttttgaaaacaaaatagctggtgataaagtactatatatgattatgtgcgtgctggac

SEQ ID NO: 15603 - DNA, 582 bp, Oryza sativa
  Clone ID: PAT_MRT4530_21431C.1
actagtggatccccgggctgcaggtttgatcactgtctttcctgataataaatccataaaaattaaatgtataactacatgaacgtatttttatgaaaatggctaatcatttttttcatgtataaaatctaacctttttgcatatagtagcaagttaagattttgaggattagcctaaagagcgaaaattaatcttagtggaaatctgtcacaaacaatattttgtttgttcttgtaagagcatgtattgtagtcccgtctgaacatgcaagccattattgacttttcatggtccccaatcaaagactttgacaaaagttctgaattgtgctttaccagtaaaaataataggattttgctagacaattttagtactatttgttctcatatactccctccgtttcaggttgtaagacattttgactttgactgaaacggagggagtagtcaatttatatggtcgagatacatgaatgattgaagttttaggatcgtgagtgcacaatttccagggttaccataggaactaacaggggattcatataaacaaaacagaagttggaattgcaaaaaaatagttgt

SEQ ID NO: 15604 - DNA, 562 bp, Oryza sativa
  Clone ID: PAT_MRT4530_21432C.1
ttgtcttcgaccgtgcagcttcaccggcccgaagaggcttcccagccagatgttccgcccgcccgggcgcgctcggcctgcggaatgcaggtgctggccagcagctgcaggacgtgaccgcgagtgccgctgcgccgccatccgccggatgtgaggcgccaccgggcccccccgtcccgccccccctgtgagccacaaggcttggttcgttcgtcgtcgtcggagttactaccggccggcgaggggttcgttctgtccggagccacggggttaactacggcgaaggggtccgtcggaggagggctactacggcgagcagcaacagcagcccggggatgacccgcgtgaggctgaccagggcgaggcagtacgcggcgcagctgccgtcgatgtgccgggttgagccccagcagtgcagcatcttcgccgccggccagtactaggctagctggcttgcctcatagctagtaggatcacaccgttgctgtgttgcatgcaacgagatagtgatccaaaccaataatgaataatgaaatgttttgaaaaaaaaaaaaaaaaaaaa

SEQ ID NO: 15605 - DNA, 326 bp, Oryza sativa
  Clone ID: PAT_MRT4530_21433C.1
tttttctagtaactataaaaccctgtgagtagttttttgttaggagtgcgcactgtgggtcgcccttaggatgacaaatgtgccatgttctgctgcaggcactgggtgttggcctgttgccaatggagacgcgtaggaggtgggtccattcttggtgcaaaaaggcatgtccgtgctacattgctgcaggtactactggaactgcggggccagtctgatgttcctggagtcccctgtgggtgtgggattctgatgcactaacacatactcaggtctgcattggtttgcgtacaagatcaccgctgatgatgaagacatcttgctgc

SEQ ID NO: 15606 - DNA, 365 bp, Oryza sativa
  unsure (1)..(365): unsure at all n locations
  Clone ID: PAT_MRT4530_21434C.1
gaacgcacaaaatcatatatagtactttatcaccagctattttgttttcaaaacatttcattattcattatttgttttgatcactatctcgttgcatgcaacacagcaacggggtgatcctactagctatgaggcaagccagctaagcctagtactggccggcggaaaaaatctgcactggtggggctcaacccggaacatcgacgggagttgcgccgagtactgcctcgccctggtaaaactaaggggggtaatcccgggttggtgntgatgntngaaaaaaaagttttttttagaaaaccagtgggggaaatanntttggtagaaaaaagaaattttgatgatgtattaattggaggagaaaa

SEQ ID NO: 15607 - DNA, 399 bp, Oryza sativa
  Clone ID: PAT_MRT4530_21435C.1
acacaaatgccttcgtacaacaaacacatgcttcatccaattgatttggaaagcttgagcgccgggagaatgtaagtcctatacatgactaatcatctagaatagggtcttgaacctcggactgcctgacgacgagagggtggcaaaacaatatacattgtcctctctgacgtaaagaaaacgaaacaaccctctatctcctggtgggaagctatagaaaatgtacaagcttggtggaaaaaccttacaaacatgacatgtgtgccaaagtagggattgcgctccctaatccttctcgtcgtctgggagatacagaagaagtggaaccaacgaatttttgagcacaacgagagcatgacaatcaccctcctagcaaaaattaaggaagaagccaaaatt

SEQ ID NO: 15608 - DNA, 688 bp, Oryza sativa
  Clone ID: PAT_MRT4530_21436C.1
agtttcaaggtgacagccatgttcccgtctccacgggcggggctgtccccccctgggcgcgcgcccgccaggggtcttcgcccccacctctccccgccccgggagaggttccaatcccgatgtgtccccccagccccgggcgcgctcgccctccggatccagtcgcttgccagcagcttgcaggacgtgacccgcgagtcccgctgcagccagccatccagccaggatggtgaggagctacgaggagagcatgccagatgccctggagcaaggctggtcgtcgtcgtccgtcggagtactacggcggcgaggggtcgtcagtcggagcaggggtactacggcgagggtgtctgtcggaggagggctactacggcgagcagcaacagcagccggggatgacccgcgtgaggctgaccagggcgaggcagtaccccggcagcagctgcacgtcgatgtgccagggttgagccccagcagtgcaagcatcttcgccagccggccagtactaggctactggcttgcctcatagctagtaggatcacaccgttgctgtgttgcatgcaacgagatagtgatcaaacaaataatgaataatgaaatgttttgaaaaaaaaaaaaaaaaggtgataaagtactatatatgattttgtgcgttctggacacaacccaaaaaaaaaaaaaaaaaaaa

SEQ ID NO: 15609 - DNA, 414 bp, Oryza sativa
  Clone ID: PAT_MRT4530_21437C.1
catcccagatgcccctggagccaagctgtcgtctctctcggagtactacgcgcgaggggtcttcttcggaccaggggtactacggcgaggggtcttcggaggagggctactacggcgagcagcaacagcagccggggatgacccgcgtgagctgaccagggcgagccagtaccggcgcagctgccgtcgatgtgccgggttgagccccagcagtgcagcattttcgccgccggccagtactaggctagctggcttgcctcatagctagtaggatcacaccgttgctgtgttgcatgcaacgagatagtgatccaaaacaaataatgaataatgaaatgttttgaaaaccaaatagctggtgataaagtactatatatgattttgtgcgttctggacaaaaaaaaaaaaaatata

SEQ ID NO: 15610 - DNA, 258 bp, Oryza sativa
  Clone ID: PAT_MRT4530_21438C.1
atgcagcggcgtggcggcagtagccgcgccgttgcttccaccgacgccgccggcgcatctcccttatcaccccgctcctcagagaccaacccctcgacctcaagcctcaacgcccatccaccacgcagcaatcgctaccaaccaccaccagaaccccctgaaccccctgaaccccgcccccagttccgcgcccttccccgctccgtgcatttcgacgaatggacgcagatcccgccaatgcaggcctcgaaagtatag

SEQ ID NO: 15611 - DNA, 1053 bp, Oryza sativa
  Clone ID: PAT_MRT4530_21439C.1
atggctgcctctccgccatgggcgaacctcatcggcgccctcgtgcgcgagatcgccacccgcctcccgtgcaagttcgatcgcgtgcacttcgccgccgtctgccgatcatggcgcgagtccctcgagcagctcgctcccctgccccggtctcccgctctgccgtttctcatcctaccgctcgctgaggggcctgccgtctcctgcatcctgagcgactacgccacccacccagccgtcgtcccggattgggtgcggtacgctcgctacatcggcgcgtacgacgatggctgggtcttcctctccactgctccacctcaagacgtcgacggacgatgcgtcttcgccggaatcatcaacgtcggtcccgtcccacaaggccggccaatgattgcgttctggcgcatcttcgatccggtggtccctggcttgttcagcggcccactgaacccgcgcagggaatgggatgcggtggacgtcgtgcaccaccatggagccttccatttcctcacccaaggggagcacatcattgtggccaaaccggagttccactattggtgtccggtcccggctatgcctcaagtcgactgggagtttcgctgcttcccatcgaacaggcgcggctacaaccagcagcacgtcaaggcgcgctacctagtgaagtcccgcgaagacctgctcatggtcgtgaggtgctcccctcatcctggacagccgacgtcggcgttcaaggtgttccggatggtgccaagccagcgggctcggtgtcggcagtacatttggcagagggtgccctcactgggtggccggatgctgttcgtcgggcgtggctgctctagatcctacgaggcggatcactaccccgccggcatcgcgggcggcatctacttcttcgatgatgggttcatccaggacccggtgatgctgcagcaaccgcagtacagctgcagcgactgcgggaaatggacggaatcacctggccccatggtggagcgctgcttcccggcacaaggcgcatcgaactactccccccaaggttggcgtctcccttga

SEQ ID NO: 15612 - DNA, 722 bp, Oryza sativa
  Clone ID: PAT_MRT4530_2143C.1
ttggattttggagaaaatcaaccatggacaaggcggtgctcaggcatcccctagtggaaggatcgatccctgaccgactattgatggagcgccgagagggaggtacgaaacacatacacaatcttggcaaaatcgtaacttttgcctctttcacccaatgtggctttttacctcctctatctattttttttctttgcttctagacatctacagaatctatcttctttacctcaaccctaacttctttgcatttctaagaatctttgcacatctatgctaagcgtatttaggagaaggccccttcctagatttaaataggtatttctataaactaaggatcatggagaagtcgagaatcacagagtgatgtggtatttgtcgatactgagcaccaagcccaaacgtcaaagcacttggacctccactctctctaagtccaaatccctcgacatttttgttgagaatattattgaattatgggattagggtctgatggtgcatgagattatcagtgacttcgtgcgtcgttggacttatatgctgaaagagcgtgagcaactcatgtacgagtatacgggtgagaagaccctacccagatatccctcgcagggtactactccctccgtttcaaagctcgcacaaagaaggtgttgatcgacaagcctgagtacggctagtgacatccccaccccattttgtttgtcatatataacgaaaaggtt

SEQ ID NO: 15613 - DNA, 330 bp, Oryza sativa
  Clone ID: PAT_MRT4530_21440C.1
atggtgggttgtgagcacatggttgtgaaggtcgtgctcatggcaattaaggaccgactgagaagcggcgagaagttcgtgggggtcgctggggagtccattgcctctggttttgagggggagattatgatccaggaatggtgcactgtggccttcaccccgccgccgaggggacggcgcctcctcgccgtcggccggggaacacgccttcttcctcgtcactactggtcgagacccaccgcatacagtcgtcaccatcaaattgactccgccgccagcaaccatgtccccttcgctgcctcactcctagtggcaagcactccaggctag

SEQ ID NO: 15614 - DNA, 400 bp, Oryza sativa
  Clone ID: PAT_MRT4530_21441C.1
ttaagccgtgctctgcgtaggtcgtcgcattaccggcattctcggactggtgacaggtccctaacttcttccttaagtcgatgttgttctaggagtttctagagttctttctcaaaacgacgttaccatgacaacaggtcctgggtctcgaaccggtccagtaagttgaagtcccactagtctcctttttgcatagtttaaaagaacaagtccggccgtaacacttcttccttgtgtagttctaagtaccaaagactcgttgacggttttggtaacgtttctgatatcaaaccccacctcatatgaaccaacacatgtacggacgcacaaggtaacatgtgtgttttggatcggtggagaactgagaactcacatacgaacaatgggsacacaactccaa

SEQ ID NO: 15615 - DNA, 409 bp, Oryza sativa
  Clone ID: PAT_MRT4530_21442C.1
ttgccttcgtggcccgtaaagtcctcctctacctcccccgaccgctccaggggcaccgtgagctcgggctggcactgattaggcgtgagatacaggctgaggaacggatggggctcacattctaggagcagtgatgggagggcatgtaacccatctggttgtatgggacctccatgagcttcatggccggctacaccttcttcctccggaccaagaaggagccctccttcaagggcttgttcgagagccggttcgcggtgaaacagaaacaggtgatgcacgcccggtatttcgatcttcgccggaatgacgagctccggcgagccttgtacctgccggtggttcggactccgactagcacctgcagaccgatgtcgtcgtctactacgcaggagagccattgccagtc

SEQ ID NO: 15616 - DNA, 400 bp, Oryza sativa
  Clone ID: PAT_MRT4530_21443C.1
aatggagaaaaacataactcttttttttcatttttttaggggacacaacaccaacttgatcattttttggggggactaaacccattttccccaacccaaagagaaagaacttggtggccacaaatccctccaaccccaattaaccactggtaaggtacgggcccccactttatttggcggggacaaaattgggggggtacccccaggcgttgttgttgacggggtccgcaagggggccggggaggtttttgggggggcccttgccggggacaatggcctggaccaaaaaacccaacatgggaaacatgggggggggggcggtcttggtctcctttaccttgagctccgcgaacgcctcgggggtattggggaggcccagcggggtaaaggggccccccgg

SEQ ID NO: 15617 - DNA, 345 bp, Oryza sativa
  Clone ID: PAT_MRT4530_21444C.1
atggcggtggcggcccgtgcggccgtgttgccgacgctggcacaggtggcgaagcgggaggggaggtacttggcacggcagcagaaacgatatatggctgaggaagaaaggccattgaagacaaccgtaccaccagcacgagcaggagccatccagctaggttaccattcgcgtagtaaaggcggcgccagcggactgtacgacccgcaatccagcctccgcggaccacggggaataaaagaagagagggcaaaagctgtgtcaaacagggtggactgcgtgcctgcggtgcggtgggcagcgacgctcgaattgagccggtctctcgcgtggctgaccgcttga

SEQ ID NO: 15618 - DNA, 586 bp, Oryza sativa
  unsure (1)..(586): unsure at all n locations
  Clone ID: PAT_MRT4530_21445C.1
cttgaagctacttggcgccgccaccgcggtgttccgccccgtcgagctcgcggggctggccggcgcccttgccaccttgccgtccagctcgcagagctgctcggcgctgcagcggcgttccatcccgtcggcctcgcggaaccagccggcgccatcgccacctttctgtctggctgctcagcggcgccgcccccgcggtattgcaccccgtcgagctcgcgcagctggccggcgccattgccaccttgccgtccagctcgcagaactgctcggcgctgcagcggcgttccatcccgtcgagctcgcggaaccagccggcgccatcgccaccttgctgtccggttgctcagctttcctctcctcttcagtgctgcttggagattaggatcacagatgtttgagcaagcagtaaatcgacagaaggtgctcactttctggacttaatttgtttttgtcatagatcacgaacacactgagagatataaatacgagggttcgtatgtaagttgtatcttaccaactatntaccagtttgtcagtgggtgctaatctctgttaaaagaaaataaatgatttcactttgcag

SEQ ID NO: 15619 - DNA, 415 bp, Oryza sativa
  Clone ID: PAT_MRT4530_21446C.1
accttgccagactaatcggaacagccaaaatagacaactgaatgtagctagaacatggcagtaaggcgactgcccaaacggcaacgtaatcaacctgagtatgataacgcacgatcaggatcagttcgcaccaatatgtgctgcaaaacaggaacatgatgggatgacaacagaacttgaagacgcatggtgccgtggtctcaaccacagggcacactgcgcgctagatttgggctgctggctgacgggcgaacgtgcaccaattatagcctttcacgtaatcacccatatagatgacacacttgaccatgagcggtacaagcttagagccgaccatcaaagtcctttttagtccatgcagaggcactgatgcagcatgtaacaagggtctggttgaggctcatatgcctgcgct

SEQ ID NO: 15620 - DNA, 631 bp, Oryza sativa
  Clone ID: PAT_MRT4530_21447C.1
atggcgaagagcggcacggaggagtggcggcgcaacaccgacacgcacaagatgagcgcggaggaggtccgggcggccggggtggaggcctccatgcgcccgcccggacgcggccacggcccaggggaggtgctacaccagcgcggccggatgccgtacgggcccgggaccatggcgctcgccggcctcggcatcttcggcgtcctcggctacctggtgctctaccacaaggcgaggcccggcacgcccgccaccgaggttgccaaggtcgccgtcgggcacggcgaccccgtcgccggccgtgacgcccacaagacccccgacgacgcggctgctgctgcggctgcggcacgccaagggaagtagctagctagctagctgctagttactgtactcatccactgacagaagatcgacgtacgtggtgcttttgttttctactagcccatcacccgatccatgatcttcttcttgtgtgctgcttcgtttcacacatctttggtttggtgccgttttgtttcgtggatcaaccatgtatgcacgcatgttttgatgattttgtatggttaaacaagcggtggaaaataaaaatacagacgtggataccacggaaatgtggctggaacaatgg

SEQ ID NO: 15621 - DNA, 869 bp, Oryza sativa
  Clone ID: PAT_MRT4530_21448C.1
caatttgagcaacagaaacactaacacgtcaccaataatggcgtccctcgccaactcttctgtccacctcctcctcctcgtcgtggtgctcgccgccgccgccgatgcggtgacgttcaccatcgtcaacaagtgcgggtacaccgtgtggccggcggcgctgccgtcgggcgacggcaatcagctcgacccggggcagagctgggccgtgtacgtgccggcgggcaccaagggcgcgcgcgtgtgggggcgcacgggctgcggcttcatctccggcggcagcctagggcagtgccagacgggcgactgcggcggcacgctgcggtgcgcggccgtcggcgcgccgcccgtcacggtggccgagttctcgctgggccaggcgagcaaggacgactacttcgacatctcgctcgtggatgggttcaacgcgccaatggccatcgtgccggcggcggcgggcgggcggcggtgcccccgcggcgggcctcggtgcgcggcggagatcacgctgcagtgccccggcgagctgcgcgccaaggccgggtgcagcaacccgtgcagggggaacagcacgtgcgggccgaccaaggacacggagttcttcaagaagctgtgcccggagacggtcacctacgcccgggacggccaaggcaccaccttcacctgccccgccggcaccgactaccagatcgtcttctgcccatgatgagcttggtctcgtacagggacagtaataactatcttagttcctgtacttgtatatggtggtaaataaaacctcgcactgagtgaatcacttgtttgggataatgaaaataaatggataaatcttgtcacttaaaaaaaaaaaaaaaaaaaaaaaaaaaaaa

SEQ ID NO: 15622 - DNA, 510 bp, Oryza sativa
  Clone ID: PAT_MRT4530_21449C.1
tgcggtcactctgaggataatagtgaaactttggctaaattttccttcatggcctggatgtggggtttaagtttgggttgttctgccacaatcacattatccagattattgattcgccaaccccgttcaaggattaattgatgcacctgagccaaaagtttgaggctatcggccccctgccaccgggcatcgctgggagggaagtagtggccaatgtcccccaaactcaatgcccctaggagagcatccattaaagcgtgggtcagcacgtcggcatcgctgtggccatccagtcctaaatggtgggcaatggtaactccccccaaaatcaaggggcgatcgcctacgaggcggtggatatcgtagccgttgccgatgcgtagagcagtcatagaaatttagtgagttcaaataatctaaataaattgggcaagtagagaataattagcttactaagggttacttgaataacccccaaaaaaaccggttgatccccgggtaccgagctcg

SEQ ID NO: 15623 - DNA, 1692 bp, Oryza sativa
  Clone ID: PAT_MRT4530_2144C.1
atgcatgaggagacgcggcgcgcggcggccaggcaaggaggggcggcacgcagcggctgggcgaggaggaatgcggcctgcggcggctgggcgaggggggggggggtgcagccgggcaaggagagaggcggggcgcggcggccgggaatgagggatgcggggcgcggcaaccgggcgaggaaggatgcggcgcgcgggacgcagcgccgccaccatggcgcgatggatatccgacgaacccctctcttcggtccaaccagcgacgagaaatgcagagactccagtggtgctgtgaggattttcgcggcttccggtctccagcgaggtcgccctggccgcagcgccaagcagcagcctcacaccgcctgcagcaacacttcaccagcgacggggcagccgccatgctccggccaccgtgccacatccaataacgtcgcctacctctccattcccggggcggccagtcccgccaccgccgccatcgccgtgcttcgcacttcagctctcggcccctcccaggctctcaccattgtaaagtacgttctgctcgtttctgtcaagactcaagaccctttttttctgctcatttcgaacgagttagaagatcacaaggacaaaaccaagaagacggcgcccaatttgtccctccattctgaagccttcttggactcggcaactgctggcaagcagcaagtgcagcaacctcgtcctcatgccgcctccagcaacacttcgccggcgccgccggagcggcctccgtgctccggccaccgctgtcaagtcccgccggcgccgccgcggttggggcttgtctacagcgaccccagagatgggattcagctgccgcttggtgatggctcgagctctgctcctgctcatcctagcagcgctagcttcggcctcgtcaatggctgccaagaagcaggggcgacagcctcgcggctgcggcggccacacctcgacgtcgccgacgccggagctggagctgccgccgtgctccggccaccgcggtcaagccccagcgccagtgttggggcttcttggccggaggggatcacctggagctccgcctccgccgcggtcacacccgccggtatcatacgtacgcccacagccgcgcccgtggccaccgccaccgccgcatccgcagcctccattcccgatcagcccggttgcgccgccgccgccaccaccgccgccaccgtgcttgtagtcgccgtcgttgcagccgccgtgcgcctgcagtcacaaactgttcttggctacgatgaggctgttcgagctcatcgccggagttgccatcctggctgctctgtccaccaccacctcaaacgcgccatcgccggtcgccgtggcggcggggagggcggtgagggcgccgccgtcgccgaagccggcgccgcccataaggccgctcttccgggcgccaccaccacctccggcgaggtcagttcaaccaacgtgttcgtcagcgccgccaccacctccggcgaagtcagaactagctatgagttcgccgcctctcgccggcgaagtcggttcaaccaacgcctcagagctaccatgaatccgtgacaggatcagtcggattcaggattttcagtcaggaaggaagctcaaatgatttgctaaatctggttcgggcacttcggaactattgtaaattctttgccttttgcgggttcaagattt

SEQ ID NO: 15624 - DNA, 200 bp, Oryza sativa
  unsure (1)..(200): unsure at all n locations
  Clone ID: PAT_MRT4530_21450C.1
gccgtggggttcgaacctcgagggggggggccccgggtaccccaanttcgnccttantagtggagtcgtatttaacgncgncgncttcaacttgggcccggtcggtttttnacaaacggtcggtggacttggggaaaaaacccttgggcggttaacccnaactttaaatccgccctttggcaagcaacaatccccccntt

SEQ ID NO: 15625 - DNA, 539 bp, Oryza sativa
  Clone ID: PAT_MRT4530_21451C.1
ggccgcgggttttttttttttttttttctttttttttttttttgcttttttttttgttttttagaagagcaagaaagccgggcaagccgactgaggttgtatattcattgaaaatgaagttatgtactttgaaatagagacaggtcctgcgtgaagtccagctacaagtccagcctaataaccataaagccttggtcaaaggtccttccgggaattcatattcacatcttgagagtaaccagccaattgacattggtcttcagctccaaagactccggaaactgatcatgctatcgaagcatttatccagagacagtcatggtagcctggccagagctctggtaaccctcaacagcaaggatctggtagtcgtggcttccgaggcggagaccagcctgggcccaggcgttgaagtgagcaccggtgttgacggatccgctggatcgtttgttgcggcggacggaccagtactgctggaaggtcttgcagtcaccctcgatggaaggagcacagttgcgagtgctgacagcaatgtccta

SEQ ID NO: 15626 - DNA, 159 bp, Oryza sativa
  Clone ID: PAT_MRT4530_21452C.1
atggtgggccctggccatggtggatctgatagagtcgaggtgtggcatgctttgggcaccgggcggtggcagtggagcccagtggtgggcagatccaccacctccgctgttacagtgacggcatcttctgaggcggtgggaatgggagcttctggctag

SEQ ID NO: 15627 - DNA, 338 bp, Oryza sativa
  Clone ID: PAT_MRT4530_21453C.1
gtgcggttggggagcacacgggagggacccatgtgtcggtgaaggagaggcggatggtagagatcgtgagacagcagcaggacgtagcagcacaggagttagaaggacaaactgatgaaaatgctgcagaggcagatgaaagaatatctagatctcctcctggcactaaagagaagttatggatgatgcaagaccagctaattatggccaaggcctacttgcagtttgcttccctgcatggcagtgcacatttagttcgggagttgaagttgagaatcaaggagatagagagggtgataagccactttagcagcagttcccgtgtacccacgaggtaa

SEQ ID NO: 15628 - DNA, 527 bp, Oryza sativa
  Clone ID: PAT_MRT4530_21454C.1
tttttaaggaggaggcggcaatgcaagaaggacgggcgaaacagcttgaagaagaaataaaggagcttcgtactaggcacaaaaaggagctgcaagatgcagcagaacacagggagctgcttgagaaggaccttgaaagagaaaaggctgccagggcagagcttgagaaaacatcttcccgtgatgcaccaaaaattccgcttccagatcagacaagaaatgctcctctcagaaagctctctagttctggcagtatcaatagtctggaagaaagccatttccttcaagcatcattagatttgtcagacaacgcttcattagagaggagaatgtctgctgaaagtaatatgtcgtattatcttcggagcatgactccaagtgcttttgaatcagcactccgtcagaaagatggagagctagcttcttacacatcgcgtttggcctcattagaatctattcggaattctctggcagaggagttggtgaaaatgactgaacagtgtgagaagttgcgtaccgaggctttt

SEQ ID NO: 15629 - DNA, 1270 bp, Oryza sativa
  Clone ID: PAT_MRT4530_21455C.1
caaaatttcttgtgattttggtgatactgaatatgggcactgatataaaggcatgatacactataccatcgtggcaatcaagcttggaagctgcattgcaaggtgctgacaaacaatcccagtccaaagctgatgaaattgcaagactgatgaatgagaatgaacaactgaaatcaacaattgatgatcttaagagcaagtcagctgaagccgaaatggatgcacttaaagatgaatatcaccagagagtagcaactcttgaaaggaaggtgtatgccttgaccaaagaacgggatacattaaggagagagcaaaataaaaaaagtgatgcagctgctcttttgaaagaaaaggatgaaattatcagtcaggtcatggcggaaggtgaagagctatcaaaaaaacaagctgctcaagaagctactatgcggaaacttagggcacaggttcgtcaaccgggtccggaaaaacaacggctgaactcaaagatccaggttgaggagacaaaggttgagagtattaaaagagataaggctgcaacggagaaattgctacaggaaacaatagaaagaaatcaaactgaacttgcttttcagaaggagttctacaccaatgctcttaacgcagctaaagaggctgaggcattagccgaagcaagagtcaacactgaagccaaagttgaacttgagagtcgtttaagagaagcttgtgaaaaagaaaatatcttaattaagacgattgaggagttgaggcatgctctcacaaggcaagaacaggaggctgcattcagggaagaaaggctgaaaagggattatgatgatcttcaaatggatcctctatgcagtgaacttcctcacagtgatctgcaggaacgagttcatgatcccgctccaggtctgccgacgggtctcctgcccgcagtgactaacagaagaacactgcgcacgctgtgctacatcctctctagcttcttgttggtcagaccggaccagtttaagtaaaaacccttttgggcttgttgtaaaacttgtaatgctagcatctgtcgtggtttggtagcggaggacttggatcgtcaccattgtgtgtgctcgcttctcagtggatggagacattttgagtcgtgtgtgatgaaaccttagacttgctgcatggcattgtattgtgttaaacttatccgtatgccttgtgtattcttgtgcttgccatgtgctcatgcgcttgaattgctgtgcacgcggagtcgaactatgccgtcgacttcttttgg

SEQ ID NO: 15630 - DNA, 3675 bp, Oryza sativa
  Clone ID: PAT_MRT4530_21456C.1
atggcgtggtggtcggggaaggtgtcgctcggtggcctgcaggatatcgcaggggccgtgaataagatcagcgagagcgtgaagaacatcgagaagaacttcgacagcgcgctcgggctcgaggagaagcgcgacgatgaggaaggatcaggatcacatgcatctaactctgatagaatagggttctttaatcctgtcatggcattcatgggaaataatggcgaggaggattctgctgaagcatcagaaaagcagcaacctccaaaaagtacaaccgcagaacagagccaaagtgcctccacagaggcgcctacatccaaggtagatgcttctgaagaatcggaatcaacacaatctccaaagccttctgaacaaggagagactcttatcagctcaactgagccacctgtatccaaggctgaggtttctgagcaactagcaacaccaaaaactccaaaatcactttcagcaacagaagaaaagcctagtcattctactgaatcacccacatataaaggggattcagaagcaccacaatctcccacagatccatcaacagcagaagaaaacagtggatccactgagacgggtaatacaattgagacgggaaaccaggatcatcaagagacaaaatattctggtcctaatgatgaagcgccacaaagtcagattggagaatctgacagaggcatacctgatggtacaaagccttcttcacctactgaattagatcaatcaggtaacacgggaacaactgaataccttcatgctggaacggaaaacatagatgataaaaatgccatacaatcacaaccactagattccattctagccagttcagatgatgtaaatgaagctgtgaaaattgttaaaggagctgatgatcgaaatgaaataagcagttcacatgagaatactgacaccgttgaccaagctagtcatgtggaagtcatagaacatgatgagcatactaatgctgctgaaaatgatgaagaagctaatcgaacagaagcacaggtagcaactgttgttgaaagggaggagaatacaatggtgcagcttgaagaccttagctcaatgtccataattgtgagcaatgattcaaactcgcaaaatgagtcggtgcccacttctgcagatgtgcctgttggactggtagaggttggttccaattcaaatgatttgagaaaagaagaaaatatccagggctctgttacaactagcaatcatctggaatctgtcggtgctgtcgctgaacttgagaaattaagacgtgaaatgaagatgatggaagctgcattgcaaggtgctgcaagacaatcccagtccaaagctgatgaaattgcaagactgatgaatgagaatgaacaactgaaatcaacaattgatgatcttaagagcaagtcagctgaagccgaaatggatgcacttaaagatgaatatcaccagagagtagcaactcttgaaaggaaggtgtatgccttgaccaaagaacgggatacattaaggagagagcaaaataaaaaaagtgatgcagctgctcttttgaaagaaaaggatgaaattatcagtcaggtcatggcggaaggttttgaggcatttatttggcatcaacaatttttttacaatgaacaggttcgtgaacttgaagaagaaaaacaacggctgaactcaaagatccaggttgaggagacaaaggttgagagtattaaaagagataaggctgcaacggagaaattgctacaggaaacaatagaaagaaatcaaactgaacttgcagctcagaaggagttctacaccaatgctcttaacgcagctaaagaggctgaggcattagccgaagcaagagtcaacactgaagccaaagttgaacttgagagtcgtttaagagaagcttgtgaaaaagaaaatatcttaattaagacgattgaggagttgaggcatgctctcacaaagcttgcatgcctgcaggctgcattcagggaagaaaggctgaaaagggattatgatgatcttcaaaggcggtatcaatccagtgaacttcgttacaatgaactggtcacacaagttcctgaatccaccagaccacttctaaggcaaattgaagccatgcaggaaacagctgctcgaagggcagaggcttgggctggtgtagagagaaccttaaactctcgacttcaggaagcagaagcaaaagctgctgctgcagaagaaaaggaacggtctgtaaatgaacgtttgtctcaaagctcatcccggataactgttctagagacccagattacaattcttagaacagagcagacacagctgagtcgatctcttgaaaaagagaggcagagagcatccgaaagtagacaggagtacctggcaattaaggaggaggcggcaatgcaagaaggacgggcgaaacagcttgaagaagaaataaaggagcttcgtactaggcacaaaaaggagctgcaagatgcagcagaacacagggagctgcttgagaaggaaaagagctggatgtatgtcattgttttgattggtttggtaacttttatggtataccaatgttgtcctgtcaagttcattaatgtgtggagccttggggaaactgtttttaacctttttaaaccgaccatcagctacaggtccgacataaacattgaactttggaatctctcttacagtaggtccttctcaggatttaacaaacgggaccttgaaagagaaaaggctgccagggcagagcttgagaaaacatcttcccgtgatgcaccaaaaattccgcttccagatcagacaagaaatgctcctctcagaaagctctctagttctggcagtatcaatagtctggaagaaagccatttccttcaagcatcattagatttgtcagacaacgcttcattagagaggagaatgtctgctgaaagtaatatgtcgtattatcttcggagcatgactccaagtgcttttgaatcagcactccgtcagaaagatggagagctagcttcttacacatcgcgtttggcctcattagaatctattcggaattctctggcagaggagttggtgaaaatgactgaacagtgtgagaagttgcgtaccgaggcttctgctctgcctggtttaagggctgagctggaagctttgaaacaaagacactttcaagctctagaactaatgggggaacgtgatgaagagttggaagagctaagaaatgacattgttgacctaaaagagatgtacagagaacaagtggatcttcttgttagccagctccaatctttgggtgctcgtgtatagtgctgctgtatgtcagtatgtagcttcggctgccatccattttttttttagcatcgcgctaatctactaagccccatacagcagatctgaagcttggcgtgtttcttcgaaattcaagccgtgacaaataccgaaagttcatagccataccagtgtgaaaatattcgtttttgtacatcttgaagcacatgtctttttggacagttgagcacccttgtttaatttagtaggttactctgttgtatactagtttggatagctttacggtttttaagcctattgtttgcaattctttccagtgaagtgtatcaaatttgtaattcgattaaaagtgtatcacagcggaatgcaaccccaataatatgagagctcgtttttgtc

SEQ ID NO: 15631 - DNA, 171 bp, Oryza sativa
  Clone ID: PAT_MRT4530_21457C.1
tgcggccgacgccctggggaacccatgcgccggtggagatatgctcaatcactcagaagagaccgaatacgtggaaataactgtggtgttggatgaatggtgattacccccaagtggtgaataaatggtggcgacgcttataatgatggatggatgatataccctggtaaa

SEQ ID NO: 15632 - DNA, 192 bp, Oryza sativa
  Clone ID: PAT_MRT4530_21458C.1
atggagaatgggctgaccaccctagatccgccatctctagctccgttcaccaggctgaccgacaagcaagatccggttgtgtcggatctagcccctccacctctcgtcgcaacgcaaatcacgccgaccctcctagatccgtccacactcatcgcggggaccattgatggggaggatgagcttgatgactga

SEQ ID NO: 15633 - DNA, 216 bp, Oryza sativa
  Clone ID: PAT_MRT4530_21459C.1
tcacgcctttgtgtcatcttcagagactattttttgaaccagcagcgtcatcttaagagttcctatttgttctgcggttcgggaggcacatgcaagaatgggacaggcctcagctaccactgcgagtgcagtgagggtttcagtaaccttctgaacatcaccacaatgccatgttttcagaattgtaagatcaaaggactcaagccacttgtccat

SEQ ID NO: 15634 - DNA, 427 bp, Oryza sativa
  Clone ID: PAT_MRT4530_2145C.1
gtatcaaggaatagggcattcaatgcaaattggccataacaaaggaaaaacgggaaaaagaaaaaccgatgatgacgtcagcgatgacctcatcaatggccggcccgggttggcgacctcgccggagattggatgatcggctgcgaatttgggggacatgaacacgtagaggacgacgagacgaacccaacggtactcaccacaacgacaaacgacgaacgacgacggccggcgacgagaagggcgacggcggcggctcggttgaacggcggcggcgactctcaggtcgccggcggcgaggaaggacaggcggccgggcttctccaccccttggcgcacctcttggcgacggcggcaagcggcggcgacggcggacgtggcggagcggcgtggctggaggttggccgggggatcctctagagtcgac

SEQ ID NO: 15635 - DNA, 405 bp, Oryza sativa
  Clone ID: PAT_MRT4530_21460C.1
atgaaggaggtcgaagttgccgccgtcttgtcgggagcgatgtccgccaataccgtggcagccatcgatgaggccagcgtgggggcagacagcgtgcaggtgggtgacgtgtgtgcgggcagccttggagggcacgcgacggccggcgtgtggccaggcagatggcgggagatcggcggccgggcatgcgcatggaccgccgccgaaggccttgagatcgacgggcaagaaagggcccgtcctgcaaagttgaatcctcagttaaaccgacggctgctgaggtcgtcgtgggttggaagtgccggcacgcagatgatccatggtgttgtacacttcaacctgatggtgtggatcttggtgtatgactgggcaagaaggaggcatatgcatctcagcctgctctag

SEQ ID NO: 15636 - DNA, 586 bp, Oryza sativa
  Clone ID: PAT_MRT4530_21461C.1
ggtggcatttcccacgctcctcgaccgcctcgcccccccctctcgccgccgtcgtccctccccttcgccggctgcgatggggtgcgccgcgtcggcgacggacagcgctgagcggcggaggccggggcggtcgccgggccacgacggcgagcagcagcagcagcaggatgggaggaggcgcgggtgcaaggtggcgccggagcccaaggaggaggacggcgcggcggcggcggcgttcttggcgtcgatgcccggatcccccagcttccgatactactgccagaagtccgccaccgtcgacgccatcgtcgccgatgccgacggcgacggcgacagcgacggcgacgaatgcgtcagaatcaccgagacgcctcagccgatcaagaacaatggccatggctccagcgaggtagagatcaatccatggcttcgatcttcctcccgaatccctaaccgaattcatcctgaatttaacatgcagctctccaaatcggcaccggaggcgagcagacaagcatgcttgattaggttgaaagaaaaggagaatcatagtgaatttggaaggtgttcatccagatttaaatga

SEQ ID NO: 15637 - DNA, 292 bp, Oryza sativa
  Clone ID: PAT_MRT4530_21462C.1
atacatttgaaaggtaacaagcaaaacatctgggggaaatttgtagatatgagccatcgagctaattacattcatgaaggacggggacgattacagcttgtcactcttgagtacttgagacgtaaatgtactcaactttctttgttttctttgatttgtttttgtaacttgttttatatatttatttaatgttcttctaattttattctattttttttctattaatatacttttttttccatctttatttcttctatataattatctttattttattttttttttttttttc

SEQ ID NO: 15638 - DNA, 567 bp, Oryza sativa
  Clone ID: PAT_MRT4530_21463C.1
ccggccgggatcatcctctccatacatgttactccatctggaatcgtgcgaaaccctactcatcgcacaatcagccgtcggaagcataaaacagaaagatctttgccctgcttgaccacagatcgctctctctgcaagtgacactactgcaatcaccactatgcaatatttcccaccaacattatgcatgagcaccatgaatgcgagaagaccctacatgatgatgacgctgaggatgtgtagctccacacatgtgtccatgtcacagtcatagtatctcctgcacaaacaatgcagtatgtagctacaaagtatgatgcctcattgccactgcgccacctgatgccatatgatgaacaacatgcaataagctattcgtgcgtggactcccggcagcattagatgatgaagatggctatgcatatgccatacatgtgcaacatggcccctggcaacttccaattctcttcctgtggttgttgttgatcaaacgctggatacatgtactccagaaataacgcgttgcataccatcgtgtgcaaaccctacaaataacaaccattgaat

SEQ ID NO: 15639 - DNA, 244 bp, Oryza sativa
  unsure (1)..(244): unsure at all n locations
  Clone ID: PAT_MRT4530_21464C.1
tgaccagtgaacctcgcctgctgcttgctgctacgtatctatcagctactgctatactgctagtacctcgagggcactgtagccagtgtgtcgtcacagttaccaggttgagatcgatggacaaagttataaactatactgcattaattaattttacccttgagaacatacgtggttcatcatgtatttcatcacatgaatnttttttagagcgtttgatataaaaaaaaaaaaaaaaaaaaaa

SEQ ID NO: 15640 - DNA, 180 bp, Oryza sativa
  Clone ID: PAT_MRT4530_21465C.1
atggatccccatttaagcgtctgcgcctccgccaccaccatccccatggccacccttcaatgcggccgtgcattcaatggctcgccccgcggcgccaatttatggtcgaccggctccgtgctcctcgcggccgagcgaccgaaccggtcaccaatcacaaggcaccacaaactatggtga

SEQ ID NO: 15641 - DNA, 2476 bp, Oryza sativa
  Clone ID: PAT_MRT4530_21466C.1
atggagtggtcgtcgatgcggtggtggtgcctcgccgtggtgctcctcctgtccacgccgctgctcgccgcgggttacctgcaggagaggaagaactacatcgtgcacctcgagccgagggacgaggccgccgccgccgctggcgacgcctccgtcgaggagtggcaccgctcgttcctgccgcaggtggccaagctcgattccgactccgacggcgccgacggaggcccgcgcattgtgtactcctacagcgacgtgttcaccgggttcgccgcgcggctcacggacgaggaggccgaggcggtgagggccacggcggggtgcctcaggctgtaccccgaggagttcctgccgctggcgacgacgcgctcgccggggttccttgggctccacctcgggaacgaggcgttctggagccactcggggtttggccgcggcgtcgtgattgggatcttggacaccgggatcctgcccagccacccgtcgttcggcgacgacggcctccagccgccgcccaagaactggaagggcacgtgtgagttcaaggcgatcgccggcggcggatgcaacaacaagatcatcggcgcccgcgcgttcgggagcgccgcggtgaactcgtcggcgccgccggtggacgacgcggggcacggcacgcacacggccagcacggccgcgggcaacttcgtggagaacgccaatgtccggggcaacgccgacggcacggcctccgggatggcgccgcacgcgcacctcgcgatatacaaggtgtgcacccgcagccgctgctccatcatggacatcatcgccgggctggacgccgccgtgaaggacggcgtcgacgtgctgtcattctccatcggcgcgtcctccggcacgcagttcaactacgaccccatcgccatcgccgggttcaaggccatggagcgtggcatcgtcgtcagctgcgccgcgggcaactccggcccggaccccggcacggtcggcaacggcgcgccgtggatgctcaccgtcgcggccggcaccatggaccgcgcgatacgcaccaccgtgaggctcggtaacggcgacgaattcgacggcgagtcactgttccagccggggaacaactccgccgcgaacccgctcccgctcgtgtaccccggcgcagacggctccgacacaagccgcgactgcagcgtgctccgcgacgccgaggtgaccggcaaggtggtgctctgcgagagcagaggcctgaacggccgcatcgaggccggccagaccgtggcggcgtacggcggcgccggcatcatcgtgatgaacagagcagccgaggggtacaccaccttcgccgacgcgcacgtgctcccggcgtcgcacgtcagcttcgacgccgggaccaaaatcgcggcgtacgtgaactccacggacaacccgacggcgagcatcgcgttcaaggggacggtgattggctcgtccccgtcgccggccgtcaccttcttctcgtcgcgtgggccaagcaaggccagcccgggcatcctgaagccggacatcaccgggcccggcatgaacatcctcgccgcgtgggcgccgagcgagtcgcacacggagttctccgacggcgtcggcctctccttcttcgtcgagtccggcacgtccatgtcgacgcctcacctgagcggcattgccgctctcctcaagagcctccacccggactggtcccccgcggcgatcaagtcggcgatcatgacgacgtcggacgccgtggaccgcaccggcgtccccatcaaggacgagcaataccgccacgccaccttctacgccatgggcgccggctacgtcaacccggcgctcgcgttcgaccccggcctagtctacgacctccacgccgacgactacatcccctacctctgcgggctggggatcggagacgacggcgtgaaggagatagcccaccggccggtcacctgctccgacgtcaagaccatcaccgaggcagagctcaactacccatccctcgtcgtcaacctgctcgcgcagccgatcacggtgaaccggacggtgaccaacgtcgggaagcccagttccgtgtacacggccgtcgtcgacatgcccaaggacgtgtccgtgatcgtgcagccgccgatgcttcggttcacggagctgaaggagatgcagagcttcaccgtgacggtgcggtgggccggccagccgaacgtcgccggcgccgagggcaacctgaagtgggtctcggacgaacacatcgtgaggagccccatcatcatcccagccacggccgcgtagtaattttttgcaacttcagcatgtacagtatgtcagtaaatagctaagatcaataaagatccatcaccttggtttgacctgtgttctaaaaaaaaaaaaatgaagaatgtagcactccttgactagttggccgatcctgtcaactttgacagctactactggagtactactaattaatttccatcttattcatcag

SEQ ID NO: 15642 - DNA, 2019 bp, Oryza sativa
  Clone ID: PAT_MRT4530_21467C.1
atggcgtcgcacgcgaacgcctccggcggcggcggcgacgaggagatggtggaggcgagcacgctccgccaccggcacggcgccggcaaggatgccaacggcgtcggaactgagcggcagctggcggcggcggcggcggaaggggaggaggaggggccgtcgtcggtggagcgcgcgttcgtggacagggcggtgccgtcgtggcgggagcagctgacggtgcgcgcgttcgtggtgagcttcttcctctccatcatgttcagcatcatcgtgatgaagctgaacctcaccaccgggatcatcccgtcgctcaacgtctccgccggcctcctcggcttcttcttcgtccgcctgtggacggcggccatcgagcgggtggggctcctccggcagccgttcacgcgccaggagaacacggtcatccagacctgcgtcgtcgccgcctacggcatcgccttcagcggtgggtttggcacatacttgtttggtatgagtgaaacaattgctaagcaagcaacagaggctaataatgctcagaatgtcaagaaccctcacatcgggtggatgattggattcctcttcctcgtcagttttattgggctacttgctcttgtgcctctgagaaaaattatgattgtcgactacaaactgacctatccaagtggcacggcaacagcttatcttatcaatggcttccacaccccagagggtgcaaagcttgctaagttttactttgatttctcccctacctatgttggagtagggatgatttgcccccacattgtgaacgtatctgttctattgggaggcatcctctcatggggaatcatgtggcccctgataagaaacaagaaagggagttggtatgctgcctctctctcagaaactagtcttcatggactgcaaggctacagggtgttcatatccattgccttgattcttggagacggcctgtacaacttcgtgaaggtgctcatccgcacaaccgctggcttcgtcgtgatgatgaagaagaacagcacgcttccggtctccaacaatggcagcccgatggtggccactgaagccatctccttcgacgacgagcgccgcaccgagctcttcctcaaggaccagatccccaagacggtcgcgttcggggggtacgtcgccgtcgccgccgtatcgatcggcacgctcccgcagatcttcccgcagctcaagtggtactacatcctggtcgcctacgtcttcgcgcccgtgctggccttctgcaacgcctacggcgccgggctgacggactggtcgctcgcgtccacgtacggcaagctcgccatcttcatcttcggcgcgtgggccggcgcgtcgaacggcggcgtgctggtcgggctcgccgcctgcggggtgatgatgagcatcgtgtcgacggcgtccgacctgatgcaggacttcaagacggggtacctgacgctggcgtcgccgaggtccatgttcgtcagccaggtgatcggcacggcgatggggtgcgtcatcgcgccgtgcgtcttctggctcttctacaaggccttcgccgacatcggcgtgagcggcaccgagtacccggcgccgtacgccatcgtgtaccggaacatggccatcctcggcgtcgacggcttctcctcgctgcccaagcactgcctcacgctgtgctacatcttcttcgccgcggcgatcgccatcaacctggcaagggacctggcgccaagcaaggtggcgaggttcatcccgctgcccatggcgatggcgatcccgttctacatcggctcctacttcgccatcgacatgttcatcggcaccgtcatcctcttcgtgtgggagatggtgaacaaggccaaggcggaagcgttcgcgccggcggtcgcctccggcttgatctgcggcgacggcatctggacattgccgcagtccatccttgccctcgccaaggtgaagccgccgatctgcatgaagtttctgtcgcgatcggtgaatgcgcaagtggatggtttcctgggtaactag

SEQ ID NO: 15643 - DNA, 2415 bp, Oryza sativa
  Clone ID: PAT_MRT4530_21468C.1
agcgaacgcctctcgcgcgcgtgcttactggtgactggtccaagcagcaacgcaagcaatggcgtcgcacgcgaacgcctccggcggcggcggcgacgaggagatggtggaggcgagcacgctccgccaccggcacggcgccggcaaggatgccaacggcgtcggaactgagcggcagctggcggcggcggcggcggaaggggaggaggaggggccgtcgtcggtggagcgcgcgttcgtggacagggcggtgccgtcgtggcgggagcagctgacggtgcgcgcgttcgtggtgagcttcttcctctccatcatgttcagcatcatcgtgatgaagctgaacctcaccaccgggatcatcccgtcgctcaacgtctccgccggcctcctcggcttcttcttcgtccgcctgtggacggcggccatcgagcgggtggggctcctccggcagccgttcacgcgccaggagaacacggtcatccagacctgcgtcgtcgccgcctacggcatcgccttcagcggtgggtttggcacatacttgtttggtatgagtgaaacaattgctaagcaagcaacagaggctaataatgctcagaatgtcaagaaccctcacatcgggtggatgattggattcctcttcctcgtcagttttattgggctacttgctcttgtgcctctgagaaaaattatgattgtcgactacaaactgacctatccaagtggcacggcaacagcttatcttatcaatggcttccacaccccagagggtgcaaagcttgctaagaagcaagtaaaggaactggggaaattctttttgttcagcttcgtttggggcttctttcagtggttctatactgccggagatggttgtggattccagagcttccctacattaggccttcaagcctataaaaacaggttttactttgatttctcccctacctatgttggagtagggatgatttgcccccacattgtgaacgtatctgttctattgggaggcatcctctcatggggaatcatgtggcccctgataagaaacaagaaagggagttggtatgctgcctctctctcagaaactagtcttcatggactgcaaggctacagggtgttcatatccattgccttgattcttggagacggcctgtacaacttcgtgaaggtgctcatccgcacaaccgctggcttcgtcgtgatgatgaagaagaacagcacgcttccggtctccaacaatggcagcccgatggtggccactgaagccatctccttcgacgacgagcgccgcaccgagctcttcctcaaggaccagatccccaagacggtcgcgttcggggggtacgtcgccgtcgccgccgtatcgatcggcacgctcccgcagatcttcccgcagctcaagtggtactacatcctggtcgcctacgtcttcgcgcccgtgctggccttctgcaacgcctacggcgccgggctgacggactggtcgctcgcgtccacgtacggcaagctcgccatcttcatcttcggcgcgtgggccggcgcgtcgaacggcggcgtgctggtcgggctcgccgcctgcggggtgatgatgagcatcgtgtcgacggcgtccgacctgatgcaggacttcaagacggggtacctgacgctggcgtcgccgaggtccatgttcgtcagccaggtgatcggcacggcgatggggtgcgtcatcgcgccgtgcgtcttctggctcttctacaaggccttcgccgacatcggcgtgagcggcaccgagtacccggcgccgtacgccatcgtgtaccggaacatggccatcctcggcgtcgacggcttctcctcgctgcccaagcactgcctcacgctgtgctacatcttcttcgccgcggcgatcgccatcaacctggcaagggacctggcgccaagcaaggtggcgaggttcatcccgctgcccatggcgatggcgatcccgttctacatcggctcctacttcgccatcgacatgttcatcggcaccgtcatcctcttcgtgtgggagatggtgaacaaggccaaggcggaagcgttcgcgccggcggtcgcctccggcttgatctgcggcgacggcatctggacattgccgcagtccatccttgccctcgccaaggtgaagccgccgatctgcatgaagtttctgtcgcgatcggtgaatgcgcaagtggatggtttcctgggtaactagatgtgatcagcctgaaatcatcgccaatgtgaacaaccactctgtatcatctgtgtcatcatcctgcaatctcggtttcaaaaaaaaaaaatcatcctgcaatcaggatatcgtatgttctgttagggattgtactataatctgtctctgaacacctgtatatgttagtggagtgtgacaatcatccttgaatccttgattcc

SEQ ID NO: 15644 - DNA, 874 bp, Oryza sativa
  Clone ID: PAT_MRT4530_21469C.1
cgactcgcgccgggagccgtacaccgcggcgcacaacatcctgctctcccacgccgccgccgtccacaactacaagacgaattaccaggcaaagcaaggcggctcaatcgggatcgtggtcgcgatgaaatggtacgagccgctgacgaattcgacggaggatgtgcgggcggcacggcgtgcgctggccttcgaggtggattggtttctggatccaatattctttggtgaataccctagagaaatgagagagatcctctcatcaaacttaccaaagtttacaccagaagaaaagaagttgttgcaaaacaaggtggatttcattgggataaatcaatacacagcaatttacgcaaaggattgcatctattctccgtgcgcacttaacacatatgaggggaatgctctcgtctacaccaccggtgtaagaaacggtgcaaaaatcgggaaacctactgcattttcaacgtattttgttgtcccagaaagcatagagtcggctgtcatgtacgtcaatggtagatataaggacacaacaatctacattacagaaaacggctactcacaacatagcgataccaacatggaagatttgatcaatgacgttgaaagggtcaactacctgcaaggttacctcaagtatctttcctcggcggtcaggaagggagcaaatgtaggggggtacttcatgtggtcactcatcgataattttgagtgggtattcggttacaccatcaagtttgggctgtaccatgtggattttgacacgcaggagaggattcccaagatgtctgccaagtggtatagagatttcctcacgggctccaatgtaacagacgatacccaagtgtggtcacgtagagcagattcttga

SEQ ID NO: 15645 - DNA, 777 bp, Oryza sativa
  Clone ID: PAT_MRT4530_2146C.1
atgtcttcatccggcacttcacatgtcaacagtgtcgccagagatgggattcagctgccgcttggtgatggctcgagctctgctcctgctcatcctagcagcgctagcttcggcctcgtcaatggctgccaagaagcaggggcgacagcctcgcggctgcggcggccacacctcgacgtcgccgacgccggagctggagctgccgccgtgctccggccaccgcggtcaagccccagcgccagtgttggggcttcttggccggaggggatcacctggagctccgcctccgccgcggtcacacccgccggatatgcaaattgcaaagaactcactggtagagtatcattcatgtgcgcgctcgaatcgcaagacaaacaaattcaggtcaaccatcgaaagtttcagtataaattcagtttgagttcagcagccgccgtgcgcctgcagtcacaaactgttcttggctacgatgaggctgttcgagctcatcgccggagttgccatcctggctgctctgtccaccaccacctcaaacgcgccatcgccggtcgccgtggcggcggggagggcggtgagggcgccgccgtcgccgaagccggcgccgcccataaggccgctcttccgggcgccaccaccacctccggcgaggtcagttcaaccaacgtgttcgtcagcgccgccaccacctccggcgaagtcagaactagctatgagttcgccgcctctcgccggcgaagtcggttcaaccaacgcctcagagctaccatgaatccgtga

SEQ ID NO: 15646 - DNA, 1581 bp, Oryza sativa
  Clone ID: PAT_MRT4530_21470C.1
atgggctgcttctcgtgcttcgactcgcccgcggaggagcagctgaaccccaaggtgggagggccgtacggcggcggctcctcctcctccgccgccgcggccgcgtacggcggcggcggcggttccagcgctggtcggcatggggagaggggcggtggttacccggacctgcaccaccaccaccagcagcagcagctgcccatggcagcgccgcgcgtcgagaagctctccgcaggggctgagaagacgagggtgaagagcaatgcaatactaagggaaccttctgcgcccaaggatgccaatgggaatgtaatatcagcacagactttcaccttccgagaactcgcgaccgccaccaggaatttcaggccagagtgcttcctgggcgaaggaggctttgggcgcgtttataagggccgcctcgagagcactggccaggttgtggctataaagcagcttaatagagatgggcttcaaggaaacagagaatttctagtggaagttctaatgctcagtttgttacatcatcaaaatcttgttaatctgattggctattgtgctgacggagatcaacgtcttcttgtttatgaatacatgcactttggatcattggaagatcatttgcatgatctacctcctgataaggaagcattggattggaacacaaggatgaaaattgcggctggtgctgctaagggactagagtaccttcatgacaaagcaaatccaccagttatttatagagacttcaagtcatcaaacattctcttagatgagagtttccatccaaagctgtctgactttggtcttgcaaagttgggtcctgttggtgacaaatctcatgtctctactcgtgtgatgggaacatatggatattgtgctcctgagtatgctatgacaggacagttgacagttaagtctgatgtatatagctttggagttgtgttgcttgagttgattactggtcgtcgggcgatcgacagcactaggccacatggggagcaaaatcttgtctcatgggcacgacctcttttcaacgacagaagaaagctcccaaaaatggctgacccaagactggagggacgataccccatgcgtggactttaccaagcacttgcagtggcatctatgtgcattcagtcggaggctgcgtcgcgtccacttattgcagatgttgtgactgctctttcctacctggcatctcaatcatatgaccctaatgcggctcatgcttcaagaaagccaggtggcgatcagcgaagcaaggttggcgagaacggcagggtagtctccaggaacgacgaagccagcagctctggccacaagtcaccaaacaaggacagggaggattccccgaaagagcccccaggtatcctgaacaaggatttcgacagggagcggatggtggcggaggcaaagatgtggggcgacagggaacggatggtggctgaggcaaagatgtggggtgatagggagcggatggtagccgaggcaaagatgtggggcgagaattggcgggataagagacgtgcgatcgagaacgggcaggggagtctggattccccaactgaaaatggctag

SEQ ID NO: 15647 - DNA, 1684 bp, Oryza sativa
  Clone ID: PAT_MRT4530_21471C.1
accataatacatgagagatttcttcagttcagacagcctaaatgacaagggggacaaacacaatacagttagcggagcagagccattaactcgtctgcttttgcaagttgcaacaacagcggcaggcagaaacgactgaacctacatctgatcattaccattgaaatcgtagcaaagatcagagtccgaagttgcacaatgtcaggaactccatctcggtgtcgacgtacttggtccagagatgcttgtactggttgaaggcgacgtcgagccacggcttcatgttcccgttgaagtgtatcaccgcggctcccttgatgtcctccggcctgatgtgcgggttgtacccgagtcccatcacgtgccacgacttgtccagcggcctcgtgttgccgtagaacgtcatgagccccgccggcagaacggacgctggatcccacagcgtgccgttctcgttcatttccatgagctggtggaatcgctgggtgcattggtcccggcgccaagcctggagatcgaacacgttgaggccgtaggaccaggcgcacgcgcgcgggttgaaccgctcctgcacggcggggtcggagaagttgatgtgcttgccgtatcggcggaaccctccgaagcaggtctccagcgcggcgttcaccttgccgccgaggtcgacgcgccacagcccggccaggtccctctgcaccaccacgtcgtcctccaggagcaccacccgccgcagcgccgggaacatctccgggaggtagaaccggaggtagtcgagcagcggcacgtccctgttgccgtcctcgatctgcctgatgaccggggaggcggaggcgttcaggaacgggaagtccgagacggcgaggagctgcacgtgcgtgccgagcggcggcggccggcgcgcgaaccagacgcggaaggccgggaggtacatgggcgcggtgaccacgtggaagacgtggcgcgccggctcggcggctgcgcgcgccgcggaggccaccacgacggacacggcgagcacgttgtcggagaagatggcgtagtggtacagcgccgggtcggtgaactgagggggcgggacgggcgggtcgtcggggatggcggaggcgttggcgaggcgtgcctcgaggaggcgcatgacgaggcagtggagcgacttgggcgtggagccggcggcgatgcgggagttgaggaggcccgcgcggcgggcgcggaggagctgctggtcgacggcgaagacggtgtcggagagcttctggatcttggactgcgtgtcgaacgcctccttggcggcgcctgccagggagcgggcgcgcttgatttgcccgcgcgtctccttctccaagagcgcgacggtggacagggagatgcgggacgagagcgagctgagatgcccggagatagacaagaaagactccgtctgggaggcggaggccgcgctgagtttccgcgcctgggccgcgtaggcggcgagaacggcggcgtggtcctcggcgtggcggcgaatggcggccagccggaagggtgcggagttcggggcggaggcggtgcccgtcgccgacaggaggaaagcgagggacgcaagcaagaggagcgtgatcagcgccgcgagcgccgcccgccgctgcgcggaagctctgccgccgccgccgccgcctgccatgggagcgcgtgaagtcggaatcgc

SEQ ID NO: 15648 - DNA, 336 bp, Oryza sativa
  Clone ID: PAT_MRT4530_21472C.1
atcctccttagctagattagatcttctccaactgatttgaatcaaagtcaaagagtgaggcttgttgaagttgtcggtggcgacgaagtcgaagctcctgaggctaaggcgaagccggcggctcataaaattgattccatcgcattcctcaataggaaactcggcgtacccctacctggcgcgccaactgtcgaaacatgaattcggcaataataaaagggggtagcgcacgagacataaaagtggatggatgcggagacaaaggatttagacaggttcaggccctctcaatgagaggtaatacccgctcccaaggatctgatggatataaactcc

SEQ ID NO: 15649 - DNA, 590 bp, Oryza sativa
  Clone ID: PAT_MRT4530_21473C.1
gcacgaggatcccttcatcttgacaccgtcaactggactgtcttcccaccactcggggaattttggccccctaaagaacctggtcaggaatatcttcgttctgtccaaggaaaaagctttcaaaacttaaaaactctagaacttgttggactcacaagattggaaaaatgggttcacaatgacaaatttctcctgttctcccttttagaaattttcataattagagattgcccagaactggtagagttaccagtttctcaatatgctagtcagaaatttaagcaagatgtgatgattgatctgtttcctaagatgcaagaggtcagaattgctgactgcccaaaattggaatccctaccacttattccatggactgatactttgcacactgttgacatgaagaatgtgggttcaagtttggaaaagttagtttactccactaaaagttcatcatccaaactattgttggaaatcaaagaagatcatcatctggaataccttgatgagatggttgcctttcacaatttaagtaaaatacatgagttggaggtctcaaaaagcccacctttgatgaataaacaccttcactg

SEQ ID NO: 15650 - DNA, 353 bp, Oryza sativa
  Clone ID: PAT_MRT4530_21474C.1
gtaaattaaacttaataagcttgcttttttctaaagttcagagccacaagggcggcatgtggggtggaaaaaaaaggaacaaaacaggaccgcagtgcaacgacaagcttcctccagggtgagtgcgattacaccttgattcagttcaaggagaaaccgcacacttgggtaaaaggctacggagtcacaatctctaagccgagcatagaagatgggcacaatatcaaacccagaggtgcccattgataaggacaacctaaaacataagaattggcatgcatgccataattcatatggcaaaaccagatgtactaccacaatgaatgacctgaaaaacatgctgggggaggaca

SEQ ID NO: 15651 - DNA, 168 bp, Oryza sativa
  Clone ID: PAT_MRT4530_21475C.1
atggcatgcacaggcgggaggtgctcgtcggcgaacgaggtgaagggcgaggcagatggcgatggcgagctcgatgggcatgcacgcaagacgtttttatccaagtattccttcgagatcaaatttcgcatcggccaacaacaggcaccaattctgctgcgtcgctaa

SEQ ID NO: 15652 - DNA, 801 bp, Oryza sativa
  Clone ID: PAT_MRT4530_21476C.1
atggagcctaatgaggctcgcttggcatcgccatccgtgataaagaaggtgacgctagtggggggtaggcttgcagctctcaacctcctcgtcgacgccggggaagggaagcctgcgttcgggcgagcgatggagcagggaagcgagaggcaggacgagcggccgccgctcccgtgcgcgaacggctgcggcttcttcggctctgccgacacccgtggcctctgctccaagtgctaccgccagaccgtgatgtcccaggcctccgcgccgtcggccgcagcacagtccgcggagcacgaccaggtggtgttgccggcgccggagggcgtacccgtggacgagggggcgatgccgccgccgccgccgcggcacggggcgaagacgaagagcaggtgcgctgcgtgcgggaggagcgtggggctgatggggttcgagtgccgctgcggtgccgtgttctgcggcgcgcatcgctactcggacaggcacgactgcggctacgattacaggggcgccgggcgcgacgccatcgcccgcgccaaccccgtcgtgagacccgacaaggtggagaagctctgaaaaaaaaggaaaagctacaactgctcgatcttgccaacattgccatgcccgaaccaaactcattggtcgattgctcatttgcttctcgtgcgagatggagtcggcactcggtactgctctatgtatggagatatcatatacgtagagattggaaattgactgattctgtggggcccaatgtgttccgctcaacacaaaacaacaaaaaaaaaacgccgcgtcggt

SEQ ID NO: 15653 - DNA, 615 bp, Oryza sativa
  Clone ID: PAT_MRT4530_21477C.1
atggcgccaaacggggaaggcgcagtggcggcggctgcggcggcgccggcgccggcgccggcggtggcgagggggaagcgggcggagaagccgcggaggatctcgatggaggggctccagcgcgccatgtccgacctggccctggagctcaccaagaagcagcaggtggcggacgcggcagccggcggcggcggcggcggcgagaagctgccggagatcacggagcagcagcaggtggtggtggaggaggcgcggtgcgagtgctgcggcatgcaggaggagtgcacgccggagtacgcgcgccgcgtccgggagcgctactgcgggcggtgggtgtgcggcctgtgcgccgccgcggcgagcgccgaggccgacaggagatgccgccacggcggcaccgggtggacgacggcgacggcggaggaggcgctggcggcgcacatggcggtgtgcgggcggttcaaccgcgtggggcgcgccaacccggtgctgatgcagacggaggccatgagggagatcctccgcaagaggtcgaggtccaacagcccgagggaccacggccatggcggcctcaccaggagctccagctgcatccccgccattaccaaggactga

SEQ ID NO: 15654 - DNA, 1662 bp, Oryza sativa
  Clone ID: PAT_MRT4530_21478C.1
atggtcgccggcgacgaccaccggcgcgacagcacgcgcggggggcgacgaaaagaggggaaagggagaggagatggagggggtcctcaccgaggggcgccggcgacggagggagcggcggcggagggaggcggctcaccgagaggcgcggcgacggagggagcggcggcgctccacggggcgaagacgacggcggcgattcggcggtctccaacgaaggtggaggagcggccgggggcggcggtggcgcgctgccggagtcggcaaagtggtggtggagctcgggttcacggtggaatcggtgcttcgggggtggatttgaggagtgggccggtggccgggatgcggcacggagcggcggcgctgtgggaggcagccgcacgaccgggcgaggtcggagtggaggccggggcgcggcacggcgaggcgaagccgacggcacacacggcgcggcgcggtggtggctggggcggcgggaaaaagcggccggtgaactccggcgagcggcggctgctcggcttggcgaggggagagcgggcgagggcgccgggagctcgggaaagttgggggaatgggagaggagaccacggggatcgtttttattggctcggggcggtgggatcatggccgcggagggcggaatcgaccggcaacggtcttcggagtgggctccggcgacgtgggcgaagtggggtggttcggcgccggttttggagggggaaagtgggggaggagagtggaggaggtggggcgacgcggtcccgcggtcagggcgagcgcgcgggtggaggaggaggcggaatcggcggcgacgtggggaggccgtggcggcggtttcggctgagggagccggagttctcagcaatggcaacaagtggcgacgatggcgagcgcagctcaaccggcagcaccggcatacatgattccggcgctactgaaacggactcattcttcgccttgtttgccaatgacacttctagtgaggatgtgaatgacgacgaggcaagtgacgcatcgaagcccagccggttggtgaatatggctgatgttgcagcagatggatcattcgaggtcggtcaagcaccagctcctcatgtagacatgagccctgagggaggcatccacgcagaagaaagattgctggagataaccggtgaagtggacccgacgaaggaagcagatcgagtgtgcaacactgtgttagctatggacgagggggcactttcactcgaaagtgggacgaacagccgctccgatgaagacaagattccatccggcgggaacgactatactgttccgcgcgaggggatggctgcaatgttccgcctcacgtacaacgttgagtgccacataggaagcgactgtgttagacttagtcttttgagtgatgcagagggcagcctcatcggccgccacctttgcaacctcaatccaggatcattgttgttggttgaacacccggttattcctttccttccagatagatcatgctaccaggatgattaccatgtcgaacccacgctgccgaggccggggaactcttcctcgagcaaccagccaccaattgatgaaggaggtctcagccaccgggagacaatccaggcaaccaatggcattaaggataagccacgaaaattgaagggactctggacatgcaactag

SEQ ID NO: 15655 - DNA, 2651 bp, Oryza sativa
  Clone ID: PAT_MRT4530_21479C.1
atgaaatcgttgaggctgacctcgccggcagggaatatgttggtgagccccatcatctccttctcgaatgtgtccagatccacaccctccacagtcggcgcctctgtgggcttatcccaagaaatggtggtcgtagtggatggtggcgcggcaggagaatcgaaggtgagctccttgcggatgccgacctcgtcgttgcaaagttcgcaaccaacgacgacgtcgggaatgcggaaggacaccgaggaggttggcgagggaggggaaatggtcctcgctgacgtcagcaaggggcggccggcgccgacacgcgggccccacacatcagcgagtcaaagggggagggcgcacggtggacatggtccagacgtgcctcgggtgcgcgtccaccacgtggacggcccagatcggccaaggccgatcggacggctggggacagccgggcggcgcggcctggccagcgctcacacaaagctggcggcggcggcggccgggaccgaagcgacggcggcacacgggccgggcggccaccggcggcggcggcacggcgcgcgcaagcacgggaggcggccggccaaggggagaaagagggaggggagaggagtgctcaccgagggcggcgacggcgagacgaccacggagaggcgaccggcggcggaaaggatggcggcggtcggcacgggaggcgacgagaacggcgttccgatgacgcccgaccacggcggagccacggccgaggggcggtgggatgcagcgaatgcggtggaggcggtggcgcggcgtgaggtagatggggatggcggcaagaggcggccggttggcggcagttagtggtggggctcgggtttgcggcgggaatggtgcttcgggggtggatttgaggagtgggccggtggccgggatgcggcacggagcggcggcgctgtgggaggcagccgcacgaccgggcgaggtcggtatcgccggcggggagcggctggagacggagggaagagcggcggctcggttttcacggtggggtggtatttcggtggtggtttgggggaaaaggagtggaggccggggcgcggcacggcgaggcgaagccgacggcacacacggcgcggcgcggtggtggctggggcggcgggaaaaagcggccggtgaactccggcgagcggcggctgctcggcttggcgaggggagagcgggcgagggcgccgggagctcgggaaagttggggaaatgggagaggagaccacggggatcgtttttattggctcggggcggtgggatcatggccgcggagggcggaatcgaccggcaacggtcttcggagtgggctccggcgacgtgggcgaagtggggtggttcggcgccggttttggagggggaaagtgggggaggagagtggaggaggtggggcgacgcggtcccgcggtcggggcgagcgcgcgggtggaggaggaggcggaatcggcggcgacgtggggaggccgtggcggcggtttcggctgagggagccggaggttagggatggccctgacaggtggggcccacctgtcggcggctcggggggaaggagagaggagacggttgggggagaagatgacaggaataaggtggatatgcactggcaagatcaacaacccacggagagttatcatcaactcaccgaaagatcgggccaaacaactgccttgagtgtcgagaggaactcagggttcatcaggttgtatcagagctttcgctgctcgccgtacaacaagtgtttgcaaaggcatcgatacatcctgcctccattggggtgcttggttgagtcggtgtatgtcaccattccgcttgcattggaactgcgtaatcacgaaaagaaggagagaggcatgaaagagccgccaattccattgttcgcactcaagttcgaggcacctccatcatctaaagaggacatcaaaggtaaagtaaatggtgctgaacaaggaataaggttgatctgcaccggcaagatcaacaacccatggagaggtgtatcgatcgctaagagatttagggatgctagaaaccgatgttttagtttgaatataactaaaagagatttagttgatcttgcttttagtggtttgcttgctcctattaacgaaagattagatggccaacaatttcttgatattagtcaacttatgcaaaaaaactctgctcaagtaagccgggttagggaaagcaatgttagtattgttgattaccctgatgatagtgattctgataatgatgatggtaataatgatatacatgttgctgagtggtcatggactaacatgaataagccgtttgtttgttctaacttaatgttgactcctcgtaaagatcggcaaagtgagattaagtatagctttgatgtggccaagtgtgataaaatctttgattatcttttgcaagaaaaacaaattacattacctaaaggctatgtcatttcatctccagaagaattgaaacgtcatgcttattgtaagtggcatgattctcatactagtaacgattgcaatgtgtttcgacgacaagttcaatcagccatagaggaaggacgattaaaatttattgagggttctaagatgaagctagatcatgatccttttcctatgaatactattgatttcaatgataaaaggtgttga

SEQ ID NO: 15656 - DNA, 521 bp, Oryza sativa
  unsure (1)..(521): unsure at all n locations
  Clone ID: PAT_MRT4530_2147C.1
ggaagcaaagcatcagcaatgggatttcgctgcttctgctcgaaagctcaagctcagctcatcctactgctaccactactagtgctagcttcagcctcgtcatctgcagccaagcagcagcctcacaccgcctgcagcaacacttcaccagcgacggggcagccgccatgctccggccaccgtggtcaagtccctgcgccgccaatcttgggacttcttggtcgtaggcgagcaatcagagctccgcctccgccgcagccacatccaataacgtcgcctacctctccattcccggggcggccagtcccgccaccgccgccatcgccgtgcttgtagccgtcgactctgtcgttgcaggttcagtagaattcagaactttcaatcagcaagaaagttccatggatttactctgtttcagcgcacttcagctctcggcccctcccaggctctcaccattgtaaagtacgttctgctcgtttctgtcaagactcaagaccctntttttctgctcatttcgaacg

SEQ ID NO: 15657 - DNA, 294 bp, Oryza sativa
  Clone ID: PAT_MRT4530_21480C.1
atggcgtcgagtggagcggcggcggcgtcatccacgcacgggaaagcaacgaagttggcgccgtggatggggaggggatggaaaactcaccttgaggacgacgacgagcagagctcgggcgacgaagggggcggcggagttggggacgacgggaggagctcgggacgatggcgggcagagtgggcggcagcgaagagggggcccgcagccaccggcgctcgaggcggcggtgagggcggagtgggcggcggcgaagagggctccggcagccaccggcgctcgggacagcggtga

SEQ ID NO: 15658 - DNA, 278 bp, Oryza sativa
  Clone ID: PAT_MRT4530_21481C.1
ttgggtcatctacacgggcggcatcaaccctcgctggtgtcattcgatagccggggcgggctcattcaacctgcccacctacgacatctagctcaccccattcctccgcctcctggtctacagcaacgcccactagatctggctcatcgtgttctacgggatcacctagtggcctcgctacaccaacctggacctttggctggaccccagcacggcggacatgcacgccacgctcggcgcgtaccagacacctggccttgaaatctaacgccactact

SEQ ID NO: 15659 - DNA, 1798 bp, Oryza sativa
  Clone ID: PAT_MRT4530_21482C.1
ggatttgtttgctcttgtaacataagtgacccccgccctttgaacttccgcgggcttttcgttctcatgcacacccctctcccatcggcgctcatagccccggccccagcccccgcctttcctgggtcccccctcgaggcttcgttcttgtcccctcagcatcccatctcaacacacggcaaactagcaattgcatcatcgcactcaatcagttcatcgctgccagtctactaacttgggcaacgcctatgtgaaggcccaagtagtgaagcttacaccaagaataactagctggagctcacatagtgctccaaaatgaggcctggtaactcaagtgttcatcatcgaggtgtacccttcacacggatcatcttcaacaggttactgcaagctggactcccagaggccagagcagcaagatgcaaaacataggtctctggttgctaattagttagctacatatattagttactcccatcatataggtctccacctgctaattagttaactacatatactagttactcccattatctagaagggttatagccggagaaggctagccatcgccacgctcctcagagaccacaccactggaaagagtaatagctatgtttgcttggcgatctgcctcggcattccattcccgtcgaatgtggttgatctcaaatgagacgaagttttctttgagctttctcacttccttgcacagttccatcatgttctggttcttcgtttgccatgtacctttcacctgataacagactagttgagagtcgccatatactatgattttcttgaaaccatgcctaatagcatatctcaatcctaagatcaggccccggtattcagcaacattattggtaacaataccaagaccctcgcgaagtcgagatatcactctcccatcttcagtcataagcacagccccagcacccgcttttcctggatttcctttcgatgcaccatcgaagtgaagtaagcataccatatattgtttcgagagaggttgtgcatcaacagttccactctgatcaagattattcggtgagaaatggctggaagaactaggtcttgattccagcctgttaaatgcttgtccccgaacagagtagccttggttaatacgctggctatagtgctcagctgaggcttgaccagatcccacggcatcgtagttcagatccacggattgtgccccaggctgatatcttgtattgttaaggacacctgtatgatttagagctgattgatttgaactagaaacagttatctcctgaaaagtacaggggataagggtaccaaatagatcttccctaagttcagctgcattgattacatatgtagcattacttaacccacgcgaagagaggtattcctccttttctctgctccaagagttacccttgtaggcacttgcagcaggaccagataccttatcaacaggtaggatcactgtgttcgatgagcaaatttgagcctggcaatcatttaaagatttgtaaacagctaccatctcccccttcctgacaagataatagttgctgccctcttccatcgtaccaaatgcaattctgaaccctgccggagagggcgacggcggccagcccccgagcgtgagctgccggagcgagggagggcgacggtggagcaccggagggggcggcctggaggagagggcgacggagaggagagcagagggaggcggcgaccggctcggagcccgcgagcgccggccgccggagcgtcgcgccgatgagcggccctgcagtgagcgagtgggccggcggaaacgcga

SEQ ID NO: 15660 - DNA, 123 bp, Oryza sativa
  Clone ID: PAT_MRT4530_21483C.1
atggcgaaagaggattttatcaaagcggaattggaggcggagatcgagtttggaaacagagcaggaatcggctgcagtccggatcggctacggttaggatcggctgagtctgagtcgagctaa

SEQ ID NO: 15661 - DNA, 423 bp, Oryza sativa
  Clone ID: PAT_MRT4530_21484C.1
atgaaaacgggcaagtacgctagccgacacgctctgcgcctctgcccccaccccccaccccccaccccgatccaaacccaaccaaaacgcaaaaaaaccgcaacgcaacgctcgtcgcatcgctcctctcttctcgtcgcgctcgcgccggtgcgaaaccgcgagacgcgcggtagccaagcccccaaccgcgacgcgcgacgacgtactactacctgcccgtgccgcgcgagcggcgaaaaaacgggaaagagaaaaggaaaacgctctcggtttcgatcggggcgccgattcgcggggttgggtgtggtggtggacggacgcgcgcggaggagggttcgcggggtcgctgctcgctgcgtgcgagtagctgtgcactcgcgcaaacgcatgcggctacggctgtgtctcccttcaaacttc

SEQ ID NO: 15662 - DNA, 147 bp, Oryza sativa
  Clone ID: PAT_MRT4530_21485C.1
atgggtgacctccttccttggggcaaggacatatgcttctttgcttccaggggcggatccaacgtgaataagaacttgactggagaagagaagagacaaggtgttgatgatcctactgtaactcatggatcaggagaagatatatag

SEQ ID NO: 15663 - DNA, 411 bp, Oryza sativa
  Clone ID: PAT_MRT4530_21486C.1
gccggaattcccggcccgacccacgcgtccgatgaaggacttgtgcccgaagagacgagacgagggagagaacgagaagaggcggcgccggccgctggcgaaggcgggttgcgccgcccctctctatgctctcctcgactctgggtgtccatccttccttgcatccagtcgctgccgcacccttgagcattggtctcatcgggcaagactcggtccatgggtctggcagcgattcgagggtgatcgcgatatgagcgagcttgtcgtgctcgtggagcggctgatgtcgggccgcacagaacgagcccgtcggtccttacgacccgcttccgtgaccagggggcccctgtggacggagcttgcgcgtgcccgccaggcgcttcggtggtccccccgccggcagtattctgc

SEQ ID NO: 15664 - DNA, 1857 bp, Oryza sativa
  Clone ID: PAT_MRT4530_21487C.1
atgactacagaagaaaaaatgctcataaggaccttgaaggaatgtaatataccaacaaggcacatgattgtgattttatctgttctaagaggaggattgacttctttgccttatacgaagaaagatataagcaatgtgagaaccacaattaacaaggagacaagcagcaatgatatgatgaaaactttagaatttttcagaaggaaaaaagaaaaagatccacatttcttttatgagtttgatttggatgagagcaagaaagtgaaaaatctgttttggacagacgggagatcgagggagtggtatgagaaatatggtgatgttgtgagttttgacacaacatatttcaccaacagatacaacctcccgtttgctccctttgttggaatttctggacatggaaacacaattgtttttggttgtgcatttttgcatgatgagacttcagaaacatttaaatggctgttcagaacttttttgaaagctatgtcacaaaaagaaccaaaaacaatcattactgatcaggatggagcaatgagatcagcaattgctcaagtatttcaaaatgcaaagcacataaattgcttctttcatattgtaaagaaagctttcaatctatttggaaatttgttcaaagcaaaagaagggttgtatgatgagtatgaagacatcataaataactcagttacagaagaagaatttgagtatttatggcaagaaatgattgacagctttgaagttcagcatatcaattttctaaagcacatgtggtcaattagaaaaagatttattccagtgtatttcaagggtgatttctgtccatttataaaaagcacagctctcagtgaagggactaactcaaggtttaagaataatgttggtccacagtacagcattacaaacttcatgatagagtatgaaagagtaatggatacaattcaaaacttggaacagtttgatgatcacatttcaaggacaaagaaaccaagcaaactttggtcccattactacattgagtaccaagcaatgagaataagaaggaagtaccttgttattgtggacttggaaaaggaggatttcaactgcatttgctcaaagtttgagaaagatggacttctatgctgccatgtattgaaagtaatgctccacctcaatgcaatgaagataccagaaaaatatattattgaaagatggacaaaaaaagagtacaaaggtcttgggggaaaaggcaatggaaatatacctttagcacagagctcaatcctgagattcaacattttgtcaaggaaaagtgcagaaatagcatcaaatggatcgaaaagcaatgaaactttccagtttgcagtggaagagatggacaaaattgctaaacaattggaattaatgtgttcaaataaagatgctgagcaggagatcaatgattcagatccaaatgcagaagacaatttgaactcacatgaaaaaggcaatcaacaatctgaggaaaatacagaagaaatattgttggatccagatattgcaaaatccaaaggcaggccagctcaaagatataagacaatcagggaagaaatacagcaaaaagaactatatcattgcagtcattgtcagaggacagatcacacatttccaacgtgccctctgaaacacgttgagtttgacttgccaaggaagaagagaagaaaggttaaaaatacaagagaacaggatggtgtagagcagaaaaagaaagatgtttcaaacaaaagaaaagatttgcaacaagatatatcacaggagaagcataattctggggctgaattagaaggcaaaaagaagagaaattcatcttcatcaaaaaggggtggcacaaaagaatag

SEQ ID NO: 15665 - DNA, 198 bp, Oryza sativa
  Clone ID: PAT_MRT4530_21488C.1
atgttcgttcttacccacagccgcaaggggcgcttgaagggcactaagatccgctggcaaggaactactatgaaccgtgcggttcgggtgagagtagctgatgctggtgaatcgaagacggatcatagcagtggagtggaggttctatggcagaagccccatatttatgaagaaaaacaagttctaaccgcattctag

SEQ ID NO: 15666 - DNA, 555 bp, Oryza sativa
  Clone ID: PAT_MRT4530_21489C.1
gcacgaggcacctcgctcggctcgcctcctctcccccgttcggcgccgcctcctctcccacgagctctctcgcttgcgccgccgtctctccccagccgacctcacccgcacagtctcctctcccgtcaatctcgcccgcgtcgttttctccgttggatctgccgccgctttttgtcttcctggacgttgacggcggcttcgtccccgtggtggcggccgacgcggaggacgacacacgcgcggtgaggtgatggcggcggcggtggtggtggaggctcgccggctccctctctcccccaggagcactctctcctcatctccgccgccctcccccttctcctcctacagatctgatgatgggagtggtggagaagacctacgcgagcaagcctgtgttcatcggagagaaggaagatgcagtccagactagttctgtgtgtgtgtgttttttttttagtgtttcaagctagtacgctcgtgatgttctttcgtgtttggattaaatgttagtggatatttcgatagtgttccatatctctattttcgacacacggg

SEQ ID NO: 15667 - DNA, 311 bp, Oryza sativa
  Clone ID: PAT_MRT4530_2148C.1
acggatacgactcaaatttttctaaagataaaatacaaataagtccatatggcggactcttgtcatatttctaactcaaaccgacatcaatatcctaattaatagatacaattgccttaaatgagctctatccctaaacggtaatgacagttatcccaatcgaggcccaaactgagccccaagtcgacctgtatcggctcaattgaattctgactgccgatgcgcagtccgtttcggcaagattcaatctccttcgattccgcttcgatatccaactccaaatctgagtctatcttgccaaattttgctgt

SEQ ID NO: 15668 - DNA, 1305 bp, Oryza sativa
  Clone ID: PAT_MRT4530_21490C.1
atggagctaggagaagagaaagaagagagaaaaagaggatccaaatcgcagatggaaggagagagtacaatgtcagaatcaaagagtagttctagaggaaagaagaaatcaaagacaacttctgaacagaaagttgagatccatacaaaggaaacacagaatctggcgaacacaaagaaaaaacaagaggaaggcaaaatcaagagaaacaagaaggctccagttcaaggtgtcatacaaaaggacaaagaatgcaaaagttctaaggaaatagaaggaaaaaatatagatataaaaaagcacttcaaagctctgacagaaatggatacagagattataagtcaatcgaatctgacagaaattaacacagctatgttgagctcaggtatcacaattgaattgtcagaaggagaaagaagtattcagtcaaaacaaattcagaatatgaaacaaagtattttgacagagtatgaaacaacttttgtaaactcaggcataacaggtaatgaggtaggaataagcaatgctctggatgaaccaaacacagatcatattggattaggagcagaagatgcaacagtagaaaagcaaagtatggataattcagcaagtgtgacagaagcatttgttgattacagcaacaaatattcatatgatgaattatctcttttcggatcaatgaattcagttgcaaatatgtcgtacacaagcttaatggaacaaatcatatcatcacagcctacgatttctgatatgcaggaacaaaattcagcacactctacttttgttgcgagtccaagtgcatttcaggaagatgagagtaatgaagaggatgcaatggataattggaatcttgatatattcaatttgttagatggtgaaaaggaaccaagttcaatggataatcatcgatgtacttcagttcaaggaacaagagatgatgacaataatccaaatgataactctgaaacaaatcaacaagagctgacagaagaagacataaatattttcgtagagaatgaacaggaagaagctacaaagggtaataatgcagcaattgatagcagatatataccaagagttggaacacaatttaagactattacaaaagcacatgaattctttaacttctatgctctgttggctggattttctattgtcagggctcacaactaccacacaacaagcaagaaaaggaatggagaagtgactagagtaacgttcagatgtaatagacaaggcaaaccaacttctcaatccaaatcaagaggaatgagatttggaatatttcaagggtacaattag

SEQ ID NO: 15669 - DNA, 684 bp, Oryza sativa
  Clone ID: PAT_MRT4530_21491C.1
atggagctaggagaagagaaaaaagagagaaaaagaggatccaaatcgcagatggaagaaggggagagtataatgtcagaatcaaagagtagttctagaggaaagaagaaatcaaagacaacttctgaacagaaagttgagatccatacaaaggaaacacaacatctggagaacgcagaggaaaaacaagaggaaggcaagattaagagaaacaagaaggctccagttcaaagattcatcaagcaaagaacaggatatcactacttcaaagttggtcatgtgcagaagccaaatgaattcatatctatgaaaacttcaaaaggattcaaaggaaacaaggaaaaggaaaagaacaattctatggacatgcaaaaagtggaatcaggtgtcatagaaaaggaaaaagaatgtaaaagttctaaggaaaaagaaagaaaaaacacaggtgtcatacaaaaggagaaacaaagcaagagttctatggaaatagaagaaaaagaatcaggtgtcatacaaaaggagaaacaaagcaagagttctatggaaatagaagaaaaagaatcaggagccatatggaaggaaacacaaagcaagagtggtaaggaaaaaggagaagggagaaacattgatttgatggaaggaaatgataacttcattgtttttggtacaactgcttctatttaa

SEQ ID NO: 15670 - DNA, 477 bp, Oryza sativa
  Clone ID: PAT_MRT4530_21492C.1
atggggaaggacgtgttgaaatgtggtggcgcgcctctcggcgtgtgggacgccgcctcccccgtccgcagtggcggcagcggtggtggaactggtccccctatgcccgcccgcctgcccgcactgttgcctttgttgctggtgactaacttcggggagttcttgccggaggggagcgacggccacagtggcggcggggggaggggaggaggtagggccgaggggcgaaaccagccgccgtgcccgccggatccagcaatggtcgcctcggcggtgggtggggctgtgtcggcaacgggtggatccggcatcggcggggtgtcccgtggtgtatccggcgacggccgtgtcggcggccgcccgggcggcatccgtagggtgtcccgcaaggatccagtgacggccgcaggtgccgactctgtggtgttggttaggaaaaccgacacctataggggttttctaaccggcaccaattag

SEQ ID NO: 15671 - DNA, 3411 bp, Oryza sativa
  Clone ID: PAT_MRT4530_21493C.1
atggagctaggagaagagaaagaagagagaaaaagaggatccaaatcgcagatggaaggagagagtacaatgtcagaatcaaagagtagttctagaggaaagaagaaatcaaagacaacttttgaacagaaagttgagatccatacaaaggaaacacagaatctggagaacacaaagaaaaaacaagaggaaggcaaaatcaagagaaacaagaaggctccagttcaaggtgtcatacaaaaggacaaagaatgcaaaagttctaaggaaatagaaggaaaaaatataggtggcatacaaaaggagaaacaaagcaagagttctatggaaatagaagaaaaagaatcagatataaaaaagcacttcaaagctctgacagaaatggatacagagattataagtcaatcaaatctgacagaaattaacacagctatgttgagctcaggtatcacaattgaattgtcagaaggagaaagaagtattcagtcaaaacaaattcagaatatgaaacaaagtattttgacagagtataaaacaacttttgtaaactcaggcataataggtaatgaggtaggaagaagcaatgctctggatgaaccaaacacagatcatattggattaggagcagaagatgcaacagtagaaaagcaaagtatggataattcagcaagtatgacagaagcatttgttgattacagcaacaaatattcatatgatgaattatctcttttcggatcaatgaattcagttgcaaatatgtcatacacaagcttaatggaacaaatcatatcatcacagcctacgatttctgatatgcaggaacaaaattcagcacactctatttttgttgcgagtccaagtgcatttcaggaagatgagagtaatgaagaggatgcaatggataattggaatcttgatatattcaatttgttagatggtgaaaaggaaccaagttcaatggataatcatcgatgtacttcagttcaaggaacaagagatgatgacaataatccaaatgataactctgaaacaaatcaacaagagctgatagaagaagacataaatattttcgtagagaatgaacaggaagaagctacaaagggcaataatgcagcaattgatagcagatatataccaagagttggaacacaatttaagaatattacagaagcacatgaattctttaacttctatgctctgttggctggattttctattgtcagggctcacaactaccacacaacaagcaagaaaaggaatggagaagtgactagagtaacgttcagatgtaatagacaaggcaaaccaacttctcaatccaaatcaaggaatgagatttggaatatttcaagggtgcaattagaccacaatcatcaactaagtccaagagatgaagtgagatttctcaaatcacacaaacacatgactacagaagaaaaaatgctcataaggaccttgaaggaatgtaatataccaacaaggcacatgattgtgattttatctgttctaagaggaggattgacttctttgccttatacgaagaaagatataagcaatgtgagaaccacaattaacaaggagacaagcagcaatgatataatgaaaactttagaatttttcagaaggaaaaaagaaaaagatccacatttcttttatgagtttgatttggatgagagcaagaaagtgaaaaatctgttttggacagatgggagatcgagggagtggtatgagaaatatggtgatgttgtgagttttgacacaacatatttcaccaacaaatacaacctcccgtttgctccctttgttggaatttatggacatggaaacacaattgtttttggttgtgcatttttgcatgatgagacttcagaaacatttaaatggctgttcagaacttttttgaaagctatgtcacaaaaagaaccaaaaacaatcattactgatcaggatggagcaatgagatcagcaattgctcaagtatttcaaaatgcaaagcacagaaattgcttctttcatattgtaaagaaagctttcaatctatctggaaatttgctcaaagcaaaagaagggttgtatgatgagtatgaagacattataaataactcagttacagaagaagaatttgagtatttatggcaagaaatgattgacagctttgaagttcagcatatcaattttctaaagcacatgtggtcaattagaaaaagatttattccagtgtatttcaagggtgatttctgtccatttataaaaagcacagctctcagtgaagggactaactcaaggtttaagaataatgttggtccacagtacagcattacaaacttcatgatagagtatgaaagagtaatggatacaattcaaaacttggaacagtttgatgatcacatttcaaggacaaagaaaccaagcaaactttggtcccattactacattgagtaccaagcaatgagaatgtacaatcgcaaaatcttcatcaagtttcaagttgagttgaaaagaacaactagatttcaaataaatgaagtagagaagttcaaaacttatgaagtttttttggcattgaatcaaaatattcaagtaatcagaagaaggaagtaccttgttattgtggacttggaaaaggaggatttcaactgcatttgctcaaagtttgagaaagatggacttctatgctgccatgtattgaaagtaatgctccacctcaatgcaatgaagataccagaaaaatatattattgaaagatggacaaaaaaagagtacaaaggtcttgagggaaaaggcaatggaaatatacctttagcacagagctcaatcctgagattcaacattttgtcaaggaaaagtgcagaaatagcatcaaatggatcgaaaagctatgaaactttccagtttgtagtggaagagatggacaaaattgctaaacaattggaattattgtgttcaaataaagatgctgagcaggagatcaatgattcagatccaaatgcagaagacaatttgaactcacatgaaaaaggcaatcaacaatctgaggaaaatatagatgaaatattgttggatctagatattgcaaaatccaaaggcaggccaactcaaagatacaagacaatcagggaagaaatacagcaaaaagaactatatcattgcagtcattgtcagaggacagatcacacatttccaacgtgccctctgaaacacgttgagtttgacttgccaaggaagaagagaagaaaggttaaaaatacaagagaacaggatggtgtagagcagaaaaagaaagatgtttcaaacaaaagaaaagatttgcaacaagatatatcacaggagaagcataattctggggctgaattagaaggcaaaaagaagagaaattcatcttcatcaaaaaggggtggcacaaaagaatag

SEQ ID NO: 15672 - DNA, 682 bp, Oryza sativa
  unsure (1)..(682): unsure at all n locations
  Clone ID: PAT_MRT4530_21494C.1
ttttntttttttcttttttttttttttttttttttggaagttgaaaaacctccacagaggtgattttatacagtgttgatagaattcaatcaagacaacattatcatcatcacaacatactatcttacatacagattatttgccactaacatatgttacaaatacatgctacaagatcttaatattctaacttaaactaccctcatccagtacctgatgccgtgcttcagatgtgaggcacttttctcggactacaagttgtactccggacgctcataatcagcagccagcttttaggatggacctaaagcaagaggcgatgcagtgttgaatgcgctctcggaactgttcattgatgaaccgctgcttgcgtctccaatgagtgatggaaatgaggggatggatttcagtatcagcttccggccaccttttcggcttggtgaaacactgagtgcattatgaggtggcgagactctctttccatttggtgaagatgtcttgacacagttaccaggagaagcatcatctcttaatatatgtggcatttcttcattcaagccactattaacaatcttggaaaacttctgtgagtgaacagctccaggaactttcgaagatgaacgagatgagttcgagcgagctttaataggccttggtgggtttgcactcaagaagtttgggg

SEQ ID NO: 15673 - DNA, 411 bp, Oryza sativa
  Clone ID: PAT_MRT4530_21495C.1
atggcggcgcgcaaggggctgcggcccgacgccggcgccgacgccggcggcggccgggtgcgcgtggtggtgcgcagcgagtgcgagcccatgatggacttgttccggtccgacgagccggtggggagggccggcgagtggtggatgtacatggtcgacgtcgagcggctgaagcagaagctccggcttcctgtcggctcatgcaacctcgccctacctctgtggggacccggagtgtgtgaggacgatttaacgagggtgtgtgtgggacaaagccacccaaagagcgtaggaatctggtcgggaaatgttgccaaaggccacgagctgataatggacaaggttctcatcatcaattcatcatcatcactcgactttctctttagcaaaacatacactaggatcgagtag

SEQ ID NO: 15674 - DNA, 6080 bp, Oryza sativa
  Clone ID: PAT_MRT4530_21496C.1
tttgaagttgaaaaccctccccagaggtgattttatccagtgttgatagaattcaatcaagacaacattatcatcatcacaccatactatcttacatacagattatttgccactaacatatgttacaaatacatgctacaagatcttaatattctaacttaaactaccctcatccagtacctgatgccgtgcttcagatgtgaggcacttttctcggactacaattaggatggacctggttgattccatggacaagcatttgaataagatgctaaagcaagaggcgatgcagtgttgaatgcgctctcggaactgttcattgatgaaccgctgcttgcgtctccaatgagtgatggaaatgaggggatggatttcagtatcagcttccggccaccttttcggcttggtgaaacactgagtgcattatgaggtggcgagactctctttccatttggtgaagatgtcttgacacagttaccaggagaagcatcatctcttaatatatctggcatttcttcattcaagccactattagcaatcttggagaacttctgtgagtgaacagctccaggagctttcgaagatgaacgagatgagttcgagcgagctttagtaggccttggtggctttgcactcgagaagtttggtggtttgagcaacgaacttgaaacatcgaaaggtggagttatcgggacaagttcaaggaatgggtgatcttcactctgtgcatttgccttttgtagatcgttttccttttcctttccacaattttctgcttcttcacctccttgcttcatttcttcagcctcagttgatacagcagcatctcttttgccaaatgtgtttttgcaaccctcacatctgcagttgctggagcatccaacgcctccctgatagcattcacagtatttcttaagacagcttgacttcttgcaattgcatcctctcttatgtcgagctgaagctggagtgttgttaggatcttccccagtaatatcctgaccagcatcagacatgcggatcacttttggagcaaatgccagtgggttcctgaattctatctgcttgcgagtggaaagaacaatctcctcatgtatgggcttgttaagacacccttgacatgagcaaggttcagaacagtacacaccagcagcaaaacactcgcagtaaagtttcaagcactttgacttcttacagctgcagcgcttgcatgcctcaccatcatctccattatctgatttgcgcctcttcttttgagggctgttgctttgacttgaatcgtgatcatttccaagaaaaactccagctgaacaatcatcatccatctgaagttctagaagttcaccacccgggtgaatgaaattctctccagcagacaacatcttcccatgcgcttcctgctgagttgcagatgatggaaccaaagatgacatgggatcctgacagatcattttatccttcgatgttaaagcaagagcattcaaatgtagacctataccacgcaacacacgtggagatggagttttccctggatttgagtgattctgtacagggcttttccctttgcaggttgagactgacagatccatgactgattctttctgcacaatcctatttgagtacccagctgcctcaaaaacaagacagcgtcttcgcatgccacgttgctgttgagtctcaaccttgtagcctgttggaatacttccatttgcttcgtaaaggttatcctgaatttcttcagttgagatgtttttttcaccatctggaactagctgagcattttctgtctgatcttcgtccattagcaactcacggtagtacgtctgcgtagatgaactaggatgtgttctgtctgagatgtcaccatctcctgtaagctttgatagcagaaatccacaagattctgcattacttactgctagctgcactcctttgtgatcctcgtcataggctataagttcacccgaagttgcagagatcaagtcatcccagtcacatcccaggatttcatcattaagtttttctggctggcacccatccatgagctggacttcagtagaaaacaagcatttccttttctccgaagtattggtcttagctgtttggaatgcttgtaattttcgacatttgccctgtttaagatctgatctaacaccatggcaaggtgttgtgttgtgatctggactgccagaatcgaattgaccaggttgaggcaaatcgtttgacccttcaggaggtcctactgtaccttcacttactgaagaggtaattttgtgggttgcttgtgtaagagtgctagtgcaggcaaacaacctgacagcattagaagatttagatggcttgtttttatcgctttcatcggcacaaacctcactttcagagaattcagcgaaagagctctttgatagcttcgattccttttgcgcattgtcgtgcggagaagtgaagatggaagaaatggaggtgatgttgagggactggtatgcctgaatgctgcttgctgaatacgcggacttgagaggctcgatcggagacaggctatcgatgaagctgaaaagtggggagtgattgcaccatctcctagacggagaattgtttcgcaaagaaagtttctcctggatctacttcgtgacgaaggtatgctcggttgccgacctgcctctacaccaattgagcaaaatcataagttatgtgctgaattaggagatccagtgaataaagaaagatatcaaagacttgtgggacgactgatatatttgtgtcataccagacctgacataacttatgctgtgagtgttgttagtcgatacatgcatgaccctcgaagtggtcacatggacgcagtatatagaatcctgagatatttaaaagggagcccaggaaaaggcttatggttcaagaaaaatggacatctaggtgtggagggctactgtgatgcggactgggctagcagccttgatgataggaggtcaacctctggttactgcgtatttgttggtggcaatttggtctcttggaggagcaagaaacaaccggtagtgtctcgctcaactgctgaggcagaatacagggcaatgtcacaggatctcgaggaaaatatgaaatccaagaggttcctgattgttttggatgatgtctgggatgtcactactgactgttggaacaaactactggctcctttaagagctaatcatgttaatccgtcaaaggaaaaagtgacaggtaacagtatggtcattgtgacaactcgaaaaaacactactgccaagctttgtggaacggtaggatcaattaatttggaaggtctgaaagatgatgacatatggtcactatttaaagcatatgcttttggtagtgataaacatagcaataatccaattttacagaatcttgggaggaaaatagctaaggagctaaatggcaacccattggcggcaaaaactgtgggctccctattacgaaggaatcttaccgtagatcattggagcagcattatagagaacgaagaatggaaatctctgcaacatactgatggcattatgcatacattgaagttcagttatgatcatctacccagccacttacagcaatgtttctcttattgttctcttttccccaaaggttactcttttagtgaagcacaattgatacaaatatggattgctcaagggtttgtggaaaaatccagtgagaagttggagcagaaaggatgggaatatctagctgaattggtgaattctggtttctttcagcaagttgaaaatgagtggccttcatcagaagatattgttctgcacgatcttatgcatgatttagcacgaatggtttcaaaaactgagtgtgcaactatagatggatcagagtgtgaaaagttagcgccaagtatacgccatttgtcaattgtaactgactctgcgtactctgaggatccacatggaaacatatctcgtaatgaagaatttgagaaaagattgctgaaagttatgtcaaggaaaggggaggaactgccatcgagtgatagcaacggttccccaagttcagaatattttacagacataatatcaaatgaggtaatttatggtcttgaaccacatcatagcctcaagcataatggagttacctccccaacttgtcttgcaacttcacttacatctctgcaaacactttatctagaaaattgtggaaaatggcaaatactttctctggaaaggctatgtttacttaagaagcttgtattgatcagaatgagcaatgttgtagaagtttcaatttgttcactggaggagcttgtgttgattaaaatgccaaagttgaagagatgcttctgcacttcaatcaggaacttgaacgacaatttaagggttctcatgattaagacgtgccctgcactggaggtctttccgttgtttgataactgccagcaatttaaaatcgagcagccatcttggttgttccgtcttagcaagcttgtcatccataaatgtccccatttgcatgtccacaatcctctgccgccttcaactaatgtttcaaaattatccatcaccggagtttcaacgcttccaacggttgagtggtccagaggaatattaagaatcggggttctcgatgattctgatgatccttcggttattgatgagccttctgatcagctgataacgctagacgacaaagtattgtcattccataacctgaggttcctaactgaattggtaatagcaggttgccaaaatctcacgtccatttcattgcaaggtttgaggcaactcatatatttgaggactttggaaatacgcggctgcccaaaacttttctcttccaatatgccaccagagcttgtacgtgagaacatggcagctacatatcacaatgccctcccatctcttgaatatctctttattgctgcctgtggaataacggggaagtggctatctttgatactgcaatatgcgcaggccttacaggacttagatttatatgagtgcgagcagataacagggctatcgataggagaggaagaaagcagtcaaccaaatcttatgtcaactccagaaactttgtcattaggacatcaaggtgactcgccaacaagctcagctcgagatggacttgtgcgcattccgttaaatctcatctcctctctgaagcacatatatattggtgactgccctggtctaacatataatgggaacgatgaaggtttcgctaaactcacctcccttgagagtctacgaattatgaatggcgccaagctactctcgtccttggtgcatggtaatggatacgatgagcggaagaacataaagctcatcccactatcacttgaagtactggagctcagaggttatgatttaccagaagaagtggtgcctgattttctaaggaaccccatccgcctcaaaaaattatctgttatggacactttaagtttaaaatatctacagttgcaatcctgcacggcactcgaagagttggagattgtaaactgtgaatcgcttgccacactagagggtttgcaatccctgcgaagcctcaagaatttgattatatggggatgccccatcttgccacaatggttgtggagttcattagagcaggtccaggagcttttgcctcgactggaaaggctcaagatccaagacgcctctgtccttaccacatctttctgcaagcacctcacctccctccaacgcctaacgcttttcgcttgcaactgggaattggtgagacaaacagatgagcaagacatcgcgcttcagctcctcacatccctgcaagagctctcatttacgtgttgccgcaacctcggagattttcccgttgatctgtacagccttccctcactcaagaggttgaatatctattattgtaaggacatctcgaggctgcctgaaaagggcctcccaccttctctagaagaactggatatcaatgattgcagtgaagagctaaatgaccagtgcagaatgcttccaagcaagctgaaggaagatgaacagcgtcgcagatttactagtagaagtctaaaccttgtcagattacctgaggttcgccttccccatgcgcacgacttccactga

SEQ ID NO: 15675 - DNA, 321 bp, Oryza sativa
  Clone ID: PAT_MRT4530_21497C.1
gaacaccgagtgcgaaccagatatggctctgtatctgtttctgtatttggagatgaagacaagccggcgctcataacatacccggatttgggagcggcttcaatttcatccgatgtgcccgtgccatctgttgatgagcttgtggatcaagtcgcggatgttcttgatttcttcgggaagttcgtgggaatggacaagaccctgaatcagagattgtgcaagcctgtagaagtgagacatgacctgacggaagcgttgaagaagcttcagtgtcggacactgatttttgtgggagagaactcacagttccacgacgacgca

SEQ ID NO: 15676 - DNA, 1736 bp, Oryza sativa
  unsure (1)..(1736): unsure at all n locations
  Clone ID: PAT_MRT4530_21498C.1
ggcagaggaggaggaggaggaggaggaggagaagcttctagaaggggagcggggcggcatgggggactcgagccggtcggtgtccatcgacgtggagcggatctccttcggcggcaaggaacaccgagtgcgaaccagatatggctctgtatctgtttctgtatttggagatgaagacaagccggcgctcataacatacccggatgtagctctaaattatatgtcttgctttcaaggattgttcttctgcccagaggccgcgtcgctgttgcttcacaatttttgtatttaccacatcactcctcaaggtcatgagttgggagcggctccaatttcatccgatgtgcccgtgccatctgttgatgagcttgtggatcaagtcgcggatgttcttgatttcttcggattaggatctgtgatgtgtttgggtgtcactgccggtgcctacattctcaccctctttgcaacaaaataccgggatagagtgattggccttatgctagtttcgccgctatgcaaagccccttcttggagcgagtggttgtacaataaggtattattaaacttgctttactattctgggagtcgtgggctagtcaaggaatgcttgcttcagcggtattttagcacggaagttcgtgggaatggacaagaccctgaatcagagattgtgcaagcctgtagaagtttacttcatgagcgacagggatctaatgtatggcgattccttcaggcgataaacgagagacatgacctgacggaagcgttgaagaagcttcagtgtcggacactgatttttgtgggagagaactcacagttccacgacgacgcagtccatatgaccacaaagctagaccggagatattgcgccctagtcgaggttcaggcatgcgggtcactcgtcaccgaggagcaaccgcacgcgatgttgatccccatggagtacttcctcatgggatatgggctctacagaccttcccagctggatagcagcccccggagcacactgaacccattctgtatatcgcctgaacttctgtcaccggagagcatgggagtgaagctgaagcccatcaagactcggatctcgctcaaagtttagcaattggcaaatgaatgaatccttgatggcctgacaatacaagctcatgaaggtggaacactgcatgggctagtctgaattcagatggtcactgccagcaagttttggtacctccagtgatgcagctaatggcagttttttttttcttttcattgtggttaactgatataatctgtatcgatgtgttattaggcagaggtgggagtgagtttgtaggggagaagggtgggtctgtttgttcatatgtttgtagtcagaaacacatgtatatctcatcacatcgttccatacgagaaaaagaagagagaaaatgatagaagcagaattttgttgtgaaaaagtttcataaagaaattattatttttgcgaaacatcaatcatcactgacggagctgatgcatgccacccaagagctggaaggcgtgcaaatctcatcagccacaatttccccattcttaatcttgtgcaggtcagcgccggttacgtaaatctataccagactgcactcctttcaccgttctggaacatcaacgctcacagtcatcgtgtatattactcaaggccgagcccagtctcatgttgtcagccacaatggcacgnactgtgttcaacggacagcttcgtcgtggacagc

SEQ ID NO: 15677 - DNA, 185 bp, Oryza sativa
  Clone ID: PAT_MRT4530_21499C.1
ccaccaccgccgtgggcatattcccgggccttttcgggttggctgccgcgctcccgcgtgatctgctcgcgggcgacagaggggaaaacggcatatccgggcggtgccgcggccgtgcgcgcggcatatccgcccaccgtggccgtggcgtgcggggccaggtcaggtcaggtcacggcgcgtga

SEQ ID NO: 15678 - DNA, 653 bp, Oryza sativa
  Clone ID: PAT_MRT4530_2149C.1
cgaaccggcacaggatgtgccaatttcatatttataggaggacagaaattgcccctgagtacatgaacatttttgaaaaattgcccccgagtacatgacacatcagctgttttaaaacgaacaagtttgaaatgagcaaaaaaaaattttgaacccccaaaaggcaaaaaatttacaatagttccgaagggcccgaaacaaattaacaaatcatttgagcttccttcctgactgaaaatcctgaatccgactgaacctgcaacgacgggaactacaagcacggtggcggcggtggtggcggcggcggcccaaccgggctgatcggaaatggaggctgcggatgccgcggtggcggtggccacggccccggctgtgggcctacctataataccggcgggtgtgaccgcgggggaggcggagctccaggtgatcccctccggccaaaaagccccaacactggcgctggggcttgaccgcggtggccggagcacgggggcagctccagctccggcgtcggcgacgtcgaggtgtggccgccgcagccgcgaggctgtcgcccctgcttcttggcagccattgacgaggccgaagctagcgctgctaggatgagcaggagcagagctcgagccatcaccaagcggcagctgaatccc

SEQ ID NO: 15679 - DNA, 369 bp, Oryza sativa
  Clone ID: PAT_MRT4530_214C.1
atggcgattgcctgcgcgctctcggtggccgccccgtccctaaccggcaagaccaactcaaacccgccgccacgccgcagcttccagcagcagtggcgcgagcgccgccgccgtggcgtggccgctcgcttctccggtaaatccgccgacgtcgacgcggaggcggactcggggcgaatcgaggatgactcgagctacctttggaaattgggccttggatcggttggcggcgcagcggctatcaagtacgggagcatcctgttacctgacatcacaaggccgaacatcgtggtagccttgttaatggtgtccattcctgtggctgttgctgtcctcctcttgctcaaagtcagctcgagagatgactga

SEQ ID NO: 15680 - DNA, 184 bp, Oryza sativa
  Clone ID: PAT_MRT4530_21500C.1
ggagatgcgctgctctggttgccctgaaggtttacgctgagacgtgtggaggagcatacactgtctaccccttggggatgctataggatgtgctgtaagagctgtgcgcgcgccttattaatgcggatgcactctgtcttggggtgggctgagttctcgttaaatatttgagttttgttttcag

SEQ ID NO: 15681 - DNA, 348 bp, Oryza sativa
  Clone ID: PAT_MRT4530_21501C.1
atggtggcgctccggcgtgggttcaagacgctcgccgtggcacgcgccgtcgtgctctccaccgccggccctcacttctgcgccgcatcgagctcagctccccaagaaccccgccatggccccctcctcgtcgggcaacagtggcccagcgcgcgcggccgaggggctccgccgtaccattgtggagatgcaggcagtgcacggaagccgatgctcacggcgttgcacgtcgcctgtgtcggcggcggcgtcgaggtcagggctgcctgtgccatcgtggagaagagccgaaggagatgggggaggaatctgtgtggggcccacggttggccaatgatttctggctag

SEQ ID NO: 15682 - DNA, 369 bp, Oryza sativa
  Clone ID: PAT_MRT4530_21502C.1
atggccgccgtgagccccgccgccgccgtccttgggagccgccggctttgctggccgctcgctcaggcggcggcaaggcagaggaaggggcggggaagggcggcggcggcggcaagggttgcgccgcccgagtcgcccgacgcggggggcgacgcgggggactccttaaactgccagggactaaaacttaggctaccaaacttctcaaacaagaactacagattcttactttcgcggctaaggacgatgacatatcatattcacttacaggcagcatttaaactgtcacaggatatcgaaaaatctgcgctcggaagtaccataaataatggtaaacagaaggtacacaagggaacacataatacatga

SEQ ID NO: 15683 - DNA, 267 bp, Oryza sativa
  Clone ID: PAT_MRT4530_21503C.1
atggcccggtggtgccgctcccttagcttcgtccgctcctccctcttgccgtcgccgcggcgctgccgaggcagagggcggtggcgccacggctgcggggaggggaagaggcggcggatggggatggtggagccgaagccctacggccggtggtgcggtggtgggtccccacgcgtggtgagggagaaggaagcacaggagaggggacggcgtgagggcggaagagaaaccaccacagtcgccaggccgactgcacgcgggcgatag

SEQ ID NO: 15684 - DNA, 127 bp, Oryza sativa
  Clone ID: PAT_MRT4530_21505C.1
tgactttttcaacgcacgcatcttgcacctcatattggcttttaatttgccatgggggcttctaaatcacctacctgccaatcgataaacacgaatactcattctgatcaagaacacagttattgta

SEQ ID NO: 15685 - DNA, 1206 bp, Oryza sativa
  Clone ID: PAT_MRT4530_21506C.1
atgtatggcaagtacccggagagcatcaagtgcgacccgaccaccgtgtccatgagcatcaaggagaacgagcccttcgtgtacacctacgaggtgtcgttcgtcgagagcgatatcaagtggccctcgaggtgggaggcatacttcaagatggagggtgccaaggtgcactggttctcgatcctcaactcgctcatggtgattgctttccttgctggtatcgtgtttgtcatattactgaggaccgtgaggcgtgatctgacgagtgatgttttccgcgcgccaagcaacccaatgttgctctgcgttatggtcggggatggtgttcagatccttgggatggcagtggtgaccattctgtttgcggcgcttgggttcatgtcaccagcttcccgcggtactctgatcacgggcatgctgttcttctatctggttcttggaattttggcaggatatgtgggtgttcgtgtgtggaagacaatcaagtgcggtgatcatacagggtggatggctgtttcatggagggtagcttgcttcttccccggcattgcattcctgatccttaccactctgaacttcctgttgtggggaagccaaagcacaggagccatccccttctcgttgtttgtcatattgattctgctctggttctgtatctctgtgccgcttacacttgtaggtggactcctcggtgccaaggcaccgcacattgagtaccccgtgcgcactaaccagatccctcgtgaaatcccacctcagaagtacccatcctggttgctggttctcggcgctggcacactgccctttggtaccctgttcatcgagctcttcttcatcatgtctagcatatggatggggcgtgtgtactatgtctttggattcctcttcatcgtcctgttgctccttgttattgtctgcgctgaggtttcccttgttctgacctacatgcatctctgtgtcgaggattggaaatggtggtggaaatcattcttctcatctggatctgtggcgatctacattttcttgtactcgatcaactatcttgtttttgacctaaagagcttgagtggacctgtgtcggcgaccctctatctcggctactcactcttcatggttattgctattatgctggctactggaacagtgggattcatttcatcattctgcttcgtccactatcttttctcatccgtgaaagcagattaa

SEQ ID NO: 15686 - DNA, 452 bp, Oryza sativa
  Clone ID: PAT_MRT4530_21507C.1
gggaactgggaacccccaaaaaaaaaaccaaaaaagggtgggaaaaaaaaaaaaaaaaattaaaaaaaaaaactaaaattaggggtaaaaaaaaaatttaaaggaacttaaaaaacttaccctaaaaaaaaaaaaaaggggggccaaaaaaaaacaaaaaaaaaagggggggggcccaaagggaaaaaaaacccccttttggaaaaaaaaaaaaaaaccctggggggtaaaaaaaggggaccctaaaaaaaaaaaggaggggattggggggggcggaaaataaaaagggggtaaattttgggcaaaacccaaattttgcttttggaaagggctttgggaaaaaggcccactggatttgaccccttaaaaaacccaaacccccaaaagggggtggggaaaattggcccgggaaaatacccaaaaaggctccaatttttaaccttggcctaaaa

SEQ ID NO: 15687 - DNA, 2596 bp, Oryza sativa
  Clone ID: PAT_MRT4530_21508C.1
cccagatctactccaccgccaccgccaccgacacccccgtctccggcgagtccccccgccgcctcctcgccggagaacccgcctcccctcccccaaccctaaagcctccccgtctcattcgcccccccaccggatccagatcaaaaccacacgccgatccagatcccgccgggcgcccagccatggcgcgcctcctccccttcctcgtcgcggcggcggcggcgttggtggcggtgtccctctccgcgccaggcgccgacgggttctacctcccggggagctacccgcacaagtacaaccccggcgagccgctgagcgtgaaggtgaactccctcacctccatcgacaccgagatcccctacagctactacagcctcccgttctgcacccctcccgacggcgtcaaggacagcgccgagaacctcggcgagctcctcatgggcgaccgcatcgagaactccccctaccgcttccggatgcacgccaacgactccgacctcttcctctgccgctccccgccgctcgccgccgacgccttcaacctccttaagaagcggatcgacgagatgtaccaggttaacctcatcctcgacaacctccccgccatccgctacaccaagaaggacgactacttcctccgatggaccggctaccccgtcggcatccgcgtcggcgtcgactactacgtcttcaaccacctccagttcaccgtcctcgtgcacaagtacgaggaggccaatgtcgcccgtgtcatgggcaccggcgacgccaccgacggcttcccttccaccggcaaggacggcagcggcggcgccgccgggtcatccggctggatggttgtcggcttcgaggtcgtgccttgtagcatcaagcacaaccccgacgacgtcaagtcgctcaagatgtatggcaagtacccgaggagcatcaagtgcgacccgaccaccgtgtccatgagcatcaaggagaacgagcccatcgtgtacacctacgaggtgtcgttcgtcgagagcgatatcaagtggccctcgaggtgggacgcatacctcaagatggagggtgccaaggtgcactggttctcgatcctcaactcgctcatggtgattgctttccttgctggtatcgtgtttgtcatattactgaggaccgtgaggcgtgatctgacgaggtatgaggagcttgacagtgaagcgcaggcgcagatgaacgaggagctgtctgggtggaagcttgttgtcagtgatgttttccgcgcgccaagcaacccaatgttgctctgcgttatggtcggggatggtgttcagatccttgggatggcagtggtgaccattctgtttgcggcgcttgggttcatgtcaccagcttcccgcggtactctgatcacgggcatgctgttcttctatctggttcttggaattttggcaggatatgtgggtgttcgtgtgtggaagacaatcaagtgcggtgatcatacagggtggatggctgtttcatggagggtagcttgcttcttccccggcattgcattcctgatccttaccactctgaacttcctgttgtggggaagccaaagcacaggagccatccccttctcgttgtttgtcatattgattctgctctggttctgtatctctgtgccgcttacacttgtaggtggactcctcggtgccaaggcaccgcacattgagtaccccgtgcgcactaaccagatccctcgtgaaatcccacctcagaagtacccatcctggttgctggttctcggcgctggcacactgccctttggtaccctgttcatcgagctcttcttcatcatgtctagcatatggatggggcgtgtgtactatgtctttggattcctcttcatcgtcctgttgctccttgttattgtctgcgctgaggtttcccttgttctgacctacatgcatctctgtgtcgaggattggaaatggtggtggaaatcattcttctcatctggatctgtggcgatctacattttcttgtactcgatcaactatcttgtttttgacctaaagagcttgagtggacctgtgtcggcgaccctctatctcggctactcactcttcatggttattgctattatgctggctactggaacagtgggattcatttcatcattctgcttcgtccactatcttttctcatccgtgaaagcagattaagctcatcccgatgcagagtgtattactcaaatgagaggtgagaatagtggacatcaaaaagtttgtagtcacaaaatcttagctcatgtcatcttttggtatacaaagactgaataactattgtaagctttactaggatttatcaatgggttttatggagagatgtgctagcagcttgcacgatgtaatagaatgaattggtttattcacattttgagtcattttagttgctctttctgctgccatttagctgttaagatgtaagcttagtactgctgtctgttgcaatcgtgtttggtatcattttcctaaaatgttagatcaattttttgacttaaaaaaaaaaaaaaaatttgatgcagttgctacacaatatagtgattatacttatttttctttgctgcaaaaaaaaaaaa

SEQ ID NO: 15688 - DNA, 1877 bp, Oryza sativa
  Clone ID: PAT_MRT4530_21509C.1
gtgtgtgtgtgttttgcagttgaacaatgactgctcagaccaagaagaggggtggcggggagagcgggaacggtggcgctggcttgggccttgctgccttcatcgccaacggcgaggatctgggccctatcgtccgccacgcgttcgagtccgggaagcccgagtccctcctgcaaggcctcaggagcatcgtgaaaatgaaggaggttgagattgaggagctctgtagggtccactacgaggagttcatccttgcagtcgatgagctccgcggcgtgttggttgacgccgatgagcttaagggtatgctgtccggcgaaaacctgcgcctgcaagaggttgctagctccctgctgttgaagcttgatgagcttcttgagttgtattcagtgaataagaatgttgaggaagccctagggatgttgaagatctgtttgcaagtcaccagtctgtgccagatgtgcaacaaggacattgcagaagccaggcttcattctgctttgaaaagtttggagttgattgagaaggattttctgcaaaatattcctctaaagcttctaaaaaaggctgttcagaagcaaataccaattgtcaagctgtacattgagaagaaagtttgcaatgagtttaatgagtggctggtgtatatcagaaggacagcaaaggaaattggtaaggtttcgataagccaggcatccttggctcgtcagaaaaatgagggaatacattcccaacagagggaagcagaggactgcagccgtattgggtttgacgagcatgcttatgccttggatttggatctcataggtgaggaggaagtactggaattcgatcttacaccagtataccgagcaaactacattcacacatgccttggtcttggggaaaaattccgagaatactactacaataacaggcttatgcaacttaatttggacctgcaaattcccacgacacaacctttcatggagtctcatcagcacttccttgctcagatagctgggttctttattgttgaggaccgtgtccttcgaactgcagatgggcttctttctgatagtcaggttgagacaatgtgggggacagctatttctaaggtcacatctatcttagaggaacagttctctcgcatggatgctgccaaccacctcctactcgtaaaagactatgtcactcttctgggtgcaaccatgaagaagtatggataccaaaccacatcattgcttgaaattcttgagaagaatagggacaaattctatcaacttcttctttctgattgccggaaaaagatagatggcatcttcactaaggactcatatgagcagatgatcattaagaaggaaaatgagtaccacatgaatgtttcagcatttcaacttgaacccattggtgtagttccggattttccatatgttgcaccattttcctcttcagttccagatgcttgccttatcgtgcgctcttttattgatgattctgtgaactacttgtcatatgatcctatgatggacgcctatgatgtggtgaaaagatacctagacaagctcttgattgaggtactaaatgatggccttctgaatttgatacatggtggttgtttggagattacacaaatggtgcagattgcaggaaatattgccattcttgagaagtcctgtgacatgttcctctttcatgctgcccaactttgtggtgttcctaggcgtcttcttgacaagcctcattccggtttgactgctagagctgtgctcaaagcctctcaaaatgcagcgtacaatgggttaatagccttggccaattccaagattgacgaatttatgttgcttttgactaagcatcaatggacaccagaggaaacttcagaacatgtgaatgac

SEQ ID NO: 15689 - DNA, 2052 bp, Oryza sativa
  Clone ID: PAT_MRT4530_2150C.1
ctatctgtccaatttctttttactttttttctttttatgggtgaagaagattaatccagagtttaactatagtgtacaatgctttcctgctgggaactcaccatctgaaacatctgtacaaagatacaaccatgcagctatccatcagctcggcaattacaaattgaagtatggtgcaaaaaagggggacccatgttctctaccactccagttgcaagcctccccaaaaccatatgagccctaccgttctcccgctaggaggccaggctcagaagcctcctaaatatattatccttgatcaatctttgtaaataagagatacaacaccaccacatgcttgatctgcatgtaaggaagattttgatttttttttctccactcctgttactcccacattataacaatactcatcatataactttgagaaggccgcataactagaagagctaattcacaagaatatatactggtttttctatctgtccaataaccaattaagcaccgtcttttttggcacggttccatcactaccttctttctccgtcttcacagcagtatttacagcattacggatgagagaattcaagcgcaacctcagttgtgcattgtcaataagcagatcagataacatttttgttgtctcttcatcagtaacatatgcatcttcactgctcatggttaactgaggatttaccatcagaattatcaccatcatcagaagagccctgttcatcatctcgtgacagaagttgagcccctgtagagctcatccttatcccattgaagttgggtaattttctctctttcggtcaaaacagcctgatgtagaatctctttgtcttttttcttcgtagcttccaactcaacctccaaatctttgacctttgtcgcaagatattctttgacagccacttcctgatttagtcgtgctatgagatcctccatatcagtttttgctgtcacctgtcttctgtccatgctgatcaaaagtctagtcaacttcggcctttgatcagcaggaaggatgatttgtgcatccatatcatataaaagctgcatatctaaacctgtaaattgttctgtttggctatgtccatcaattccacttggaagatccacaggaccatcccaaagggaactactaactccaggaaccgataattcactgcccctcaaagaactcaaatcacttcctatactttcagcagagtccttcctggcatggccagggttagaatcgtgatcctcttcggaaaccactcccttataagtatctatggaaccattcctaacaccatgttccaaaaagacatggttctttttcctgtgatttgacatgctactagcccgctcattgggctgatctaagatagactctcccagcataccattaccagttgctcctgtcggaccgttaccatgagcaaaggctgaattcatttgactggactcagagagaacacatgagcgtgcagcagcttccagctcaagaaaagcagcaacaggtgcacttctcgacaactcaatgtcagaaagtagcttttgcatccactcctccaaagcgttccttctctcttctagaagcaccctgcttgaatttattcttgaaaaggcatgcttcggtggagcaggggggattccttttctgggaaattcctgcttaagcgtatacactaagtcaagatttataataacagtatgttttaaagtatctgaagtctgactaccttcgaagaactccgtggctagagctgatgccttctggagattgtataccaacatgtatcctgtaaaactgtcaactatggatttcaagaagttgtcagcagtcgcactagcttcaggtgtctgagcgatccaagaaggaatcatcacacagtaactccatccggtttgagggttatgtggccatatggtgttccttccctcccatctcttcgggggcgggctccagtccatgccgaacggcagcccggaggtgccgtcgtggcggtgcttcggcgggctcggcgccttcttcctcgccgacgaaaacgacgacggcgtcgccat

SEQ ID NO: 15690 - DNA, 1530 bp, Oryza sativa
  Clone ID: PAT_MRT4530_21510C.1
atggagaagacgggaaacgaggcccataaggcccaacccaatggcttattatgggcttactgggaagcccattttaaagcgttcttcttcttctccccgcgcgcgcttcccttcgtctccacccgaaagccaagaaaccaagaacgcaagaaatcaagaacctgcgacatggatcaagaattccatttcgaccctttcaccggcggcgacttcgactaccccgacggcgagtctttctccggcggtgccgcaagcggcgggtttgactaccccggatcctgcggccgctcttcttccgccggcgaggaacttcacggccatccataccgcgacggctattctttctccggcggcgccgcaagcgacgaatgccacttcttgggcaggagcggcttcccttcttcaggcggtgagcgacttctcgttcaccggcatccagaccgctaccgctgcggcgagcctttctccggcggttacgcaagaggccacggcgacttgttgggatggagcagctgccattcttcctgcagccaacttctgcaagaccctgcaaccatcgtcatcgtcatcaatgacggtgctcatgcccatggcggcggattagcacaggctgggcaagcctcctccatgagcgttccattggtaaaatcaaaacaaggaacatcactggtgccacagctcaagcttggtccatcagctgccccaaacttattacactggctcatggagcacatcttatgggatgcattagaattctccatcagttggaccacactacgacggcatcaaccaaaactcccgagtgaatggagttggtggatggcaatgggttcaccgttcattcagatagatggaatatgctctatagctgccagttttatgtgtgtggaagcacaacataggctagcctttgagatcctacatggaattggtaggttccccttaaaagcaaagagactcaagggtgtaaagaagaaatgcataaacaaaaaggtgtggagccctgcagacggagcatttgtagaggatgtgctgaaggtggtggcgaagggaaggggaaaagacgtcagtcatgaggcagcagtgcgtctcttactcgcccatggtccactgctggcaacattgtgggtgaatgacgagtacatgatctgcacaacaaagaatgatcttgtctaccgtgggagcagcaacagtgaaaaggatcccaatcatacggtggtctgcttcgcttatcggtttgttggcgaggaattacacctcagggtcctcgacgaccataccgaagatgggccagtgagatgggtattgtacgagtgcatagatgaaatccacctgttgacactaaaggaacctttgaccaaagaactcatcgacagatacagaaagaagggacagactgagagcttcttgtcaaactctgcaaacaaacaagatcatccttcctaccttccaattatatcaccaatccagttacagcaatcaattggtgaatatgaggacaaaggattcagacaatcccatcacagatga

SEQ ID NO: 15691 - DNA, 231 bp, Oryza sativa
  Clone ID: PAT_MRT4530_21511C.1
atggggacggggacggggatggtgaaattttttcaccgcggtgacggggacgcggatgtgatccccgacggttcgattcctatgggtaccttgtctgatacttatggataccagatccgatctccatgggtaccatttctgatacttaaggaagaggaagatgagagcacgaagatggtgaagaagccgatgaagcagaggaagaagtggagcagtggcttgttctattga

SEQ ID NO: 15692 - DNA, 444 bp, Oryza sativa
  Clone ID: PAT_MRT4530_21512C.1
atggcgtctgcaagctcatcgtcgttaagcacccgccggaataggttagttgtacctttgatcgtgtgcccctcatgcaatgtgaagaccatcgtgagatgcacagcgaagacagatgctaatgaaggccggattttttacacttgtcctgaccatgagaaagatggaactgggtgtaacttttggtattgggaagaaggttacatcaattatctgaagaggaatggcttcattgctggagaagatggcacatatgggaagactgctcagcatttggatctgaatcaagatgcttttgggagacaagatgaaattgagaagaaattgatagctatagtgcccattgttagagaaatactgttggcagtgaagtgcatgttagttgtagggttatttggagttcttattttagtctgtgttctggttgttgtcttgatgaaatga

SEQ ID NO: 15693 - DNA, 362 bp, Oryza sativa
  Clone ID: PAT_MRT4530_21513C.1
aagctaaggggaagaacatggaaccggaagtagtccatgtccctcaagatgagaagatagcataccatggtgatggatatggacatggaggaggctatggtggcggttatggatctgggtacggcggaggaaatggtggtgggtatggtggtggatatggcggctacggtggtggatatggtggaggatatggtggtggaggaggaggtggtggatatggaggatatggtggatatggtggtggcggatacgaaggatacggcagaggatacggtggtggcggtggtggaggaggatatggtggtggtggctatcccggcggtggatactatggtggtggtggtggcggtggttggcactaa

SEQ ID NO: 15694 - DNA, 471 bp, Oryza sativa
  Clone ID: PAT_MRT4530_21514C.1
atgtcgtcggcattggacaagttcattgcggtggtgaaggagacgaagccgcggtgggacctcagggcggcaacacggtgcctagaggcggtgctagcccggctgctgccaccacatcagcgccgctcctcccactcacgaagacggcctccaaaccacggcatcgacaatgacgatgaccgcgacattggaaccgatcgcgcactatcgcggttgttcgtcaagggcatctcattggcgacgttgatgaggccggagttgccgggtggcgtttatttccctggatgccccggtgcggtgcccttccccaagactcaagggcactcccttcatgtcattgtgcagctgggttgttcccttgtcatggtcatcactgccactgccacggacttcaactgcccccaaagattgtcatccgaacatacgctgtgtttagttcctgaaattagggagaagtttggagaaagttaa

SEQ ID NO: 15695 - DNA, 2703 bp, Oryza sativa
  Clone ID: PAT_MRT4530_21515C.1
atggctgaacgactccttgatcgcaaaatcaaatcggttcaaaccgattggggtggcgagtaccaacgtctaaattccttttttcagcgcattggtatctctcaccatgtctcctgccctcatgcccatcagcagaatggctctgctgaacgcaagcaccgccacatcgttgaggttggtctctctctgctggctcatgcatcaatgccgcttaaattttgggatgaagcttttctcaccgccacatatctcatcaatcgtactcccatgaaaatcatccattatgatacacctgcatatttgtttgaggaacaaccggattataatgctcttcgcacttttggttgcgcgtgttggcctaaccttcgcccttacaacacccataaattggccttccgctccaaacaatgtgtctttctcggttacagtcctttgcataaaggttttaagtgtctcgaagtgaattctggccgggtgtatatctcacgggatgtcgtgtttgatgaaaatatattccctttcgctcagcttcgtcctaatgccggggctcgcctgcgggctgaagtcttgttgttgccttcacatcttgtccattcgttcgggggtactgaactgtgcaaccaacctctgattaatatccctaaccatactgacgagactgctgagctgcatgcaggaatttctgcaggagaaaatggtgcaaatcctggtgaaaacgctggtgctgatggtgcagaaacggctgcaaacagtcgtcattttatgcagcatggctccgacgtgcatggtgctcaccccgagggtggttctgcgctccagtcacctccgcgcagcgcgccgtctgctacctgtccgtcgcagacgcaggactcggtgccggcttccatcacgcatccgcatgacgaaccagggggagacacgtcgtcgatttcgccagccgatgtggtctcgtctgcggctgcagatgggatgcatgcgacgcatggatccgctacgtccagtggaggcaacgtctccagcccacacacgtttgatgcagcacaacagatccagcagcgtccagtgacaagatcacagcatggtgttcatcgcccaaagaagtatacggatggtactgtcaggtatggttgtttgactgagacaggtgagccatctagtttacaggaagctcttagcagtgcaaactggaaacaggcaatggacaaagaattttctgctcttttgcataataaaacctggcatttagtaccaccggtcaagggtaaaaatattatagattctaaatgggtttacaagattaaaaagaaagcagatggcactatagacagatacaaagccaggttagtagcaaagggttttaaacaacggtatgggatagactatgaggatacttttagtcctgttgttaaggctgctactataagattagtcttgtccattgcaatgtctcaaggttggagtttaagacagttggatgtgcaaaatgcctttttacatggttatttagatgaggaagtatatatgagacaacctcctggttttgaagatgctagacaaccacattttctgtgcaaacttgataaagctttatatggattgaaacaggctcctagggcatggtattctaggttgagtaagaaactgcaggaacttggtttcagctcttcaaaggcagatacctccctatttttctataataaggggcatcataaaatgtttgtacttgtttatgttgatgatatcattgttgctagctcatcttccccagctgtaaatgcgttgttgaaagatctggaaaaggactttgctctaaaggatctaggtgatctgcattacttcttgggaatagaagttaagaggacaccgcaaactctattactctcacaggaaaggtatactactgaacttcttgaaagagttaatatgacatcgtgtaaacctgtgagtacacctttgtcaactgctgaaaaattgtctgttgagattggagatgaattggggcctagtgatgtgacacagtataggagtattgttggtgctttacaatatcttactttaactaggcctgatatatcttactcagtgaataaagtatgtcagtttttgcaaactcctacaacagctcattggtcagcagtcaaaaggattttgaggtatttgaagggaactttggatctaggactcaagattgttaagtcttcatcaaatcttgttagtgctttctctgatgcagactgggcagggtctgttgatgacaggagatctacagggggttttgctgacaggagatctacagggggttttgctgtgttttttggtgataacttgatttcatggagtgcaaggaagcaagccactgtctcacggtctagtactgaagcagagtataaagcactagctaatgcagcagctgaaattatttgggtaagaaagttattaactgaattaggtattttacatcctaatgctgcaagactttggtgtgataatttgggtgcaacttatatgactgcaaaccccgtgtttcatgctcggacgaaacacattgaagttgattatcattttgtgcgtgaacaagtagctcagaaattgttggatatacattttgtgagctcacaagatcaggttgctgatggtttcacgaaaccaatttctcttcagcagttgataggttttcgacacaatctcaatcttgtttgttaa

SEQ ID NO: 15696 - DNA, 166 bp, Oryza sativa
  Clone ID: PAT_MRT4530_21516C.1
cgtcaggggaccaataaactgtgcgagaacaccgaggcaagggtgcgcgcaagggatcatacgcaagggagttacttcaaacacagagagtaagcatgggacagagtactgcacacagggtcccttcttcaggattcttggcaagaataaaaattccacagtggaa

SEQ ID NO: 15697 - DNA, 259 bp, Oryza sativa
  unsure (1)..(259): unsure at all n locations
  Clone ID: PAT_MRT4530_21517C.1
caacagcctgagcaagaggggatacataggaagctaccactacgagaaggatgccaagtacaggccattcagtgcactgctccctgagggtcaaaaccccaagatgctctatgtcaagctcgtcctcatcatcctcatgtgtgggcttccttcgtcagccttctcaactccgcatcntattcatcacaacgatgatcaccacaccagagtgagaaaaaaaacccttcaaattcatggttttattcgcagatttttttaa

SEQ ID NO: 15698 - DNA, 432 bp, Oryza sativa
  Clone ID: PAT_MRT4530_21518C.1
atggacgagctcatccagctcgccgagtccatgcgccaggccgcctccctcctgggtgacgacgacccctccgacgagtccagccgcgccgcccctccaccttcctcaacgccgtcgcgcttggcaacggtgccagcaatcttcacgccagtagtgggggctcgagaccccgccgcccccatgctggatccgcccctgtcgacgaggccgtcggcaagctcaagtccgtccttgataacggcgaaggcgacctcgacgaggcggtcgtggatgcgtcgccgccccggctcccgccgccgtgtcgcctcgtgctcctacctccgcgtcaccggccgtgtcgcctcgtgctcccgtgctcccgccaccacgtcgccggccgccccggcgtcctcctccccacccgccccggtagttgcccaagaggagaagtga

SEQ ID NO: 15699 - DNA, 1422 bp, Oryza sativa
  Clone ID: PAT_MRT4530_21519C.1
atgagcttgcggccgggcagggcgcaccccctcgccgcgtctcccctccacaccccgctccctgctaggcctaggccccagctgaggctgagcacctccaccagctgcgccgccatgaagtcgtacaggctgtcggagctcagcgacgccgaggtcggcggcctcaaggcgcgcccccgcatcgacttctcctccattttcggcacggtcaatccgattgttgaagacgtgcgcatgcgaggcgatgctgcggtcaaggattatacagtgaagttcgacaaggttgcactcgatgatgtggttgtgcgtgttagcgatcttccggatgtggagcttgatccagctgtgaaggaagcctttgatgtggcatatgacaacatttatgccttccacgtttcgcaaaagttgcctgaaaagactgttgagaatatgaaaggtgtaagatgtaaaagaataacaagatgcattggttctgttggcctttatgtcccaggtggcactgcagtattgccttccactgcattgatgcttgctgtgcctgcacagattgctggttgcaaaactgttgttcttgccacaccccctagtcgtgatggtagcatatgtaaggaggttctttactgtgctaaaaaagctggtgtgacacatgtattgaaagctggaggagctcaggccatttcagccatggcatggggaacagtctcatgcccaaaggttgaaaaaatatttggacctggaaatcagtatgtcacggctgcaaaaatgattcttcagaacagtgaagccatggtttctatagacatgcctgctggcccttcagaagtattagtgatagcggataaatatgcaaacccagttcatgttgctgctgatttgttatctcaggcggaacatggcccagacagtcaggttgttctagttgttgcgggagacggtgttgatttgggtgctattgaggcagaagttagcaagcagtgctctgctcttcctaggggagaatttgcttcgaaagctcttggccacagtttcactgtttttgcgaaagacatggttgaggcaatttcattctccaatatgtatgcccctgagcatttgatcatcaatgtaaaggatgctgaacagtgggaggatcttgtcgagaatgcagggtcggtcttcttgggacaatggaccccggagagcgtgggcgactatgcaagcggcacaaaccatgtccttccaacctatggttacgcaaggatgtatagcggcgtgtcactgaactcattcctcaagtacatcactgtccagtccttgtcagaggaagggttgagaagtctgggtccgcatgtggcaaagatggctgaagtcgaaggactagaggctcacagaagagctgttaccctcagacttcaggacatcgaagccactgtaaccgtgtag

SEQ ID NO: 15700 - DNA, 279 bp, Oryza sativa
  Clone ID: PAT_MRT4530_2151C.1
atggcaccctcggcgtccctgaccaccaccactctttccgacatgcttaaccaggactgccgccgtgacgcccaaggccacggcaccttcctgccgtggaggtccgtgccccagaaaccgccacacccagaggtgccccaattgaagcgacgatggtcgtcttggcgagttgactcgcacgaggaggcgacgctcggtggcaacgaggcctcgacactgaagggagttagcggacacagtggtggtgccgcggattggttttttgaccgcccccgttaa

SEQ ID NO: 15701 - DNA, 369 bp, Oryza sativa
  Clone ID: PAT_MRT4530_21520C.1
atcaagtccaaattttggtacaactaattccaacattacaatgttttgtcgtgtcttgttcaacagaaaacagtgtaaagcaaaaaaaagaattcacagtgagctaatgcgatccgctcaccatgaactggcagacattttcggctactgattacagtgtaacataacagccaaaatcagatcaaagctggcaaattagttcaaggcggccgatcgaggactgcaccctgaccgttggatccatcaaataaaaatttagcggtagtgacgacgaacactcacactcacactcaaaccagccgcacgcacgccgcggctgaacgtcactgggtcatagtcgagaagccgccgcgaattgccccgagcaga

SEQ ID NO: 15702 - DNA, 463 bp, Oryza sativa
  Clone ID: PAT_MRT4530_21521C.1
acaggaaacaggcggggttcaaattttcacattggaccgtctcctttcaaaagcatatgtccatggggcacccctgcaggggcccgggtgtttgcacaaatttttttcacccccacatgccgtacttaaccggggggccgggcggtttgatccatggttcggggggcaaaaagttttgcacggggaacttgggggccccctttttggtgaacacctttttgtaccccggccaattgacccggccggggggggggggcccggcccccttgttcccgtactccgggtaccaaaacgttttgagcccaaaatccccgctccacgggagggagccggccttgtctacaaagggggggatgtcggatttcatgatgagcgtgcgcgagtactcgccccacgggcgtgcaaggtatctgcggacgggggggcgggaggcgttccccagcgcccacttggggggaaaacg

SEQ ID NO: 15703 - DNA, 2145 bp, Oryza sativa
  Clone ID: PAT_MRT4530_21522C.1
aataaataacgaaggctaaccgccgccgccctcgcgtatctcccccctttccctcggcgtaaaagaaaatctcccggtctctcgtctcctccgctccttgcgccatctcgccgccgatctccatcgggcgagcagagcagagcaggggatcctgatctggaagaagctccttctcttaatttcagagccttaaaaccttaatacgagtaacagcttgttgtttgttcatccaaaagtttggggttgaactgaatccccatgccctcacctggtactaatagcagcagcagcttctgtttaggaggaggctaggaaaaaaaaaaggaggattttttttttgcttttttgcgggggctcagctgaacaacccccatgcatcacgttaggtccgggctgggaagcccagatgcttccagcaattctagtaagcggaagaggggctcctgcttcgcggagcggaatatgcatggtaggaattcgatcctgataaagcccgaagtcagcgtcagttggcggtagaaaagcggcgggagtaccgggcatccctccgtgatcgactaccagatgcgggtgacctctcttgtgggatcaaggtaagttgagtaagaggactgagaaattttctgagggagataatgcctggacttgtttctctttcacggcatgagatatgcgatgatttgcatggctatgaggttaccgaggcccccggaaaactctgatctaggaaaacgttttaggggctcctaaggttcaatcttcaagcttgagaggaaaggccgcccgcaatcactcgtccccactgccaggaaactgatcgacagcatttacaagtttcatactaggatgccacgagacgagcaattcagaagatgaaatataattttaaccttgtgaatattcatgtgtgttgtgcgcatcttcaaactcggtttgttactagtcactaaattgaggatattttctttattcattatagtggttgcaaccagctctgctcctgatagttcgagggaagttgtggctgcataccaatttcatgatcctaagaatttgcatggtaatatacatgcaagagaaaacagccagcatgaacatgcagtggataagttatgtggatcaagcagtcaatatttcttgccacagcaaagattttctgtcagttcctgtggcagaaatgactcatctttggccttacaaaaatcaggtgacaaccatgttgcctgccaatcaggacaaccacctctggctgtgcatactgagctccaacatgacacttctattgtaatatccagtggtgaagagaaggtcctttttgaccttaatgtgccagctgaaagcattgacatggaatcaacaataaccagtaatagttttagagataagctagtgaaaaatgatggaagtgaagaaacagtaaccgatcattctttctccaagagaaacggtgtgcatgctgaaacttctatagaagaacgaactgttggagaacatcatatatcagtcagcaaggatggaaacaccacatttttccaagaatcaataaataatgaaattgataaggcgcagtcttcagaccttataagtgttagcagcaaacatttgattgcagaaactcctcatgttgacaatattgtgtgtccagaactgcgagcatctcctgatggagcatcaagtcctcaagagaccttgataggcaattgtgacaaaatggtttgtattgcagctgagacactcgtttccattttctcaagttctgcatgtactacagattgcccaggaactgacagtcagacagcagctgaggatgtaaacgatgaaccgcagcactctttggattcctatgaggaaattgtattgaatgtagaagagatcagagatgacggggaatccatccctgtgattccacctgataaggatggaccgtcttgtgggatcaagctaagaagaggaagaggactgagaaattttctgagggagataatgcctagacttgtttctctttcacggcatgagatatgcgatgatttgcatgctataggttacgagccccggaaaactcgatctaggaaaacttttggggctcaaggttcatcttcaactagaggaaggccgcccaaacatcgtcccactgccaggaaatga

SEQ ID NO: 15704 - DNA, 193 bp, Oryza sativa
  unsure (1)..(193): unsure at all n locations
  Clone ID: PAT_MRT4530_21523C.1
ccgaactgctttattactctttttcacgaaaaaggccctgtntttcgcattcacaacaatgggnaacaacccaatntcgtcataagactggatggattcgtntcgcaagtgctccctcagtgttaatgtaaaccaacttaatataaaacgtgatattttatatttaaaaaaaaaaaaaaaaaaaaaaaaaaaa

SEQ ID NO: 15705 - DNA, 793 bp, Oryza sativa
  Clone ID: PAT_MRT4530_21524C.1
aggaggccgcggcggcggtgaggagcctggagtgggaggtgctcctggccacgaacagcctcgggagcctcgtggttgacggcgccgactacgacggtggaatcgacacgttcttcctcgacgacgccgacgacgtgctgttcgggcagctcgccgcggagcacgagccccccgccgccaagggcgcgcgcgcggcggcgaaggccgccgtggagagcctcccgaccgtggtcgtcgacgcggcccgcggcgacacgcagtgcgcggtgtgcaaggacggcatggaggccggcgagcgggccaggaggctgccctgcgcgcacctctaccacgacggctgcatcctgccgtggctcgccatccgcaacacgtgcccgctgtgccgccatgagctgcccaccgatgaccccgagtacgagaactggaaggcgaggcgagcagccgccggcggcaatggcgatggcgacaggtacggcatcattaggcaatcttgcagaagagcgcaggaggagaaggatgatatccaacagggaatctgcccgacgatcacggatgaggaagcagaaacagctaagtgagctctgggcacaggttgtccacctccgcagcactaatcgtcagctccttgatcagctgaaccatgtcatcagggattgcgatcgtgttacccacgaaaactgccagctgagagatgaacaagccaaactgcagaagcagtattttttaggttggcacaggcattaaggaagtaggtggaaatgatgaatgttgtgattggtagagaagagaaagt

SEQ ID NO: 15706 - DNA, 489 bp, Oryza sativa
  Clone ID: PAT_MRT4530_21525C.1
atggccttagtacaaaactacaggaagccagatgtattccttataatgaccatcaaccccaagtgggatgagattacttgcgagcttgagcctggccagacaccacaagatcatcctgatctcgtggtctatggaaagtgcaggaacaactacctgcgagagttcaacgccacaacttcgcaaggcaaggattcatacccgttgtataggagacgtaatgacggtaagtgtaagggggttagaggacatcctctcgataataggtgggatgtcccgtacaatccttatcttctatggatgtacaactctcacatgaacgtggagacaaggatctccgtgatgttcttgataaggaagacccaggcaggtcgatgcttacagtgtattgcgaggctaacaggcagcatgtctgggctcgagatatcctttattgagatttcccaatgtggtttacttggcagacggcagctgaatgaaggtgtattatag

SEQ ID NO: 15707 - DNA, 526 bp, Oryza sativa
  Clone ID: PAT_MRT4530_21526C.1
ttttcccccaccacctcgcgctcgcggcggccaccggcgcggcggcggcggcggcgtgccttgccttgcctagctcgctggtgccatggaggtgcgccgcagggcgccgctgccgccgccgcccgggagggtgcaggcgggcgacgcgctgccgctgccgatccggcacacgaacctgatattctcggcgctgttcgcggcgtcgctggcgtacctgatgcggcggtggcgggagaagatccggtcgtcgacgccgctccacgtggtggggctcgccgagatgctcgccatcttcggcctcgtcgcctcgctcatctacctcctcagcttcttcggcatcgccttcgtgcagtccatcgtctcctccaacgacgacgaggaggaggacttccttgtcgggccccgccgtggctcctccgcggggattaggactaataaaactttaggcggcaatcgtgatattatacaaaaaggcccttcttctttaccccattttgctaaggagacgttaaagagtttgtgttga

SEQ ID NO: 15708 - DNA, 1936 bp, Oryza sativa
  Clone ID: PAT_MRT4530_21527C.1
tttgcttattactaccaccaccactgtactaccccgcacgacacggcgcgacacggcgcaacgcgacgcgaggaggtgagcgcggatgccggcggacgcggcggcgaaggggatgaagctggagaggtacgcgagcggcgcgggcgcgatgctgctgctgcggcgggcggcgagcgggaaggtcgtgtcggcgtcgtcgcacctgctgttccgcgccaccgtgctcgccacgatggcgctcgtgttcctcttcacgttccactacccgtcgctgctgtcgcgctccttcacgctctcctccggcgccggcgccggcgaggggggagccgcggcgcacgcctcgcaccggagcttgctcatgtcgtcgtcgtcggcgtcggcgtcggcggcgtcggtgtacgggggcgcggcgtgggagaaggaggtgaggcggagcgcgaagccgaggaaggacggggggatagccgtgctggtgaccggcgcggcggggttcgtcggcacgcactgctcgctggcgctgagggcgcgcggcgacggcgtgctggggctcgacaacttcaacgcctactacgacccggagctgaagcgcgcgcggcagaggctcctcgccggccgcggcgtgctcgtgctcgacgccgacatcaacgacgcgctcctgctcgagaagctgttcgacctggtgccgttcacccacgtgctgcacctcgccgcgcaggccggcgtgcgctacgccatggaggcgccgcagacgtacgtggcgtccaacgtggccgggctcgtgaccgtcctcgaggtcgccgccaagcacgccgacccgcagccggcgatcgtctgggcgtcgtcgtcgtcggtgtacggcctcaacaccgacgcacccttctccgaggagcaccgcaccgaccggccggcgtcgctgtacgcggcgaccaagaaggccggcgaggccatcgcgcacacgtacaaccacatctacggcctctccatcaccggcctccgcttcttcaccgtgtacgggccatggggccgccccgacatggcctacttcttcttcgccaagagcatcgtctccggcgagcccatcacgctgttccgcgccgccgacggcgccgacgcgcgccgcgatttcacctacatcgacgacgtcgtcaagggctgcctcggcgcgctcgacacctccggcaagagcaccggctcctccaagtccggcaagaagtccggcccggcgccgctccgcgtctacaacctcggcaacacctcgccggtgccggtcacccgcatggtcgccatcctcgagaagctcctcggcaagaaggccaacaagcgcatcgtcgccatgcccagcaatggcgacgtgcccttcacccacgccaacgtcacccacgccgcccacgacttcggctaccgccccaccacctccctcgacgccggcctccgccacttcgtcgactggttcgccgactactacaagctcaagctcgacgtccccaagatcgccgccaaggtcgccggcgccggcaagccctcctcctcgtcggcctccaagaagaagaagaaggccgcggcgatgtcggcgtcatcatgatcgagcagcacaacaccatgagacaccatgcaagtgtgtattccatagctagttcttggaggctcttgtctgtataacattgtaagtgcttattgtttaagcccctattaatttcttttcttcttcttcttgaggtgtttaatttttagtgattagaaacaagggaataatggtggagaaataacactgttgttggtagataaatatgagaggggtataaagatgatgataaagatcaaaaacccttggaagccaggacagaaaaaaagatgaagtccctggcttccttcgaatcaaaatgtctcttttttttcttgatttatattattttttataaataaatatatatttata

SEQ ID NO: 15709 - DNA, 529 bp, Oryza sativa
  Clone ID: PAT_MRT4530_21528C.1
gggctgcaggcgctcctctctctctcctcccctccggtcgcgcgtccgtctccggagcagcagccatggacgtcaacgaggaggcaatggcggcgcacaagcgcgcgttcctcgacttcctcgaccaggatgttgggaagggggtgtacatgcaggccgtgcgcgacatggtgcagaacaagcgccaccggctcatcatcggcatggacgacctccggaaccacagcctcgatctcgcccgcagggtgatacggagccccgcggagtacatgcagccggcgtcggacgcggtgacggaggtggcgaggaacctggaccccaagttcttgaaggaagggcagcgcgtgctggtgggattctcggggcccttcggcttccacagggtcacgcccagggacctcatgtcgtccttcatcgggactatggtctgcgtcgagggcatcgtcacgaaatgttcactagtaaggccgaaagttgttaagagtgttcactattgccctgctactggaggtactctctcacgtgaata

SEQ ID NO: 15710 - DNA, 1809 bp, Oryza sativa
  Clone ID: PAT_MRT4530_21529C.1
atgtggcctctcctcctccgcgccgccgtcgtctacgcggcgctgctcgccgccggcgaggcggacggctcccacgatgtcctcgacatcttcggcacgcgctccgagagcgactactaccgtaacgcgttccaggggaagcaggggcaggcggtgccgctgccgcgtggaggcggcctccgccgcgagcagcaggagctcggcgccgcgggcccgggcggtagcgggctctcgaaggcgccgcctcggtccgcgcccagcaaggtggctctggacagcctgaagctccccgtggacacctccgcgggcttcgctggcgggtggaacctggtgagcgagaactccggcgtgtccgccatgcacctggtggtcatgcagcacggcaaggccataatgttcgacacgtgcacgacgggacgttcgctgatgcggctgcccccgggcagatgccgccctgacccccggagcaagcagcccggcgccatggactgctgggcgcacgccgtggagttcgactacaacaccggcgcgctccgctctctcaagatcgtgacggacacgtggtgctcgtcgggggcgttcgacgccgacggcaacatggtgcagaccggcggcttcttcgaaggggacaagtctgtcaggtacgggacgcagctggtgctcccggacggcagtttcatcgtgatcggcggccgacgcgcgttcagctacgagttcgtcccggcggccggccgggcaaacgccagggccacgcctttgcgtctgctccgggacaccaccgacgacgtggagaacaacctgtaccccttcgtcaacctcctcccggacgggaccctcttcatcttcgccaacgaccgctccatcgtgttcaactacaggaccgggcaggtcgtacgcgagcttccgatcctccccggcggctcccggaactaccctgcctccgccatgtcgacgcttctgcccctggacctccgcaaaggggccggccttagcgcggaggtcatcatctgcggcggcgccaccaagaatgccttcaagctcggggagaccagcacgttccctcccgcgctccgggactgcgcgcgcatcaacccgtcgaaacccggggcgcggtgggcgctcgaccagatgccctcgggccgcgtcatgggcgacgtgctgatcctgcccaccggcgacctgctcatgctgaacggcgccgccaagggctgctccggctgggggttcggccggcaggcgttgctgagccctgtgctgtactcgccgtatctgcggcggggcaagcggttccgcgttctgaacccgtcgaacatcccacggatgtaccactccaccagcgcgcttctccccgacgccaccgtgctcgtggccggcagcaacaccaactcggcctacaacttcagcggcgtggacttcccgaccgaggtgcgcgtcgagcggttcaccccgccgtacctcagcccgcagctgtcccccaaccggccggcgatcgacgcggcgtccgtccccggcgacggcatgcggtacggcgccaggttcacgttccggttcacgacgcccgcgcagggcgtggggcagggcgacttcaaggtgaccatgtacgcgccgccgttcacgacgcatgggtactccatgaaccagcggctgctgatactgcccgtcacggcgttcgccgcgcaggggcagcggcacacggtcaccgtcgacgcgccgcccaagccggagctcgcgccgccgggttactacatggtgtacgtggtggcgaagggggtgccgagcaaggctgcgtgggtgaagatgcacaagtaa

SEQ ID NO: 15711 - DNA, 449 bp, Oryza sativa
  Clone ID: PAT_MRT4530_2152C.1
tatagtcaagaaaaaaaacaaccacgtcacgcgtctacgacaacacctgccatgagagcgaaaacaagaacgaaagatctttgaagtgatgcatccaataagggaaggagcaaagctttcgcccataattatttcacccctcccaagaaagtttcctgtcacactcctgctgcaaccacctttcgaaaaccttcaacgcgtggccaccacgggcgacgcctctctgttggtcggccgtcaagaaggggcatgacctcccccccccccccgatgcgctccagctccatccatgcagttgggttggatggggagaggatgagagaggacaatggatctcctctctccccacactagcctgctcgacgtggccatcttttgtcggcaaaggcgctatcgcaagaggacaatgtccagaatagggcccatcgaagaaccacagcactcccctt

SEQ ID NO: 15712 - DNA, 806 bp, Oryza sativa
  Clone ID: PAT_MRT4530_21530C.1
cccgcgtccggtctatgcggcgctgctcgccgccggcgaggcggacggctcccacgatgtcctcgacatcttcggcacgcgctccgagagcgactactaccgtaacgcgttccaggggaagcaggggcaggcggtgccgctgccgcgtggaggcggcctccgccgcgagcagcaggagctcggcgccgcgggcccgggcggtagcgggctctcgaaggcgccgcctcggtccgcgcccagcaaggtggctctggacagcctgaagctccccgtggacacctccgcgggcttcgctggcgggtggaacctggtgagcgagaactccggcgtgtccgccatgcacctggtggtcatgcagcacggcaaggccataatgttcgacacgtgcacgacgggacgttcgctgatgcggctgcccccgggcagatgccgccctgacccccggagcaagcagcccggcgccatggactgctgggcgcacgccgtggagttcgactacaacaccggcgcgctccgctctctcaagatcgtgacggacacgtggtgctcgtcgggggcgttcgacgccgacggcaacatggtgcagaccggcggcttcttcgaaggggacaagtctgtcaggtacctgagcgcatgcggcacctgcgactggaaaggagtttcccaagagccttgccgacggaagatggtacgggacgcagctggtgctcccggacggcagtttcatcgtgatcggcggccgacgcgcgttagctacgaagtcgtcccggcggcggccggcaaacgccaggcccgcctttgcgtct

SEQ ID NO: 15713 - DNA, 744 bp, Oryza sativa
  Clone ID: PAT_MRT4530_21531C.1
atggagtcgcaccgggatggggaactcggtggtggtggtatcgtggtggattggggactggtggcggaggattggcaccggtcagagcggcggcggccgaagcagagcgcggcagtggtgagggaacgacaccacagcagtggggtaaaggtgcgtgcgtggcgcggctggccgacgcgacgcatcgccagcaagaggggcgagacggtcgctggccgccgcccggtgcacctcttcctccgcccgtcgccgtcgagccgcactcacggcgccccgccatcgagttcttcactagattgcagagggaggagacggggatccgctactcttccctccctcccgtcagacagcgcgtgctgcctcctctcccgccagccgccccgacgagctcgcctcctccctggcagcgctctcgccacgccacctaccgcccgttatcgcaccgcgcgccgccacccctctggtccgccctccgcccgccgccggccgtcgctccgcccaccgcacgccgccgctccgccctccgcccgccgcccgctgccgctcacacttcttgccgtaaatgtcgacacgacgacagtggatgaggccggcgaggggcggcggcggcggccccggccccgcagcgagcaggcgatcccgtcggcgagggagacgcacgccgccacccaccggccgagcgccacccaggtgacggccatcaggtactcggcgagctcccacggcatcgccatggatggatga

SEQ ID NO: 15714 - DNA, 436 bp, Oryza sativa
  unsure (1)..(436): unsure at all n locations
  Clone ID: PAT_MRT4530_21532C.1
cctctcgccgccgcagccgcggaggaggcgggggcgccgctggtaccggctggcgagaggaggaagaggaagatggcggtggcgaggctcggcggcggcgcngcgggcggaggcggctgttcggtgcgttccggcggctgcgggtgcggtggctggcggcgctgtaccgccgctcgctgcgggnctgcgcgcgtactacgccaaggcggtccaggacctcctcgagggcgcngcggccatgagcacgctgcgctcgantccgccgccgactgctcgttcggcactgcgttcgcnccggtggtcgccgtcggtactgatgagcgcgtgcatgtcttcaanaacgttctggcctgtgcatgaagancatgaagccatggagcagtanaacccctgtgtatagacgtggtaactgtccatgntgaattccagtgcttga

SEQ ID NO: 15715 - DNA, 1561 bp, Oryza sativa
  Clone ID: PAT_MRT4530_21533C.1
tcgcttacgcgtgggtgacggcggacgtgctggtctcttctccggctctctctctcttctcctcctcctcatctcggcaaaaccaccaccgcattgccggtatatttagttaagccgcgatagaggagggagggatagcgtagagggagagggaacaggggagggtggcgagctcctgaccatctctctccgccctctccgtttcgccgctcctcgccggatccatctccaaaagaggacgtcggagaagatgatgggcggattcctctcccgggtcctcctgttggcctttggctacgcctatccagcatatgagtgctacaagactgtcgaactgaataaaccagagattgagcagctcatattttggtgtcagtattggattctagtagctctgatgacggttatggagagatttggagattttacaatatcatggctaccattttactcggaagcaaagctgatgttctttatatacttgtggtaccctaagacaaagggaactacctacatttatgggactttctttaggccatatatttcacagcatgagaatgaaattgaccgtaatttgcttgagttgagagctcgagccaccgatgtagttgtcctttattttcaaaaggctgctactgtaggacagaatacattctttgacgttttgaagtatgttgcttcgcaatcaccatctcagaggtcaagtcaacaaccttctcaggagccgcaacaaccaaaacaacagcaggcaccagtacagcagcagccgacacaaaaacaagcaccaactgttttgcgcagatcagcatctattgctgctcggcaagctgcaatggcacagcagtctcaggatgccaagacggttccatcttcccccaagatcaagcgccaagcatcaacaaaagctgcacctgtggcatcaacaaagttgaccggagctgcagctccgtcaacaccaaaatctgatgccgacgcaccaaagaaaaatgaggcggcgccagcttccttgcaagtggcaactccagcaacaaaggccgatgtaccagcatctgaacctagtgctccactccctgaagccgaagaagctgacaagatggccattgacgaggctgatgatgccgtagagggcacagaagagggtgatcctgttccaggtgagacagtagaggagagaccaatggaggagacgatccgtgtgactcgctccaagctaaggaggcgtactgcttctgaggatcctgcaggaaattaacagcaatccattctttttgttgcatgttgtgctgttcattttctttttaagttttagattgtcatgttgtttggtgcatgtgggaaatgtgttggtctaattgatcgttctgttgcccaagagtttgtcatctcgttttctgtgttgctagcatgtttgtgtgcttggaagttgtaaatagcaccgtgcatgtatgtatatatcaattggtggcatggcgaggaatgcctgtatcttgaaacattagacatttcaatcaggtcattacatgagcactctctctgttgtctgttaaaaaaaaaaaaaaaa

SEQ ID NO: 15716 - DNA, 342 bp, Oryza sativa
  Clone ID: PAT_MRT4530_21534C.1
cgtgttggtgtagcagaatcagagacggcggcgcaagccgacgcgcgggagcagacagtcgcaacggggtggaccgggctggcggagaccgaccccgaccaggccagccacaccgccgccttctctcagcctcaggtggtccccacccccgagcatcaacagcacgggccacaggtgctaccgccgtggtgtgtgggccggaagtgggcgcccaccggccccggtgtggctgttccgcggcgcgggatcccgtgcgccgtggcgccccgccacgcggcgccgtccggctacggtctcgtggatctccgacgctggacggcgtgggcggcggccgccggctaa

SEQ ID NO: 15717 - DNA, 291 bp, Oryza sativa
  Clone ID: PAT_MRT4530_21535C.1
cggcggcggcggaggctcgcgacgatgactacctcggcaacacgacctcaacgacgacctgggtcgcggacggcggcagcggtcacggccgggaacggcaaggagggcggcggtcggcgacggcgcggagggcggcggtcgtggccggccaatgcaagagaggactggacgaggcgagagaggagtggacaagcagacgaggagacgagacaggggcggcaccgcggaagagaggcgcagaggggcggtgctggcggagtggcgtcgccggcgcgctggatctggcgagcg

SEQ ID NO: 15718 - DNA, 252 bp, Oryza sativa
  Clone ID: PAT_MRT4530_21536C.1
ggtttgcagaagccgctgaactgatacataccggctgctttacattgcgccggtctgatacacagcaggatactttcctcaccgtcaagttacggggcaactacgggggggacaacaggtgactatccgtcgaccctgaaacctccatcaaaaaccgcatgctggaggcgatcaactacgggaggaccataatgggcgcgctcgcatagctatgacaggagatactaggacggaactgagaataactgggct

SEQ ID NO: 15719 - DNA, 118 bp, Oryza sativa
  Clone ID: PAT_MRT4530_21537C.1
gaagaaaaatatgttcagatttagcacaaactgtatgtgtcaacattttgtttgattgatacaagcacactagagctaggggcgcgccgttgtcgcgccgcctggactcaagcagggg

SEQ ID NO: 15720 - DNA, 338 bp, Oryza sativa
  Clone ID: PAT_MRT4530_21538C.1
aagaggatcacatgagagaatagtcatctaagttgacctcgaaaaatggccgcatccagttggaattgtcagtggagaacatcttagaactgcacggggctggaaatgcttggtgaaagtgtgtgcttggtttgagaatgctgtgtgctacacttgtatggtgatgcatttggcagacatgatgcttgacctgtgctggaattgattgccaactgtgttgaaaactgatggctgttgtgcatggggtgttgcccccagattctcactggttggtatatatgattatgacagaaaccaggaagcctgaactaattatggaaaaaaaaaaaaaaaaaaaa

SEQ ID NO: 15721 - DNA, 300 bp, Oryza sativa
  Clone ID: PAT_MRT4530_21539C.1
atgcaagctccaggtccatctctacctcccgactacttcctcggagcacataaaatttctcctagatctggcgcacccccatcgatgccacgtcagcgggtgctagatcccctcttccactttgctatggagctcgagccacccgttgtttttggtgccgtagagatggacataaccttggagccgcacatgaggccagcacgccatagtgcctcaaggtcgacggggcttgctagccgctgcctgcgagcgtcccttccgccgtccggcgcattgccattctatggcaccgccacttga

SEQ ID NO: 15722 - DNA, 433 bp, Oryza sativa
  unsure (1)..(433): unsure at all n locations
  Clone ID: PAT_MRT4530_2153C.1
cccacgcgtccgggtggctgtgcgggctgtgctcggaggcggtgagggacgaggtggccaagaggggcggctgctgcggcggcggcggtcggcacctggaggacgccgtcagggaccacatgttcttctgcggcaagttctgccggaagaaccccgccttccacgtcgccgactgcatgcgccagatgctccgncgacgttacagcgacatctccgcaccctccggcgcctactgatcatcacccatcaagctccggcgagagagatcaagctatgagctctgaacacgaagacgacgactagcaattaatggcgccgcggcggttgagctaattaagctaagctagatgctaagctaagcttaagcttaatctgaaggcttaacgccatttttaacctcgaaatctcaattaattagctgcctcgtgtggag

SEQ ID NO: 15723 - DNA, 1190 bp, Oryza sativa
  unsure (1)..(1190): unsure at all n locations
  Clone ID: PAT_MRT4530_21540C.1
cggacgtgtntgcagctaattaagtgggtgggttcgcttgcttgctttgcttttgcttggagacgggagcgacgctggcttcagcgattggcgtggagaagctagattgttggtgcgactttccgaccgcgaaaatagtagggctggcaaaccggtggccggccggcgatccggccgaggggatggggagcatcgacggccactcgctgcagcagcatcaggggtactcccacggcggcggcgcgggagggagcaacgaggaggaggaggcgtcgccgccgcccggcggtggctcggctacggggtcggcgggccgccggccgagggggaggccgccgggctccaagaacaagccgaagccgcccgtcgtggtgacgcgggagagccccaacgcgatgcgttcccacgtgctggagatcgccagcggcgccgacatcgtcgaggccatcgcgggcttctcccgccgcaggcagcgcggcgtctccgtgctcagcgggagcggcgccgtcaccaacgtcacgctccggcagcccgcggggactggggccgccgccgtcgcgctgcgggggaggttcgagatattgtccatgtctggcgccttcctcccggcgccggcgccgccaggggccacggggctcgccgtgtacctcgccggcgggcaggggcaggtggtgggtgggagcgtcatgggggagctgatcgcgtcgggccccgtcatggtgatcgcggccacgttcggcaacgccacgtacgagaggctgccgctggaccaggaaggcgaggagggcgccgtgctgtccgggtcggagggcgccgccgcgcagatggagcagcagagcagcggaggcgccgtcgtgcccccgccgatgtacgccgccgtccagcagacgccgccgcacgacatgttcgggcagtgggggcatgcagcggtggctcggccgccgccgacatcgttctagcactggcaccggttaatcaatgtctctctacctagctagttagccttccacttctttccctagttgtttgagtaggttaattaatcatttaccatgttaattaatgtgctatgtaatgcataagtactcgtgtgatcttatcgttccattttcttcagagtttgaagaatgtaaaattactgtgcgtatcaagatcggcagtggttgctcacttgctccttcaaaaaaaaa

SEQ ID NO: 15724 - DNA, 581 bp, Oryza sativa
  Clone ID: PAT_MRT4530_21541C.1
ctcacgggttgttgaaaggaaaaagcctggaaaggcaaaagcaagaaagagcttccaatgggtcaaacggtaacaggtacctgctcttgttttttttctggtcatggcgttctgtatttgcagttggactgatattttcggaaggtccttttgagctctatactcatatattccagcctttaccgatggtgggcataatgagacacaagcattctggttttctttaatgttgacaattgacacagcaaactgatcccagggaaaaaaaaatcatttgacctaattaagatgcagaagatacattgttataagctgtcattaaaatgggctgggctaccgatggaattcgttgtctagctcccagaagttatttctgttttgctgggatggcatggctgtatgcctgtatatcagctgctgccacatttttcctccatgtatgtctgtgcatgctctctgactatggtaaatgagaagttatgcgtccaactctgtaagcagtaataagaccaaatggaatattttccaaacgtgagatgtcattgtgcttctctctgagcaatccaccaccttgttcgtgt

SEQ ID NO: 15725 - DNA, 1873 bp, Oryza sativa
  Clone ID: PAT_MRT4530_21542C.1
ccccccggtgctccgccgcctcctccactcctcccgcggccgcgtccctcctccggccgccctaatgctgctccgccgcctcctccactcctcccgccgcctcggccaccgcctccaaaccctaactccggcgagcgcagccaccgccgccgctgcctcgtcctctcccgtctccgctccccttccatttcgtcgtcccctccccgcctccagcctcctctggccgcggctcctctccacgtccggccgcgacgacgaccccaacaagccatgggcgttcacgccggaatccggcgatccggatcccttcgccgccggtgagggcgtcgaagctcccgccggcgaggatccactaggattgagcgccgccggcgaggacccgtgggcgaaggatttccgcgcggagggcagcgagaagggggacgtgttcgaggagatcttcaaggaagaggctgccaccgccgccgtcgcttctggagagaaggctccgggggcaggcgccgacgagctgtggacgctgagtggggaggatgagaaggatcctttcgcggaggccgtgctcgggggtgggcttgaggggatcggaggtgatggcgctgcgattgatgaggccgatgcgggggaagacgaggaggaggaagagcgaaaacggctagagagaagggcgagggagcaagaactaatggagacactcaaaggtccaaatcgtgcatttggtgatctcattgaggcctctgggattacagaggatatgattgctagtttgatcctcttaaaggatgttaggggtgttcctggattacctcccctaagagaaatagaagatgaaactatcgaaaaaatgaatgcaacatcaagcagagctgatgtagaacgccaaaagcaagaggaaattgctaaagcacgtgtaagacaagtcgatgagaaaggaagggcttatggaacagggaaaaggaaatgcagcattgcccgtgtttggattcagcctggtgatgggaagttcattgtcaatgacaaacaatttgattcttacttcccaattctggatcatcgggctgatcttcttcgcccatttaccgtgaccaaaactttggggcgttgggatgttacttgtactgtgaaaggtggtggtgtctcaggacaagttggagctatccggctagggatcagcagggccttgcagaattgggaaccaggactacgcccaaatctcaaagcagctggatatttgacaagagactcacgggttgttgaaaggaaaaagcctggaaaggcaaaagcaagaaagagcttccaatgggtcaaacggtggtttggacccgcagacaatgtgtctgcttgtgtcctattgagagatggaaattaacagggacctgctcttgttttttttctggtcaaggcgttctgtatttgcaggtgggctgatattttcggaaggtccttttgagctctatactcatatattccagcctttaccgataatgggcataatgagaccccagccttttggttttctttaatgttggccattggcccagccaactgatcccagggaaaaaaaaatcatttggcctaattaagatgcagaagataccttgttataagctgtccttaaaatgggctgggctaccgatggaattcgttgtctagctcccagaagttatttttgttttgctgggatggcatggctgtatgcctgtatatcagctgctgccccatttttcctccaagtaagtctgggcatgctctccgcctatggtaaatgagaagttatgcgtcccactctgtaagcagtaataagacccaatggaatatttttccaacgtgagatgtcattgtgcttctctttgagccatccccccccttgttcatg

SEQ ID NO: 15726 - DNA, 368 bp, Oryza sativa
  unsure (1)..(368): unsure at all n locations
  Clone ID: PAT_MRT4530_21543C.1
ggactgtaaagantgtataaacagttagtactactccaaatcgtgttccacatttctattttgcacatttgcaggcaggcgccgggttgatgagtccatcttgatttgccgctgcggcgnggcggttgcaagttgggacgaacaggccaggcggactgcagggcataggcatggccgcccgccccccggacccggagctcatcgagatgaaaaatgatggtatcttgcatttnttgtctggatagttcaccatggcttgtaaaacaccccaggcctccttggcaagatcagggcgctcctttntgtcatancggcaacatctcagtgctaggattgccaacttttttactatactcaaggtggccatt

SEQ ID NO: 15727 - DNA, 214 bp, Oryza sativa
  Clone ID: PAT_MRT4530_21544C.1
gggaagcaggcacgcgtgcagtgtgccgggacgctatacagcggtcgacctacgcgttcggactagtagtagatcacagtgaattatgatgatgaacatggtagggcataaatggtttaccacatggttatgaactcaggcttgctgatcgacgatagctctgagcttgtagcggccatggatagcatggcagaccagcatcaattttacagcc

SEQ ID NO: 15728 - DNA, 522 bp, Oryza sativa
  Clone ID: PAT_MRT4530_21545C.1
atggccggtcggcgagcggggcggcgacgcccgggctcaagtggcactggcggcgagcaacgacggcgtgggaggcggtggaaggagacaggaagggagagggaagctcaccgagcggcgcaacggtggggaaggcggcgcgtggagctcggcagtaaggagatgacagtgacgcacgacgcgggaggtggcaggcacggcgctccggcgactctcgaccatagtggagacgcgggcgagggtcggcggggccttgcaagggaggaggagggcttcctagcgccgatgcgaagccggtggaggagagcgcgaggtcggaagtggccaggagcggcggccggaggtggtagaggtggtggaacccgtggtccggtagtggtgagggagaaaggagcagcggccgggattgccctcacgccggtgaagccagtggtggtggtggcgtggcgcggtggtggcgctagcagtggttgtgtgcggctggaaattggcagtgagcggctgatgcggcgagcggcgtga

SEQ ID NO: 15729 - DNA, 578 bp, Oryza sativa
  Clone ID: PAT_MRT4530_21546C.1
ataaaatatgagaataggaaaagcataagaaaaagaagcatgaaatgtaagaatgaagcacggccatggaaagtccgaatgtcgtggatggacgttggaatcggccagctggtaatggcttcgatcttcgtggggtcagccttgatgccttcgtcagaaacgatgtaccccaaccagactcgaagtcataaactcgcacttctggaaattgacatagagtttatgctctttcctattacattactattctctttctttcattctgtcttttccatttgtacagttagaaggaaggatggtgaaggaagatgggagtacgttcttcagggtatgccgacgaaatgatcctctcaattgactagttcagtttcgggacttccccttacgaatggaccaatgaaaccaactgtatcaaagtttgaatctcttggcttggaatagcttaaactcgatgtcatcaagtacattcctcgcggctacccgccaataagaaaggttggcagcttcaggatcccaccccccaaagccagatgggggggaaaaggagttgctttttttttcctggcttgcgttttgct

SEQ ID NO: 15730 - DNA, 326 bp, Oryza sativa
  Clone ID: PAT_MRT4530_21547C.1
tgctttgttggcccccatacttcccccacacggtcgtgctgcggtcgatcgctcgcatgtgcgccttaaactcctatggacttgaggacgtcggtgaacttgacataccccaccaagatgctggccatgcattccgcttgcaggtcgtaaaagactacgtcggcgtacacggatatcattggccacgtcgtccacaactaggagccaaccttcttggtctggagcaactctccaaagctcacgaccagctggcgcacgatcaccaaccagtgcaggtccactgctgtacacaaccagaacgggcgcattatggatcgatactatat

SEQ ID NO: 15731 - DNA, 400 bp, Oryza sativa
  Clone ID: PAT_MRT4530_21548C.1
cgtggtggaggcggggtgggtgccgcaggtgcgcgtcctggcgcacgccgccgtcggcgcgttcctgacgcactgcggctggggctccaccgtggagagcctccggttcggcggcctcccgctggtgatgctgccgttcatcgccgaccaggggctcatcgcgagggccatggcggacagggggctcggcgtggaggtggcgagggacgacgacggcgacggctcgttccgcggcgaggacgtcgcggcggcggtgcggcgggtgatggcggaggaggaggggaaggtgttcgcgcgcaacgcaagggagatgcaggaggcactcggcgacggcgagcggcaggatcgctacgtcgacgagcttgccgagcggctgcgtcgtcgccggagtttgagctga

SEQ ID NO: 15732 - DNA, 242 bp, Oryza sativa
  Clone ID: PAT_MRT4530_21549C.1
cccacgcgtccgcccacgcgtccgtgccgatcttatacccaaaagtttcagaagaaaaatatcacatacaacctgaattgttgtaataaatatagcgaaactactactaaaacgcatgatcgttgtaattccaaatgaaactgtactttgtactgttatctaatggcatgtcaataaatactactcatgtatcaaaaaaaaaaaatattataattatattttaaaataaatataattttttt

SEQ ID NO: 15733 - DNA, 231 bp, Oryza sativa
  Clone ID: PAT_MRT4530_2154C.1
atggaggtcggaggtggccaaatccgacgacccccgacttccaggcagccagtccggcagccccctacctccatgccagcaaatccgctggccaggccaccaagaaaaagtagagaggagaggagaggagaggaaggagcggtagtcactgtgtcctccgttgttgtcatcgcccctccaatgggtggaaatatagaggggcttctgacaaaggagatggagacagagtga

SEQ ID NO: 15734 - DNA, 447 bp, Oryza sativa
  Clone ID: PAT_MRT4530_21550C.1
atggggatggggaggacgaggtgcggaggtgctgggaacggagaggaggtcttcaaatcaggattattagaccctggaaacctcctttcgtcatgggagggtgacgattgttgtcaatggaatggcgtgtggtgcaacaacgagaccgggcatattgttgagctaaatctcccaggaggtagctgcaacatcttgcccccatgggttccgctggaaccaggactcggaggcagcataggcccctcgttgcttggcttaaagcaactggagcatctcgacctcagctgcaacaatttcagtgggacgctaccggagttcttgggttctctccacaacctgagatctctcgacctatcctggtcgacattcgttgggacagtgccaccgcagctggtctctggaactgttggatatatcaagaaacaagataactgggccaatttctga

SEQ ID NO: 15735 - DNA, 1593 bp, Oryza sativa
  unsure (1)..(1593): unsure at all n locations
  Clone ID: PAT_MRT4530_21551C.1
gcattcacaccaccaaatgcagaaaagataatctccttctctctctattaaacccacacacacacacacaccaagaaggaaggcaagcaagcacagggcaaaccagagcattggaaagcaagaagcagagcacatcaagaagcaagcaaagccatggccgcctctcggtgcttcttgcttctcctgctgctgctgctatctcccttactggcgtccgctggggaggaggaggaggaggccgtgctggccatggcggccaggctgcggaggccggcggcggcgtcgttccgggaggggtacacgcagctgttcggcgactccaacctcgcgctccatggcgacggcaagcgggtccgcatctccctcgatgagcgcacaggcgccggattcgcgtcgcaggatgcgtatctgcatggcttcttcagcgccagcatcaagctgccgcccgattacgccgccggtgtcgtcgtcgccttctatatgtcgaatggcgatgtgtatgagaagacgcatgatgagctggactttgagttcctagggaacattaaggggagggagtggagagtgcagaccaacgtgtatggcaatggcagtacatcggtcggcagggaggagagattctacattgatgagactccaatccgggaggttcagaggaccaaatccatgggagttcagttcccttccaaaccgatgtcgctgtacgccacaatctgggatggctccagctgggctacctccggtggccggtacaaggtgaactacaagtacgcccctttcgtcgcagagttttcggaactcatgctccatggctgcgctatggacaccttgacccgtgcaccgatgtgcacaccggacattgccaacatccacaatgccgtggccatgtctggtaggcagcgatcggcgatggagaggttcaggacgaagtacatgacttacggctactgctatgatcgtcttcggtatcctacacctccatcagagtgcaatgtcggccctgaggccgagctattcctccccacgggcgaggcgaggtccatcgaccgccatggacgagctaggcgccaccgtcgtggtccagctgattcagcattctgatcttagctacttgtgttgatgtggcaggctagcattctgatcatcacaattggctcagtgtgtgctcacctcccttaattttgtgtggcttatgtgatgattttgctgaatttatgtgggtagtgttgtgcatgaattggtaggcaacttagattgatttgcattttggtgatggtagaattgaatagagttaggttattaattatattgattaagattagcatttcatttaggcttgttgattgtagtctgctgattttgtagaacgtttgtatgacaataatgcatggtgcccatgatatgaaatgcatatatatgtagtagcagtaaaaaagaaaaaaaaaaactgattggattattcatttctagcatccactaaacgcgtgcagctaggctatgctgcagnccnagctaatatcatgatttttttactaaagttcattctctaccaatatgagtaactttttatttgattaaaaaaaaaaaaaaaaa

SEQ ID NO: 15736 - DNA, 243 bp, Oryza sativa
  Clone ID: PAT_MRT4530_21552C.1
aaggtccatgacgaacttcttgcttcaatcaaggatgcagaaggactcctccatttgaaacgctccatgctacataaataaacaaggtcattgactgcaagttccccgatcaccagcgcagggcgtactatgagctgtgtgcccccgggtcttcctccacaggcaatctgctgaggcgctgagcctacgtcgtcgtgggggtgatcatggagacgatcaacatcgctgagggcatcagggctg

SEQ ID NO: 15737 - DNA, 2247 bp, Oryza sativa
  Clone ID: PAT_MRT4530_21553C.1
tccttctccgtaaccaccgcctcctcccatggccatcgcgtgcttgtccctcccattcctcgccgccaccgccgccgccgagccgaaaccctagggcggcaggtccgggttcccctccccccccctcctccgccccgatgacgccggtgcaggcgggggcggcgcccgcgtcgccgtcggcggcggcggcgctcgggttcctcctcccgacctgctgggagatcgaggtcacctgcgccgccgcgatgatcctcgtcgcgctctacgccgcgtacgagctgctcgccccgcgccccgcgtcggcggctgggggatcctccgccgccggggacgacctcctcctcgtgcgggacctcgacggcgccgacaagtacaagggtggctcgagtgggccctcggcgtacgtggtgaagctagagttgttggctgcgaagaatttgattgcggcaaacttaaatgggacctcggacccctacgcattgatcacttgcggcgaagagaagcgtttcagttccatggttcctggctcaagaaacccaatgtggggagaggaattcaatttttttgttgacagtcttcctgtaaagataaatgtgacaatatatgactgggacattgtatggaaaagtactgttcttggttctgttattgttccagttgaatccgagggacagagtggaccagtttggtatacgcttgatagtacatcaggccaggtgtgcctacatattaaggcaatcaaggtccatgagagttcatcgagggctctaaatagctctgctgaggctggtgctcgtagaagaatttccttggataaacaaggacccactgtagttcatcaaaaaccaagtcatttgcagacgatatttggacttcctccagatgaggttgttgaacatagttattcatgtgcacttgagaggtcatttctgtatcacgggcgcatgtatgtctcttcatggcacatttgcttccattcaaacgtcttctctaagcagatcaaggttatgcttccgttgagggatattgatgagataagaagaagccagcatgcagttattaatccagcaatcacgatatttcttcgaatgggagctggaggacatggggttcctcccttaggaagtcccgatggaagagtcagatataaatttgcatcattttggaatagaaaccatacatttagagcattgcaacgagctgtcaagaacttccatacaatgatagaggctgagaaacaggaacgtgctcaatctgcattacgtgcacacagtagctcaagaaaaagtagcatgaaggagataaatgttccagaagattgtgctgatttaacaggccaattacaaccttttgtcaaagaggaagttctagtcactgtattcaatggatcttttccatgtactgcagaggagttctttaatactctgttaagtgatgattcaagttacatcacggaatttcggacagctcgaaaggataaagatatcaatttaggtcaatggcaccacgctgatgagtatgatggtcaggtgagggaacttaattgcaaatcaatatgccatagtccaatgtgccccccatattcagcaatgacagagtggcaacatatggttctttcagctgacaaaacagatctggtatttgaaactgtacagcaagtacatgatgttccatttggttccttctttgaggtacactgtagatggtctgtgaagactaccagttctgactcatgcagtcttaacattagtgctggtgcacatttcaagaaatggtgcataatgcagtcgaagataaagagtggtgctgtggacgagtacaagaaggaagtccaggagatgttggaatttgcagagtcgtatatgcgcaaagttagaacttctaaccaagacaatggtacacctactgagcaagacaacggcgctgtgactgagcaagaaaatgtggcgccggataatacaccaaatgatgaataatttttctctaagttatgtcttctcctgtaggatgacatctaccacccgttgatagtagtttgttgaagtgttatagcagaagaacaggtggacctgtaattataatccacatgtaatagggtttagccggaaaaagggggtgcttacaagatctaacagtgtataaattgtctatacattttggctaatgtatatttgaaaacgcataacataggagtagtgctcactatagtttgggaagttgagagttcgaacattcaagttcaggatt

SEQ ID NO: 15738 - DNA, 569 bp, Oryza sativa
  Clone ID: PAT_MRT4530_21554C.1
aaccccgcactataaggaataagcttgcggccgctctgtttatatgtttccttttcttttttggcagcaattcttggcctataaggcttacttggctataaggacatcatctaaattgctgaggattattaccactgtcttccgaaaaattgtgttgtactttaccaaattgcgaacacacaatacgaatggagaatctttccgcgtctacccagtggtgcctctaaagtgaactcccttatgggttgtgcgcttcactgactgcctgtttaatcccaggcgacaatctttttggatctctgacttcatcaattccacttcatacccaagagatgcggctacattcttgcgcgcttttgacctgacccttttaatctctcgatgatcttgggacaatgaatcctgccagaactgttttgtcacattctacgcgtcctgcccttttccacagattctgggccataaactactgaatagcatttaatttcaacgtcaaatctaaggaatcatgcgccaataagctcactttttggattataaacataatctacaaccggatgaccctctta

SEQ ID NO: 15739 - DNA, 955 bp, Oryza sativa
  Clone ID: PAT_MRT4530_21555C.1
ggccgcttttttttttttttttttaattttttttttttttttttttttttttttttttttttttttttttttttttttttttttttttttttaaatgaggagttttcacagaggtgctgtatgggagaccaatatttcagtgttttcagcaagtaacaagttcacggactgccggactggccgcacatcacacaaaaagagaactcaattcttccttgaagggcagtaagccaaacaaataggtcactgcaaatccttatttggaaaaaagtggaggggaaaaacatcgatcagcagggccgggcctcctgcatgtaagtacatgtcctggctaacaaacataaaaggcacaacatgttgacctccaaatgttaaaaattgcatcgcttatgaagcggactccttggcaatcttctctgccttggcaatgacctcatcgattcctccaaccatgtagaatgactgctcaggaaggtcatcatacttcccgtccaatacaccctggaaactttgaacgctctccttcagctcaacatactttccaggtgcacccgtgaaaacttcggcaacgtggaagggctggctaaggaaccgctgaatcttcctagcacgagcgactgtcaacttatcatcctcactgagctcgtccattcccagaatggcaataatatcttgaagattcttgtaattctgaagaaccttctgaacaccacgagctgtgttgtagtggtcctcacccagtacatggggagacaacattctggatgtggaatccaaaggatcgacagcaggataaataccaagctcagaaatctgtcgtgacaacacagtagtagcatcaagatgggcaaatgtagtagcaggggcaggatctgtcaagtcatcagcaggcacataaatagcttgaacagatgtgatagaacccttctttgtgggtggtaatccgctcctgcag

SEQ ID NO: 15740 - DNA, 517 bp, Oryza sativa
  unsure (1)..(517): unsure at all n locations
  Clone ID: PAT_MRT4530_21556C.1
ggggcggggggaacccnttgccnaatggggggggnccaaaatnaaaaaatttttnattctttttgggcaaaaangggttagggttnccattttttttttcnttnggggaccccnanaattttttncccccaattnaannaaancaagggggnccntttttcccngggggggnnaggccccntaaaaagggggggggaaanaatccctnnttttaanncnccccccattttcaatnnnnnnnggggggggngncccaaatttngnaaatttnncnaaaaannatttnntttttttntttggnnannaatnanttttggnngnnccnaanttnnnnggggggnnttttttaaaaantngccnggaanccnnnnccggngggggntttttttnccccnaaaaaanttttttttttnnntggggaaaaaaaaaaaaaaaaaaaaaaaaaaaaaaaaaaaaaaaaaaaaaaaaaaaaaaaaaaaaaaaaaaaaaaaaaaaaaaaaaaaaaaaaaaaaaaaaa

SEQ ID NO: 15741 - DNA, 462 bp, Oryza sativa
  Clone ID: PAT_MRT4530_21557C.1
gcacgaggagagaactagtccgagtttttttttttttttttttttttttttgaccaattgtaccaggtgactttgccatcttttgtcatacattagtgtaagatacgaatttgttgttcgcgtgtacagcaatcggagccaacggagtatttggaagtttctaacagagtacacaaaaaagatgtaatactatacaataaacaggatcgaagcccctcgcgaaaaaaacaaaactgatctaagcaaatcgtgcttggtgtttctcttctcatcctttctgcgcaatggcatggatcattccgcacttatgtacattgcaattggcaagtcatagcccgagattgatcccaaaatctggttatgcattgctctctcgcgctgacgcagttagtgcttggccttcttccggatgtcattctgcaatgaacagtcgtctgctcgtgttgatctcttacgtgcact

SEQ ID NO: 15742 - DNA, 1380 bp, Oryza sativa
  Clone ID: PAT_MRT4530_21558C.1
atggagaagggaggcgagaaggagaggtcggctgagccatcgatggaggtgaggaatgagagcgacaaggtgcggtgggtcgacgacaactctccgttgctcatggcgaactcggacgtctccgtccagttcgccgaaccaccgcgcgccagtatcctgaacgtggcgaggcgcatccaccccgacggcttccacccctcgcgcccgtacctacccttcatcctcaacatccagtccgaccacctcctcctctacaccaccaatggggggcatgccggcggcggtatctacctgttccatgcctacaccggcgtcgcaattcgccttcctccatcgcctgagaggcctatcaatccccggagggctgcaacggcggcgtgctcgcccacaacgggaggctgtggtgggcggatcctcacgctcgatccattcgctgccggggagttccaccttcgacacgtcgcccttccggaaggccacggcgcccgcatggacaactccgacgacaagcaccggtgcgtgaaggtgagcgagggaaagctgcggtacgtggagatcgacggctttcccgacacaccggccgtgaccatgactaccctgatcgatctggatggcgctgtgtggaacatggactacagggtgggattggacgagatatgggcagacgacggctacaagctagcaagccgggctgacgccgggcaagacggcatgatttttgcggtgaacatgtgcgccagcgccaccaagagcagggtcctgcacttcgagaagtttctggtgggcgctggcgtcgactccttggagaagtaccagaactcgcgattcgtatttgcttggaagctattacagccattgcctctccgactccgatctgagatggacgaacaccagagtggaaacttcaagatccaggatatcaaggactgtactgctgtgacctctgcagaagctgcacgacaatttttcactgctcagttggaagacatccgcatgaagaaaggaacccgcaaggagaaaggaacccgccagaagaatgatgcagctgctgcaaaggaagagcgagccatagaagtgggggcatcatcatcagtggaagctgtggctgcacagtctcacggcatgctccttcgctcgagcatcttgccacgccccgcgcgtcgcgcgccggggcgcatcgcgcgccaccttcgcccatcgagttctgtgacattcgcgaatcgtgattgctcggcgccaacggccaagtctatcgccttctccacgttcgtgtgcgcctacttccacttcctcaaggtgcagactgcagttcgagcacctgagctgcttctgcgtatccgcccggggacggtggccctcgtcctggtggccactgactga

SEQ ID NO: 15743 - DNA, 282 bp, Oryza sativa
  Clone ID: PAT_MRT4530_21559C.1
atgacggttgtgatggttggaatggtcggtaatagcctccaaccgtcattggggcttcatctcaaccgtccagccaaaacctagatccaacggaggcgagggtggtttggccgaacctggggccaccccaatctagcccaatttcagctggcggcctcctccgttgttcttctccgtagacttgtgaattttggcccagtttgtcatgtcagttctgagttcttgacccatttattcataagtctggttcctgacatcgtccgattgatttatcatttgcgt

SEQ ID NO: 15744 - DNA, 208 bp, Oryza sativa
  Clone ID: PAT_MRT4530_2155C.1
atgagggcaaccatctcccggagacggtcacagcttatcaaatatgcgcaacatattaacacgtaccgaggtgacgaaaagaccggctgcttggtcgaaacttttcgcaggctctgggcaagcctgtgtatcatcgtcgtcgtgatgctcatcatctttccacttcggcgcgtcctccttctcctccacaagaatgaagacctttttg

SEQ ID NO: 15745 - DNA, 168 bp, Oryza sativa
  Clone ID: PAT_MRT4530_21560C.1
atgggccccatgcgaaactacaagccaaaaccagtttattcctcatccatccgtgtgatgacgatattggagacacgtgtagaggtcgacaagatggaatcaaatagcttgattgacaatcagggtttacgatttcgagatggccttccatttcggattttggcggaa

SEQ ID NO: 15746 - DNA, 215 bp, Oryza sativa
  Clone ID: PAT_MRT4530_21561C.1
atggtgatgctcgacctccacgtgatcggcggcatccaactggggaggacacacgagcacagtggcggggcatggcactcagttcaaacagctagcttcttgatgtgcacctgccacagttcagggcgtggtcaatacatacgccatccactgatagccaccatcgactatctaccgtcggccagtattctagggcgtggtgggcgctacccagg

SEQ ID NO: 15747 - DNA, 357 bp, Oryza sativa
  Clone ID: PAT_MRT4530_21562C.1
tcttattgtgactgtgtatgcattggccaagaggacgattgatggtgagtggttcctcatgacctgcttcaagggcgcgcatggcggatgccttgtgacgaacgcctcatacgacgtgcacagcgggatcctctactgccagaaccacttgtggcagttgttaaagaagtccggctgctacaacaacctgatgaagcccgacttcgtcggcgaccagaacacgcgggaatccaaggacgccgtcgtggagcccgcgaaggacgacctcgggactggggaggcagacaaggaagcagaagaagcgttaccggagcaggtcgcggaagctgttgtagaggaccacggagcactcatgag

SEQ ID NO: 15748 - DNA, 813 bp, Oryza sativa
  Clone ID: PAT_MRT4530_21563C.1
aggggaggtcatgccaaaatttcttgtgaaatttttttagtgattatatacaaatcggagatgtctaaaaggttaatggatcgacaatggatgtacgctgaccggtgatccaaaaagtttatcgagggcgtgcattatttttttgagagtggccgaagctaacaagcgtaacggttttatttgttgtctatgcaataagtgtaagaaccagaagtagtattctgcatccaggactattcatttccatctgtttgagtcggggttcatgccaagctataattattggacatcccacggtgagcaaggggttgaaatggaagaagatgaagcggaggacgagaacattcccgactgggctcagtacgctggatttgaaggaaatcaaacgggcgaggtggacagggatgttggcgataacaacgcttcggatgatcttggtcagatgttgcagaacgcaaaggaggattgtgaaagtgaaaaggaggcccgtaaattggagcagatgttagaggaccacagaacgtcgttgtacccaggttgcgatgacaaggcatttggcgatttattgaaactcgtcaagaacattcttctggagggaaacaaattgtccaagacaacgtacgaggctaagaagatagtctgccctctaggactggaagttcagaagattcatgcatgtccgaatgattgtatcctatatcgtggtgaggagtccgagaacctagaagcatgccctgtttgcaaagcactacgatacaagattagacgagaggatccaggtgaagttgacgggcagccaacaaagaagagaat

SEQ ID NO: 15749 - DNA, 301 bp, Oryza sativa
  unsure (1)..(301): unsure at all n locations
  Clone ID: PAT_MRT4530_21564C.1
ggcgccgtcaacctcaccgtcgggggaaactccaccgtcgtggtccggtcgccggcgcctttcccggggtcgagcgccactgtcctcggcgccgtcaccgctgtgccttacaacctcagcgtgctcgcggtgggtggcctcatcgtcccctccgggctcgacgtcgcggcctccgacagccgcccggccggtggcgtcaacatcaaccacgtccccgcnaacgaccgcntccagtccctccccgcagatcgcaagggcaacgtgcttcgcttcaacgtgctgnantcgtaatatccgttgg

SEQ ID NO: 15750 - DNA, 717 bp, Oryza sativa
  Clone ID: PAT_MRT4530_21565C.1
atgctcgcccgccgctggtcccccctctgccatgctttctcgccgctgttgtgccttctgccgctctcgctcgccgctggtcccccctctgccaacctactgagttctccaccaaatccctccatcgccgttgctagcagatggacttcatccttctctctcggaatcgattttgagggcgacggtgatgagtcccacctcaccgacaacggcaatggaggggaggagcagaagcgttatgaggctctcgatgcaccatccttctctctcgacatcgacggtgatgaggagcaccactgggaggagcaatggaacctcaaagaactcgtgttgggcaacaagtatcaccggaacccggatgcaatcatgcaaaaaatggatcggcaatggatgtatgctgaccggcggtccaaagagtttatcgagggcgtgcattattttttgagagtggccgaagctaacaagcgtaacggttttatttgttgtccatgcaataagtggttcatgccaagctataattgttggacatcccacggtgagcaaggggttgaaatagaagaagatgaagtggaggacgagaacattcccgactgggctcagtacgctggatttgaaggaaatcaaacgggcgaggtggacagggatgctggcgataacaatgctgcggatgatctttgtaacaccccagaaactacaaagacatcgggatgctactaa

SEQ ID NO: 15751 - DNA, 2802 bp, Oryza sativa
  Clone ID: PAT_MRT4530_21566C.1
atgcagcgcgatatggcaaaagagaaagaggaaaaaaagctcaaggcaaaggcaaaggcaaaggaggcagctaggctccaggcacaagcagcttcagatggtcctaaaaaaagtgagaagaagcaaaggaagaaagctgttgaggatgagaatcctgaggatttcattgatccagacactcctcatgggcagaagaaatttcttgcatctcaaatggccaagcagtatagcccagctgctgttgagaaatcgatattttggggcagatcctgtggctcatactttgaagtttgcactagatattacgttttgccacctccaaatgtcaccggagcacttcatataggccatgcacttacagtggctatagaggatgccattatacgctggcgaaggatgtcaggttataatgctctgtgggttccaggagtcgaccatgccggcattgctacacaggttgtagtggagaagaagcttatgcgtgaaaagaaattgacgaggcatgacatagggcgtgaagaattggtatctgaagttctcaaatggaaagatgaatatgggggtaccatattgaatcaactacgtaggcttggggcctcacttgattggtcccgcgaggttgattatctagatattaaagaagaaaccatgttaaaggttcctggttataatacaactgtacaattcggcgtgttgatctcttttgcatatccacttgaggaaggattgggtgagatcattgtcgcaacaacaagaatcgaaacaatgcttggtgatacaacaatttctgttcaccctgaggataatagatacaagcatctgcatggtaggtatgcaattcatcccttcaatggccgaaagctcaaaataatctgcgatgctgagttagtggatcccactttcggtactggggctgtcaagattacacctgcccatgatccaaatgattttgaggttggaaagcgacgcagccttgagttcatcaatatcttcacagatgatggaaaaataaacaactatggaggtgcacaatttgaaggaatgccaagattcactgctcgagttgctgttattgaggcactgaaggcaaagggcttgtacaaggagacaaaaaagaacgaaatgtgtttgggtgtttgttcaagaactaacgacgtggtggagcctatgataaaaccccaatggtttgttaattgcaataccatggcaaaagcaggtattgatgctgtaaggtccaaaagaattgaaattattccacaacagtatgagcaggactggtatagatggcttgcaaatatacgtgattggtgtgtttcaaggcagctttggtggggacatcgtgtgcctgcttggtatgttgtactagaagatgatcaagagaacattctgggttctgataatgaccgttgggttgttgctagaaacgaaagcgaagcaaacctggaggcacatcaaaagtatcctgggaagaaattcgagttacatcaagatcctgatgtgttggacacatggttttcatctggtcttttcccattaaccgtacttggttggccagatgatacagctgatgttaaagctttctaccctggttcagtgctggaaactggacatgatattctcttcttttgggtagcgcggatggtgatgatggggatgcaacttggtggtgatgtgccatttcagaaggtttatttgcaccctatgatccgggatgctcatggatgcaaaatgtctaagtcgcttggtaatgtcattgatcccgttgatgtgataaatggtattccactggaaggtctcctcaaacgtttggaagaaggcaatctggatccaaatgaattgaacattgcaagcgatgggaagaagaaagattttcctgatggcattgctgaatgtggtactgatgccctccgttttgcactggtttcttacacttctcagtctgacaagataaacctggatatcaaacgagttgttggatatcggcaatggtgcaacaaattatggaacgccattcgttttgcaatgggcaagcttggcgatcattacactccccctgcaactatttctgtaactataatgccaccaatatgcaaatggatattgtcagtgcttaacaaggctattggcaaatctgtcacctcgttagaagcatataaattttctgatgctacttctgctatatattcatggtggcagtaccaactgtgtgatgtatttatagaagctataaagccttacttcttcaatgactctcaagagctcgaatcagcaagagctgcctctagagatgccttatgggtttgcttagataccggcttgcgcttgctccacccattcatgccttgtgtaactgaagagctctggcagcgtcttcctcagcctaaagattcttgtcagaaagattccattatggtatcagagtacccatcccttgttaaggaatgggcagatgataaacttgaaaatcaaatagatattgccttggatactgtcaacaaactaagatctctgaagccaccaactgatacaaacgagagctgttgtgaacaaagtttatctgtatacctccaactccaaggagctctcaatgcagaagttgagcttgaaaagctaaggaaaaagagagaagaaattcaaaagctgcaacatgccctatcacagaaaatggaagcttccggttataaagagaaggctccacataatgtccaggaggacatgagaaaactgaccagttttttggaacaactagagattatcagtgaagctgaaaagaagctagatgcaaaaactggcaaaaactga

SEQ ID NO: 15752 - DNA, 3870 bp, Oryza sativa
  Clone ID: PAT_MRT4530_21567C.1
atggcctcggcacaggcggcggcgactccggtgagcagcggcctcagcgcgacggcggtggcgctcctccggatccatgctctcaggcgcaacgacactaaaagttgttcggatccactggtggagaaatcatctttgatggatcggcaatggatgtacgctgaccggtggtccaaaaagtttatcgatggcgtgcattattttttgagagtagccgaagctaacaagcataagggttttatttgttgtccatgcaataagtgtaagaaccagaagtagtattctgcatccaggactattcatttccacttgtttgagtcggggtttatgccaagctataattgttggacatcccacagtgagcaaggggttgaaatggaagaagatgaagtggaggacgagaacattccggactgggctcagtatgctggatttgaagaaaatcaaacggacgaggtggacagggatgctgacgatagcgacgctgcggatgatcttggtaagatgttgaaagacgccaaggaggactgtgaaagtaaaaaggagacccataaattggagcgtatgttagaggaccacagaacgtcgttgtacccaggttgcgagcagaggcataaaaagttggataccactttggagttcttgtaatggaaggcaaaaaatggtgttagtgacaaggcatttggcgatttattgaaactcgtcaagaacatttttccggagggaaacaaattgctcgagacaacgtacgaggctaagaagatagtctaccctctaagactggaagttcagaagattcacgcatgtccaaatgattgtatactatatcgcggtgaggagtacgagaacctagaagcatgccctgtttgtaaagcactacgatacaagattagacgagatgatccaggtgaagttgacgggcagccaacgaagaagagaattcctgctaaggtgatatggtatttccctataataccacggctaaggcgtttgttcaggaacaaggggaatgctacaatgatgcgttggcacgctgaagaacgtcaacaggacgggatgctgagacaccccgccgatagttcgcagtggcgaaacatcgacagaacatttaaagactttagaaaggacgcacgaaacattcggtttggtttaagtacggatggcatgaatccttttggagagatgagtagcggccatagcacttggcccattacgatgtgtatctacaacctccccccttggctatgtatgaagagaaagtacataatgatgccaattattattcaaggcctcaaacaacctggtaacgacatcgatgtgtacctaagaccactggtcgaagatctgaaactgttgtggaagaaaggtgtcctcatctgggacgaggataaacgggaggagtttaacctacgagcgctgctattcgtaaccatcaatgattggtatgcacttagcaatctatccgggcaatctaacaaggtttgggatttgggggaaaaatcaatgggaaaactcccacacatcaagtttcaactcagtgagcctatcgagcggtgcaatccacttggggcaccgctgaaagtaggagttccacatccagaacctttgaaggaggcatggcgggggtgacaaagatgctagaaaatcaacaggaataggtctggcactcagaatacttagtgatttgaggctacagctgctcaatttgctgagagaagaggacaagtactccttgtatcttgcatcacttggctcgtcctcatcccaagatatcgagagctctctcaagttcctcaaatttccaagttcctgcactgcatttactgggctgtcacagatgttgaattgtgacagtgtccgaagtgcttgcatgctcccaatgtctttcggtaacatcccctcattgtccacaaggagatgtctaagatgttgtagctgagaaatcccatccggcagcaaactattccatgagaaactgcaccattctagtgtctcaagacactgcagctccccgatttctgcaggaagcttaaaggcatttagtctcaaatatttcagctgatgtagtttgcaaataatcttcaaatcgacatcctcattcaactcacaatcgagactcaggactcgtaaaactctgaaataagcaaatggcagtgtctgattgagacagtcaccaaaggtgctgaatgatctaacatggtttaacgatgttacttcttggggtgccaacttctgatctccatcattatattgaattgagagccggcgaacaacaccttttggttttgttgagatcgggctcggacctatgattgtaagaaaattctcttctcttgcctttgatttcataagttctagcatcatgtcatgtacgcgacaaactcgcacccttccatcgtagtcaatgtccactggcagaatcatactcctattaatgagctcattgaagtagctttcagcaacatcctccacattttgcccataatcttcactgaccaatccttctgctatccatctcctcactaaactacctctttcaatgtcataatcctcaggaaatatgctcaaatagagtaaacaaggtttgagatagtggggaagatcattataactcagagacaatatagttttcatgccctcaagatcatgattttcttgtaatacagatcctgtcgatgtactcaccttttcccattgctcctttgtattggacctgctagccaataagcttgctatactaactatcgccaggggaaggccagtgcattttctcaatatatcatctgaaacatgtgtaatttgcacagggcaaccatccacatggccaaaaactcttttgaaaagtagcattcttgagtggagctcactaagaggctcaattttgtaacagcggtcactgggcagagaacaacacgcctttgcgacagactcaatacgtgttgtagtaattactctgctaccatttttgttctctggaagagcacatttcagtacatcccatgctgaagcagaccatatgtcatcaattatgatgaagtacctcttatcctgtaggatttctcttatcttttcaataagcattgtctcactctcatcccaggtctctctcagatctctgacaagattagtgcctttcggagttatacgagagagtatgccccagagaattttcttaaaatcaggcttttgggaaacagatacaagagccgcacaaccgaattgcggtccaatcttacgacggacctcattggctagcgtggtcttgcccaaaccaccaaagccatagatggacagcaccttccgatgattcaaatgctcagcttcaccctccatcagccagctcactaggtcatcccttgggccatcgatgcccacaaggtgagcctcctcagtgaaaagagcacccatgcgaggatctattgtcaagctggtgtaactgctgccagcaacatcatcgagcttgtatctctccctctggtctttgacctcgacaacacgggccttcagttcttggatctgctttgcaatgcggtgcctagtgcacagtgtcttcaaacgccgagcacatcggcgaaagaactccttgatgcctccgtgaccgtggtggtcattggtgtcaactccgtggacatactcgtccacgcagtcttcgatgtcgtgtgagagctccctcaactcctttgtccaggtcttcacttggatgtcagggttctccattgcagcacacttttggagaagggcgtgcatgttgttcagctctgaccggaggaagcggatttcacggcggactcctttcagtcgagcacactcctcaacaagcagattggtgagtttctttaggagggagtccatggcaccttgagcctccat

SEQ ID NO: 15753 - DNA, 270 bp, Oryza sativa
  unsure (1)..(270): unsure at all n locations
  Clone ID: PAT_MRT4530_21568C.1
cgncgtggatgacgacgacgacgacgtgttcaaccgcgcgttcaacgaaacgagctggcatttcttcgaggtggatgacgccgccgactttgctnccgacgtcgcctccaccggaggacggagataagttccgaagtactcttcttaatttcagtactcgtgactgtaattgtaagancattgtttgnccaattggatgcttttggtgatcaatactcgatatttacatcttaattagctaaaaaaaaaaaaaaaaaaaaaaaaaaaaaa

SEQ ID NO: 15754 - DNA, 2895 bp, Oryza sativa
  Clone ID: PAT_MRT4530_21569C.1
ccgacggggtccccgcgctgcgggcttgctcccgccccgtgcgttggcccgggcgttccccccctcccccccctcgcggctccacctcgcgcctcgcctcttcgctggcttacccctggtgcctggttcgcgccgtccctcggcccaaagccgggggggcggggggggggcggcggcggcgaagcgggagtggggggggggttcttgccgatgtcggcgattcgtgggcgcggcgcgcgttgcggcccgtgcggtgtaggcggcggcggcgcgagcgctcgcggggtgagcggcgttgtggctggggagatggtgaagaagaaaggcaagtatagccccggcgcgagcggcagcggcagcggcagcggcggcggcaatgcgggaggaggccccaggccgggcggcagggagacggtggtgtggtccgagaagatgaacgagtatctcatcgacgcgttgctgcaccagcaggcgatcgggaacaggggcgaggggaggtttcactccgcggccttcgatagcatcatctccggggtcgccgagaggttcggggtggccatcgacaggtcaaacatcaagaaccgtctcaagtccatcaaggagaacttccatgaatgcgagaacctcttccagaaccagagtggctttaagtggagcgcgatgaacaagaagttttatgctgacccaactgtttggagggagtacatcgagaggaaaccggaagccaggaaatggatcaacaagcccattgatcattacgataggttactagagctattcggtaaggatagagaaagatgtctagcttctggcagcccaaagagtccaccggcaaaaaaggcgcgaagagacccaccaaaggagaaacctcaacggacaccaacaaatggtttggtgtcacccattgtcaaaagtttgaaagacatggaatctcaacggacaccaacaaatgttttggtgtcacccattattatcaaaagttcgaaagaaatggtgaatgaaaacgaggtccctagcgaggcggtaacagaaattaacatagctgaggagcaggatctatcagaaaagttcacaagtgagaatggtgctatgccagttgaaggtaattcatgtggtacaggtatgccctatgctcccgaaaactggccatgtcctggagatcaatggagctggaaagtgggaaacagggcttctgcaactggccactggcttgataggtaccttacaccgccctcacgttttcgtgatgctactggtaaaaagacatcattcacaagtagactaaaggttgaagaatttatcaagacagagtttccagatatggatccgaacacattcttttctatgtttatttggaagatccctgctaaaggacactgtatccaaagaggaggtggagaagtgaggagggtcttttgtccttatgcaaggcaagctgatccagctggaccatgcaaggccaggaataacttgtgtaaacttgagagagagggattcattgaatcatctccggcacaggattgtgacctctgctgcaaaatgcctgatttctgccgagagtgctgctgtgttttctgccgcagggttgttgactattcctttggaggttatagctacattaagtgtgaggcagtcctagaagagaacaaaatatgtgggcatattgggcaccttgattgtgctctccgtacttttatggctggaacagttggaggatgtattgacttggacatgcagtattgttgcagacgttgtgataacaaaacgaacttgatgctgcacgtagaaaaattcttggaaatatgccaatctcttcaatcaagggatgacattgaacctatcctgaatactggcttatgcctagtgcgtggttcaagacaaacaagagcaaaaagcttggagagcattatgagatcagcaatggcaaagctaaagtgtggggttgatcttgctgaagtttggaaaatggaagataatggtatcaactcaactccaagtgcagaagtttcccctgctaccggtggtgtaacagtgcttgggatccagcaagctccagaagaggatgctcctccagggtttccatattatgttgatttggctgacaatgatttgcagagggctgttgaaaatcttccagcttacattaccgaggatcaacacacactgtctgtcaggttcgaagattcgatagatcatgctcttaaagaactgaagagatctcaggaagcagagtacaagctggcagagcagaagctttattcccagaaggatcatgtcctgagtctttatcgtcagcttgattctgaaagatccgtccttgcagaccctatgcccttagctgatgatgatggttcactatatagtacactaatcaccaatgttatgaagcgtgtggatcaagtgaagagtgaagaggagaagctcaaggtcatgctgggaatcgctgatggatttgggaaaacgccatcaggagtcattcaggagcatttcgggctacctgctgatactgccaactgagagtgcctgctttgttgtactgtcgtatgagtttgttaccaacccatctggtttggactaaaccagtaataccgtgaaactcgcggtaatccgtggacatgcctttaggaaccttcgctctccctaataccagttttaccgtttagcagtaccagttttaccgtacttaaagtgatcgttctactgtcaaaaaaaaaaaaccttgtgttcttctgtcgtgtaagtaaatttacattacaggttgcttctgctgcagctgctgtgatcccagagcaatgttggagaggtaagcatttacagattttgactagaatgagcagcagcgcagcacggaggcaattttcctttcagtaattactgcttgtcagttgtaagatt

SEQ ID NO: 15755 - DNA, 564 bp, Oryza sativa
  Clone ID: PAT_MRT4530_2156C.1
atggcagctgcatttgcccaggagagttcacatgcagttgtgtaccgagcctcaaattccaagaggtataccacgagaaccttcggccgggcctaccgaaacgaaggacataagcaaaggcatgagccggaggcaagcagcgacggtcgaagggagaacataagcgaaagccgtggtatcgagctgacaagcttcgccaaagatggactctgccggagggtcgtacggttgaagtccgcgaggcgaaagcccacgaagggcatgggtttcgccaagtatcgaaccttgccaggagaaggcccagcgggccgacacgccttccagaggcttcgccaaggactgggccgagtcacttggcccattaggagcccatacgagcaaaagacattgtatgcccataaagatattcctatcataagggcaaccatggcctttgctgcccaggctatcaacgccttgccaatgttcgcgtacaagccctctagcgcggtggagaaggatggcgttggcggcgccgcattgtacacggtgtaccatgtcgggaggaagaggacaagaaaatag

SEQ ID NO: 15756 - DNA, 1494 bp, Oryza sativa
  Clone ID: PAT_MRT4530_21570C.1
atggctccgatcggcgtgctcacggcgctggaccaggcgcggacgcagtactaccacttcaaggccatcgtcatcgccggcatgggactcttcaccgactcctacgacctcttctgcatcgcgcccgtcatgaagatcgtgggccgggtgtactactccgacggcggcgcccgtccgggggtgacgccgccggccgtcgtgtcggcgaccgtcggagtggcgctgctgggcgcggtgatcgggaacgtggtgttcggcgcgctgggcgaccgcgtggggcggcgccgcgtctacggcgcgtgcctgctgctgatggtgtgcagctccgtcgggagcggcttctccgtgtgccggacgcgccggtgcgcgctcgccagcctctgcttcttccgcttcctcctcggcgtcggcgtcggcggcgactacccgctgtcggccaccatcatgtcggagttcgccaaccggcgcacccgcggcgcgttcatcgccgccgtgttctccatgcaggggttcggcatcctcgccagctccgcggtcaccatggccgtcgccgccgccttcgaccactacaccggctaccccgcgccgctcgacacgccggagtgcgccgacctcgcctggcggatcattctcatggccggcgccgtccccgccgcgctgacgtactactggaggatgtccatgccggagacggccagatatacggctttggtggagcgcgacgtggtgaaggccaccaacgacatcggccgcgttctggccgacctcgacctgggcgccgtcgccgaggaggaggtggcggcggcgttgagccggcctccgccgccgccgcgcccttcgaggcgttcaacgtggccaagttccaggccgtcatcgccgtcgcctccacccatcccgggctacttcgtcgccgtgctcctcatcgaccgcgtcggccggcggtgcctccagatggccgggttcctcctcatggccgtcttcctcttcgcgctcgcgggtccgtacgacggatactggcgcgaccacggcgcgcacgccggctacatcgtgctctactcgctcaccttcttctccgccaacctcgggccgaacaccaccaccttcatcctgccggcggagctcttcccggcgcgcttccggtcgacgtgccacggcctctccggcgcggcggggaagctcggcgcgctcgtcggctccatcggcttcctgtgggcgtcgcagcagaaggacggcgcggcggccgggcacctgccgggcatcggcatgatgtacgcgctgttcgttcttggcgggatctgcctgctcgggctggcactcacctacgtgttcacgccggagacgatgatgcggtcgctggaggagaacgagagcgacagggcgcagacccaggtcggcgacggcggcagcgacaccgaggcggccaagagcccggcgtccatggcgagctcgcacctcagcatgtcgcccatccttccagcccgggtctccgtgtga

SEQ ID NO: 15757 - DNA, 3445 bp, Oryza sativa
  Clone ID: PAT_MRT4530_21571C.1
atgtccagcgttacccctgctgccgacgcgcagccactcgatgagaaagagctggagcggaagctgaagaaagatcagaaggcaaaagagaaagaggaaaaaaggcttaaggcgaaggcaaaggaggcggctaggctccaggcacaagcagcttcagatggacctaagaaaagcgagaagaagcaaaggaagaaagctgtggaggatgagaatcctgaggatttcattgatccagacactcctcatgggcagaagaaatttcttgcatctcaaatggccaagcagtatagcccaactgctgttgagaaatcatggtattcctggtgggaatcatcaggatattttggggcagatgctgcaagctcaaagccaccatttgttatagttttgccacctccaaatgtcactggagcgcttcatataggccatgcacttacggtggctatagaggattccatgatacgctggcggaggatgtcaggttataacactctgtgggttccaggagttgaccatgcaggaatcgctactcaggttgtagtggagaagaagcttatgcgtgaaaggaatttgacaaggcatgacatagggcgtgaagaatttgtatctgaagttctcaaatggaaagatgaatacgggggtaccatattgaatcaattgcgtaggcttggggcctcacttgattggtcccgcgaggttgattatctagagattaaagaggaaactatgttaaaggttcctggttataatacaactgtacaattcggtgtgttgatctcttttgcatatccacttgaggaagggtccggtgagattattgtcgcaacaacaagaatcgaaacaatgcttggggatacagccattgctgttcaccctgaggatggcagatacaagcatctgcatggtaggtatgcaatccatcccttcaatggccgaaagctcaaaataatctgtgatgctgagttagtggatcccactttcggtactggggctgtcaagattacacctgcccatgatccaaatgattttgaggttggaaagcgacacaaccttgagttcatcaatatcttcacagatgatggaaaaataaacaacaatggaggtgcacaatttgtaggaattccaagatttactgctcgagttgctgttattgaggcactgaaggcaaagggcttgtacaaggagacaaagaagaacgaaatgagtttgggtgtttgttcaagaactaatgatgtggtggagcctatgataaaaccccaatggtttgttaattgcaataccatggcacaagcaggtattgatgctgtaaggtccaaaagaattgagattattccacaacagtatgagcaagactggtatagatggcttgcaaatatacgtgattggtgtatttcgaggcagctttggtggggacatcgcgttcctgcttggtatgttatactagaagatgatcaagagaaaattctgggttctgctaatggccgttggattgttgctagaaacgaaagtgaagcaaacctggaggcacagcaaaagtatcctgggaagaaattcgagttacatcaagatcctgatgtgttggatacatggttttcatctggtctcttcccattaaccgtacttggttggccagatgatacagctgaccttaaagctttctaccctggttcggtgctagaaactggacatgacattatcttcttttgggtagcacggatggtgatgatggggatgcaacttggtggcgatgtgccatttgagaaggtttatttgcaccctatgatacgtgatgctcatggacgcaaaatgtccaagtcgcttggtaatgtcattgatcccgttgatgtgataaatggcatttcactggatggtctcctcaaacgtttgaaagaaggcaatctagatccaaatgaattgaacattgcaacagaagggaagaagaaggattttcctgatggcattgctgaatgtggtaccgatgctctccgttttgcactggtttcttacacttcgcagtctgacaagataaacctggatatcaaacgagttgttggatatcgacagtggtgcaataaattatggaatgccattcgttttgcaatgggcaagcttggcaatcattacactccccctgcaactatttctgtaactacaatgccacccatatgcaaatggatattgtcagtacttaataaagctattggcaaaactgtcacctcgttagaagcatacaaattttctgatgctacatctgctatatactcgtggtggcagtaccaactatgtgatgtgttcatagaagctataaagccttacttcttcaatgactctcaagagtttgaatcagcaagagctgcctctagagatgccttatgggtttgcttagacactggtttgcgcttgctccacccattcatgccttatgttacagaagagctctggcagcgtcttcctcagcctaaagattcttgtcggaaagattccattatggtatcagagtacccatctgttgttaaggaatggacggatgataaacttgaaaatgagatagatattgccttagatactatcaacaaactaagatctctgaagccaccatctgatacaaatgagagacgacctgcttttgcactttgccgaggccaagagattactgccaccattcagtgttatcagtctctagttgtgtctctttcttccacatcatctctaaagatcctgacagagaatgatgaaacgccacctgactgtgcaacagctgttgtaaacaaagatttgtctgtataccttcaactccaaggagctctcaatgcagaagttgagcttgaaaagctgaggaaaaagagagaagaaattcaaaagctccaacacgcactgtcacagaaaatggaagcttctggttacaaagagaaggctccacagaatgtccaggaggaggacatgagaaaactcactagtttttttgaacagctagagattatcagtgaagctgaaaagaagctagatgcaaaaactggcaataattgacccagaaatctctgatgtgattttgaagatgcacatttgttgaagtttatctcaaattttttgcatggttaccttaatcatacctgaatgcccaggtactcatttttatattttgtagcttgaagagtatattcacagcattatacttttgtagtttttggttgtccaatcttccgtttgaaaatattttttgtggtgttgatttttcttaaaaaaaaaaaatcggcatcagaatcatgggccgcttgcttttatcatgtccttattcgttctcttgtgttttatgttcatgtcagagtgtgcgtgcatgcaaggggtatgttggataattcttttagtacgttacgtatatatacacgagtttcttataaaaaaaaaaaaaaaaaaaactcgagactagttctctctctcctcgtgc

SEQ ID NO: 15758 - DNA, 435 bp, Oryza sativa
  Clone ID: PAT_MRT4530_21572C.1
atggtgatagtggaagaatataccgaacgtgatcccaagaacaaattcatccttaacaccatcatttcggagttcgccaaccggcgcacccgcggcgcgttcatcgccgccgtgttctccatgcaggggttcggcatcctcgtcagctccgccgtcaccatggccgtcgccgccgccttcgaccactacgccggccaccccgcgccgctcgacacgccggagtgcgccgacctcgcctggcgaatcatactcatggccggcgccgtccctgccgcgctgacgtactactggaggatgcccatgccggagacagccaggtatacggcgctggtggagcgcgacgtggtgaaggccaccaacgacatcggccgcgtcctggccgacctcgacctggccgccgtcgccgaggaggaggtggcgcggcggcggcgttga

SEQ ID NO: 15759 - DNA, 1749 bp, Oryza sativa
  Clone ID: PAT_MRT4530_21573C.1
atggcgccgaggatacgggtgctcgcggcactggaccaggcgcggacgcagtactaccacttcaaggccatcgtcatcgccggcatgggcctcttcaccgactcctacgacctcttctgcatctcgccggtcatgaagatcttcgggcgggtgtactacgcgccatcgggatcagtagacggcagcggcagcggccccggggtgacgccgccggccgtcgtgtcggccaccgtcggcgtggcgctgctgggcgcggtggccgggaacgtggtgttcggcgcgctgggcgaccgcgtggggcggcgccgcgtctacggcgcgtgcctgctgctgatggtgtgcagctccgtcgggagcggcctctccgtgtgccggacgcgccggtgcgcgctcgccagcctctgcttcttccgcttcctcctcggcgtcggcgtcggcggcgactacccgctgtcggccaccatcatgtcggagttcgccaaccggcgcacccgcggcgcgttcatcgccgccgtgttctccatgcaggggttcggcatcctcgtcagctccgccgtcaccatggccgtcgccgccgccttcgaccactacaccggctaccccgcgccgctcgacacgccggagtgcgccgacctcgcctggcggatcatactcatggccggcgccgtccccgccgcgctgacgtactactggaggatgtccatgccggagacagccaggtatacggcgctggtggagcgcgacgtggtgaaggccaccaacgacatcggccgcgtcctggccgacctcgacctggccgccgtcgccgaggaagaggtggcggcggcggcgttgagcccgcctccggtgacgacgccgccgccgccgcgcccttcgtacggcctcttctcgcgccgcttcgtccggcagcatgggagagacctgttcgcgtgcgcggcggcgtggttcctcctcgacatcccctactacagcagcacgctgttccagtcgcagatctaccggccatggttcccgccggcggcgaaggtgaacgcgttccaggaggcgttcaacgtggccaagttccaggccgtcatcgccgtcgcctccaccatcccgggctacttcgccgccatgctcctcatcgagcgcgccggccggcggcgtctccagatggccgggttcctcctcatggccgtcttcctcttcgcgctcgcgggtccctacgatggatactggcgcgaccacgccaagaccgccggctacatcgtgctctactcgctcaccttcttctccgccaacctcgggcccaacaccaccaccttcatcctgccggcggagctcttcccggcgcgcttccggtcgacctgccacggcctgtccggagcggcggggaagctcggcgcgctcgtcggctccatcggcttcctgtgggcgtcgcagcagaaggacggcgcggcggccgggcacctgccgggcatcggcatgatgtacgcgctgttcgttcttggcgggatctgcctgctcgggctggcgctcacctacgcgttcacgccggagacgatgacgcggtcgctggaggagaacgagagcagcgtgcaggcgcagagccaggtcggcgacggcggcagcgatgccggcaatggcagtgatgggctgcgcttccacgaactaaatgttctcatggaggcggcgaccaagagccctgtgtccatggcgagctcgcacctcagcatgtcgcctatccttccgcaccggatgtctctatga

SEQ ID NO: 15760 - DNA, 630 bp, Oryza sativa
  Clone ID: PAT_MRT4530_21574C.1
atggcggcgcggcggcactacggcggcggcgcggcggaaagggaggagatggaggggaatgggtcgcgcggggcgcgaggcggcgggcacgcggcgcgaggcgacgagacggcgcgcggcgccgcagcggcgacgggacgcgtgcgacgacggggcgcggcgatgggacagcggcgcggcgcgggacgacgcgacggttgcggcgacgcgacggcgggcggcacgaggcgcgagacgacggcgacccgcggcgatggcgacggcgacattggtgcggcgcgacagaggcgagggaacggcgatgggaatggctcggcagcggcggcgcgcggctcggagcgacgatgggacgcgcgcggtgatgggacggtcgcgcggcgacgtcgacgcgcggtgacggctcacagcagcggcgcggggctcgggggagcggcgtggcaccgggggggtgaggcgacgacggcgacggctcggcagtggcgacgagacggtgcgcggcgcgatgggacggcgacgcggtggcgacgggcgacgcgacggcgatgcgacggcacggggctcggggcggccgggcgcgcggcacgcggggcagaggagtggggctgggctaggggagaggggaaacgctag

SEQ ID NO: 15761 - DNA, 1923 bp, Oryza sativa
  Clone ID: PAT_MRT4530_21575C.1
atggctaggggaggaggagcagctggtgtgtccatggctcatcacctcggcattgccttggtggtgcttgtctttgccgccatggcgcaggtggcgcgcggcggcggcggcggccatgactatggcatggcgctgagcaagagcatcctctacttcgaggcgcagcgctccggcgtgctcccgggtagccagaggatcgcatggagggccaactccggcctcgccgacggcaaggccaacggcgtggatcttgttggtgggtactacgacgccggcgacaacgtcaagttcgggctgccgatggcgttcacggtgaccatgatggcgtggagcgtcatcgagtacggcgaggagatggcggcggccggcgagctcggccacgccgtggaggccatcaagtggggcaccgactacttcgccaaggcgcacccggagcccaacgtgctctacgctgaggtcggcgatggtgactccgaccacaactgctggcagcggccggaggacatgacgacaagccgtcaggcgtaccgccttgatcctcagaatcccggctctgacctcgccggagaaaccgccgcggccatggcggctgcgtcactcgtcttccgtagctccaacccgggctacgcagaccaactcctgcaacactctaaacagctgtttgatttcgccgacaagtaccggggaaggtacgacaacagcatcaccgtcgcgaggaactattacgggtcattcagcggatacggggatgagctactgtgggcgtcggcgtggctataccaagcgagcgacgaccgccgctacctcgactacttggccaacaacgcggatgcgctaggcgggacgggctggtccatcaaccagtttgggtgggacgtcaagtaccccggagttcaaatcctagctgcaaagtttctcctccaaggcaaagccggcgagcacgccggcgtcctgcagggataccggcggaaggcggacttcttcgcgtgctcgtgcctcgggaaggacgccgccgacaacgtcgggaggacgcccggcggaatgctgtaccaccagaggtggaacaacatccagttcgtcaccagcgcgtcgttcctcctcgccgtctactccgaccacctcgccggcggcgccgtgaggtgctcgggcggcggcggggcggtggccggggcggcggagctcctggcgttcgccaagtcgcaggtggactacatcctggggagcaacccgagggggacgagctacatggtcggctatggcgccgtctacccgcggcaggcgcaccaccgcggctcgtccatcgcctccatcagggccagcccgtcgttcgtgagctgcagggaggggtacgcgagctggtacgggcggcggggcggcaaccccaacctgctcgacggcgccgtcgtcggcggccccgacgagcacgacgacttcgccgacgagaggaacaactacgagcagacggaggcggccacctacaacaacgccccgctcatgggcatcctcgcccgtctcgccgccggccatggcgcccgcgcccgcggccggcttggccagtcacttcaacacggaatcgctgcaaatcacacttcactgcctcatggtgccaatcaccagcatgcgtcgccggtggagatcgagcagaaggcgacggcgtcgtgggagaaggacgggaggacgtaccaccggtacgcggtgacggtgagcaacaggtcgccggcgggcggcaagacggtggaggagctccacatcggcatcggcaagctgtacggcccggtgtgggggctcgagaaggcggcgaggtacggctacgtgctcccgagctggaccccgtcgctgcccgccggcgagagcgccgccttcgtctacgtccacgccgcgccgccggccgacgtctgggtcaccggctacaagctcgtctga

SEQ ID NO: 15762 - DNA, 939 bp, Oryza sativa
  Clone ID: PAT_MRT4530_21576C.1
ctattcattgcccgcaaggtgttcaatgtggtccctagcctttccccttctctcccacctctcccctagcccagccccctcctctgccccgcgcgccgcgcgcccggccgccccgagccccgtgccgtcgcatcgccgtcgcgtcgcccatcgccaccgcgtcgccgtcccatcgcgccgcgcaccgtctcgtcgccactgccgagccgtcgccgtcgtcgcctcgcaccccgtgccacgccgctcccccgagccccgtgccgccgctgttaccgcgccgcgccgcccgttccatcgccacgcgccgtcaccgttcggccgtcgcgtcgcctcgcgcctcgcgcccgcgcgccgctcgcccgttccatcaccgcgacgcgagcctgccgcctcgcgtcccgcgccgctgctgtgagccgtcaccgcgcgtcgacgtcgccgcgcgaccgtcccatcgccgcgcgcgtcccatcgtcgctccgagccgcgcgccgccgctgccgagccgttcccatcgccgtcgcctcgcctctgccgcgccgcgccaatgtcgccgtcgccatcgccgcgggtcgccgtcgtctcgcgcctcgtgccgcccgccgtcgcgtcgccgcaaccgtcgcgtcgcctcgcgccgcgcgcccccacctcgcgccccgcgtcgccgtcgcgtctcccttctcccctccccccccccttagctcttcccctccccgcgccgccgcctccacgccgccgcgccgccgccctcgtgctgtcgtgccgccgcgttcgtgcccccgtgccgccgccccagtgtgccgcaccgtgcgccgtcgtcgccgccgccgccgtcgccgtcgccgccgtcggtgagccgatcctcagaaaaccataacgactcaatggcgggaagctatccttgggatcacaatggatggtggacagaaccgtcat

SEQ ID NO: 15763 - DNA, 276 bp, Oryza sativa
  Clone ID: PAT_MRT4530_21577C.1
atgcaagtgaatgaatgtgctgcatatatatatgctactacctgttgcgacagacaggacgatgtcagcctgttcaggaacacgacccaccgtcaccgccgcctcctgcacacacaagacaacacattcattcatccaagagaacacccggctgcagctgagctagcacggttacagcatggatatccagagaatttctgggaaggtagaaacaaagagagacatacggatgctatctggaagccgccgggtcgtgcgacgcggtacccgatatga

SEQ ID NO: 15764 - DNA, 728 bp, Oryza sativa
  Clone ID: PAT_MRT4530_21578C.1
gatggtgtttcgtgattcattgaagctactcccagattctttaagttctttaggtcaaagtctctgcccagagctcggcagtaaaggtgaagtagatcatacgtctgtagttatggataatttcgcatctaggaagagggaattggtagagaagcaagacatattgggtggtattatgctgatcaaaatatctattggagtctttacgagctttatattactacaaggatgatgaccttgtcttttctagcgctaaccatctttaggaaggattattatgatgagatgagtacacctatagcaattcctcataggactgctgatgagtttcttcataggggagactatggaggtcatgcggatgtgtataagctgtgagaattttttctattatgacgttcgctctctgtatccgtttataatgaaatcatccccaatgccgataggtgcagctaaatgggatggtaatttacagggagaggaactgtatggctttctcgaggcatatgtggactgtcctgaaacaatgaataagccattccttccatatcgatcataaaaaagactggattgcttattttccccggtttatcggagtttactattcagagaaacttcaatatgctgatatatttggatataaagtcagacctctttgtggctatctctatgataagggtgatggtttattcgataaccacattgccgaaatatttccacgttcaagc

SEQ ID NO: 15765 - DNA, 403 bp, Oryza sativa
  unsure (1)..(403): unsure at all n locations
  Clone ID: PAT_MRT4530_21579C.1
aaaaaaacagagctttctctctctccctccctctctctctctcttcttccaatctgcggcgcgaggcggaggtggtggtggtggtggtgggcgccgccgggaggatgggcccgtagcgccggtgtgggcggcatcctgtcctcgccgaccacccgcccccgccggtgcggcctcgccggcaagaagtctttgtttttcttttctttttttttttcatctttgaagattggatccttaatttaggggcgaaaagaggggagtttgcaagaggaatcatccctattgggttgtttcttgctgctgggtaagatccaatccagcctctaggttaggtttgtttgctgttggtgaggagatttaagggttngctngtcatgttgggggaccagcgcaggaaattcct

SEQ ID NO: 15766 - DNA, 363 bp, Oryza sativa
  Clone ID: PAT_MRT4530_2157C.1
gccagtacaacaaatgataaaggaaagggcttgcatatagaggatgatgcaggagaaactgacaatccgaaggatgcagtggacagtgtaacaaagcagataagtggcattgctatttctgaatctctggttgtcgcaacctcctccactgatgctaccgacaactcaaaatcggagtcatctgctccagacatagataagaaaattcgagcactgaagaagaagatacgcttagcagaagcgcaagtgcaaggagatccagaaaatttgaagcctgaacaactcgagaaaatgaagaagatagaaggttggaaagaggagctgaagcttttggagaataagagctctcctgctgcttcctag

SEQ ID NO: 15767 - DNA, 477 bp, Oryza sativa
  Clone ID: PAT_MRT4530_21580C.1
atgggagcaggagtcacgctgtggccttctccctctcccacgtggtccttcccatcatcgccaaggcgctgtagtcgctgccacgggaccaaggaggccgccaccacctccaccggtcacgattgccacggaggtcgatccgtcgcctccgcctccgcctccctcctcgacgccaccgtctccctctataggtacagcgccgtcgccacgttcgtcttctctgtccaccgccggcagccgctccagctgcccctagcagccgcctcggccatcgacgacctgcgccatcgcctctctcggccctgcaaggtcaagctccaccccgtccaccccttacccgaggccgaatcccgccggaagcttgccgtcaccatgaaccagtgggttgttgccacggtttggtctccagccgcgtcgttcgtcatcgtccgtcgtcgccttcggtcactgtcacttcctttggattcgcagctgtga

SEQ ID NO: 15768 - DNA, 338 bp, Oryza sativa
  Clone ID: PAT_MRT4530_21581C.1
ttcgtggacgcgtgggagcgtcgccaccctctcgtctccccctcccgcctccgcctcgccgccgcctcgagatgctcgcgacccccggcgcgctccaccacctcctcctcctcccgccgccgccgcacacgcaactcgccttccaccatgccgtcgggggcgagggggcggggctgctcccgctcccccgcccccgccgcgtagaagcgagcgcctccacctcgcgtcgtggtggcgcgcgaaggagagcggcgggggctagggttagggcttacagtggcgaggaggcgccccccgtggtgaccgaagaggctagcaccttcggcggtccgaccaag

SEQ ID NO: 15769 - DNA, 273 bp, Oryza sativa
  Clone ID: PAT_MRT4530_21582C.1
ggtggccacccaaacaagaggattgacagcctgggttagaccgcaacctgagtcggatgcgctacgtgaccatgtatccggttaaatagaagagacaccatcggatccggtggaagacgagctaaacgtggacccgagggcacgattgatgaagaaaaacttgcaatgtgagaagaaggtggctacctcccaatgaccaggctttcactggagcacttattgtacactttgtatcacgatggacacgggatacgcgaatctcaataactgaca

SEQ ID NO: 15770 - DNA, 491 bp, Oryza sativa
  Clone ID: PAT_MRT4530_21583C.1
cgatgggtggtgagggcgtgcggacggacgacgatggggaggaggacggtggtgccgcgagcagcgggcggtggccgaaggaggcgagcagtgagcgcgtgcgcaggtggcgccagaagcagcaagcatggagcacgcgcgcgggcggtgtcggaggcggcaagctacaagcgcgtgggtgggcagcgctggagagccctctgtgccgtcgtcgcctcctcctccctcccatcggcgccgccctcatcccccagtcgccgtccttcgccacccatcatcgccgtcgtctctcccatcagcgtcgttgtcttcctcctcccatcagcgtcgttgtcttcctccccccgtccgtcgtcgcagctaacgccccgcgctcgctgcggggaagcatgagctccgtcgggctcaaccttccccgctcctccctcttcctctttatccacatccaagggcgtgctagtcagtttgatcctgcaactgacaaggtatga

SEQ ID NO: 15771 - DNA, 740 bp, Oryza sativa
  Clone ID: PAT_MRT4530_21584C.1
atttttggattggttggtgcctatgctgtttatacgtggaggcataggagatttttggggcatggaaaggaaagtttagagcatattggacgcgttgttatcttgaatatgggtatgggtctccttacaaggggcattgataactggggccatttgggaggcttgctcggaggcatggctatggcatggttcctcggtccagcttggcaatatcaatatgtgtcaaaggacggaagaacggtgttcaaagacaatgcccctattctccaactaagcaacgggaaatggttgaggtagaattttgtatttaaaacggattcctaacttgtgtgggacacagaaattgaagactgaagagaggtggggtttgacactgccatactgccaaggtgatggagtggacgcctagtttggactttggaaagctattgccagggaaactccagctccaaatcttacgcaagggcgacatttgagttcacctgagtcattatttttggatataagttgcaattgtttactgtgacagattatagctaatcaatactcaaatagtcgcacttataactaatcaaaacagcaattgctatttaacatgcttatcagtgttactggagcccaactggcacggtgtacatgaatccatatttttggagcccaactggcacggtgtacatgaatccatatttgatacagctaactataggctcaagtgtatcaatctatttatttttggggtg

SEQ ID NO: 15772 - DNA, 639 bp, Oryza sativa
  Clone ID: PAT_MRT4530_21585C.1
taaaccaacattcacccttgtttaatcaaattcggttctctcatgaccatactctaattgagttgttgaatgccatgttagacattgcgaggctttccaagaaatggtggggtgaggccatattgattgtgttatatcttaaatagaatttctattaagaacaaagaagtaacaccattcgaggaatgggaagagaaaaggttgattctcttatatatattggcgtgcctggggatgtttggctaaggtcgatgtgcctatagtcaaaaagctcaaacttggaccaagaaccgtagtttgtgtgtttcctagttatgctatctatagtatgggaaattgtaaattctggggtaacagacatgcatgttggtataattttttagtccagagatgttacatcttttgagaatgaatctccggtgaaagatgaaagatgcatctacatttctagtcaagaacttattatattccctgagtcttttctgctgattgaacacaatgaacaaacgtatgtggaaaatcctcccaccgtcaacaacgccccctcccccgtgcactccctgtgggccttttcatcaacatttccccattaagtgttggtatttcttaacgacattactagatatataattcctagca

SEQ ID NO: 15773 - DNA, 513 bp, Oryza sativa
  Clone ID: PAT_MRT4530_21586C.1
atggagctgtggatagtaaagtacattccaagggaaatagatctgtgcaagcagtctgaaaccaaatggcaggctcctccgtcgggttgggccaaaataaacgtcgatggagccttcgtttcacagaccagcaaaggtagtgtggggattgttattcgagaccatgaatgcaatgtccttctctctgcttggagcgtcatgagatattgcacgtcggcagaggaagtggaagctacagcttgccgtgacgtgatggtgttaattaagctggcgaatgaatggatcaagatgccgctgatcctcgaaacggactgtgcaaatgttagcagtgtcctgaaggcgacagaagaagatagatcccagctctggaatatttttcaggaagcaagattagctttagctttgtctcacaagtatcagattgtctccgtaccaattcgtccacggtatggcgtgcccaggccccagggagtgtgtctgagctgctggctctggattgtaatcatgttaact

SEQ ID NO: 15774 - DNA, 2266 bp, Oryza sativa
  Clone ID: PAT_MRT4530_21587C.1
ccggcccgggccttcccacacgcgcacacacacagacagacaagaggagtgagggggaagaagtgcttgacttcaccaccaatggcggctgctgcggcggcgctcttggccttcgtcgccgtcgccggcgccttggttgcgcaggccaccgacccctacgtcttcttcgactgggacgtctccttcatcaccgcttccccgctaggccttccccagaaggttatcgcaatcaacaagcagttccctggccccgtcatgaacctcaccaccaactacaatgtggtcgtcaatgtgctcaacagcttggatgagccattactcatcacttgggatgggatccagcaaagaaagaattgctggcaggatggtgttcttggcacaacctgccccatacctccaggttggaactggacctacaatttccaagtcaaggaccagattgggagcttcttttacttcccaccccttagcctgcagcgtgctgctggtggtttcggaggtattactgtcaacaaccgcgccgtcatttctgtcccattcgacacaccagatggagatatcaccttgttcattggggactggtacaagaagagccacacggacctgaggaagatgctcgatgatggaaaagagctcgggatgcctgatggagttctgatgaatggcaaggggccgtataggtacaatgattccctcgtccctgctggcattgaacatgagactatcaaagttgaaccaggaaaaacataccgtttccgtgtccacaatgtgggtatatcgacgagcttgaacttcaggattcagaaccacaatttggcccttgttgaaactgagggatcatacacaatgaagcagaatttcacaaatcttgacatccatgtgggacagtcctactcatttttgatcaccatggatcagaatgcaagcagtgactactacattgtggccagtgctaggtttgttaatgaatcactgtggaccaaagttaccggtgttgcaatcttgcagtattcaaattcaaagggaaaagcttctggccctcttcctgatccaccaaatgatgagtacgacaaaactttctcaatgaaccaggcacgctccatcaggatgaatgtgagtactggtgctgctcgtccaaatcctcaaggttcatttcactatggctctatcaacgtcagccaggtttacaagctcaggaatgaaccacctgttactatcaacgggaaaaaacggactacactgagtggtatctctttttccccacctgatacccctatgaggttggcggatctctatgacaagaaaggagtgtacacgcttgacttccctactatgccaattgatggaccgccagtgatgaaaacttctgtcattaactccacatacaagaatttcttggaaattgtatttcagaacaatgacacgaaagtccagacctaccatatcgatggatatgcattttgggttgtagggatggactatggtgagtggactgagaatagccgtgggacttacaacaagtgggatggtgtttctcgttgcaccacacaggtattccctggagcatggactgctgtgatgctgtcacttgacagcccgggtttttggaacgtacgcaccgaaaatctggacacatggtatcttggtcaggagacatacatcagggtggtggatccagatggaggctataatgtcactgagatggtggctccagataacatgctctactgtggcctcctcaaggataaacagaaggctcagaagcctcatggttcatcaagttcatcatcctctgctgcatcaccaaaccgctattggcttgcagttgtggtgtctctggtagcggcggtgttcgtccaatgaaaatatttttcctgttagtgccctgttggctgttgtttgcaaattaggaaactgacagaattcgggtaggtcgaaaaatttgtaggttccatgattcgtgtggaatactgtcattgtgcatcggcaaagtttgtcggaatttaacagagattgtgtaaaccattgcattgagtctgtgtgtcggcacctgcaaggagtggtgcctgagagtgtgttttctcgcatcgatcgacttattagtagagatctggatattgatgattgtcattccatctcaatttagtactactagctagagaagtttgtctctcctgttcctgtctctctgtatgaagttgcagatactataatattttggggcttgcaactactgtactttacaacaactttactggcaggcttg

SEQ ID NO: 15775 - DNA, 207 bp, Oryza sativa
  Clone ID: PAT_MRT4530_21588C.1
atggcgagggccgtggcatccagcgttcaacgagcagggccatggggtgtggcgttcaagaagcagattgtgccggagcccgctgccgcaagcctccacgaggagaccgagggtgggcgggtattcctcgccagtaggtctagggcgacgaggccaccacccattgtccatggcgagggtcgtggcagccgacaaggagggggatga

SEQ ID NO: 15776 - DNA, 165 bp, Oryza sativa
  Clone ID: PAT_MRT4530_21589C.1
agcccagtgcacacccccaaaatggaggaggtgtgcttgcagggtggtgtgggagtggttgaccacatggctgccacacatgggagggaagatggaaaagactggtggcgtgcagacgcggacagtgacctgctgcgtgtgtgtgggggatgcaggattagcttg

SEQ ID NO: 15777 - DNA, 1006 bp, Oryza sativa
  Clone ID: PAT_MRT4530_2158C.1
atggcgccaacaagtagcactgaggaggtgaagcacctgacgcttcaccacttgttgaagcggcagcaccggctcaagcccgccgccgtggtgtggagatggccgacgtcggtggtgcccggcggcggcgccgggcggccgccggtgcccgacgagcagctggcggcggacgacgtggacggcctgggcgggacgtggccgccgcggtcctacacgtgcgcgttctgccgccgcgagttccggtccgcgcaggcgctgggcgggcacatgaacgtgcaccgccgcgaccgcgccaagatgcgcggccacggcctccacggcgccgccgggcagcagctcggcgcggcggaggcgcctgccgccgccgccgccgcgaggacggagtacgccgtggcgctgtaccccatcctgaactccggcgcgggcggcgcggcggtgcgcataccgcacggagacgtgctgctctccgcgcccgtcgcgctggcggccgcgcgccgtggccatgatcaccggtgcatcgatgtaggtgacgacgagaacgacaagaagattgacctggagctgcgccttggaatcctaatgacgattaaaaggagggacgacaggcaggccgtgaagcaaacgagcgaggcggttgccgggacttctagaaagagaagcagcgggcggggggtaacgaccaaatttggttatatcagtatcggagatgaggataagaacaaagcagaatcaaaggtggagattgatttgagaacagagcaagaatcagctggagtccggatcggctacgatcaggatcggctgggtccgagtcagactggagggcaaccaattaggttagacatcgatgttgacttagattatatgagatatctaccactctatgaaacttccagcggcttgattcctgccttcttgacggagcgtggggctcctcaccgggagaccgcgcaggcccccctttgccggttcggccgggggccctgggttcgggccgctgagaagc

SEQ ID NO: 15778 - DNA, 1066 bp, Oryza sativa
  Clone ID: PAT_MRT4530_21590C.1
ctgcaggaattcggcacgaggcttgttcggttatttaacagtggagctagttgatatcagacgctgtgccattgtcactttgactaaactcatacctacggtgcaggttggtactcatgtttcggttttggtgcatcatctaaagctagttttggatggaaacaatgatgatctacggaaagatgcagcagaggcgctttgttgtcttgcacatgctcttggagaagattttacaatattcgtgtcatcaatacacaagcttcttgtgaagcaccatatgcggtatagaaaatgggatgagattgaaaatcgattactaaggcgagagccactcatctctgagaacttatcagtacaaaagtacacacaatgcccgcctgaagtcattagtgaccctcttgatgattttggtggtgttccttctgaggaggctgatgaaacacagcggcaaccaagaagtcatcaagtcaatgatgttccgactgagaagtgccggtgaggcttctcaaaggagcactagagaagattgggctgaatggatgaggcacttcagtattgcgcttctcaaagaatcaccatctcctgctttacgcacttgcgcaagactagcacaacttcagccttctgttggtcgtgagttgtttgctgcgggctttgcaagttgctgggcccaaatgaatgaaacatcccaggagcaacttgtgagaagtctcaagactgcattctcatctcagaacatacctccagaaattcttgccacacttctgaacttggcagagtttatggaacatgatgagaagccgcttccaattgatacaagactgctcggtgcacttgctgaaaagtgtcgagcatttgcaaaagcactgcattataaagaaatggagtttgaagctgtatgttccaagaagatgggtgcaaatcctgttactgttgttgaatctcttattcatattaacaaccaattacaccagcatgaggcagctattgggatattgacttactcacaacaacatttagaagttcaattgaaggagtcctggtacgaaaaattgcaccgttggga

SEQ ID NO: 15779 - DNA, 216 bp, Oryza sativa
  Clone ID: PAT_MRT4530_21591C.1
atgggccggggttcactggttggcgccgcctgtttcctttgcttttctcccttcgtgtgggtgcgttggactggttggcatttggaggcgctgcaagaagaagagtctgtgagtgtacagcgaaggggtagagtggagaactcaagccgagaagggaagggacgtgttatgccgtgttctgcgtatgtgtggggcgagggaaaaatccgatgctaa

SEQ ID NO: 15780 - DNA, 367 bp, Oryza sativa
  unsure (1)..(367): unsure at all n locations
  Clone ID: PAT_MRT4530_21592C.1
gacccacgcgnccggagacancaaaccaccngcacgcggaggggaagaccgcacngancgccccaggncccggaggagaagaggcaaaaacacccncgaaaagcaacaccgcaaggccacgaaaaagcaccggcaccgccagccgaagccaggcacaaaccccccccgcaggacagcggccccaaagaagcaaaggcgggggggggggacacaaaggcaccaccnnccncngcgccaccaccgcgcgccgggaggacccacccaagcacaaacagcgcaccaagcgcagngaagngccacgaaccccacnggnacagcgcngccggggcggaagcgacgacaagngaccngaggacaangaagaagg

SEQ ID NO: 15781 - DNA, 390 bp, Oryza sativa
  Clone ID: PAT_MRT4530_21593C.1
atggctcgacaagacctatcggactctaacaccttctattcaaagaaacgattccttactgatcagccgatttcctcaattcagaggtaccttcccatatacttgagggtatactgtatccatatatctcacgaccccaaggataagaggctgactagtggaggcgtaatggttgatgagtgtgggatgacaacaattgaccttaacaacattaggtactcagatgaaccattcatcttagccaatgatgtaacacaagttttctatgtaaaggacatgtgtagcaaaccaaagaaggggaaagggctcgacaagccaaagtgccacatggttctcccaaggaaaaaggaggataagacagatgaagattacgataagtttgacgggtaa

SEQ ID NO: 15782 - DNA, 303 bp, Oryza sativa
  Clone ID: PAT_MRT4530_21594C.1
tttttttgttttttttttttttttttttttttccttttttttttttttttttttttttttttgggaaggccacttttccttaatgcactgaactcttcctgaccattgattaccccctaaaagcccagcccactggacccacacacaaaacaaaacaggtttaccggtccatattactccgaaaggaccggcttaatacctttctcccgggggggcaaccacaagcgggggcccccacaatggaggggccaccctaaccccttacctaaataaacagccctaattaaataaacacccctccgg

SEQ ID NO: 15783 - DNA, 697 bp, Oryza sativa
  Clone ID: PAT_MRT4530_21595C.1
tctgagtacaaaataaaatacaacaaagattaatgatgcagttatctttttttacctgaatttgatttttctgaactaagtgttttctttcttctattacctaattttgatgtctgtgttttcacttcacttatgccatctttctcccaataatatttggctaagctacattaggaattctcgattagctgaacctagtctttattctttttcttttgtgaattgaacccatatgtcaagtagtgtatgctatattaactgaaacctttcctgttctatggatgtttataaaatagaatttgttgtttaagattcagatagttttttattttaatttgtacttggatgtcattacaagtaagtgtgcctgacgtagtgtttattgacatttgggaatctgtacaaattgtgttgttttgggcttaagaacaatgggtagatacttcacattataatcatacttcacatttactaatcaaacggttcaatgtaaaagttactcatgctcaccaatttcataataagttgattactgaaatgttgatttcttctaatattttaatgttatttaaaattggcagaagaatgaattttaactctttccccttgtgcattgttcgtacttttgatctgcttttgctcctgaatttgatctttgaagttttcttgtacctgcaactttatcactcttctccat

SEQ ID NO: 15784 - DNA, 1532 bp, Oryza sativa
  Clone ID: PAT_MRT4530_21596C.1
cctgcttcttgattgccaataagggtttcatcgaggtttcagccggatcaaactggctggcacgcccgcatctcatcaagatttggatctgcacaagagctaagcagatctcccaagccgccgtcctccctccctcgcgcctccctcgtctgcacccgctggcgccgcctcctctcctccgccgccttcctccgccgcttccgcgcccgccaccggcggccaccactcctcggcctcttcaaggaagattcagtataccccatcttcatccccacgctggactcgccggaccgcatcccgcccgcgcgcttctcatggcgggtccccggcggcagcggcgaggactaccaccagctgttcggatgccgccatggccgcgtccttcactacagccggaggcggcgcctactcatggtgtgggatcccctcaccggcgaccgccgcgccgtggatatcccggcgctgttccatcgctgggacatggtcgtctaccatgggtcggtgcgctgcgtcgacggcgacggctgctactccaacccattcgaggtggccgtggtaggaactgacacgagcgggacagtggcgttcatctgcgtttactcatccaagaccggcaattggggaaatgtggtctcagccccgattagtcctggggattacatgtcattttccagtatcctggatggggatttcctctactggttgctgggaaatcatgggtgcccaatccttcagttcaatttggttaaacagacagcaactctggttaacgcgccaccggatttgcgtaccaattcgtatggcggcttccatattgcaccagcagaggatggtggtgggcttgtaatccttgctgtgacacatttcagtctaaatgtatggaagggtaagaccaatcgtgatggtattgctggatgggtgctggagaaaaccattgaattggacaggctcctttctttcggaacaggacctgagacatgggcaccagtgattctgtgctttgcagaggaacatgatgtggtatttttgagcacgcatgttggtttcttcatggtcaatatgcagtcaatgcaattcaagaatattccccaaatcctgaaaggaggcctgtattatcctttctctagcttttatactaaagaagccgcagaactgttgcccccatgtgatatgtccaagaagcctaaggttccatttgctggtgcgttgcctgatattgaagaatatggttcaaatattggagagattagttgctactaattctggtccaaggcataagaagaagataaatccaaaacaaaccttttatgtgggctctttacaagtggagatcgatccaaactaatggttcggtcatgcttaattgaattaagtacctatcagtagtaacctagccgcattagtttattccttatgcaggtgctagctttgtgtccttttgtgtttgctgtgaacatgtgattcgatgttgtctatctggtgaaggaaaactgaagaatcacttcactttggtataatgtgtcatttgtgat

SEQ ID NO: 15785 - DNA, 549 bp, Oryza sativa
  Clone ID: PAT_MRT4530_21597C.1
ttacgccatgttggtggtcctattttctccacccatggcgaggggacagcgcggcgagccgctgcccatggcgaggatgccgtcgaggtcggggggtggcgcgtaggacggcggagacggggctcgaggacgacgagcaagttggagagtgctgagaaggatggggacagagtggagagcattgtcctcgagggagtcgaaatagatgaaggggaggaaggaggtggagtggacgaagtggcagaggatggcgagggacggtggtgcgaagacagaggagactgggaagaagaagatgaggtgtgcatcctcgaacatgttgccatcgtcgccggcgacgctggtggggaagtaggagtggcgaccaagacagtagtggagctcggtggagaaggcgtgatgatgacggcggaaggagttgggagcgccgaagctgtggagatcggcgtcggcagcggatttccgccaccgcgccgcgccgctctgctcaccctcctcccttggcagcggttgggcctctcggcagtgggcctgaggtggaggaagtag

SEQ ID NO: 15786 - DNA, 1354 bp, Oryza sativa
  unsure (1)..(1354): unsure at all n locations
  Clone ID: PAT_MRT4530_21598C.1
cggagtcggagagagacacaagccaacctcgnaactcgnaagcagnagcaaacgcgaagcagaagcaagcgccatggacgccgagatggccatgggcgagagcttcgcctactactgggagacgcagcgctaccttgagtccgaggagctcgacagcatgtacctgccgacgcaggatgactccaactacgagtcgagctcgccggacgggtcgcactcgtcgtcggcgccggcgccggcggccgtgggcggggacgcagccgccgcggtggcgggtagcggtggcgggatgacgacgatgatgatgggcggcggcggcggcggtggcgacgacgccggtggcgcgaacaagaacatcctcatggagcgcgaccgccgccgcaagctcaacgagaagctctacgcgctccgcagtgtcgtgcccaacatcaccaagatggacaaggcgtcgatcatcaaggacgcgatcgagtacatccagcgcctgcaggcggaggagcagcagatgctccgggaggtcgccgcgctcgagtccgccgccgcggcgagcgccgccccggccgcggcgaacccgttcgccggcctcggcgccgacgaggaacacgagtacggccaccaccacccctcgtcgtcgtcggagcggacgaagaaggtgaagcgggcgctgtccgtgtcgtccatcagcgacgccctgctcgccgcggcggcgccggcgccgccggtggagatccaggagctgcgcgtgtcggaggtgggcgacagggtgctggtggtgagcgtgacgtgcagcaagcgccgcgacgccatggcccgggtgtgccgcgccctcgaggagctccgcctccgcgtcatcaccgccaacatcacctccgtcgccggctgcctcatgcacaccctcttcgtcgaggtagatcacatggatagtgtccaaatgaagcagatggtggaggctgctctctcccagcttgtggcgaccggcagtccgttgagctccatgagctattagttatgagctggatagatatatggagtcatgcgttttggccacctactttacctagtctcattcgcaataaagcgcatttttatgtatgcttggtgatgttgtttgtggcctttttgggaccccccaccaagggatgggggtggttgttttcttgcgggggcaacatttagtgggttgatgataaatttaaagtttttggaaatcctgaggacgctggcttggttttggtgcttttaataatggtgcaatataagggggtgcacggtaatggaaacaaaaacgggggagtcgaacctcacgtgcagccagcaacaagtccacctccgtctcaagctttcttgcgcttaa

SEQ ID NO: 15787 - DNA, 243 bp, Oryza sativa
  Clone ID: PAT_MRT4530_21599C.1
atggcgtttgctgaattggctgcaagacctgtcgtctgggtggtgtctgttgaactggttgcacaacctgttggattgggagtgttgactgaactggttgaacaacctgctgccttggcggtgtttattgaatcggctgctgctgggtttgatcaatggtgtgctgaggagggatttattctttggcctggagccgaaggtggtggagcaggtgcaggaagcgacaccagtgctgccggctga

SEQ ID NO: 15788 - DNA, 166 bp, Oryza sativa
  Clone ID: PAT_MRT4530_2159C.1
gcacgaggggagtcgatcgatctcaccggtcccaatccgccgccttctccttcgccgacatgtagagcctacacctgcagcgtcccgcggtcaccctctacccgctcggaaacccagcgccgccgccgccgcgccgctggtgccgctcaccactgtgcccgctccc

SEQ ID NO: 15789 - DNA, 287 bp, Oryza sativa
  Clone ID: PAT_MRT4530_215C.1
gggggtgctgctccagtaaaaaaaaaactttttttagtctcttctaatataaaataaaatggcagagctcctacctgcttctttgaaaaaaatatactgaactatttgagagagcatggaaaacaagttaaccaagtatattcaatagaaattctttcggtagtgatcttacacgcatggcatgtaacggtgccctaagagcaaggctaatagtatagcccattgccggctacactccattttatagccaacgctgcagccaactgctcataacagtaggtttgtct

SEQ ID NO: 15790 - DNA, 302 bp, Oryza sativa
  Clone ID: PAT_MRT4530_21600C.1
atgatcctttttgggacgtcagagtggctagcgtcgtcgtgcaactggacggcgccagcctctctggcgccgtccccctgccgacgtggcagggcgatgctgaggtggctagggggagcgcgccagagtggctggcaccgccccagggaggagggcggcagcatggcgggcgtcgcccccctccccacccctcacctccattcatgtttgccacgtcggcagggggacggcgccaaagaggttggcgccgttggacgatggcgccagccactctggcgccccaaaaaggaccatttctggga

SEQ ID NO: 15791 - DNA, 443 bp, Oryza sativa
  Clone ID: PAT_MRT4530_21601C.1
agcactgatttttctcaaggtgcctcatactgtacctaattattgagtaaagtccatcaccggtctctaaactttaccgttgtgtcatcccggtccctaaactcgcaaatcgaccgttcaagtcctcaaacttgttcgactgtgtcatcccgatccctaaacttacaggtcactcgtttaggtcctccaatttgttcagttatgtcaccctagtccctaaacttggatttaaatatcatctgggtcaaataggacgagaccggggtgacacaactgaacaagttggaggacctaaacgagtaatctgcaagtttagggactaggatgacacagtcgaacaaactatccaaatgtgtttgcacaaaactacattaaaaaaaagctcgatcttggggaaagaaaaaatagtcccttgggggacggagattaaaactcccacccct

SEQ ID NO: 15792 - DNA, 528 bp, Oryza sativa
  Clone ID: PAT_MRT4530_21602C.1
atggggccgaggatgagattgtgcgagtgcgacgatgcggtggggaggaagatgtggacaaagagggaggagttcggtcgatgcggacgtccttggggggcaatgtggaggtcctcccgccgctactgttaccgtgagcgactagagcatgtgtcggaggaggagctcgatgtccgtcattgctcactcggatgtgaatggtggcagcagccggctaaaggaggtgggtggggcatgagggaggcggccggacttgagggtgggaatagggacggcgaccggctggggaaggcggggctcgatgtgaaggtggcgccccgaacgcaaggctggagcaaggcgacgtggagaggggtaacacctacggtggcaatgcctcctcaaatgaggcaagctgagcttgccctgctgctggcctcccgggcatcgatgtcgctcgagccacgcgccatcgtcgcttgtcgcactacaaagcaccacccatcaccgacccctcgccggaaacgccgccgccccaacttttgctag

SEQ ID NO: 15793 - DNA, 427 bp, Oryza sativa
  unsure (1)..(427): unsure at all n locations
  Clone ID: PAT_MRT4530_21603C.1
aactcactcttccaattatactnnnaaactcgccgcccaagaaaaacactgaaccttcgccttcctcctcgcccgatcgacctttggatggcatcactagctagctccaaggggcgggtgatcgctacaagcttcgtgggccgcgtcctgaccggcaaggccgcctcccctcggagatttgtgagcgcttcaacctacgacaagaacgttgaagagcacgttctcccggcggtggtgccggaccatntgatctgcaacgactnaagccctnacaagtacttttgccctcacccgaccaccggcatgatcttaccaanggcggtggacgccaaggcggcggccgccgttggcgcgacgaaggccgacgcgaatggtggcgccttcgtgctcgaccagaaagtcttggttcccccccctcaggacgttg

SEQ ID NO: 15794 - DNA, 1520 bp, Oryza sativa
  Clone ID: PAT_MRT4530_21604C.1
gcacgaggcttctcttcgtctacggatgccgttgtcatcgtgggagccggaatcgccggactcgccgtggctctcgggctgcacaggtgggaaactgagggggaaaggggtgaagtgcacggtgctagagtcgtcgccggagctcagggcgtcggggttcgccatcgcgacgtggaggaatgcgttgcaagcgcttgacgcccttggggtaggcgacaagatcaggaagtgtcatctgcatcttcaggagttgcatgtcttctcttcgttcaccggagagatggcacatgcaacgtctctcaatgagcaggggaaacgatgcagaggacccaacgaaatgctctgcgtcaggcgggactggctactgcgagcactggaggaagagctaccagaaggcaccatccgctactcctccaagatcgttgaaatcgaagaggacggcgacgccaagatcctacacctagccgacggcgcaattctccgagcaaaggtagtgatcggttgcgacggggtcaattccgtggtggcaaaatggctggggctcgcaaagccgtcctactcggggcgcttggctacgagaggcctcgcgtgttaccctggcggccacggcttcgatcccaagttcaagatgttcttcggccatggctttcgtctcggcgtgatcccctgcaacgatactgatgtctactggttcttcacctggtctccttctgagcacgatgatgatgctctcgccaagaataagaagttcatgagtctgatcatgttgagcaggccggtgttcctagacggatggaggtcatcgagaggagcgacgcgaagcacgtgctcaccgcgccgctgcgtttccggccgccgctctcgctgctgctggcgagcatccgcaaggggaacgtgtgcgtcgccggcgacgcgctgcacccgatgacgcccgacctggggcagggcggctgcgcggcgctggaggacggcgtcgtgctggcgagatgcctcggcgacgccatcctcggcggcggcggcggcggtgcggagagcgagaggatcgaggcgggtctgcgtgagtacgcgaggatccggcggtggaggagcgccgagctcatcgggacagcctacgtggtcggcttcatgcaggagagcagcaatgcggtcatcagctttctgcgtgacaattggttggccagagcgctggtgagaaagcttctgaaaatggcggactattactgtggcaagctctaaacccggtggactcggcgtcgtccccaaggaaagaaacctgcgaaaagggggtggggccctggggcctggacagggggggcttggggggctgggtgaggaggcgaagggacgccgacgacgaggtggcggcggcggacgccatggatggaggagagggtggcttcccagggtttggaggtcaggcactgggcggcggtgagggcgccgcggcgaggcggcgggggcaacagggaaggcgagcgttcaggatgcggctgccaggatcgccggagaaggcggcggcg

SEQ ID NO: 15795 - DNA, 891 bp, Oryza sativa
  unsure (1)..(891): unsure at all n locations
  Clone ID: PAT_MRT4530_21605C.1
tctgttcatggcnatttcatccatagaccttcacttaggtcctcacccttatcactatctacattagaagaagtcccaaggattgagcactggaagtggttcagcttctcaacaaggcttgggtggatagccaatggaagcgaaatgaagtgagagtaatctagtattggacttttcacggcctcttcaagaacctttgcaattttctctgaagcctttctaatatcttcagtagttttagcttcaagaacaacacatgtttcctccttagaagatggaaatataattttgaccccagtttcatcttcaatctgcttctgcatggttccaccttttcctttcacaaagcgcatcagaggagcatctacctgaacagaagaggaacacttttcagatagattggacctatctatgtccttattgaagctagcatcctccatagtatcttctgtggctaatttattttctggcaaggatgcgttgtaggtggaaacttcaataacaacattagttgttccatctgaggctgaattctcttccacttgtttgcttacaggacctgacatctcattaaggtcagcttttggagcagcggcttctgtggagattggcctccatctctgcacagcagactttcttttcttgtgttttgccgaattatttgaggctccttgtgcacctttcattacaagtgagtgaatactattttgattaacagatccctggaggaagcgcggcgcggaacccgcggcgcatagagggcgagcgagccgactaaaccttgcgagggaagcgcaagccaacatgggtggtgtggaggccgcgcggctcagagacggcggcggcggcggcggcggcggcttccggtttagcctgcctgctcggctgccc

SEQ ID NO: 15796 - DNA, 1745 bp, Oryza sativa
  Clone ID: PAT_MRT4530_21606C.1
atggcaccaaccgtgttgcaacaaaaggaagctggcgaggaggacgtcgtcgtcgtcgtcgtgggagccggaatcgccgggctcgccgtggctctcgggctgcacaggaaaggggtgaagtgccgggtgctggagtcgtcgccggagctccgggcgtcggggttcgccatcgcgacgtggaggaatgcgttgcaagcgcttgacgcccttggggtgggtgacaagatcaggaagtgtcatcttcatcttcaggagttgcaggtcttctcttcgtccacgggagagatgtcacatacaacgtctctcaatgtgcaggggaaacgaggacccaacgaaatgctctgcgtcaggcgggactggctactgcgagcacttgaggaagagctacccaatggcacaatacgctactcctccaaaatcgttgaaatcgaagaggacggcgacgccaagatcctacacctagccgacggcgcaattctcagagcaaaggtgctgatcggctgcgacggggtgaattccgtggtggcgaaatggctggggctcccaaagccgtcctactcggggcgcttggctacgagaggcctcgcgtgttaccctggcggccacggcttcgatcccaagttcaagatgttcttcggccatggctttcgtctcggctgttggcaatagtgatcccctgcaacgatactgatgtctactggttcttcacctggtctccttctgagcacgatgatgatgctctcgccaagaataagaagttcgttctgaccaagctgaatagcgcggagatcccagccgaggtgctcgagatcatcgagaggagcgaggcgaaggacgtgctcaccgcgccgctgcgtttccggccgccgctctcgctgctgctggcgagcatcagcaaggggaacgtgtgcgtcgccggcgacgcgctgcacccgatgacgcccgacctggggcagggcggctgcgcggcgctggaggacggcgtcgtgctggcgagatgcctcggcgacgccatcctcggcggcggcggcggcggtgcggagagcgagaggatcgaggcgggtctgcgtgagtacgcgaggatccggcggtggaggagcgccgagctcatcgggacagcctacgcggtcggcttcatgcaggagagcagcaatgcggtcatcagctttctgcgtgacaattggttggccggagcgctgcccgaactctgccgcctgagccttgcctttggtgctcttcctcatcatcatcgagccatcgttgccccttctccgctggatccacccgcctcagcccgagctccacactccttccccgtcgcatccacccgcctcagcctgagcttcgccacccatcccctactgaatcctcccgccctagtcctagctctgacgcccgggcccagctgccatcgctcctcatcatcattgtcgaggcgtgcgctaccgctccctctcttggcacgccgttatcgctgctccgttcgtgtgcagctttcgtcgtcgctccctttcttcatgcgcaaccaccgctccctccctctccacaccggcgacgctggcaccactgtgccatccctctacgtgcgggggctcggtggcagcggcggcgagcaggtggtggtggcggcggtgggcggtggacctcgggtgacgggcgcgggagcaactcaaggttgcgcgtcgccttcgttttttgcggtggcggtgggctcgtcttggcctcgaggcggcggcacgaagtga

SEQ ID NO: 15797 - DNA, 2247 bp, Oryza sativa
  Clone ID: PAT_MRT4530_21607C.1
atgtcggctccgacgccgcgagtctcgcgatcgccgcgtcatcaatcccgctcgcctcctctgcgccgtggtcgtcgtcggcctggcgacgcctggcacttgggtccagtcaggcgcgtggtcaaggaggtggggggctcagccaactattcgatcctcacgaagacgaactacagtgattggtccctcttgatgagggcgatgctccaggtgcgtggcctctgggaagctgtcgacacgggtgacgtcaacttccaggaggacaggatggcgttggaggccgtcctcaaggtggtccccgctgatctgctgccggtgctctctgtcaaggagacggcgaaagacgcctgggatgccatcaagacgatgcgcgtcggcgtcgaccgcgtccgcaagtcgaaagcgcaggagctgcgcaagcagttcaatgcgatcgagttcaaggaaggggagtccgtggaggaattctccgtccggctgagtgggcttgtcaacaaccttgccgtacttgggatccagcttgaggaatcaaagaagctgacggggcgtctgaggaacgccgaggagcgccgtcccaagaagaagtccggcgatgagggcgacaaactgtatatcacggaagaacaatgggccgctcgcgccaaggaacggcagtccggcgagggatcgtcgcgcaagaaggcgggtaacaaccgccgacaccgcgatgggcgaaagaaaaccgagggcactgccgatggcgagcgcggtgcgcgttacacgcgcgatcaagggcgtgacaagtgcaagaactgtggccgcctcggtcactgggcgaaggactgctgccagcccaagaaacaagtcgcggcacacgtcgcacaaggtgaggaggaagatgatgagctggcgctgctgatggctcacgcggttgagctggcgccacctccaccatcgctcccaccttcaactgaaccgctcaacctcgttgagcccaaggtgttcacacacctgcactgcgatgtcgacgctggtgtttggcatctcgacaccggcgcgactaaccacatgactggcgtgcatgacatcttctccgagctcgacacggtggtgcgcggcaaggtctgttttggcgacggctcggtggtcgccattgagggccaaggcaaaatcatctttgagtgcaggaacagtgaacatcgggcgctcataggggtgtactacatccccaagctcaacgcgaacctcgtcagcctcaggcagctggatgaaaatggctgcgacatctgcatcttccatggcgtctgcacgatccgcgacgctgcgcgacagctcctcgctcgcgtgcggtgtacgcgtattcggctgtacctgatcaagatcaccgtcgctcggcctgtgtgcctctcagcacgcacgcaggaggccgcgtggctgtggcatgctcgcttcggccacctccacttcgacgcgctacggcgcctcactcaacaagacatggttcgcggccttccacagatcgaccaagttgagcagctgtgcgactgctgcgtcatctccaagcaacgacgttcgccgttccccgggcagtctctgttccgggaggaggaccgcttggagctcattcatggcgatctttgcggtcccatctcgcccgcgacgcccggcggcaagaaacactttctgctgcttgtcgacgatgcaagctgctatatgtggctcactcttctacagaacaagggggaggcggctgcggcaatcaagcactttcaagcccgcagcgaggctgagtccggctgccatctcaagctcctccaccccgacaacgggggtgagttcacctccgccgagttcgccagctactgcaccgagagcggtgtcaagcgccagctcaccccgccgtattccccccagcaaaacggtgtggtcgagcgtcgcaaccaaacgatcttggcgatggcacagtgtctgctaagggccaagtcagtgccggcatgctattggggggaggcagtcatgacggttgtctttttgctcaatcacgcgccgaccaagtgcctggtggacaagacaccctatgaggcttggttaggtcgcaagccggccgtcggtcacctacgcaccttcgggtgtctcgtgtactcaaggacgttcagccacacatcaccaagctccaggaacgcggcaagcccatggtcttcctcggctacgttgagggaactaaagcctacaaggtgttcgacccgaagtcgggtcgcgttcaagtga

SEQ ID NO: 15798 - DNA, 7085 bp, Oryza sativa
  Clone ID: PAT_MRT4530_21608C.1
ggaggaggaaacgggaagagacccgcgagagaggcggcgccccgtttcgtccccaaaaccgatccattcattcgccaaccacgccgtccgccgcgtcgccggtagagaaggccgccgtgcgtgcgggagagaagggggaagcacaaaccgcgctcggggacgagagccgcgaggcgaaggtgtggggaggatcgggacgcggcgtcggcgtcggtctcacctccgggctacaagagcgagaggtagcagagggagagtcgtgaggtgcagccatgtcggcggcgcaagggatggcctacaagctccgcaccgacgcggcgcccacgggcgctggccgcagggctcggcgcagccactcctccgtggcggcgccttaccgcgcggctaggctggtacagggcggcgtgtccatcgagggcggtttggtcggcggatgccagctcaccgaggagcgcgtcgccgcacggccgccccgcgccgccgcgcgcgacgccgagccggtcaggccactttcgacgctccccgagagcagcattgggctgtacgacccctcgcgcgagcgcgactcgtgcggcgttggtttcgtcgccgagctgtcgggcgattacaagcgcgcgacggtcaatgacgccctcgagatgcttgagagaatggcgcaccgtggtgcctgcggctgtgagaagaacactggcgatggtgccggcatccttgtggctctaccgcataactttttcagagaggtgacaaaggatgctgggtttgagctaccgcagccaggcgagtatgctgtcggtatggtcttcctgccaatcgatgagaagcgccgtgagcggagcaaagctgagtttcagaaggtagcggaatcgctgggacatgtaatacttgggtggcgccgggttcccactgacaactcagacttaggtgaatctgcgctccagactgagccagttattgagcaggttttcctcaccaaaagttcaagttcggaggctgattttgagcagcagttgtatatcctgaggaggctctcgattctatctatccgtgcagctctgaatctccgtcgtggaggaaagagggacttctacatgtgttctctctcctcaaggactattgtctacaagggccagcttaagccatgccaacttaaggggtactactatgcagatctaggtcatgaaaacttcacaagttatatggctctggttcactcaaggttctccacgaacaccttccccagctgggaccgtgcacagccgatgcgtgtattaggtcataatggagagatcaataccctcaaagggaacaagaattggatgaaagcacgagaaggtctcttagagtgtgagaagcttggcctaacaaaggatcagttttcaaaaattctaccaattgtggatgctacctcgtctgattcaggtgctttcgatggtgttcttgaacttcttatccgtggtggaagaagcctgccagaagctgtgatgatgatgatacctgaggcatggcagaacgatgtgaacatggaacctgagaagaaagctctctatgagttcttgtctgcccttatggagccttgggatggacctgctctaatatcttttactgatggccgttaccttggagccaccctggatcgcaatgggttgaggcctggtcgattttatgtgacacacagtggacgtgtagtcatgggaagtgaagttggtgttgttgatgttccttccaaagatgtattgagaaagggtagactaaaccctggaatgatgctgttggttgattttgagaaccatactgtagtggatgatgaagcattgaaggcacagtactcgaaagctcacccatatggggagtggctcaagagacaaaaaatatacctcaaagacattgtagaatctgtgccagaaactgagagagttgctcctggaatttctggttcactcacacaaaagaatgagaaaaaggaacatgcaggcgtcaatgggattgtgactccactaaaagcctttggatacacagttgaagcccttgaaatgctgcttctcccgatggctaaagatggagttgaagctcttggatccatgggaaatgacacacccttggcagtcatgtcaaacagagagaagttgacttttgagtacttcaaacagatgtttgcacaagttacaaacccgccaatcgacccaattagggagaaaattgttacatctatggagtgtatgattgggccagaaggtgacttgttggaaacaactgaaaagcaatgcaaccgccttgcacttgagggtcctttggtgtcgattgatgaaatggaggctattaagaagatgaactaccgtggttggcgaagcaaggtgctcgacataacttatccaaagaagtctggaaggaagggcttggaagaaactttggacagaatttgcacagaagctcggggagctataaagaagggctacactgttttagttctctcagatagaggattttcctcagaccgtgttgctgtcagttcgctcttagcagttggcgcggtacatcagcatcttgtggccaatcttgagaggacgcgcgtaggtttggtggagtctgctgaacctcgtgaagtgcaccacttctgcacccttgttgggtttggtgctgatgctgtatgcccttatttggctatcgaagcaatttggtgcttgcagaatgatgggaagattcctcctaatggtgatgggaaaccctactcaaaggaagaacttgtcaagaaatatttctatgcttctaactatggaatgatgaaagttcttgcaaagatgggaatttccacccttgcatcttacaaaggtgcacagatttttgaagctcttggcctttcctctgaagtcatccgtaagtgttttgatggtacacctagccgaattgaaggcgccacttttgaaatgcttgcacgagatgctctacgtcttcatgagttggcatttccatcaagagcacctccaccaggaagtgcagatgcaaaggcccttcccaatccaggggactaccactggaggaaaaatggtgaagtccacctcaatgatccccttgcaatggcaaaactacaagaagctgctagagtaaacagccgggcagcatacaaagaatattctaggcgtattcaggagctcaacaaaacctgcaacctgcgtggtatgcttaaatttaaagacactgctgacatgatttctgtggacgaggttgaacctgcaagtgagatcgttaaacgctttgttactggtgcaatgagttatggatccatttctttggaagcacatactgcccttgctatggccatgaacaaacttggagggaaatctaatacaggtgagggaggggaacagccttctcgtatggaaccacttgctaatggttcaatgaatccaaaaagaagtgcaatcaagcaagttgccagtggaagatttggagtttcaagctattatctgactaacgctgatgaactgcagataaaaatggctcagggtgctaagcctggtgaaggtggtgagcttccaggccacaaggttattggtgacattgcggttacaagacactctactgctggtgtaggactgattagcccacctcctcaccatgacatatattctattgaggatcttgcacaacttatccacgaccttaagaattcaaatcctagagctcgcataagcgtcaagctagtttctgaggctggtgtaggagttgttgctagtggtgttgtaaaaggacatgcagaccatgtccttatatctggccatgatggagggacgggagcttctaggtggacaggtattaaaaatgctggccttccatgggaacttggattggctgagacacatcaaactctagtggcaaatgggcttcgtggccgagctattctgcaaactgacgggcagttaaaaactggcaaagatgtagctgttgcttgcttacttggcgcagaagaatttggtttcagtactgctccgttgatcacacttggttgcatcatgatgcggaaatgtcataccaacacttgccctgttggtatagctactcaagatccagtgctacgagaaaagtttgctggagaaccagagcatgttatcaacttcttcttcatgcttgctgaggagctaagagaaatcatgtctcagcttggcttccgtaccattactgaaatggttgggcgctctgacatgcttgaggttgatccagaagtagtgaagagcaacgagaaacttgagaacattgatctctcattgattttgaaaccagctgcagagattcgccctggggctgctcagtactgtgttgaaaagcaagatcatggtcttgacatggcattagataacaaactcatagctttatcaaaagctgcacttgagaaggaagttcgtgttttcattgagactccaatccagaatactaaccgagcagtaggcactatgcttagtcatgaagtcacaaagcgttatcacatgaagggattacctgcaggtacgattcatgtgaagctcactggaagtgctggtcaaagtcttggcgcttttctctgtcctggaatcacccttgagcttgaaggagacagcaatgattatgttggcaaaggattgtctggcggaaaaattgttgtctacccaccaagagatagtacatttattccagaagacaatattgtaattggtaatgtggctctatatggtgctactataggagaggcatatttcaatggaatggctgcagaaaggttttgcgtgcgcaattcaggtgctcaagctgtggttgaaggaattggtgatcatgggtgtgagtacatgacagggggtactgtggttatccttggtaaaacaggaagaaactttgctgctgggatgagtggaggcattgcttatgtttatgatattgatgggaaattcagcgtccgctgtaaccatgagttagttgatctctatcatgtggaggaagaggaagacattaccacattgaaaatgatgatagaacaacatcgacttaacactgggagtgttgttgctagagatatactctctaattttgatactcttcttccaaaatttgtcaaggtattcccaagagattataagagggttttggacaatatgaaggctgaaaaggctgctgctaagcttgcaaaggaaccaaagatttcaaatggtgtttctgtaaccactaagaaagtgcaaccggagcaatcaacaaaccgaccaacacgtgtttccaatgccaaaaagtaccgaggtttcatttcatatgagcgagagagtatttcttaccgggatccaaatgagcgtgtaaaagattggaaggaagttgcaattgaatcagtgccagggccactactgaacacacagtctgctcgttgtatggattgtggaactcctttctgtcatcaggaaagctcaggtgctggctgtcctcttggaaataagattccagagttcaatgaactggttcaccagaacagatggcgtgaagcactagatcgtctgcttgagacgaacaacttccctgaatttactggaagagtatgccctgctccctgtgagggatcatgtgttcttggcattattgaaaatccagtatctatcaaaagcatagaatgtgcgatcatagacaaaggttttgaagagggatggatggtaccgcggcctccacttcaaagaacaggaaagaaggttgccatcattggaagtggtccggctggtttggctgctgcagatcaactaaacaaaatgggccattttgttactgtgtttgaacgtgctgatcgtattggtggtctgatgatgtatggagtgccaaacatgaagacagacaagattgaaattgtgcaacgccgtgtcaatttaatggcagaagagggcattacatttgtagtgaacgctaatgtaggcagtgatcctttgtattcaattgagcgcctccgttctgagaatgatgcagtcattttggcttgtggagctactaaaccaagggatctaggtattcctggacgcgagttatcaggagttcattttgccatggagttcctccatgcaaatacgaaaagtttacttgacagcaacttggaggatggtagatacatatctgccaaggggaaaaaggttgtggttattggtggtggtgacacaggcacagattgcattggtacatctattcggcatggttgcaccagcattgtaaaccttgaacttcttaccaaaccaccaagcaagagagcagctgataacccatggccacagtggcctagaatcttccgtgttgactatgggcaccaggaagcatctagtaagtttggaaatgacccaagaacttacgaagtcctgaccaagcgttttattggtgatgaaaatggaaacgtgaaggcccttgaggtggtccgggtcaagtgggagaaagtcgatgggagattccagttcaaagaaattgaaggctcaaacgagaccattgaggctgatcttgtcctcctagctatggggttcctaggccctgaagcgactattgctgagaaactaggtttggagaaagacaaccggtctaacttcaaagctcaatttggaaactttgcaaccagtgtggatggcatttttgctgccggggactgcagacgtggacaatcacttgttgtttgggccatcaccgaggggcggcaagctgctgcagctgtcgacaagtacttgtcaaggaatgaacaagatgccgcagaggacataaccccctcgggtgcaggttttgtgcagcctgttgcagcataaatgaaacaggcaaacttttcaagaccagtgcaatctaaattaggatcaacgtttttagtctttgatcacagcaagttgtctttgaaagataaggccgggctcaatagggaaaagagaagagccttcttatattttggtagataaacaattggaaattttggtgtgttctgcttgttacttttccagtaaaatgatttgcatggtgaaatgccgttttgtaatctgaataataatgtacagttgttttggtttaattaatagatgtaaatttgtctaaaaaaaaaaaaaaaaaaaaaaaaaaaaaaaaaaaaa

SEQ ID NO: 15799 - DNA, 663 bp, Oryza sativa
  unsure (1)..(663): unsure at all n locations
  Clone ID: PAT_MRT4530_21609C.1
gacgtcgcatggcaccgccgtaccgtaagccttgggatccctctagnagnncggccgnncccttttgttttatttatttatttatttatttatttttattttttttatttttttttttttttttttttttttttttttttttttgggccctagcattcaaaacgggttttaaaaaaaacttttacaggacaaaacaacaacccaatggggggcaattaatttatttatttattaagggattctttacccgcatggccaacttaaaaggattcccccccattaaaaacgcctggggagcccttggtttgggggggggggaatgcccccaacccatccccctgggtaggctggagccccggagcccttttttttgaaaagcgaaaggcctttgctaaaacaacagtggggaaaacccggaaaaaggaaccctttcccgcaaggggggttaccaaaaagtaaggggttggcttgaaagcaaaggaaacccaaccttttttttgggccttttttacaacaacaaaggggggggggacaaaaaggagcgggccccaaaaaaactctccggtgaacaccggttttccattgggggtgacaacctgaaccggggcccggccttgagaaaaatacacgaagcggggagcggggagggtccaaaacggggaa

SEQ ID NO: 15800 - DNA, 371 bp, Oryza sativa
  Clone ID: PAT_MRT4530_2160C.1
ttaaataataacctattttttttttttttttttagggagcctttttaaaaaaatacagggccaaacacccaaacagatgccaccaacgaaaacaaacaagacaaaaaaaacgaccaggacaaaacaactgaaacaaattgacaacacaaaaaaacagccactgcaagaaccacacacaaaggaatggagaaaaaaaccaacatgaaaacaggagctacaaaggctcacacacaataagctacctggcaacaatactacaaccagcccaaacattgacgaaataccaaaaccgataaccgagccagttaacacaacacgaacacccaaaaaaaaaccctacaaaagtgaaagaattttttagaaaagccgac

SEQ ID NO: 15801 - DNA, 2064 bp, Oryza sativa
  Clone ID: PAT_MRT4530_21610C.1
atgcctactctagtaccgttcaagcgccggctctcctctcctccgggccgggcggcggcggcggcgtcctccgggccgtgcggcggcgcccttgaagacggcggcgcggcgcggatctggaagacggcggtggcgggaagacggctgtgcggcggcgccgggaagacggccgtgcggcggcgccctcgaccaccgatgtcggacgaagacgggagcagcggcagggtcgtcgcgacgtggagcggcaacggcgccctcaggcttccccggcggcgcggccgagagctccccggcggcagcctccggctctccctggcggcgcagctacgagctccccgacggcgtcgggttccgagcgatgcttccttcacgcgggccatatcaaggctcgctctggatgtgtttccccgtaacatacagtttgatcaagtaatcaaggtgtcgccgatcaatccagaggaaaaacgagtgggaggaggaagcagcttcgtcatgagattggaggcgcagctggtcgccgcggtggcacaggagctggggctgctcgaccaagaataccacaggctcaagcaaaggatggaggagacaaactatttctcctggggtgtgtcgggggataatgaaatgcgtgagtacttgttttgggaaatggctcctcggatcaacgccacactggacagtaagaggtacctgctggtggttgagaacctgtacaagcccatcacgaccagtgctttcacaaccgagttgcggcttcctcctgctaatgcatggtcgggctctgaatgggtggtatccgccacctcccgagaagtctgtagcaagagcaagtccgaaggtgatgacgtgtatgagtcattctctggtgctgatatcatggttcttatcctctttgcgctgcaccaatcagccaaggacatctccaaggcagtggggcaggaggatgacgtggagcactggcaccgcgttgccctccgaaagctggagcatgtggagttgagggaccttgatgctttggaggaactggacctatcagctacagctatcaaggaactcccagctgagatccctaatctacctcagcttaggcgattgcttctcatggaagattctagattgttttacagtttcaacataaacaccagaaggctagtagaatatggagagtttttccaagatttctatgttcaaattgcccaatgcaagaccaatattaggaggttggaggatgaacaagacatgatggccgacaagttgacagaactagcaaataagaaatcaccatatggtgatgtgtaccgtcgttatatggcgaaggaattttcagtggttgccattgcgcctcccattcgccaaaccaagcgtcatgtggagatgtctgcaacgaatcggtatccccatggtttatattctcttctacaagttgccaaatcgatttctttgatagatgatatttatgtctcctgccttactaaactgagctcctttgacaagttggaggactgcaagcttcgctcatgccatcacatgaagcatgttttagaatatgcatattccatggggcaatctctacaaaatgttcgagtgtctcagctccaaagtctaattcatttctacaaacctttggagtacaatgatacttcgaacttcgattccctgaagcacctgcacctggagtactgcccaagactagagcgcatcgtgccacgtgagtctgcactaccaagcctcacgacactcgacatcctattctgctacaacctcaagacaatcttctaccaacatccttgtgagcaacccatcaactatcagctccctatcctccaaaggatgcgcctcaggagttgccactactgcagcacctccgcgatgatgtcaacgccgccatatccgcaccggcgtggaaggagctccatgtccgcgggtgctggagcctacgccgtctcccgctcctccgccaagaacattcaagccaggcggtggagcgccagctataaatccaagcttcccctgccgtttgcctccttcaacgagcgcgccacggtgatgagctacctcaggtga

SEQ ID NO: 15802 - DNA, 330 bp, Oryza sativa
  Clone ID: PAT_MRT4530_21611C.1
cccactcgtccgaccctgaccatggttgtcctgtgtaccccggatgcggcgggttaagacctcgttaagccagtcaccggagctggacgcgtactgtttccccgggttgcccgcgacggatttgtggcacatagggcgagcggacctgagacgccatcagacatgtctgacaagatgtctgagagcactcacaaggcaaaggaggcttactcagaggacactgctagcggacactgaccggttacctggcaccatgtgtatgagctgagcgaggtatccagccacacgcgcgacaagatgaaagagacctgcgacccgatcgaggactac

SEQ ID NO: 15803 - DNA, 824 bp, Oryza sativa
  Clone ID: PAT_MRT4530_21612C.1
gaatttaattttcctccttttccccgtcttcccatcgctcgccggcgaccgacatgaactccggcgagcctcctgcctcgtcctccctcggcaatgccggagaggaggaggaggaggacgacttctactgggacgccgaggcggaggccgagctgcaggccatcgaggccgcttacgccgccgccaagcgccgccgcctccccgactggccaagccccaacccggtcaccgcatccgcatccgcatccgcatccgggggttgttcccccgcgccgccatgggctccctctcctcccgctttccgaggtaatgtgaaggcaaggtaccaaccagtaatgttcaatggcagcatagtgtactgcaggaccccttcaaaagtggagaaagccacaagggacattttatgcaaaattgaaaccatgaaggcctctggccaggtttctcttggattcgatctcgagtggaggccctttccgagaagagtgcaggttggaatatgtatagataatgacgcaaggaaaatgttcaatgactatgatgtccatgtacagccattgatggatctgtcaaatcttgctaatgccaagttaggtttccctcctaaaagatggagtcttgcttcattaactgaaatggtcacatgtagagagttgccgaagccaagcaacataagaatgggaaactgggaggcatatgttctctcaaagcaacaacttcagtatgctgctacagatgcctacatatcttggcacttgtatgaggtactgcagagtctcccagacaataatgttgaggttgaaaaggagacaattacagcagcatag

SEQ ID NO: 15804 - DNA, 237 bp, Oryza sativa
  Clone ID: PAT_MRT4530_21613C.1
atgcagcagctagctagcatcaaccaaaacatcctgattaatcaaagtgaggacggatccgtcaccggccaccgcggggagggcggatccgtcgcggcggacctcgggcagggcgccgatgacgacggcagtggcggcagcggtctcctagcctcgggcgtctggatccgtcatcgcgaccgcggggacgacagcggcgggccttgggcaggccagtcgcggcgacggcgggattag

SEQ ID NO: 15805 - DNA, 626 bp, Oryza sativa
  Clone ID: PAT_MRT4530_21614C.1
gtcaagttcgccgcgcgcaacactcgcagcagagcatccaccgatcgtcgatgctcaccgccgccatgcacatgctcgactcctccacctcctcctccccttggcttcctcccgacctcatgcctcccccgccgccgccgccgcccgccgccgccactctccaccaccacttccgcgccgccgccgccgcccccggccgccgccgcatcgccaagcgccgaccgcgcccgtcgcggcgccttcccaccacctacatcagcgccgacccggcaaacttccgccgcatggtgcaccaggtcaccggcgccgacgacctccctccccctcctccatcgctctctctacagcagacgacggagctcctcctcccggccgtgcacgccgctccagcgggctcgcccggcgctgcaggcgcgctgatgcttcccacgctcgacacctcggcgttcctgctcggccgccgcgcggagccggcggccgcggcgccgccgtgcgacgagtcggtggcgttggtaagaggaggagcgggtaattacggcagcaacaacaatagcattagcagcagtagcagcagcggcaactgtggtggtggcttccccaccttggactcatgggatctcctgtaa

SEQ ID NO: 15806 - DNA, 2511 bp, Oryza sativa
  Clone ID: PAT_MRT4530_21615C.1
atggccacgtcgagccttctgttcctccttgttctctcttccttctccacagcctcagctgccttcaccaagccacgccaggtgtacgtggtgtacctgggcgagcatgccggagcgaaggtagaggaagaaatcctcgccggtcaccatggcctcctgctctccgtcaagggcagtgaggaggaggcacgggcgtcgctgttgtacagctacaagcacagcctgaatggcttcgcggcccttctctccgaggaagaggccacagcgctgtcagcgaggacagaggtggtgtctgcctttccgagtaacgggagatggagcccgcacaccacgaggtcttgggagtttgtggggttggaggaaggggtgcgaggtccggacgacaccggccggctgccgcccggcgacaaagccggcggcgaggatgtcatcgtgggcgtgttggactccgggatttggccggagtcgaggagcttcggcgacgaaggtttaggaccagtgccggctcggtggaaaggggtgtgccaaggaggggattccttctctccctcttcctgcaacaggaagatcatcggtgcgaggtactacgtcaaggcgtacgaggccaggtacggcgcggtgaacaccacgaacgcgtaccgctcgccgcgcgaccacgacggccacggcacgcacaccgcgtccaccgtcgcggggcgcacggtgcccggcgtggcggcgctcggcgggttcgcgccgggcacggcctcgggcggggcgccgctggcccgcgtggccgtctacaaggtgtgctggcccatcccggggcccaaccccaacatcgagaacacctgctttgaggccgacatgctcgccgccatcgacgacgcggtcggcgacggcgtcgacgtgatgagcgtctccatcgggtccacggggaagccgctgccgttcgcggaggacggcatcgcggtgggcgcgctgcacgccgcgatgcgcggcgtggtgctcgtgtgcagcggcgggaactccggccccaagccggccaccgtgtcgaacctcgccccgtggatgctcacggtcgccgcgagcagcatcgaccgcgcgttcatctcgccgatcaagctcggcaacggcatggtgatcatgggtcaaactgtgacgccgtaccagctaccaggcaacaagccgtatccgttggtttatgcagcagacgccgttgtccccggcactcccgctaacgtttccaaccaatgcctgccgaaatcgctggcgccggagaaggtgcggggcaagatcgtcgtgtgcttgaggggtactggcttgagggtggagaagggcctggaggtgaagctggcgggcggcgcggccattatcctcggcaacccgccggcgttcggaggcgaggtccccgtcgacgcgcatgtgctcccgggcaccgcagtctcctcggtcgacgttaacgccatcatccgctacatcaactccagctcgagcccgacagcggtgctggatccctcgaggaccgtcgtggacgtcaagccgtcgccggtgatggcgcagttctcgtcgcgcggccccaacgtgaatgagcccaacattctcaagcctgacgttacggccccggggctgaacatcctggcggcgtggagcgaggcatcgtcgccgacgaagctcgacggcgacaaccgcgtcgtcaagtacaacatcatgtcggggacatccatgtcgtgcccgcacgtctccgccaccgccgtcctcctcaagtccgcccacccgggctggagctccgccgcgatccgatcggccatcatgaccaccgccacaacgagcaacgcggagggcggcccaatgatggatgcggacgggacggtcgcggggcccattgactacggctcgggccacatcaggcccaagcacgcgctggacccgggcctcgtctacgacgcgtcgtaccaggactacctcctcttcgcgtgcgccagcggcggcgcgcagctcgaccactccctcccctgcccggcgaccccgccgccgccgtaccagctcaaccacccgtccctggccatccacggcctcaacggatccgtcaccgtgcagcggacggtgaccaacgtcggccagggcagcgcccgctacagcgtcgccgtggtcgagccgatgggggtctcggtgaaggtgtctccgaggagcctcagcttcgcgcgcaccggcgagaagaagtcgttcaggataaagatcgaggccaccaaagggagaggcggttggcgtgtaaacgggcagttcgtggcgggatcgtatacgtggagcgacggtgtccatgttgtgaggagccctcttgtcgttcttgtcgcgtgattcattcttaggttagattgattactctttactgcttaggatgcattgcttgaaagaagtgaaatctagccgaaagcctggaaggctggaaccatgttgtggcagataaattcagcgaaaagaaagcgaacacgacttatatatattcttccctaaaaaaaaaaaaaaaaaaaa

SEQ ID NO: 15807 - DNA, 222 bp, Oryza sativa
  unsure (1)..(222): unsure at all n locations
  Clone ID: PAT_MRT4530_21616C.1
cggcagtgctgtcttcggctggtctgggcgcaatgggatttgggctgcctgctgcatgtggtgcttctgtggctaacccaggtgtcacagttgttgatattgatggggatggtagcttcctcatgaacattcaggagttngcattatccggcattgagaacctcccgtgaaggtatgtgttaacaaccaacatttggtatggttgtgcgcaatggaggatag

SEQ ID NO: 15808 - DNA, 1412 bp, Oryza sativa
  Clone ID: PAT_MRT4530_21617C.1
atggcgcgcaatgtcgcccaggccgacgcctccctcaaggccggcaaatggcaacgtaacaaatatgttggtgtttctttggtgggaaagacgctagctattatgggctttgggaaggttggctcagaagtagcacgacgcgcgaaaggacttggaatggatatcatttctcatgatccctatgctcctgttgatagagcccgggcaattggtgtagaccttgtatcgtttgatgaggccatctccactgcagacttcatatcactgcatatgccacttacaccatcaacagcaaagcttttcgatgatgaaacttttgcaaacatgaaaaaaggtatgagtcaggcagcacttgatgtattcactgaggagccaccaccaaaagacagcaagttagtacaccatgaacatgtgactgtcactccacaccttggagctagtacatcagaagcacaggaaggtgtagcccttgaaattgcagaggctgttcttggagcactgaaaggggaattagctgctactgctgttaatgccccgatggtccctgctgaggttttatcggagttatctccgtatgttatccttgctgagaaactaggtcggcttgtcgtgcaacttgtagctgggggaagtgggattaagggagtgaagattggatattcatcatctcgagaccctgatgatctggacacaagggtactccgtgctatggtcaccaaaggcatcatcgagcccatttcaagtgcatttgttaacattgtcaatgctgactatgtggccaagcaaagaggccttcgcatcagcgaagagagaatcctccttgatggatcaccggagattcctatagattctatccaggtgcatctcgccaatgtagagtccaagttcgccggtgccctctctgacgaaggtgacatcagagtggagggagaggtgaaggatgggaaaccacatctcacacttgttgggccattcagtgtggatgttagtcttgagggcaacctaatactctgccgtcaagttgatcagccaggtatcattggaaaggtaggatcaattttggggaagatgaatgtgaatgtgaatttcatgagcgttggaaggactgctcctggaaagcaggcgataatggccattggggttgatgaggagcctgagaaggaagctctcaagttgatcggcgacataccatcagttgaggagtttgtctttattaagctttagataataaggtgtataacagtagcttaccacaataacatcctctgctccattggcatggcataggttttttttttggcaagcttagctagttaatttaggttagaacatcatttattttcagtccacgtagatatatacttgatgaacactatgcaaattgcaatgtttattcattgatctgttgcccc

SEQ ID NO: 15809 - DNA, 561 bp, Oryza sativa
  Clone ID: PAT_MRT4530_21618C.1
atggcggcggcggcggcgctaaccgtgcttccgcgcgcggcgggcgtactgcgcctctcgcagcatgggaggtctgcctcccgcctactctgcgccgcagccggcgacggcgaggcgtccccggcgccgcgggcggggaggctggtgctgtacacgaagcccgggtgctgcctctgcgacggcctcaaggagaagctccaggccgccttcctgctcgccggcacaccctactcgctcgcctccctcgagctccaggcaagcagactagaccacgttcgtggctcttgcgctctctctcccttggggggtttcatcctgagaagttggggtttgtgtttcgatcaggagagggacatcacgacgaatccggattgggagcagatgtaccagtacgagatcccggtgctcgccaaggttcttcccgacggcagcgaggaaaagcttcccagattatcgcctcgtctaagcgtggagctcgtgcagaagaaagtgttttctgcctttgatcattttgagtcagcagctatgagaatgccgatggataatggatggcatatgtga

SEQ ID NO: 15810 - DNA, 251 bp, Oryza sativa
  Clone ID: PAT_MRT4530_21619C.1
atggtgtgttttttttttttattttaagggaagggctttaacaatttataaccaggggcagatccatttttacaatggttaacgaataagggggtcttttgaatattgaaaaatttttttcccaaatgggcatttccttgtccccaaaagcaaaataattttttgaaaattccaggaatttaggaaatgttacacctggggtgaaaaacaaaaaacctcttgctaaattattaagggccccctccactttt

SEQ ID NO: 15811 - DNA, 1563 bp, Oryza sativa
  Clone ID: PAT_MRT4530_2161C.1
atggagatggcgccggatgggaggacgcggctcgccgctcgctctgcgtcgctctcgccgtcgccgccgccgccgccgccgcgacagcaccaagcagcagatggcaagatcggcgtcgaggaggaagaggacgtcgacatctgcggcggcgcctccccgttggcaaccgcgccgatgtctcctctcttccctgacgtcgatctcagcgagctcgtcggtgcaaccggagcgaagctgctctcgccgctgcaacgcaagtacattgcgctcgccgacgccgagcgcgccgatgcacgcggcggcgcctccaccgtcgcgccgccggcattgtctcctctcctcccagctggatacagcgagctcgtcggtgcaaccggagtcgacctgctctcgccgctgccgcgcgaacacgtcgcgctcgccgatcgcgccgacgcccttggtctcggtctcgtcgtctccgccaccgcgacgacgacgtcgccgtctctgcctcctggtttcgctgaactcgccatcgccgatgcaggcggaaccaaaatgctgtcgccgctgccgcgcaaatacgtcgcgctcgccgagcgcggcggcgtcgcctccaccgcgacgacattgccttccctcgatgagctcgccgacgcaaccggggtcaaaatgctgtcgccgttgccgcgcaagtacgtcgcgctcgccgaggaagaggacgacgagtacgtcgacatctgcggcgacgcctccccagtggtgctacacaagaatcatggcgagatcatcatcagcaacagcagcagcagcagcccaagcagcgactctgactcggactcaaacagcagctccagctccagctccagcagcagcagcagcagcagcagcagcgattcagactccgacgagagcgccgccgcggctacacatgcgccggcgatccccaccaatgcgtgcgtcagttccgcgcaaccgtcgtcggcggcgcctgcagcgccggaggtagcacagagcgctaaaaaacaagaagagaagctcccggaccagcgcaccgccgcagccgccgccgccgccgtcgtcgcgacggcgccgccgaagccactgaccgacctgatcaccagagcccagggagccgcggcgaggcggcggcaggacgagaaggcgcaggcgagggagaaggcccgtcaagaactgcgcgagatggagaggacgacagcgcccgccatggccagaaacttcatacacccgctggacatgaagctgctcggcctcgccgccgtcgagcacatggtgagcgccgacgaggaggctcgctgcagggcgcttcgctccgccgcgcccagccttctggagaagctcgggctcttcctgaaggccgatgacggtggcgacaaggtgcagcggcagcagcagccgagcttcgtcgccggcgacgatgacgacgtcgaggaaggtcgcttcggcggctggggcgtgaacggcgaggtggacgccaccggattgaggcagtctgcggggggcggcatcgccggcgtggagtgcttcccgatggaagaagaggagctaaagaagaaatag

SEQ ID NO: 15812 - DNA, 648 bp, Oryza sativa
  Clone ID: PAT_MRT4530_21620C.1
gcacgaggcgataacccaaacgatatcgatggcggcggcggcggcgctaaccgtgcttccgcgcgcggcgggcgtactgcgcctctcgcagcatgggaggtctgcctcccgcctactctgcgccgcagccggcgacggcgaggcgtccccggcgccgcgggcggggaggctggtgctgtacacgaagcccgggtgctgcctctgcgacggcctcaaggagaagctccaggccgccttcctgctcgccggcacaccctactcgctcgcctccctcgagctccaggagagggacatcacgacgaatccggattgggagcagatgtaccagtacgagatcccggtgctcgccaaggttcttcccgacggcagcgaggaaaagcttcccagattatcgcctcgtctaagcgtggagctcgtgcagaagaaagtgttttctgcctttgatcagtaagatattttcacagtttctttcagaaggtgttttttttcttccagttttgagtcagcagctatgagaatgccgatggataatggatggcatatgtgatctttacttgttgtaatctttattaatctctatggatttgagaaattatacactaatttttctggatactctattcggttcagaataagttgtgcttgctt

SEQ ID NO: 15813 - DNA, 220 bp, Oryza sativa
  Clone ID: PAT_MRT4530_21621C.1
aattatatataaccatatctggcagaggttttatattacaaatacctcacccaacaacatatataccaatcacaataccacttttacattaacacaaaaaaataccaattcatacaaaaaccaactcatatcatctccaattaaacaaattcacaattaacaaacttctcacacactaaacacctcactaatcatcattcaatcaaacatcaatcattta

SEQ ID NO: 15814 - DNA, 1697 bp, Oryza sativa
  unsure (1)..(1697): unsure at all n locations
  Clone ID: PAT_MRT4530_21622C.1
atggagaagccggcggcgagcgtggaggagccgctgcttgttggcgctggcgagaagaagggcgagagcgcggccgcggcggagctgaagcggctgctccggctggcggggccgctggtggcgagcggcgtgctgcggaacgtggtgcagatggtgtccgtcatgttcgtcggccacctcggcgagctccccctcgccggcgcctccctcgccacctccctcgccaacgtcaccggcttcagcctgctcttcggcatggcgagcgcgctggacacgctgtgcgggcaggcgtacggcgcgcgccagcaccacctcctcggcgtctacaagcagcgcgccatgctggtgctcgccgtggccgccgtgcccatcgcgctcgtctgggccagcgccggcgagatcctcctcctgttcggccaggacccggccatcgccgccgaggccggcgcgtacgcgcggtggctgatcccgtcgctcgtcccgttcgtgccgctggtgtgccacatccggttcctgcaggcgcagagcgccgtgctgccggtgatggcgagctgcggcgtcacggcggcgagccacgtggccgtgtgctgggcgctggtgcgcaaggccggcatgggcagcaggggcgccgcgctggcgaacgccgtctcctatggcgtcaacctcaccataatgtctctctatgtcaggctgtcgcgctcctgcgagaagacatggactggcttctccatggaggccttcagggagctccgccagtatgcggagctcgccatccccgcggcaatgatggtctgtttggagtggtggtcatttgaatttcttgtgatgctctctggtcttctgcccaatcctaaacttgaaacctcagtgttgtcgatatgtctcaacactggtgctctgctggtcatggttccaattggtctcagcacagctataagcacgcgtgtttggaacgaactaggtgccggcaatccccaggcagcgaagctggcaactcgagtggtcatatgtatggccatgaccgaaggctcggtggttgcgtttacgatgattctgttgcgcaattcctggggtcacatgtacagtgatgaggctgaagttgtcacctacattgctcgtatgatacctgttctagccatatcattcttcattgatgggatgcacagcgctctttcaggagtgctcactggatgtggcaagcagaagatcggcgcacgggtaaatcttggcgcattttacttggcaggcattcctatggccgtctttcttgcatttgtgctacatctgaatggaatgggcctttggcttggcatcgtttgcgggagcctcagcaagcttatcttgctcttttggatcacaatgagtataaactgggagaaggaatcaaccagggcgaaagaattggtgttcagttcatctcttcctgtagcatgaagaaaaacaatgcatcagaatttcatgatatggtgcaattgttatngtgaaagccacacagnaccaaatgttatgaagctcgcctntcatctttaagcacccagtttattaacatttgtaacatgaatttttgttcttgtgataacacctatttaatattttttntcttgttcagattgtactctgtaaactaaggatatatcttatatgcatcgattaattgaaaatctaagaagnatattataggaaaaaaaaaanaaaaa

SEQ ID NO: 15815 - DNA, 138 bp, Oryza sativa
  Clone ID: PAT_MRT4530_21623C.1
atagagttctaaagcttatacctggaacacaatatactaagtatttattggatctatattttgactactagtatttataaaactttaggagctcaaggaaacgttcagagtagaaaatcaatgtctgaacaaattcct

SEQ ID NO: 15816 - DNA, 1334 bp, Oryza sativa
  unsure (1)..(1334): unsure at all n locations
  Clone ID: PAT_MRT4530_21624C.1
tttccnttttccnnnnnggnggggggccttttgggcngggncccccccaanttttttcccggganaaaaaaaccnggnaaagggggccnttngggtttttnaaaccttnggggcncccccaatttgggggggttttttcccataaaaaaanaaattttttnttcccnggtttnttngggtttnttnaaaccctttccccccccccccctttntttngggaaaaggncccctttnaaaaaagggncccttttttggggaaaattttttngggntttcccccccccntttnttttttncccttttttnggggcccgggntttttttnttncccggggggggaaaggnnaaaaaaagggtttttttnaaatttccccaaacccaaaagggnggggcccnaaagggttttggggggggaaaacccnaacccctttntttcccccccccccntttttttntttggggaaaacccntttttttccccaaagggnaaaattttggggccccaaatttttttcccccaaaaanngggnaaaaaaaaggggggggtttttttnaaatttcccccaaaccccttttgggggggggccccccccaaaagggnggggccccccccttttccccaaaaaaanaaaagggggggggnaaattttggggtttttgggnaaaantttggggnccccttttcccccaaanggnccccnaaantttttttngggggttttgggggccccaaaattttgggggcccccgggaaaaaaattnggggcccccntttccccccggnggggggggggtttttggnngggggccccntttttggggnaaaaattttnccccgggggcccctttttgggggnccccaaaancccccccccgggggtttttttttcccccgggggccccaaaaaccccttttttttttggggggcccccttttngggggcccccggggccccccnttttgggggnttttttaaaacccccaaaatttttngggggggggggtttttttttttttttttttncccccnaaaacccccccccccccccccccccttttttttttggggggntttttttttttttttcccccaaaaaaaaaagggggcccccccttttttttttnaaaaaatttttggggggggggggnttttncccccccgggaaaaaaaacccccnaaaanggggggggggggttttttttttttttttgggggggggggggcccccgggggggggggncccccggggttttttttttttcccccccccccngggggtttttnccccccgggnaaaaaaaaagggtttttttnccccccccccnaaannng

SEQ ID NO: 15817 - DNA, 606 bp, Oryza sativa
  Clone ID: PAT_MRT4530_21625C.1
atggcagcaagattttttctaagtctcagctctcctctccctcaaccctctcttcgtcagctccctcaacaacctgcggcgggaaccagcaacggcgacacgcagaggcggcggggtcagcgccggcgagggcggggtcagcggcgggaacggcgaggcagcggggtcggcggtggcaacggcaaggcgcggggtcagtggcagcagcggcgaggtggcggggtcggcagtggcaacggcgaggcgcggggtcggcggcgacaacgacgaggcccggggacggcgacgacaatgctcgaggacggcagcatccacacccagcgcggctcccctcccctccctcccagatccggccaaaggggaggagaggaaggagaggtggcggcggctgcccctggaggtggcggcaggcggtggcggcggcggcgccccccacccccgacggcggcggcacccctacgcagttcccctaaccctagatcggctagagcttatctttgtgcggacgatgaattaggatacagagtaggggtgaaggagaagattggagtaaaaccgggtgagatgttcctagatttggagagcgaggcaggccgtggtccgtaa

SEQ ID NO: 15818 - DNA, 518 bp, Oryza sativa
  Clone ID: PAT_MRT4530_21626C.1
ctcaaatggttccatttattctgctgaatacaaagcaagagtacctcaggtagaaaaatgcaataatttcgttttattaaccggtaagatgccacaaaagaatagttagctacacattagcattatgatttatgaggagcatacatcattacatcattacatcatacaacagatacatctttctcgtacaagtagcgaaaagtacagatatgcttcaactttcaactgcctgaggtttgcaactgctactatttcacaagtaacatttttatatcttgaacaaactgtatgtattgccctttgaagttttgagttcctcactttaccatcatatcaaggtaagatcatgtaaatctttgttttgtttttttatcatgttgatagttcgtcacagtcgtcgtacggaggagccaaggtactttcagctggtaaaactgatctcagccaccaatgtgaatcataggtctatttgctgtcttagcaatatcaaacatcccagcgtgtttagctttcttcct

SEQ ID NO: 15819 - DNA, 167 bp, Oryza sativa
  Clone ID: PAT_MRT4530_21627C.1
ggctgcaggcgagcgaatgcgagtgttagctgctataggagctaggtgcctatttttgtacatcttcttcactgctatgtatatatgtcttctgagttctgaacggactaatgtactcctctgaagtctgatcactcgttcctccagtgcatcaaatcgcttacttt

SEQ ID NO: 15820 - DNA, 904 bp, Oryza sativa
  Clone ID: PAT_MRT4530_21628C.1
ccggccggccccgtccccaatccattcgagcttctcttctccaatcgattcgcgatttccaatccatggcgactctcaccatgcagccgatcggtcccctaccgtctactaagcaagaaggcacaagcaggggagagaagcctgcggagggtggtgccgatttgagtgacatcgactcgggctgggttgttcttgggaagtcggatatcgtcccggcggatttggcagcccagagcctgcgctcatctccgaagacaattcctacatgggctcggtgggtgattggaggtgtgctgcacacagtggtgccattctacgagagagcacggtatgttgaagatgagacggctcgaaatgtggagactgctgctgaggttgtggagcaaatagctgaggtcacagagaaactggcttctaacgtggctgatcaccttccagagaatggatgtctgcagaaagtagtggagaagattgaatacatagctgaggtagtggatgaagatgcagagaaggttgaggccattactgagaagattgagaatttcagcgacaagattgatgctaaagtagaacctatcttcacggagattgagaaggaattcgaagactcaacatcaaatgatggagtaaatgcaaatatataatcactagccctacgtagaaggaaatactctcagctccccattgtgtatagcatatgcttttttttttgaatgattcgttgtacatatgtgtacctttctgtatgagttataccatgcttattgtgacgcatggtggtgttgtggctggtgctcgaaaactaaagtagagttagcattgactattgagactgttgagctgtgaaatttcatagactggtacaaaatagaatggttggtactggtaaatgctattatatcac

SEQ ID NO: 15821 - DNA, 958 bp, Oryza sativa
  Clone ID: PAT_MRT4530_21629C.1
catctcaaacacaccacctgaattaacaagcaggtatatataagctactagctaattaagaagggcattagaatggcttcgtcttccttcctgctcctcgccactcttcttgccatggcctcatggcaaggcatggcttcggatcccagccctctgcaggacttctgcgttgccgacatgcactcacctgtgcttgtcaatggatttgcttgcctgaacccaaaggacgtgaacgcggatcacttcttcaaggcagcaatgttggacactcctcggaagacgaacaaagttgggtctaacgtcacactgatcaacgtcatgcagatccctggcctcaacacactcggcatctcaattgcacgtattgactatgcaccgttaggtcaaaaccctccccacactcatcctcgtgccaccgaaatcctcacggtgcttgaaggaacactctatgtcggcttcgtcacgtctaacccagataacaagtttttctccaaagtgctcaataagggtgatgtgttcgtattccctgtggggctcatccacttccaatttaaccctaacccctacaagcccgcggtcgcaattgccgcacttagcagccagaaccctggtgccatcaccattgcaaatgcggtgtttgggtcgaagccaccaatctccgatgatgttttggccaaggcattccaggtcgaaaaggggacaatagattggctccaagcccagttctgggagaacaaccattactgatcatcttactgattgcatttaagaaaaagttatgtgcagttacagagatcctgcataattaactttatatactacaataaaatgacttctatttcgtgtaccactactagctatattctgtgatgtaattccaatacatgtgtatggttttcctgtttaattaatgaaatacagtgttctttgtgacaaaaaaaaaaaaaaaaaaaaaaaa

SEQ ID NO: 15822 - DNA, 225 bp, Oryza sativa
  Clone ID: PAT_MRT4530_2162C.1
atgactaaccatcatcaccaccaccatcaccatgacgacgatcacaaagtcggggccaacttctgcaacatcttgctttccatcatcctccctcctttcgccattggcgtcgtcgtcggatgcaagaaggagttctggatctgccttctcctcacctgcctcggctatcttccgggcatcatctacgccatttgcattatcagcggtgctcatatccacgactga

SEQ ID NO: 15823 - DNA, 579 bp, Oryza sativa
  Clone ID: PAT_MRT4530_21630C.1
atggcgacgccaccgctgccgccgccgcctcgggcgaggtgcgtcgtccgcctcaagctgccgccggcgtggacgcccgaggaggacgcgcggctgcagcgcctcgccaaggagaacggcttccgccgctggagccgggtcgctaggagcatgccacgccgctccgccaggtcgtgccgcgacaggtggcgccaccacctcgcccgcgacgtctaccaccgccccttcaccgcccgtgacgacgacgagctccttcgcctccactaccgcctcggcgaccgctggaaggagatcggccgcgccgtctacggccggacctcgcgcatcatgaagcaccgctggagggagctccggcgcagcggcttcccgctagctgccaccgccaggaaggtgcaggcgctcgacatggtggaaagcgaagtggaggagtcagaccagtcgctgccgccgccagagttgcagcgttctttggcggacgctcttgcctcgagcttcggttattgtagccttgccaacgagcacgcgatggatcccctggccggcagcctctcgctagggttcgcgtgcatggcagtttga

SEQ ID NO: 15824 - DNA, 567 bp, Oryza sativa
  Clone ID: PAT_MRT4530_21631C.1
atggcgactctcaccatgcagccgatcggtcccctaccgtctactaagcaagaaggcacaaggcaagtgaattccttggtccgctttgtactcactgagattgagagcaagaacaagatgggagaaactaggtttcgcaggggagagaagcctgcggagggtggtgccgatttgagtgacatcgactcgggggctcggtgggtgattggaggtgtgctgcacacagtggtgccattctacgagagagcacggtatgttgaagatgagacggctcgaaatgtggagactgctgctgaggttgtggagcaaatagctgaggtcacagagaaactggcttctaacgtggctgatcaccttccagagaatggatgtctgcagaaagtagtggagaagattgaatacatagctgaggtagtggatgaagatgcagagaaggttgaggccattactgagaagattgagaatttcagcgacaagattgatgctaaagtagaacctatcttcacggagattgagaaggaattcgaagactcaacatcaaatgatggagtaaatgcaaatatataa

SEQ ID NO: 15825 - DNA, 476 bp, Oryza sativa
  Clone ID: PAT_MRT4530_21632C.1
cgaaagatcgggccaataacagccttgagtgtcgagaggaactcaaggttcatcagtttttctagatcaataagcacgacgtttgcctcatggacgtcggtcaatcctaacttctggatcttttctttgacagtgcccgggctagccgaggatggtgaacgaggcctaggagatctgcttaactccagtgcaggtccaaagctcgccttcaaatgtatgagcgtgccagttgatttgatcatgtcggtctgaaggtctgactcgtagtcgacaacatggtagtcttcctcctcgaatccgtgcctggcgagatcagagatagtgctttcgtatctcctgacggtatccagatacaccgtaggggaataactatgcctatccctgaagtcgatatccggcggcgtgtcttggcttacgtagggttgtatgttgtggcttctagtgggcgtgtgttgattgtcatgggtgtcttccat

SEQ ID NO: 15826 - DNA, 399 bp, Oryza sativa
  Clone ID: PAT_MRT4530_21633C.1
cgagcgggagcgacaaagccttcgtatgtgagacagaccgtttctggcagtgtgacgactgagcgttacctcgacgcaccactagtgtcacgaacggggctcctctccgataccttcctagtattcggaccctaccaggacaggagcaggctaggtcggaagccggagacatcccttcctcgctagatccgacctgagagatggcatgatgggcacagcgcatgacagtgcgcgtgagtccacagacacagtggtccgaatccactctgcgctcgatggccaggggactcggcgccaaggagcggaccaaccagaaggcgcacgagaccaaggatgcctccaaggagtatgcttactatgcaaatgacgcggcctccgacgccaccggccgggccatgg

SEQ ID NO: 15827 - DNA, 502 bp, Oryza sativa
  Clone ID: PAT_MRT4530_21634C.1
gatctttctaaattgaactgtactaacgacgtatgggtttaaccccacactaaatgaaagaaaatcccttttgcaaataaattgttaaattggcgtctaattttagttttcgtaatgatcaagatagaacgaaaaaatttaagagttttagaataaaatacaaatatctatgtaaaaataaacgaatcttagtctaagtaatccgttccttgtatctttcacacaaactaactttggtactattataaagtcaacatataaattctaattaaagataattgtaatattctcttatttttaagttacaagtaagttaacaatgttctttaatgcaataaaaaataataattaggatataggctagataaaaaaaaagaaatttaataaataactaagttaactaaaccaataaaataaacgtaaaaagaagtgaagaaagtgaaaaaaagaaaaaaaaatgaaggtacgaggaaaaataatgacagataaaaaaaaaaaaaaa

SEQ ID NO: 15828 - DNA, 345 bp, Oryza sativa
  Clone ID: PAT_MRT4530_21635C.1
atgcggcgggcacagctaggtgccatgcggcggcgggcgcggctgggtgccgagcgtctggtggtggcgcacctccgccgcgacaacgcgcacgttgccaccgcgctcggcctcaccacccacacccagggcctcctcgctgtcgacgccgagaatgccgtcctccgtacccaggccgccgagcttgccgcgcgcctcgcctctctcaacgacatcgtctccccgcatcgtctcgccactgaagctgccatggcagagaccaacaagaagaagaaaatatacttgccattgggggcaatctttgtcctcgggcagtttcacgttttctcggtgtccctcaactaa

SEQ ID NO: 15829 - DNA, 293 bp, Oryza sativa
  unsure (1)..(293): unsure at all n locations
  Clone ID: PAT_MRT4530_21636C.1
aacgtgtgttcatcgactagtttttaactgagtttattgtttggatttgaaatgatacaagtgctaccctnatcgggcatgttacaatgaaaaaaagaanaaaaaaaaaaaaaaaaaaaaaaaaaaaaaaaaaaaaaaaaaaaaaaaaaaaaggcggcgggcaaaaaagtggaaacccctgaacaccaccctcagcacacgcacaagagcccaaccacggcccacctcatagaaaaaaaccaaaaccccagttcatccactgtagaaattaaaaaaaccatactggtaacacc

SEQ ID NO: 15830 - DNA, 705 bp, Oryza sativa
  Clone ID: PAT_MRT4530_21637C.1
atgaccgcgctgctgcgccacggcaagccgtcggcggtgccgctcgccgtggacacccacatgtacgtcaccgtcgggctcggcgtctccctgtgccagccggagcagctgctctgcaaccggagcgcgccgccggtgttctcgtcgagcatgaacaacgcctccttcgtcgtccccaagaacacctcccttctcgaggcccacttcaggcgcgagccggccggcgtctacacccgcgacttcccggacacgccaccggtggtgttcgactacaccggcgacgagagcgacaacgcgacgatgcagttcacgaccaagtcgaccaaggtgaagacgctgcggtacaacgagacggtggagatggtgctgcagaacacgcggctgatcgcgaaagagagccacccgatgcatatccatggatttaacttcttcatcctcgcgcaagggttcggcaactacgacaagaggagggcggagaggaggttcaacctcgtcgaccctcaggaacgtaacaccatcgccgtgcccaccggcggctgggctgtcatccgcttcgtcgccgacaatcctgggatgtggtacatgcactgccacttcgacgctcatattagccttgggctggccatggtgttggaggttttggacgggccgacgccggagacatccgtgccgccaccgccggcggaccttccacggtgttcatga

SEQ ID NO: 15831 - DNA, 348 bp, Oryza sativa
  Clone ID: PAT_MRT4530_21638C.1
atggatttggaagggcgagcgaacgacggacctccatggccgacaagtcaagaaggagcaccacatagaggcgccgcccagacctcgtcggagtggtggactccacgacgaccaacaaatcgagcaggaggggggcacatggctagtggcgcggtggcgccggccagacctcgtcggagcaacgtacgccgcggccgacgaattgaccacacgcggatgggaggtgatgccggcaatgcaacggaaggagatggggagtcgtctatttgccttgccaaggcggcggcatatggcacaccgccaaggtcacaaatcagaacaaggttggagcaggagaagtgtggttag

SEQ ID NO: 15832 - DNA, 378 bp, Oryza sativa
  Clone ID: PAT_MRT4530_21639C.1
atggtgggtgtggatcccaacgcattgtcgatgtcgccggcgcgcggtgaggggacgtcggccatgatttgccgcagctcagctagatttgccgttgccccgtgtagatcttgtcggatgctacagcgacaactcgttgggggcggtgatgacgcccacgtgcgacagcttgttgggacaacaacgacgacgcgatggctcgatgggcgtggtgactatgacatgaagcggtgtcctgaggtggtggcggccattggcatcgccgacaggtgtgccggtggcctgcacatgcaggctcacctcaatacttcatgccgagtggagacgatcggcaaggaggctgctggccgacgactggagaggggcagccaacgatag

SEQ ID NO: 15833 - DNA, 168 bp, Oryza sativa
  Clone ID: PAT_MRT4530_2163C.1
tttagtgtccgcccttagtatccaagcatgcaggggcttaaaccaactgatactgtaccatcactgcgctgaataccgacgcacaagccgggatctgctgataagagtccaatatgaaagtcttcaaaacgccatcatggcgagacgttcatcacattcacagcggtt

SEQ ID NO: 15834 - DNA, 159 bp, Oryza sativa
  Clone ID: PAT_MRT4530_21640C.1
atgacttcactgtcgtcgactcgacggtgccgaccgccgccggcgaggcacgcatcgcatcttcacggctgcatatcggaggccacggcggcgggcggcggccacgaggtcatcggtgatttggtgtggagcggatcggccgccgagggcgagcagtag

SEQ ID NO: 15835 - DNA, 1730 bp, Oryza sativa
  Clone ID: PAT_MRT4530_21641C.1
tgatgccgccgtcgatggcggtggcggcggcggcggcggcgccacgcagtctcctcttccccgtctcgccttcaccctcgcagccgcggcgtgtgccagccttggcaagggctggacggagccagaggcggcatgcggcgctggcgaggcccgctcgccgccacctcgacgacgcgatgtccgccgggttcgtccgcagcctcaacgccccgcctgacgaggacggcgcgagatccggcgggaggtacgaccccaggccgggggacttcgccgtcggggtggtggtctccggcaccgaggcccgcctcgacgtcgccgtgggcgccgaccgcctcgccacgctcctcgccaaggagctcctcccgctctaccgcgccgacctcccggccttcgctgaggcggctccgcctcggccggggagcgtgggtgccgtggcgagccccgccgcgggcgagggggaccggaagccgggggagcgcggcgggggcaggacgctggtgccgcccggcacggtggtgttcgcggaggtgctcggccgcacgctgagcggccggccgctgctgtcggcgaggcgactcttccgccgcctcgcatggcaccgcgccaggcaggggctgagagcattccttcctaagtttgagctcatggacaggataaatacgttcacagacttgaaaaacaaagttggttgcagcatacgtgtgtgcattacaaggcttgatgaagaaactaatgacctgataattagtgaaaagaaagcatgggaaatgacatatcttaaagaaggaactcttcttcaagggatcgttcacaagatttttccgtatggtgctcaggttagaatagctgggacaaacagaagtggattgttgcatatttcaaatattagtcgagggcgtgtcttgtcagtaagtgacatcctaaagatagatgaggagtttactgaatactctgttacattgagcatatctgacctcgaaagtacacctggtctattcctttcagaaaaagcgagagtgttctcagaagctgaggaaatggcagagaggtaccgggagcagcttccagctgactctaagaacgctaaattagatgctgaccttccaggaggaacaattccatttgatgatgaagctacattatacgcaaactggaaatggtttaaatttttggaagatggcaaactaggtgctgtaacaacagaacacaatggcagctgatgcagctttcagggattacatgttgtgagaacaatctggttgctggcttgctgctgaagaaaaatagcatatataagcagcttagcatgaagcatatgaagttgaaccttcattggatgacctggagaaataatggttcttggtgagagcacagcactttccaaagcaaagaaccagcattaacggttctacgagtagcaacatgcagctccatctggcaactgcatcaacaaaagaagcagcaacaaaatttctttgtcggcgtatgccgtactcctatcagcaaagaggaacttctttgtgagcctgtcgttccttggaaaattttgatgcgctgtggaccgaaaatgacacattttgtgaatgtttaatccattagtccaagtagctccgtggagaaaacatcacatttgatagcatccactatttgtacaacttgagttcacttgtatttactatttcaatggaaacaagcaactcaactacctcaacgtgcagcagtaaaacaaa

SEQ ID NO: 15836 - DNA, 419 bp, Oryza sativa
  unsure (1)..(419): unsure at all n locations
  Clone ID: PAT_MRT4530_21642C.1
ggggggggggggggggnaacaaaacagagaaacgagggggaaaanncccacagaaacnncnnaagggagagggcaggnaaaaacagacgganaaanccnnggagaaagaaccggnaacgcggcnacncaaaacnnaaaacaagacaacgcccacggggggggggggggccacnncgagaagnngncgaacncagcaaagncacgggcggagaacanggncggggaccaggccngccccgcagcccaaaccggagcagccccccccgggcgaagcccgggccccccggaggcaagcngccccnnccggggcccgacgcgggcagccccagcaagggcggccaccccgcgcgcagcgccgaagcaggggccgagcccgagcacagcggcgacacccccgagcgcgcccccacccccccccc

SEQ ID NO: 15837 - DNA, 736 bp, Oryza sativa
  Clone ID: PAT_MRT4530_21643C.1
ccggccgggatttccccggctcgcccgatgtcgctggtcgcctacgacgcctcgtccgacgaggaagacgccggcggcgagccgccggccgccgcggcggcttctcccgctcccgtcccctcatccttcggacctcggccgaggcctccctctccctcgacgtcggtcggcgccgctcctcagcctccgccccacagccagaatatttcttccactagttcaagtaatatctccctgcccacaccgtcactagaccttccagatgttgcagatctgttttcttccccttctctgccctctagaggatctacttctatgatggacagcacatcaaggaaacgagaatcaaatggatctgcatttcaagacccacgcagtaaatttccaagggttcaatcgggacaatctcgtggtgccaggatcgctgctgggaacacgttagttccaccacagcttagtggaaggagcaacgttgtcactgaagatatgaccaagttgtttgtggctagacgcaaagagtagtgctgatgtttttgttagcctctaattgtaaaccatcaacgaatctacggcgccccatggacagaaggacctgattggacgatttgctatttgcgaattgtgatctataatcctagacagctggattgggaatgctctcttttttcacattatctagtgcccatgcaattgatgttcacttgtgtttatgagcaatcgtgatatgttaaagcat

SEQ ID NO: 15838 - DNA, 942 bp, Oryza sativa
  Clone ID: PAT_MRT4530_21644C.1
atggcgggaagcgacatggacgacctcgtcgcgcggttcatggacatcaccatgcgcgacagtcgagacgccgcagctaaccacatcagatcatgccgcggcagcctcgacgacgccctcgccctctacttcgccgccgccgacgacgagccccccatccgcccgcccatcccgacccgcaccgagaggctctacggcgacgacgacgacgacgaccacgggcatctcacggccacgccaccgccaccgccgcccccgccggtgcccgtcgtccgcccgccaatgccggtccctgcgcgcacggagagcttcttccaagacgccgggtatctcagggccgtgctcggcaacagcaacgtggtggaggaggaagacggcgacgcggcgtcggactacggcgaggcggcggagggggaggaggcgtgcagcgtgcgcgtcaggttctcggacaggcgggtggtgcagaaggacttcggcgcggcacgaccggtggaggggctcttccgatactgccaccgccactcggtctcggcggccggcggcgagaggcgggcgttccggctggtgcggttcgccggcgcggcgtcggaggagattcgccggggcgacgccacgttccagcagctgggcctccactgctggaccctgcacctcctcttcgggttcggcccacgggcccatggcggcccccgccggcggcaacgacccaacggtggcccaggacgtggtcaccctgcacgcactcgacaaacagttctacaagaacgtgctccacgccgagtgctgttcacgtcggacgccgcgctactgtcgttcttggcgacggcgaggctggtgcacgccaacgtgcggcacccggtgtcgtgggcaaagaagttcgcaaggacgatggtgaagaatggcgaggattgggctcatggccgcatatatcacaatggttga

SEQ ID NO: 15839 - DNA, 2881 bp, Oryza sativa
  Clone ID: PAT_MRT4530_21645C.1
atgtcgctggtcgcctacgacgcctcgtccgacgaggaagacgccggcggcgagccgccggccgccgcggcggcttctcccgctcccgtcccctcatccttcggacctcggccgaggcctccctctccctcgacgtcggtcggcgccgctcctcagcctccgccccacagccagaatatttcttccactagttcaagtaatatctccctgcccacaccgtcactagaccttccagatgttgcagatctgttttcttccccttctctgccctctagaggatctacttctatgatggacagcacatcaaggaaacgagaatcaaatggatctgcatttcaagacccacgcagtaaatttccaagggttcaatcgggacaatctcgtggtgccaggatcgctgctgggaacacgttagttccaccacagcttagtggaaggagttcatggcggatcaatggcgaagcgaaggagctaaaccctagagctctccagcgcctcgttcacctatccaaaactaaaggtggcatccccttctcaggcagggatttttgttggctctttttattccaaacaattgggtggaatttcccaaggggatcccgtgacacccaaaagtattacagcatgcacatgatgacttctgcaagcggatgtgcaaagttggattaccttagttcgcaggagcctggtgatgaatcacagatcaacgctattgacattgtggataggctgctagtagaagatgatatagaaacttatcagcaaataagcatcgaccagacaacgagggcaaagtcagcttctactttaggttcagatatagctcaatgcctggccaaaagggctaggtgcagttccccactaaaaaaggctggaaattttgactgggttgatacccccactgttgatgattgcagaaccagtattatttccatggaaaatacagtagatcgtgctaataatcaagtgaaacacggtggctgtggatcaagtaccagggcttggcccatactagaatgcattgatgaggacttgggtactaattgtctgaagaaaacggaaccattttgtggtactgatgatttataccaagaatatgatattgggccaaatactcagatggcagctgaagccatggaagcattgttcaatgcttcaactgtcagttatgatgtcaaggagaatgaacgtcctgaagattctgttgttaaaaatatgacaaaaggaaccaaagttgataagacatgtgcagttcattcaccaattcaaaagagaaaggtaaacttcttgcgtcacagatcaggagtggcaacagaatacaagcaaatcaaggtagatgatacagtaagggaaaatggtgaaagttcagtctctcatacaaacacatcacaaaccaggaagtatacgaaacagatggcagggaaagcaaaaagaaacatcagcagtgggattactcaaagagacatagatcatgaggtgtcagaagtaatcacaagatctggtacaaatgactcaaatattcctctttcactagatacagatgctttaatccatcctaaaaggaggaggacatatatatttacctcgggaagctcaaaaattgagttcattgaagctatcaagccaacggcacttagagccaaaactacagaagtaaaacagctttcaacagctaacacagtaagcgtatctgatcaagataccacaagtggcttgagaatgagtcaacattcttcttttgctgatcatgaagcatcagcaggtagttcatacttcaatccacttgcagaaacttttactgtagggcttgaaaaacagtcaatacctgagaagaagggtcatgactctagtttgatgcccagtgtaccgctgagagagctaaatggtgcagggccccaagctaggacacgtacatcagaaacaccgaagagagtcctgaaatcaccaggttccagagaacttgctaacctctttagaaatgaagtatctccagtattgcaatctagcaggcgaaggagaaagcatatgtccacagtccgtgtactacttagccaaagtatgggcaatgaaaccctcaacgatcaaacaaagattttgatacattttggattatcagtggcaacaactatttcagaggctacacactttgttgctgaaaagtttgcgcgcacaaggaacatgctagaggcaatagctacgggcatacctgtagtcacaccggcatggcttgaatgctgcagggaagctaggagtttcattgatgagaaaagatacattctgagggatataaagaaggaaaaggagctaggctttagcatgcctgtctcactaagccgagcttgcaaaaaacctttgttagagggtagaagagtgctaatcacaccaaatgctaaacctagcaaggagcttttgaaaagtttagtagtgactgctcatggcaaggtgttggagagaaacgcaatgtccaagatgaagaatagaagtttaatgggagcttttgtaatctcttgtgaacaagactacaaaatatgcgtgccattcattaagaacggttttgaggtgtttgaatcagagcttgtgcttaatggtattgtcacccagaagctagaatttgaaaggtacgctctttctcgtcagattgtagcgttatcatttccaatggaatgaataaattaggtactatgcaaccaagcgtattattgtacataaatccttattatattcctctagttactcgtattcgtatgtttcctcgcaatttgcgaacgcttgttgcaagtatttatccctgcagcctcttcttggcatgactaaaaaaaaaaaaaaaaactcgagactagttctctctctctcctcgtgccgattcctgcagcccggggga

SEQ ID NO: 15840 - DNA, 190 bp, Oryza sativa
  Clone ID: PAT_MRT4530_21646C.1
gcacgcgagggctgggcctctatagagggcacgccttttttttttttttttttggtcgcacggcagcaattatgaacgatagtatcacagggagagcacagatagaagacgtactgaaaaaagtggagagcaatcgtgcgcgcatggaggagcgcggcctagagtgtacagctgatacagagagaaaagg

SEQ ID NO: 15841 - DNA, 321 bp, Oryza sativa
  Clone ID: PAT_MRT4530_21647C.1
atggagcacggacgacggggggaagaacctggacgggaaaccggctgggaggtggtcgacgcacctgccgccgacacgtgccggtcgggctaccccgtgtgggctgggccctttttctgggccgtgtcgacgaatcgacgattgacttccgacatactgcaggaaagcggaattccagtacctcgtatccaattcctttgcacacagcagttagctagcaaacgtaccaacctcttcagtgaaaacagaagtaccaggagggatcctttcaaaaatactccctccgactcaaaatatagtaacgatgagacctatcgacta

SEQ ID NO: 15842 - DNA, 387 bp, Oryza sativa
  Clone ID: PAT_MRT4530_21648C.1
caaggtaacccggttgccacagggaaattgcccccgggtttcgaaccaccaacagcaggtcccgggaggctttcttcaggcaggtgcccgcatagagtcacacccaggcttcaaccacaaaggagcggcagacaagtggacaggctggtggcaccccaggaggcagggagcatgggcagaaaggccacaatgcacacagcactgacactgcgcctgcacagactgcacatgtgcaatggtgacgcaacccagctgggtaatcacaaactgcagcaacagcacagcacagcacagcacttgtgcactgcacgcacagcactgcagggaggaggtttgcttgccagatgaaaatgggtaagctttggggtcgcacataatagtgacagg

SEQ ID NO: 15843 - DNA, 529 bp, Oryza sativa
  Clone ID: PAT_MRT4530_21649C.1
gaaccaccgtaaagactcgaattcacaaacagccgagggacaatattgggctctcaaagcgtcgctctttaaccgaacagaaatgaacgacagttattcgactgacctagggcacgttggaagcagatcttatcggcccatgaaacgagagcgctggccgggggcaaaacttaacacatactataacgagatctctcagctggaaagatgcaaaccaccttttgaacgaggctctcttcttcttggggggagccttggccacctggggaccggttggggccttcttttccgcgttcttgccgacgccaacagccaccgtttgcctaatgtatcgcgccgcatagcgaccaagaggacgacactcacaaaaggtctccacaaccttgggcgtacgggaggaatcttccttgaccataccaagctcaccgttcttgcaaaacttggcctccttttccagtgccttgccagaactgagctcagtcttggccaccagctcagaaaacttgacggctacgtgggaggtggggca

SEQ ID NO: 15844 - DNA, 1044 bp, Oryza sativa
  Clone ID: PAT_MRT4530_2164C.1
gaaacagtagacggtaggagatctaccggatatattagaagaagagagttgaccctgtttataaggaaaaccaggcccgaaaaccatacaactgcacagtttgctaaagggaaaccggcaaaaaccttacacagaagacacgaaaaagcctgcgacaaaactacgaaccgcagtagtgaccgaggggagagcaagaccctcaaggcgaagcctccaaggaggtgaacaacgacagaagccgctgccgacgcccgcccaaagaactaggctgggttttcacccaaagggagagaaagtccataaggcaacacctccaaggaggaaacggcgcccgcagacgtcgatgttgccgatcctggaagaccagacaaggctttcgcctaagacttcctcaaaggtgtagagcctctaagaaaccagagccagagtgttaagtgttatcgttgcctggctcatcggctgaacccgatgcagcagctccgactccgccttaacacaaaaactctagcatcgtagagggcaagcaccctgctcaaaactcggcactacgacagattcacacggacacaggacacttgaaggactggcgagacctaagagccctgactacaaacaaactggaccccaaacacggacgaacacttctcctcaaccaccgaaacgctccacggccgggtctggagatggccaaaagaagggaggagcaccaaggagtgaaggagtcgtggccggcatgaagaggaacagagagctgaagacaggggcaacaaagaccacggtgtcttccatgaatccggcgaggaactctggccatcacgggacaaaccctacgactgctgcaaccaccaccaacttcaccgccagcgcagagagcacattggggcgaacagatgtgcagctgcgccgaagtgatggtgaggggaagggaggaagggatgtcgggtgagtggagggggggcctgagcagctgccggcgatggccggaggaacagagaggaagagaaaaaggaggaagaccctctgccgattcctgcagcccgggga

SEQ ID NO: 15845 - DNA, 640 bp, Oryza sativa
  Clone ID: PAT_MRT4530_21650C.1
tcgcggcgtggggcgtgcttagcttcctcccacccttccttccttcctccgctcttctcaattttttcgctcatcggagtcggaggagcagcagatcgcccggaatcccgccgccgcgaacccaccgctccctcgcctcgcctcgcctctgattcaggcccccgcccccgccgatcctccacaccgcgcgcctagggtttcgactgctcatccatccgctcctgggggaaggagaggagccaccgccgcgcgattcggggcttgtatgtgtatgtagggttattagattcgtcgacctactgattctactctctcggatgacctagatttcacgtaggatcctctacttccaaccgattcgccttctgcttacttgttacatttacctctacacctctccactcttcctgctcctgcacctgcacctgctgttgctgttgaagatgagctccgagcccccagagccagagccgcccaagcgcaacatgaggatcagttactccagggactttatgatctccgttggagagaccgaccgctgcaagaagctgccccagggctttgatgcctcacttctcagtgatctgcaggagatgtccgctggcgtgcttgacaggaacaaaggctactacactacacc

SEQ ID NO: 15846 - DNA, 354 bp, Oryza sativa
  Clone ID: PAT_MRT4530_21651C.1
ttagaaatggaaattagccaatatacgattattgaacgtgatggtattgtaattgcttgcgcagctttgatacattatcccgctgagaaaatggcagaaatggcttgtgttgccgtacatcctgattatcgtgattctgcgagaggcgatattttactagaagcgattaaacgacgcgcctataaattaaatattgaaaaattatttgtattaactacccaaacaatacaatggtttcaagaacgaggttttgtgcaaatacaaccaacggatttacccgttgaaaaacaacgccattataattatcaacgtatgtcaaaagtattaatgttggcattggataattagtatttt

SEQ ID NO: 15847 - DNA, 281 bp, Oryza sativa
  unsure (1)..(281): unsure at all n locations
  Clone ID: PAT_MRT4530_21652C.1
cattcctccgctgctagaaccttctagaagctctcctcctcctcccatggcggcgacgatcgtttccgtnaaggcgcgccanatcttcgacagcaggggcaaccccaccgtcgaggtcgatgtgtgctgctcanatggaacctttgcaagggctgcagttcccagtggtgcatcaactggtgtctatnaagctctcgaattgagggacggtggatctaattactttgggaagggtgtttccaaggctgtcngcaatntgaacccggttntttgccccagtt

SEQ ID NO: 15848 - DNA, 705 bp, Oryza sativa
  Clone ID: PAT_MRT4530_21653C.1
atgcggcaagagggagcagatgtgcgcggcagccacaagatcaagaagacgactgctgatgtggaaggcgggggtgaatggatcaacgccctcccggaagaggtcctgcagcacgtgatgtcgttcctgccggcgaagcaggccgtccggacctgcgtcctcgcccggcgctggcgccacctgtggaaatccatgcctgctctgcgttccatccatgctcggataatgaaggtcgaattgcatgagcacaacgataactttttctctagccaagctgcctcttatctcccagcgcttgacgagcttcccagcatggaggccctatggatgaagttctgctatatagacggtgagaagatatcgtctcagtcacttaaagagctgaccatgattgactgtatattttttcgccaatttcggatttctgctccaagtttggtgaggttggaaataactgattgtgtgggtaaagctcctgtgctggaaataatgccatctctagtaaaggcatttatcaggttccgagactctagagatatttgtggtaaagaagaatttgggggtagttgtactaatgctagctgtgataattgtggtgctaatggtgttgacagtggagattgtgtgcttctgaagggtatttcaatggcaaaaagcttggagttggtagctgaacctggtgcgtatatgtattctgtaaattag

SEQ ID NO: 15849 - DNA, 204 bp, Oryza sativa
  Clone ID: PAT_MRT4530_21654C.1
ggcggccgcgctgggaagacgccgggagaaccggtggcgatcgccgggcgggggctgcagcggccaggctggggactaaagatgggtacctttaatcccggattcgcggtcccgtggattatgcatgactggggcgatgatgaatgtgtcaagatactaaagaactgcaagaaagccattccatctagagatgctggaggaaag

SEQ ID NO: 15850 - DNA, 476 bp, Oryza sativa
  Clone ID: PAT_MRT4530_21655C.1
cgaggtgttcgacttcctcgtcgacatcgtgccccgcgacgacgccaaggacgccgacgccgccgcggccgcggcggcggccggcatccacggccccgcccacggggtcgcggccaccgatccgctcgcctactactatgtgccccagcagtaatgtatctgattaacccctttcaagccttttctaagcgaaggatgtgttgttgtttgttgttgctgttgctgttcttgttgttgttgttgccgcgtaataagatatgttgataatttatggcttcccctgagcttaaagaatttgagcttttggttctagaatctgggtaaaattgttgtaatggggaagactgtatgactgtatttgtagtgcatgtcttaacttgtcggatagtgtaatccgataattattatgcggttagctggttacctctcatgattactgtgctcatgtgctgtgcaatttatgttctttgttttgg

SEQ ID NO: 15851 - DNA, 1190 bp, Oryza sativa
  Clone ID: PAT_MRT4530_21656C.1
accaagctccaagacaaaaataataaatgtttaagggagatatagagataggaaaagaaaaattttggccaaccttatagctaatctattatatgggtgggctttaaaatgggctaatagtaaatagggagctctactgttatccttgcttttaaaaacacgaggcaaattatccagctggaagcacagtttaatggccagcaatgaaagcagccactcgttccatgagcttgctggcctcgtggctgccgggcttgtcgacgaagaagtggtggccctcaccctccgactcgaaccagtccacctcgcgtccccacccgctggccttgactgcgtcgtagtacgcccgatcccttgtcctcctcggatcgaaccccgccgagcagaccagcatcctctcgcacgccagctttgtcaggctcggcgcgccggcggccatcgggttcatccgcggatcgtccagcccgccgttcgcgccggggaagatgaccgcccatctcttcttgacgccgccccagaactcctccggctcaacctccatcctcgtctcgccgcagaaggaagggtggagcaagatcgtgccctctatgcgtggcgccggtacgacggcgtccaggccgcgcacgcccacggcgatggtcatgttgtgggctatgttcccgccggcgctggcgccggacaagaagactcggccggtgtcaccgtgcgcggacaaccaagggtcggcgccggacaccgcccagctgagcgccgcccatgagtcgtcgtaggctgtcgggagcaggtgctcgggcgcgaggcggtagttgacggcgacggcgacgacgcgggcgcttgcgacgacagagttggtgtagcggtggacaggaggccagctcgctgacccgacgacgaagtagccagcatggaagaagaggaggatcgggagcttcttaccgtcgtcgtcggtagctggctggatgcacggtggtaggtagaggcgcgcggacacgccggtgacagcgtcgatgacgacgtccttggacgtgacgccggtctcgtcgtcgtagccggcaggcacactctccatgccgccggcacggtcggcgtggccatctttgtatagccggaagccaccgaggtcgatgaggatctcggcgctgctggaatccatcgcactgctcctggtaaagcttactcccaaatcgaag

SEQ ID NO: 15852 - DNA, 249 bp, Oryza sativa
  Clone ID: PAT_MRT4530_21657C.1
atggtcggtggggacatgtgccaccacccacgccccgcccgccaggatcatcgtgctggtgtcgctttctccacgccgccgccgctcctccgctccattgagcagcgtgggcgtgaagtaggagctggaaagggcgaggagcttgccctccaccgcccctctactccatcccgccgctctgcccgccgcctgctctgctccaccccgctcgtcacccgctctggccttctccttgcaggggagagatag

SEQ ID NO: 15853 - DNA, 1319 bp, Oryza sativa
  Clone ID: PAT_MRT4530_21658C.1
atgtcccaagttggatccgtccctgtcgacgatacgagtgctgatgctgcagcggcgccggaggaggagaagaagaagaagaagatggccggagccatattcgatacgcagctcatcattcgcgagccggtgacgggcacgggggccgccagccaccgcacgaccaccaccgggttccccttctcggtgtcgctgagcctcgccgcgccgccggggatctcccacgtccacctgcacccgatggcggcgccccacaccctcaagcacggcctctcctcgctcctcgccgcggacgcccaccacctcctcctctgcgtcgtcgtccccgtcaagaccaggtactacagctacgaccacccggaggagttcttcgtctacaccgccgcctctgccctcacccctacgctgacgcgcctccctgctttccccgacggccgccagcgctcgtccggggacatcggcatcttgacccatggtggtggtggcttcaccgtttcatctttgcagatgtggatggtgggggaaggaacaatcaccgttaaggagctagaggaaggaaccgcaatcattgaggagtttgccaagctcaccttactccattgttcaggcggcgacagggataacaacaacagcagcagcaacagctgggttgtcaagaagctagctctgcctccttttgactcagattatggggggcattctggactgataagcaagtggagcagccaaatcgccttctcccacggcggcaaggtctattgggctagctacaacattggccttatcttctgtgatgtcttggaatctctgcccaagctccatttgatcaagttcccttttcctgagagcgaaattcaactcttgttccatgttaagactgacaattgcggaccaactgcgtccttcaggacagtcggtgtctctgatgggaagatcaagttcgtagatgttgacaagtgccgctcccggccctctgccatcgttatcagggccgtcgaccctgcaaatgccacagatgggatgggatgttcgcatgatgtgctcgatgccaacggcctgcggggggccaccttcctttcaagaaatccggtttgcatcagtgggtaccagagtatcctgtggtgagcttactagacccacacattgtgcactttgtgctgcgccaacctatataccatgagcaggtctggatgatcacagttgacatgagggccaagtcagttgtgtcgtgcaagaactatccaaacggtgagaaggggtatgaatacaaggggctgttgttcaacccatattacatctctagtgagctctcaaagtaa

SEQ ID NO: 15854 - DNA, 1270 bp, Oryza sativa
  Clone ID: PAT_MRT4530_21659C.1
cgggcacaattgccatccctagtcccacgttgacgaccggcggaggttgatgccaaggatattgtcgttgccggcttgccgcgcatccatcgccccggtgcctggttacgtgcccgtcgcgctcaaaaatctcgtccacgcactgcacaaaacatcagttggggatcaaccccagggccttgccgtacgcgacgaggtcgtcgtacatctcgtccaggttcttgtacttgaactcgaacccttcgccgatgagcttcgccgacgagagcgagatggtcggcttcttggggtgatgctcttcgaaatcgcatctgacgttgtactgggggtacttggcagccaggaagccggcgatctcggtgaccgtggtgttgaggctgccgcagatgtacctccccgacgccgactcctcctcggcgacgaagatctcggcgcggcacacgtcctcgatgtggaccatcggcatcgaccacccggacgccttctcgatgccgttcctcaccggttatcaacgagaggcaggccgggacgctggtatcgaccctcaccgccggcgatgctccgacggcgacgaccgggcagagggtcaccaggctgagaccgttctcctccgcgaacttggtcgcctccttctccgaaagaaccttggagatcgagtacgccggcgacagcttctccatggatctgaggtactcgatgtcggaccaggacgactcgtcgaggacatggccggcgccttccagcggccgcaggctggagacggcggccgtcgacgacgtcaggatcacgcgcttcaccgtgccggctctcgcgcacgacctcatcacgttcagtgtgccctcgacgccgccttggactatctctttctcaggattctgagacttgaggttcatcggagcggcgacgaggaaggcgtaatcgcagccggcaaccgcctcgtcgaagctgccttcctcttccaagtcggcgcggaagatcttcaaggggcctagtgcttgcaactccttgaaatgagagttcttctccatatcatcggggtttctgactgtcgtcttgacagcgtatcccttctgcagcagcatcttgatgagcgccgaagcgatatacccgctgccgccggtcacgcacgccgtcttcctctcaaccgccgacatcgtcgtcgtcgatcggtcgctacaacaacccaccagcccagatgagacgcacaggacgaggaatttatgtttgttgctgtactttgggaagagttcaatttgtccggacgcgtggg

SEQ ID NO: 15855 - DNA, 628 bp, Oryza sativa
  Clone ID: PAT_MRT4530_2165C.1
gaaaaaaaaaatttttatccccaaaaaaggggggggccaaaaaatttaaaaaaaggggccaaaacccggggaaaaaaaaacaaggggcccttttttgaaaaaaaaggcccccccaggcgaaaaaacccccccggtaaaaaaaaaaaaaaaaatcgcatgggaaaaaaaaggggcccctgccttggaaaggaaaaaaaaagggcaggggggggaaaaactgggaaataaaccaaggtttccaagggggccaactttccccaaaaaaatttggggcctttttttaaaaaaacccccttaaaaggttaaatttggctttactagccccccgggtttttttttttccaaaaaaaatggtttaaaaaaaaaaaacggtctttagggaaaaaaaccaaccccggtttgggggattccaaaagggggttttggaaaacccggaaaggaaaaaaccccggggcaggggggggaaaaaacccaaaaacaatttgggggccacccgttccccatgtttaaaaccaggggggggggaaaaaaattttaaggggcctttttttggggccaaaaaaaaattttttggaaccccccttttggaaactttttgggttttgccaaaggggaaggccttaacccc

SEQ ID NO: 15856 - DNA, 267 bp, Oryza sativa
  Clone ID: PAT_MRT4530_21660C.1
gggaattacagcacgaagcttgatgtttttttggctaagacaaagacggaattctccgtttagaaacagattatttctaactacgattgtggaacatctatacatatgactgtgtagattaagtgggaagatctcaactcgatcctcagtaaggagaatgtcgaaatgtgacatgaaccgaacgattggtcacgaacggtgaaggctctaactagctgcccaaatggacatgaacagaagctcattcagcgttcagatctaaaaggg

SEQ ID NO: 15857 - DNA, 1362 bp, Oryza sativa
  Clone ID: PAT_MRT4530_21661C.1
ttttggttttttttttttttttgttttctccacgggccagaccacaacattcctgttacatgaacagaacggagtacagccaaaccgccaaatgttttggaaaacttggtactactagcaatgtagcaattgcatatttgcatagacacaatggtgtttttgaaagcagcacacgtttggtcgtaatcgccaaatcaggggaatcacgccgtccatcatcaccatcagttggggatcaacccaagggccttgccgtacgcgacgaggtcgtcgtacatctcgtccaggttcttgtacttgaactcgaacccttcgccgatgagcttcgccgacgagagcgagatggtcggcttctcggggtgatgctcttcgatgcaatcgcatgacgttgtactgggggtacttggccgccaggaagccggcgatctcggtgaccgtggtgttgaggctgccgcagatgtacctccccgacgccgactcctcctcggcgacgaagatctcggcgcggcacacgtcctcgatgtggaccatcggcatcgaccacccggacgccttctcgatgcccttgaggatgttcatcatctcttcctcaccggttatcaacgagaggcaggccgggacgctggtatcgaccctcaccgccggcgatgctccgacggcgacgaccgggcagagggtcaccaggctgagaccgttctcctccgcgaacttggtcgcctccttctccgaaagaaccttggagatcgagtacgcccaggagatatcccgttggttgatctgaggtagtcgaggtcggaccaggacgactcgtccaggacatggctgctgccgttgccgtctccttgcagcggctggccggagacggcggccgccgacgatgtgaggatcacgcgcttaaccgtgccggctttcacgcacgacctcagaacgttcagagtgccttggacgccggcttccaacagttctttctcaggattctgagacttgaggttcatcggagcggcgacgaggaaggcgtaatcgcagccggcaactgcctcgtcgaaactgccttcctcttccaagtcggcgcggaagatcttcaaggggcctagtgcttgcatctccttgaaatgagagttcttctccatatcatcgggatctctgactgtcgtcttgacagcgtatcccttctccagcagcatcttgatgagcgccgaagcgatatacccgctgccgccggtcacgcacgccgtcttcctctcaaccgccgacatcgccgctctctctccggtcagttaattacctctcctatgacagagaaggtgacttgggtttactcccaggtagaatccgagcagcacactgatgatgaggtttaat

SEQ ID NO: 15858 - DNA, 1215 bp, Oryza sativa
  Clone ID: PAT_MRT4530_21662C.1
tcagttggggatcaaccccagggccttgccgtacgcgacgaggtcgtcgtacatctcgtccaggttcttgtacttgaactcgaacccttcgccgatgagcttcgccgacgagagcgagatggtcggcttctcggggtgatgctcttcgatgcaatcgcatctgacgttgtactgggggtacttggccgccaggaagccggcgatctcggtgaccgtggtgttgaggctgccgcagatgtacctccccgacgccgactcctcctcggcgacgaagatctcggcgcggcacacgtcctcgatgtggaccatcggcatcgaccacccggacgccttctcgatgcccttgaggatgttcatcatctcctcgtcgccggttatcaacgagaggcaggccgggacgctggtatcgaccctcaccgccggcgatgctccgacggcgacgaccgggcagagggtcaccaggctgagaccgttctcctccgcgaacttggtcgcctccttctccgaaagaaccttggagatcgagtacgcctgcgtcggcgacagcttctccatggatctgaggtactcgatgtcggaccaggacgactcgtcgaggacatggccggcgccttccagcggccgcaggctggagacggcggccgtcgacgacgtcaggatcacgcgcttcaccgtgccggctctcgcgcacgacctcatcacgttcagtgtgccctcgacgccgccttggactatctctttctcgagatcgtcggacttgtggctcttgtcgtacaccggagcggcgacgaggaaggcgtagtggcagccggcgacggcctcgtcgaagctgccttcatcctccaagttggcgcgaaagaccttcagggggccgagtttttccatgtccttgaaatgggagaccttctccgggttattgggatctctgacgcttgtctgaacagcgtatcctttctccaggagcatcttgacgagcaatgaagcaacgtacccgttgccgccggtgacgcacaccgtcttcctctcaacctccgacgacatcgtctctctctctctctccggtcagttaatacctctcctgtgacagagaaggtgacttgggtttactcccaggtagaatccgagcagcacactgatgatgaggtttcttttgctgattgcgctgttgtggcacttgccaggacaaatcccggagagcaggaacatcccggccgg

SEQ ID NO: 15859 - DNA, 951 bp, Oryza sativa
  Clone ID: PAT_MRT4530_21663C.1
atgtcggcggttgagaggaagacggcgtgcgtgaccggcggcagcgggtatatcgcttcggcgctcatcaagatgctgctgcagaagggatacgctgtcaagacgacagtcagaaaccccgatgatatggagaagaactctcatttcaaggagttgcaagcactaggccccttgaagatcttccgcgccgacttggaagaggaaggcagtttcgacgaggcagttgccggctgcgattacgccttcctcgtcgccgctccgatgaacctcaagtctcagaatcctgagaaagaactgttggaagccggcgtccaaggcactctgaacgttctgaggtcgtgcgtgaaagccggcacggttaagcgcgtgatcctcacatcgtcggcggccgccgtctccggccagccgctgcaaggagacggcaacggcagcagccatgtcctggacgagtcgtcctggtccgacctcgactacctcagatcaaccaacgggatatctcctgctcaggcttacgcgatcgccaaggttctctcggagaaggaagcgagcaagctggcggaggagaacggcatcagcttagtggcggtgtgcccggtcgccaccgtcggcgcgtcgccggcgccggtggccaacgagagcgtcgccaacgtcctctccttgctgtccggcaacgaggagatcaacaccctgagaatgattgaccagtactccggcgggctgaagctggttcacgtcgacgacctctgccgcgccgagatattcctcgccgagaaagcgtcgccgtcgccgtcggggagactcggcggcggcctccctgagaagccgacgatcctcctctcgtcggagaagctgaccagtgaagggttcgagttcatgtacaagacggtggatgagatgtacgatgatgccttcgtggagtacggcatggcactcgggattctgcactactga

SEQ ID NO: 15860 - DNA, 506 bp, Oryza sativa
  unsure (1)..(506): unsure at all n locations
  Clone ID: PAT_MRT4530_21664C.1
tggaccacagggcatgctattgatattctcgcacgaaacaccactttgncagaagtggtctgngattaccggcacngtacnngccatgggnggggggntnnngtgggaatcttcatnaangtcctcntctaattancntcaaaccttctgctanaaatgtaccactacnagcntcgatgactgtaacngatnancctggttactatgaagacggaagctttggtntatggttggaaaatgttctnatacttnaagaaccaatnctanatttnattttgganatnacggtnnttnngctttgaacntattacatggacccctnccccacaaaactgatgcacaccccttacttacccctnctnaaattnaatgggttaatgcctatcactcggattgccaaaaaattttgcaaccttacctcaatgancncgagancgaatgctnaaganactacngaacctatcnctgcgaactgttnncntccatcactanctggttgacgctac

SEQ ID NO: 15861 - DNA, 1986 bp, Oryza sativa
  Clone ID: PAT_MRT4530_21665C.1
atggacacgccattgctgctgctgcttcccttcctggcggcatgtctgctcgcgccgcggcacgcggcggaggcggccgtcacgagctgcgcgccgaggaggtgcgggaacgtgaccatcgcctacccgttctggctgccggactcatcgccgccgccgtcgtcgtcgtccgcgccgtgcggccccgcggcgttccaggtgaactgcgacaacggcagccgcgcgtcgctggcccgctccttccgcagcgggtacaagatcctcggcgtgtcgtacgccaaccgcaccgtcgtcgtcgccaacgacaacgtccagaccgacgccagcggctgcccggtgcccaagatcgacgtctccgccagcctcaccctcgcgccgttcaccgccagcccggccaacagccagctcgtcttcctcttcaactgcaccagcagcagcaggccgccgccggcagggttcgtcaacgtcacgtgcccgggagcgaaggccgtggtccggctcgacacgagctacaacaacaccgccgccagagtggtcgccggaggctgcgactacgcggccgttccggtggtcggcgtgccgggggcgagcccgacggactacccgcagctgctccggggaggctacatgctggagtggagggcgcccgccggcgactgcatggcgtgcaatgccagcggcggccagtgtggctacgacgccgacacggaggcgttcgcctgcatctgctccgacggctcatcgcgcccggggatatgtgggtggttagaactgacaaaaggaaatgcaaagaagtccgggaacaaggtcatcctgatagtgtcactgtcgatctgtgcgactgggttggtgctattggcatgcatcgccatcgtctacaagtgtcgccgacgtatgcaaaatcgtttcagttttctgaacgccatggacggtgcaagcagaacggatactgcaaaggtggagaagctgctgcagagttacggatccctagctccccggaggttcaggtactcggagctgaagaagataacgaagtccttcagccagcggctcggcgagggcggctacggcacggtgttcagcggtacgctcgccgaccgccgcgccgtcgccgtcaagttccttcaccacttcaagcccaacggcgaggagttcctcaacgaggtggtcagcattggcgggacgagccatgtcaacatcgtcttcctgctcggtttctgcctcgagggctccaaacgagccctcgtctacgagtacatgcccaatggctcgctggacaaggatgttctggggtggaaggtgctgcaggagatcgccgtcggcgtggcgcgggggctggagtacctgcacgacgggtgcaacacgcggatcatccacttcgacatcaagccgcacaacgtgctcctcgacgagggattccggcccaagatcgccgacttcgggatggcgaagctgtgcaacccaaaggagagcatcctgtcgatggcggacacgagggggacgatagggttcatcgcgccggaggtgttctcccgcgggttcggcgacatctcgaccaagtccgacgtgtacagctacgggatgctgctgctggagatggtcggcggcgggagcaacgtcaaggcctacgccgagaagggcgccagcggcacgttcttcccgctctgggtctacgaccacctgctcgaggacggcggcgtgctgcagagcgtcgccgccgccgccgccgccacggccggcggcggcgccggatcaccgggaggcgaggagatcgcgaggaagatggcgctgatcgggctgtggtgcatacagaccgtgccggcgaacaggccgtcgatgggcaaggtgctggagatgctggagagaagcgtccacgagctcgccatgccgccgcggccgtaccactcgaactcgtcgtccccgtcgcggccgtcgagctacccctcctctgcctcggatttcacgcagcggtcagtgtcgtgttga

SEQ ID NO: 15862 - DNA, 380 bp, Oryza sativa
  Clone ID: PAT_MRT4530_21666C.1
tagtggatcccccgggctgcaggatttatctgatggcctggaaagaataagggaggataaacttctttcagagcttcatccttcttttacttctcatcacggtgatctggaattgctgtatgctttgaaaactcaaggctagatcagaatttcttgacaccgcattcgtcactgtcgttacagaggtacatctggccattcgggctcagtccggtgaaaggttgtatataaaaagcattctagtggttctctttcttttttcgtgatgtttaaaatataattcgattactttgtaatatatagattttcattgtttgcaaggatcagttgaatttattagcgatttttataaatagactaagtaaatatccttctgttta

SEQ ID NO: 15863 - DNA, 2278 bp, Oryza sativa
  Clone ID: PAT_MRT4530_21667C.1
atggacacgccattgctgctgctgcttcccttcctggcggcatgtctgctcgcgccgcggcacgcggcggaggcggccgtcacgagctgcgcgccgaggaggtgcgggaacgtgaccatcgcctacccgttctggctgccggactcatcgccgccgccgtcgtcgtcgtccgcgccgtgcggccccgcggcgttccaggtgaactgcgacaacggcagccgcgcgtcgctggcccgctccttccgcagcgggtacaagatcctcggcgtgtcgtacgccaaccgcaccgtcgtcgtcgccaacgacaacgtccagaccgacgccagcggctgcccggtgcccaagatcgacgtctccgccagcctcaccctcgcgccgttcaccgccagcccggccaacagccagctcgtcttcctcttcaactgcaccagcagcagcaggccgccgccggcagggttcgtcaacgtcacgtgcccgggagcgaaggccgtggtccggctcgacacgagctacaacaacaccgccgccagagtggtcgccggaggctgcgactacgcggccgttccggtggtcggcgtgccgggggcgagcccgacggactacccgcagctgctccggggaggctacatgctggagtggagggcgcccgccggcgactgcatggcgtgcaatgccagcggcggccagtgtggctacgacgccgacacggaggcgttcgcctgcatctgctccgacggctcatcgcgcccggggatatgtgggtggttagaactgacaaaaggaaatgcaaagaagtccgggaacaaggtcatcctgatagtgtcactgtcgatctgtgcgactgggttggtgctattggcatgcatcgccatcgtctacaagtgtcgccgacgtatgcaaaatcgtttcagttttctgaacgccatggacggtgcaagcagaacggatactgcaaaggtggagaagctgctgcagagttacggatccctagctccccggaggttcaggtactcggagctgaagaagataacgaagtccttcagccagcggctcggcgagggcggctacggcacggtgttcagcggcacgctcgccgacggccgcgccgtcgccgtcaagttcctccaccactccaagcccaacggcgaggagttcctcaacgaggtggtcagcattggccggacgagccatgtcaacatcgtctccctgctcggcttctgcctcgagggctccaagcgagccctcgtctacgagtacatgcccaatggctcgctggacaagtacatctactcgacgtcggcggcggcggcggcggaggcggaggaggcggaggcgacggcgagccctgacagggatgttctggggtggaaggtgctgcaggagatcgccgtcggcgtggcgcgggggctggagtacctgcacgacgggtgcaacacgcggatcatccacttcgacatcaagccgcacaacgtgctcctcgacgagggattccggcccaagatcgccgacttcgggatggcgaagctgtgcaacccaaaggagagcatcctgtcgatggcggacacgagggggacgatagggttcatcgcgccggaggtgttctcccgcgggttcggcgacatctcgaccaagtccgacgtgtacagctacgggatgctgctgctggagatggtcggcggcgggagcaacgtcaaggcctacgccgagaagggcgccagcggcacgttcttcccgctctgggtctacgaccacctgctcgaggacggcggcgtgctgcagagcgtcgccgccgccgccgccgccacggccggcggcggcgccggatcaccgggaggcgaggagatcgcgaggaagatggcgctgatcgggctgtggtgcatacagaccgtgccggcgaacaggccgtcgatgggcaaggtgctggagatgctggagagaagcgtccacgagctcgccatgccgccgcggccgtaccactcgaactcgtcgtccccgtcgcggccgtcgagctacccctcctctgcctcggatttcacgcagcggtcagtgtcgtgttgaccgggaagcacagcgtgaaaagtggcgatggaatgactatacttgaagcagacaactggctagtagactgtaaattaaagaaaaccagagtgggagctttggttttgtatgtagagcagattagcaagaactaactaaaattagactgttattactgtttgaatcattaattcgttctcttatggttttctgtggaaaaaaaaaaaaaaaaaaaaaaaaa

SEQ ID NO: 15864 - DNA, 335 bp, Oryza sativa
  Clone ID: PAT_MRT4530_21668C.1
aaaacattagggggggttttatattttttttttttttttttctctcctcgaacaaaaatgacgaaaacaaaaaccatcggaaaaaaacaaaaaacaacaaacacgctggccacaaaaccatccaacacaaaaaaacccctgcaaaacaaagggcccaaaaaaaaaagcccgaaaccaaaaaaaaaaaaaacacaaaaacggggaaaaacacaaaaccccccacgagtcccaaaaggcccccgagggggcccaaaccggagacaaaggcccgaacgaagaaccccaacatggagaacatggccaggcggcccttcctgatctcccaaacaccaaac

SEQ ID NO: 15865 - DNA, 447 bp, Oryza sativa
  unsure (1)..(447): unsure at all n locations
  Clone ID: PAT_MRT4530_21669C.1
aaaaaaaagcaaagcccgcgaccataaaaattttattcggggggaaaaaaaaaaatgggggagggaaaaagggggaataatatttaaaaaaaaacaggatcagatataaataaaacaccaagggggaagggggcgaacccccggcgggggggcgcggggggagggcaaaatcgtcgggcccggggagcccctcgggaaggggggcaaaggccccctttttgaacgccaggggggcctttttcttctggaggagatacctccaaaagggggggaagggggtngaaagggaagggggccgacacctccctaaaggggggggaaaaacgggcccggacccccgggggggggaaggatggtgaccggggtagaaggaaaaacggggaaattgggggggggtacttgggaaaaaaggtggggccggggttaaaaaatttggggggggggggg

SEQ ID NO: 15866 - DNA, 210 bp, Oryza sativa
  Clone ID: PAT_MRT4530_2166C.1
atgacacagcagttctcacagaagagtgagctgtacagctttgggtctgtcatgcttgagctactaagcagaaggcttcccctagcgaagggcagatttattgatcgggaattcaggatggcaatagatgcaagcaactacgactactatggcctgcaatgcatcatcgacctagctattgacgacgcaaccatctgctacagagtttga

SEQ ID NO: 15867 - DNA, 1718 bp, Oryza sativa
  Clone ID: PAT_MRT4530_21670C.1
atggcgaggacggcgcggctgctcgcggcggaggacccgccgccgccgccggcggcggccgcggagaggccccggccggcggcggcggggtcggggctccggtcgctctccagcgccgcgtccgggctgtgggaccgcctctcggtcctcggcgcgggcgtctccaagctcgagaaggccctcggcgaccacttccccgagggcgcgcgctacttcggcctcgagaacttcggcaacacctgctactgcaacagcgtcctgcaggcactttatcattgcatcccttttcgggagcagttgctggaatattatgcaacttacaaaaacacagaagactccgaggacaatttgttgacttgtctggctgatcttttttcacagataactctagcgaagaaaaggactggtgttcttgcaccaaaacgttttgttcaaagagtgaggaaacagaatgaattgttcagaagttatatgcaccaggatgcccatgagttctggaatttcttagtgaatgatattattgatattcttgaagaagattgtagaactgcaaatagttctcctgagactactcctgaagaggtctcaaatggggcagccaatgctttagcaaatggagccagagaaaggccattagttacattggtgcacaggacttttcagggtattttgaccaatgaaaccaaatgcctaatgtgtgatactatcacagcaaaagatgagacgttttttgatttgagcattgacgtggaacagaatagttcgctcacaagctgcctgaagagcttcttttccactgagattttaaatggcgaggataagttcttttgtgacaaatgcagcagtttgcaagaagcacacaagagaatgaagataaagaaggcgccacacgtattggtgatccacctgaagcgcttcaagtacgttgagcagcttagccggcacaagaaactgtcgtaccgagtggtatatcccctggagctgaagctgggcagcatgtctgaagacgctgactgcgagtactccctctttgcggttgtagtccatgttgggagcagccccaaccatggacactacgtaagccaaattaaaagccatggtaactggctttctttcgacgatgacaccgtccagatcagcgaggaatccaccctgcaaacattctatggctcttctcgggagcattgtggtggcaacacagatcatggctatatcttgttctatgagcgccttggtgggaagagctaggaacttcctttggcatttctccacctggttgcttccgttggtagcctttgccgtcaatgacagatgcagattctctggaggaaggcacatgtttttttttgcctgttacctccatgaggaaaactggctcatgcaaaggttcagtatgaccgacggttgttgtaacagggacagaggtgctagccaggtagacaggtagtagtatgcaccgaaaggatgggaacctggttttatctgtgtaaatagaagtttttttataccacagtttagtcatttattaaatagagacatcttacagttttattactatgtatatacataaacaaatataacagcttatctagggagatgagagttaaatctcactattgagcttccctttttctttgtttattagtagtagtagttaggctaggatgaacaaaaaaataatttggcttcagattcatcaaatgccttttaaaaaaaaa

SEQ ID NO: 15868 - DNA, 119 bp, Oryza sativa
  Clone ID: PAT_MRT4530_21671C.1
cacaaccattccctgcctttgtataatgctcggggggttaatgaaacacgtgattgcccatacggtgcaatttatttagaattaacatgatagaagctagtgtacctttgtcatagtat

SEQ ID NO: 15869 - DNA, 246 bp, Oryza sativa
  unsure (1)..(246): unsure at all n locations
  Clone ID: PAT_MRT4530_21672C.1
aggacacctcttcagcgnctagtaaattttccttcncttgtgctagtatttatttaccncccgtgtnccatttgcatagacgagantctgcatggttttttctttatgtactctgcgtatacnaataagatcatgttcttttaaactcagnatatatagtagtagaagaattggccgtatcgatggtttgggtaagcaatncngaatacagaaaaactgtctttnatgaaaaaaaaaaaaaaaaaa

SEQ ID NO: 15870 - DNA, 165 bp, Oryza sativa
  Clone ID: PAT_MRT4530_21673C.1
caaataagaagaagagctgtactgaatttttgttcaagggaagagaggattaggaacaggattaattaaagcataagtccaccacatttcacgtcactaccactttatttcactacaccaccctgaaaacacaccacgttcacacatgttcggatgcaatcttta

SEQ ID NO: 15871 - DNA, 462 bp, Oryza sativa
  Clone ID: PAT_MRT4530_21674C.1
ctctggatcccttagtgaggggcgccctcttctttttttttttttttagctcataggatctagatactagggacgtttgtcgcaaccaacattcgggccccaacccagcactaggccctcaaccatcagccttttggtagactatgggctgcatagaacgtcccagcaggcctactcacatcgtgctctttattcatgatcgcagggatataccgcgcatgatagaaccctaggagtagcctgtttgctgcaggcccacggcgggcgctctcgcaccgtccggtgccgtcccgtgcgccgcccgatcgcactagctggcgcaagcggcccctcgccgtgtgaggccgccctaaaacgcctgcgcctgtgtcgtgcgaagctgcgccgcctgcttgatgtcgggggcctgggacgctagcctcgccttggcgcggtccagctgggggccgcccggccggtgct

SEQ ID NO: 15872 - DNA, 297 bp, Oryza sativa
  Clone ID: PAT_MRT4530_21675C.1
ggctggcttggatcgccgaatcgtcgggtcgggtcgggtcgcgtgtccgaccggtcgcactggtggtggactgagaaggcgagctcaacgctcaacagtggcgatgattttttatcttttggggttggggttggagttggacggccgggggagccatgccccaaagtcgtgtacaggggaccgacgaccactggttcactaccaccaacagtgggcgggcggcgtggtgccccctacccatgttgcgtcttcttctattcttcttgggtctcagtcttaaatatatctctcaactag

SEQ ID NO: 15873 - DNA, 660 bp, Oryza sativa
  Clone ID: PAT_MRT4530_21676C.1
atgccggaggtggaggaggcgcggccgaccggtgcacaagcgaggaggaacgggcagccgaaggactccggcaaggcgggtggagggaggagcagccggaggagaggacaactctgcgacgtcgaaggaggagacggcgacatcggttggtgctcgggcacggcggaaggggctgccggaggtggtgcagtgacggcaacgccactatttactggcgaggacgcgtcttcggtggttttcccgcgaaacggaggtgatgccggagaagaggatgcacctgcgaggccgagggtggcgacagcgcacgggcgaggcggcacaagcggctggaggcggccggcgccggggaaagagaaggaggcggcggggagaggcggtgcggccacgggggagctcgggaagaggaaaaaacgagagaatggaaggagagggtcccattttataggcgcggggtgggaggagcggggaacggcggtggaaatggcggccggcggccatggaaggtggccgggaatggcgaggccgttccgggtgaataagagcacgaatcaaggcagaattaggggggaattgaagaggaaggaaaggggattaattccccctaatcaattttggaatcccatgtttgaatcgcgcggatttgtgggaggaatcggctag

SEQ ID NO: 15874 - DNA, 200 bp, Oryza sativa
  Clone ID: PAT_MRT4530_21677C.1
cactgcataacagtttcgatcgatgcagtgaaacccgcatgccaaggcaggaggtgagactgacatgcataccaagggggtataaatatctcgatctgtatcttacgagcatagggtagctaatctaccgtggccgtggacgactagcacgcacggtcctggatggctcttgagctattcttgaacgccttgtcggagga

SEQ ID NO: 15875 - DNA, 278 bp, Oryza sativa
  Clone ID: PAT_MRT4530_21678C.1
caaatacaagcttattacctgcttgggggagctggcattgcatatttacagtctccttaggtgctaatgattagtgcttacggggcaaagcttattaagggggcataacgtttgttagatgaggtcggcatctatgctgcactaaaatgaatgggctactttattgctaacaaaaggacgatctcactatatcttaggcgatacacatggcatttatcaaacatctattgtcatttggagctgagtgtgccttgtttaagagaaagatctcaacagtc

SEQ ID NO: 15876 - DNA, 2412 bp, Oryza sativa
  Clone ID: PAT_MRT4530_21679C.1
atgcagatgccaaatgataacctagacatcacccaacgcagcattctttctaatgcatcgtgtcttgatcatgcagaagaaataacttcatatgatactgatggttatgacgatagaacaatctcatttggaagtagctgtagcacaatacctgcaagttatccatatattagccctttgcaaagaaatcacctcatttcagacacacgggactgtacttggactgctcttatgcaagaatctctggaagcgtctaacagtaacaatggactcaatgaagattgcagtgacttgactttcagtaatacagaattttcaggtgggaataaaatgcaaaatcaagttgtctgggacaatggctgcctaacaagtccatcttttacctcaaattttttgcctttccctggagatgctgagtccgcattcacaagtgccagcactgtttgtaacttacaaaattttgttgatctcccacatgatatgaataataacgagcaagacaaaccatcttctgagctcagagcgccccaacagaaaggggcaacaagaagccatatttgtcaacatcgagatgaaatgcattctgctgaatggggaacatatcctggtaatgaagactctgatttgatgccagctgcacaggataagcagaataaagtattgcatgcacagttcaattcatctgttattaatatagatggatctgcgggtagtggcatggaaaagctacatggcctgtatgaatgtgaagagcaaatggaaattgattcacttcttaattcattcagtgcaccaagtgatgctttttcacaatcatatgaaatattccagaaaagtgaaagttttgttggtcttgacaaaaaggttaaattagaggaaagtgtttctgccacatgcttcagcaataccgttccttgtatgcaatctggggctcctgagtcagctatatctgatggatcttcttgtcatcaacagtataattctacttctcaagtaactgatttattttacacttcagcatctcaatgggcaacaacgtcaagttctgttttgcctttacctttttgtgggtccaatccagtgagttgcctgggggcaaatggtgaagatcacttgcttaccgatgaccatactttactgcatgagcaacgaagggctgtttgtggtactagctatgatttgactgataatgttgctaatcctgttcttgagttcacaaatattttggatggtcaatctagtctcaacaaaacatatatatcccatgatggattagtggcaaccaatggtgtatggaaaggacaccgtgacgtgatggaaaatcacccactcggagtatattcttcaagccatgccaggcatccacaaatggagctgcccatgacatgtacttctcatgttctactgcctcctccaaacctgtccaacaaccccaactcatcatttgtcagaggaacagagcttaagaaggccgagctaatgggagcatacagcactacagagaattacttggatcttgataattctgaaaggaagggcatcatctgccctaaatcttctgaacaaaatgttgccgagaatatttgtaataaagcagctgaataccaatgtaatgattatagccaaattgtttgtaatcagcaaacagttctactcccactgaataaagcttcacatttcggtggtttgccaacgaagaagtttgatggtaagctggtttcacggcaaaaaaagcggaaaagggcaacaagtcttctatcgtggcatgcacaagtaatgtctggttgtagcaagacacatcatacaagaaaacctgagttggattgggctcatgctaccaggagattggttgagaaggtagatgctgaaaatatgaagacgaaaaatagcacatttgtgtctcaagctcagaaaagacttgctttcacaactaagctgatgcagtacatacttcctgttctgccagatagacttcttgcagcaaatgctattgattcctgtgaaaccattgtataccgcacttctcgactggcccttcctgacgcatttaacccagctatatcttctgtcagtgatgcaaataacttcataccaactgagagcatgccacagaatcagactagcacttctgaaaaggaagacgataaacttgtacctgaagttctggaaacattcaccatgagagctgagagggcaaccacgtttcaagatttggcaaccgagacacgggatttggagcggtggtccattctccaccattttataaagttgcataaatactctagattgcatgaggatgatgtctcgaatattagacccaaaccctgcagatcaaccatccggaagcatgctgggcctgatcaagtgtcagtggactttctgaatagtgttcgttgtcgcctcctgaactag

SEQ ID NO: 15877 - DNA, 4503 bp, Oryza sativa
  Clone ID: PAT_MRT4530_2167C.1
atgggtgctattgttgacaaatcgattaatactgggaatgcaccttatgttttcaagatcaatgaagttgtgcaccaccgaattggtactcttgtgccatctcgtggttcacctccaaaattcgctcaattatacatctatgatgcagaaaatgaaatacaaaacaggctaaatatatttgaaaatgatggtgataatgtagataaagcagatcctgaaatacttgctgccctgtcatcgatgtttgatgctgagaatgcccttgtccaaaactttagatatgctaaagaacgtctttctgaacatggtgatcagcaaataacccttcgccttttaggctgcaacgcaaaagacgatgttcagtataacctaccaacaagtggtgaaattgctggaataatagtgggtgaattttctgcaaaagaatacaaatttgatgtgcttgtgtatgataaaaaccatggactgcaccagatttctccattgcacccatcttatatggccttgcagtaccctttgttattcccatatggtgaacgcggattccatcttggcattaaatataataattatgacggagttggaagaaaatatgtcacaatgccagaatattatagatatatgatgcactatagactaaatgaaccaaatcctttgacatgttatggtcgattaagtgatcaaattgatgttgatatattttctacaattgaagctaatagattacaatttttcattgaccatcgaaaagagttacgtggtgagtctgtagatgggatcgtagatgcgattgataaaggtgtcactgatggtgattcaattggaaagcgtgtcatacttcctgccagtttcattggagggagaaggtatatggtgatgaactatcaagatgcaatggcaatatgccatgtttatggatcacctgacctctttgtgacatatacatgtaattcaaaatggcaagatattgctgaagcgattcgatttgagcctggtcaacaaccatctgatagagccgatatcattgttcgtgtatttaatatgaaggttaatgaattcataactgatattagagagggcagaacttttggtaaagttcttgcaggatatgaattggttagcgagttcatgatgcatggtccctgtggtgatgcaaacaaaagttgtccttgcatgaaaaacgataaatgctcaaaaaactaccctaaagattttcaagatgaaaccattattgatgaagctgcttttacaatttatagacagagaaatgatggacgatgtattataaaaaatggaattcccttggataatagatctgttgtcccctataacatgaaattgcttaaaaaatacgaggcacacataaatgttgagtggtgtaacaaatcaaatttgataaaatatttatttaaatatatcacgaaaggccaagaccgagctaaaatctacttcgaaacaacagctaagacaacaaatgcatcaccgaatcatgaccttgctccacgtgatgaaatattagaatacatggatgcaagatttctttcgacctgtgaggcacttcatcgattgtttgaatttgatatacactatagagtacctcttgttgaacgattggttgtccacttacctgggaaaaactatgttagatatgagaaaggatcggacttacgagcagtgcttgaaagtcctgctgcgaagcgttcaatgttaactgaatggtttgaagctaacaaaaaatattctaaagcccattcattaacatactgtgaatttccgaaagagtggtcatgggagtcatcatctagagtatggcgccagcgaacacctgctgcaaaaattggtagaatatattatgtgcatccaactgctggtgaactttactacctacgcatgttgttaatgattgttaaaggcgctcaaagttatgttgatgtgcgtacatttaataatattgtctatgccacatttagagaagcatgtgaggcacgagggctccttgagggggacaatgaatggtatctacttttcgatgaagcaatagtctctgcatcttcacagcagcttagacaactttttgtgactatacttctttactgctctgttaatgatgtgcgatcattgtttgacaagtattggttatatatgacagatgatatacatagcaaactaaaaaaagcattggataacccgaattgtatcattccacctgaccatttgcttaatcttcttctccacgaacttgctaatgtgtttgcgaatagtggtggtaatataaaggattttaacctgccacatccatcgtctgtaccacatattcctggaactatgcttgctgagcttttaattgagattgcattaatcatatgggatgaagctctaatgacacataggcgatgctttgaagcactagaccgcacattacgtgatatactttctgagacatgccctttgaattctattataccttttggaggaaaacctgttgtcctgggtggtgacttcagacaaatattgccagttgttcctaaaggctcccgtagtgctataatcaatgcatcggtcacaaactcagacttatggaaacatgtgacaatattaactatgaatataaacatgagattacttaatccaatgctacctgaaaatgaaaaaaaggacatggatgattttagccagtgggttttcgctgttggtgatggaactttacctatgatagcaaaggaagatgcaaaaatatactcaagttgtgatacaatatcaaaatgctctgaacaaataccagattttgacttgctatatccacctgagtttcttaactcaatagacgccactaactttcctacacatagacttattcttaaagaagctgttgtggtcatgctacttcaaaatctgaatcaatcaattgggctatgtaattcttcaatattccatatggcgcatgtactgatttcacagctatcgtttggagattcaaacaaaagaatccttgcaagggtctccaggctatggaactttactgatctcaacaatcatacaaaaattttccacactgatcttgtcttactcgatgaaatggggactagcatacatgcccaaatttacccccctataacagaaaagatgaaacctctccttaaggaagaaaaggtttactacattgactcattcactgttagggctgcaaacagaacatacaggccagttgcaaacaacctaatgatcctcttcagtaaatggacaacacttgaagaacacattaatgtccctcctcatttccctggtattacattttcactgacaccattcgaagatgttccttcccttgtcgagaaaaattcattctacgttgttggtgcagtcactactatacgtcctaagtccagaaacgctgagagcttaaaaaggacattacagatccgcgatgcaagcaattcaactcttcctgtcacactctggggagaaagagcaacctcttttgatgctaatgacatatacaatgctggtcaaactcaagctcaagttgttgtgtttgttggaacacttgtgaaagattacagaggattaggccttacactaactggaagctcaccatgcaaatggtatattaatctaaatattcctgaagtagcagaactaaatgagagctttagcacaaactttcagccaatcaagtgggttgatgagcctgctacaggatacaaccaggatgtaccagaagaaaagagtattgcagaaatccttaatatcaaccctcacaaacacaagggaacatgttttatagtaaatgtgactgtcagaaggatatgtaatgaatattcttggtggtacaaagtagtattaatttccggcgatgatgatgctaatgctacatttatccttttcggaaggatcgcacaacggctactacgcaggcccatagaatctctcattgaagaaaatccaccaaacagtgaatacattccaagtgaaatcacgtcacttattggcagcaattttccatggaatgttagctttacacgggatactgttatgagaagtcaagagtgcctacaagttaatagcattatatccgctggtgcttcaaaccaaccactactccttatgtccccagatgcttcacaagtgacatcagctattgtctcagcaagctcaagcagctctgtccaaacagcaccaacaccaaatgaaacaagcaatgaatcacagcagcccattcaaccaagacaaaccatctcaacaccaaccaagttcactatcgctcagggaacacaggacaccccaactagcaaatcaagttcttcaacacctaccaagaaaagcattgtctcagtgtctcacatgcagtctagcaagaccaaacctaaaactgatgataagcccaaaactgacacaaaagctgaagaaaacatctcacatgataaatcttcaattgttgtcctgcctgatactgctgaaaatatgaggaaggcctacacctacagcaacacctccggttgctaa

SEQ ID NO: 15878 - DNA, 371 bp, Oryza sativa
  Clone ID: PAT_MRT4530_21680C.1
cccacgcgtccggctattgattcctgtgaaaccattgtataccgcacttctcgactggcccttcctgacgcatttaacccagctatatcttctgtcagtgatgcaaataacttcataccaactgagagcatgccacagaatcagactagcacttctgaaaaggaagacgataaacttgtacctgaagttctggaaacattcaccatgaggtttgatgagctgcaaaattccttctcaagagctgagagggcaaccacgtttcaagatttggcaaccgagacacgggatttggagcggtggtccattctccaccattttataaagttgcataaatactctagattgcatgaggatgatgtctcgaatattag

SEQ ID NO: 15879 - DNA, 368 bp, Oryza sativa
  Clone ID: PAT_MRT4530_21681C.1
ccagttttggctcattttcgccagcaagcagctggaggacggccggacccttgccgactacaacattcagaaggaatccaccctccaccttgagctaaggctcaagggaggtatgcagatcttcgacaagaccgtgactggcaagaccatcacactcgaggacgagtcctcggacacgatcgacaatgtgaaggccaagatccaggacacggagggcatcccccctgaccagcaacgtctcattttcgatggcaagcacctggaggacggccacacccttgccgactacaacattcagaaggagtccacccttacaccttgtgctcaaggtcaggtgtggcatgcaaatctttgtgaagaacctgacc

SEQ ID NO: 15880 - DNA, 1588 bp, Oryza sativa
  unsure (1)..(1588): unsure at all n locations
  Clone ID: PAT_MRT4530_21682C.1
gcacgagggtctcttcctcctaatcttgatactagttgatgggtggttgacgtttcatcgagctatcctagctcaaggcttctctatccctttctactctcccactcctctctaaccactgtactatatactagcactgaagctggacactgatacaaaattccgtactaatattgacaactgactacctatactggtgtggcaccattatatacctcttctcccgcctgccattactaaccaccagccggagctacattgcttcgagatgatgggaattcagagaatttgcatcgttcttgggatgctttttatacttgtgagagagggtggagctgtgacattcacgttcgtgaaccggtgcacggggacggtgtggccgggcatcctgtcgaacgccgggagcgcgaggatggacccgacggggttcgagctgccgcccggcgcggcgcgcgcggtgccggcgccgaccggctggtccggccgcctgtgggcgcgcacgggctgcacgcaggacggcaccgggaaggtcgtgtgcgcgacgggcgactgcggctcgggcacgctggagtgcgccggccgcggcgcggcgcccccggccacgctggcggagttcacgctcgacggcggcggccgcaacgacttctacgacgtcagcctcgtggacgggtacaacctgccgttgctggtggagccctcgggcgccctcggcgcgacggcgacgacgtgcgcggccgccgggtgcgcggccgacctgaacgcgcggtgcccggccgagctccgcgccgtgggcggcgcggcgtgccggagcgcgtgcgacgcgttcggcaagcccgagttctgctgcagcggcgcgtacgccaacccgaacacctgccgccccaccgcctactcccaggtcttcaagtcggcgtgcccgcgctcctacagctacgcctacgacgacccgacgagcaccttcacctgcgccggcggccgcgactacaccatcaccttctgccccgtcgccaccccaagcctgaaatctgcgggaggaacgacgacaccgacgacgacggtgccgggcgtgaccacggacgccccaccggacatggcaaggccgataggcagccaaggcggcggcggcggcgggggcgccggccaaggcgtgatgctgggcgacaactcctggctcgccagcctcgccatgggcgacgcgtcgtcctcgcggagagcctcgcggctggccctcctggccgcgcccctcgcgctgctcacgctccacctgccgcggctatagcggctgatcacgtacgcgaaaaccacccgaaatttttttggtcaaaagggcagggggatgcgggggacgtcgcacgattgcacgggccaccaccagtccaccaacacatcattaccaccaagagcgcgcgaacgccgaaacggtgtgcgccttcggtcgcttctgctgctgccgccgcggcnccggcggcacgggtggccggtgcgctcgacggtgtgtctgccggtgtcntgcacngtgtggggccancnaactcngtgtgtgngggcnatcgggtgattccgtttggccnanatccgcttgcccatt

SEQ ID NO: 15881 - DNA, 362 bp, Oryza sativa
  Clone ID: PAT_MRT4530_21683C.1
tgtggtatatccatatgcagaagttgtggatgatgcgtattgcttctttttaaccagcactcttctcttgtcatgatgaaggacaccacagattcaataaagccatacatattctgttctccaggtatgttgtagcagcgtccttccttcaatatgctaaaacaatttgagcttgtagatccatggaccgagaaaaaaaacagatgcaaaagaatgaagcatagtttactcctctgcatgctattggcaattgtgcctacaaaatgatgttgtatacttcgattcacggaaaatttactcctctcatggttgcttcttgcttgttttctcatgactcatgcattgggcgtcaatgatgccct

SEQ ID NO: 15882 - DNA, 1833 bp, Oryza sativa
  Clone ID: PAT_MRT4530_21684C.1
atggcgatgccctgccgcctccacggcgacatcctgctgctcctgctcggcgccgtcgccgtcgcggtggctcacccggcggcgaacgagttctgcgcggccgtcggtggaggaagcggtggctgcggcgtcggcggcggcggcggaggggacgggaggaggatcctgatcaggggcgggacggtggtgaacgcgcaccgggtggaggaggccgacgtgtacgtggaggacggcgtgatcgtcgccgtgcggcccaacatcccggttggtgatgatcatgtaaaagtgattgatgcaactggaaaatatgtcatgccaggtggaattgaccctcacactcacctggagatggaattcatgggaactgtaaccattgatgatttctttagtggtcatgctgcagcattggctggtgggacaacaatgcacattgacttcgtcattccagtgaatggcaatttaactgcaggtttggaatcctacaaacagaaggcagaaaaatctgccatggattatggatttcatatggccattacaaagtggaatgatgatgtttcgagggaaatggaaacgatggttaaggaacatgggatcaattctttcaagttcttcatggcgtataaaggttcattgatggtcacggatgacctactcctgcaaggcttacagaaatgcaaatctcttggtgccttggctatggttcatgcagagaatggggatgctgttgctgagggacagcaacgaatgatcgatcttgggataactggcccagaaggacatgctctctcaagacctccagttttggaaggggaagcaactgctcgggcaattcgattagccaagtttgtcaatacaccattgtatgttgttcatgtgatgagcattgatgcaatggatgagattgccaaggctaaaagagaagggcagagagtcattggtgaacctgtggtttctgggctagtacttgatgattcttggctttgggatccggacttcatgatagcttcaaagtatgtaatgagtcctcctatccgagaagcaggacataataaagcacttcaagttgctctttcatcaggaattttacagcttgtaggaactgatcattgcaccttcaactccacacagaaagctttcggctctgatgatttcagaaagattcctaatggtgttaatggtatcgaggaaaggatgcatattatttgggacagtatggtggagactggccgaatttctgtcagtgattatgtgagagtgacaagcacagaatgtgccaagattttcaacatataccctcggaaaggagcaattctggaaggatctgatgcagatattatcatcctgaatcccgagaggagctttgtcatgggtgcccacacacaccattcaaggtccaacacaaatgtgtacgagggcaggaaaggaaagggaatggtagaagtcacgatctcaagagggcgagttgtgtgggaggatggcattctgaacgttgttcccggttcaggaagatacgtcagaacaccgccttacagctacctgtttgatggcattgaaaagtcagacgctgcctacagagcctcccttcgtgcccctgtgaaacgtggcaaggctgctgcttaacgatgcccgctgctgatgaactacaagaactagtttctcacaaggtgaacagacgtctgctccatgcgtaacttcgttgtgtttgtgtatacaagatctcattattcatatcattttctgataggtgagaatgtaaaattacctgacactacactccagttttttaatagatgacagccattgactttttctcaaaaaaaaaaaaaaaaaaaa

SEQ ID NO: 15883 - DNA, 297 bp, Oryza sativa
  Clone ID: PAT_MRT4530_21685C.1
atgatgaaaaatccacttcatatcaatttactaatatacagtgaaatagctacatctatttatccagcactcacaaatagcaccgacctattagtagctgttggcgatcagcctggaaccccgaaggtgttcaacgaaatgcaaatcatgaactggaatgaactcgaacttgaacgtaagagaacctttgtgctggaatgtgccatcccacattcggaggcttgccacgccatgtgtcctacaacaaatggttcggaggcttgccacaccaccacgtgggatggcgtggctaagtag

SEQ ID NO: 15884 - DNA, 281 bp, Oryza sativa
  Clone ID: PAT_MRT4530_21686C.1
gtcgtcaccctaaaaaagaaggccggtgcctggcacaccgttggcatgggcagcatgcccttgaacaacattgcagttcacaaaagtatcccctcttttttataaaggctccaaatcaccttgaaaagagtaggagtgaacaacattcctggaattttacaggtcagcctctggaagggtgatgtgaatatacactccccatattaatagtgcacgcgtctattggagcatattcatgggtagtgagaggtacaccacagtctaacaagctgcacacaccc

SEQ ID NO: 15885 - DNA, 496 bp, Oryza sativa
  unsure (1)..(496): unsure at all n locations
  Clone ID: PAT_MRT4530_21687C.1
tttttttttttttttttttttttttttttttttttttttttttttttttttttttttttttttttttttttttttttttttttttttttttttttttttttttncaaagcccggaaggggggcccccagtttccccaaaccttttggggggggggccccccccccccccggaaaaagggtttttggggaaccccggccccccccgggaggtttcccggggtttaaaaaacgaaaaaaattccggcccaggaaacccctgaaacccccaggggtccgaaaatccggggggaaccaaaaaaaggggcccccccttcttccaagagggaaaaaaaccgggccggggaggtcccctgttggacccccggggaaaagggctaaaaaagggggcccgggtttttcgggtgccacaaatttaaaaaaaaaaaccccctttttccaccgttttttgccccctctggacatttttaaaactggagggggggccctccttttcccc

SEQ ID NO: 15886 - DNA, 126 bp, Oryza sativa
  Clone ID: PAT_MRT4530_21688C.1
atggcggatctggaccaacgccgcttcccgggctcctcctcgtcgggatctggaggtggtagatccggttctatcaatcaggttctgggcgtgtcagttagtttgatcctgcaactaacaagatag

SEQ ID NO: 15887 - DNA, 731 bp, Oryza sativa
  Clone ID: PAT_MRT4530_21689C.1
tcaattgctgctttcatccattgtaactgaagtggctgaagcgccattatcatcttgtatatccaatgcaccaagatcttctagcactctctcaagatttggctcatcaagtgacagtgttgggccctctctaggcagcacccgacagtgctgcgccctctggaggcggtggcgctgtgcccagcggatggcgccgctgctaggcgatggcaaacagcggaggcacggcggtggacggaggaggtgcgacgcggcggcggcggggaatggcagtggcggaggatggtggcggtgccccgctacgacgcaaggaagagagcgagctgagttggggttggggaagcagcgccgttgatgttctttggcttgctcagtgttcgatggttttgatcgatgattttagggttagaacgtatcgcgaccgtatcgggaattttttttattatctgaaaatcgtgaaaacaaccgatacgtacgagatacgtatcggggcatatccgatacttatccatatccgatatgaatacgtggcctgggaggcgtatccaggaatagggtcaatctgcagcagcaaaatcaacaatccacggatagatgtatcaatcgctaaggcacagcacaacaacgtctcgtacggttgtagtcggatcatcagcgtttctcccaaatcgaagtattatcatcaactcaccaaaagtcgggcctatcagagtcgtgagcatatcaagtga

SEQ ID NO: 15888 - DNA, 482 bp, Oryza sativa
  Clone ID: PAT_MRT4530_2168C.1
ccaatatgatattttcactgtcctcttatgcagggaacacgttttatagtaaatgtgactgttagaaggatatgcaatgaatattcttgctggtacaaagtagtattaattgccggcgatgatgatgctaatgctacatttatccttttcggaaggatcgcacaacgcctactacgcaggccaatagaatctctcattgaagaaaatccaccaaacagtgaatacattccaagtgaaatcacgtcacttattggcagcaattttgcatggaatgttagctttacgcgggatactgtcatgaggagtcaagagtgcctacaggttaatagcattatatcctctggtgcttcaaaccagccactactccttatgtccccagatgcttcaagttcactatcgctcagggaacacaggacaccccaactagcaaatcaaattcttcaacacctaccaagaaatgcattgttgtctcagtgtcttgc

SEQ ID NO: 15889 - DNA, 585 bp, Oryza sativa
  Clone ID: PAT_MRT4530_21690C.1
atggccagtgatcccactgagcttcgctgctcctcaccggagtcctccggcgatgcaggcgccgaggatcctgcggcggtagacgctgcggaggagagcggcggcgagggtggcagcggccacattgctgctggtactgaggcggcgccgccgcggccgccggagccggagccggagaaggtcgcccgccacggggtgctcccactcctcgggaagccctacttcacctgcatcatgtgcaagtcccatgtccagccgccattccaagtggtggtcccgaggtcgttcgcgccgctgctgccgtcgaggacgacgccggcgacgctgtcgtggcgggggcggtcgtgggggatgcggttcaccggcgggcggctgatccagcggctggaggccgggtggcgcggcttcgccgtggacaacgacctcaggctcggcgacgggtgcgtgttcgagctcctcgtcggcggcggcggcgagcaggagcgcgtcgagttcagggtgcaggtcctccgcgcggagatcccggcgaggatccggggccgcgccggcggctacacctcggccacccccatcgtcatagactag

SEQ ID NO: 15890 - DNA, 280 bp, Oryza sativa
  Clone ID: PAT_MRT4530_21691C.1
gggggaaaccaaaaaaaatatttttgcaaaaaccacaacttctttttcatttctttaggggacccaacacccacttgatcattatttggggggactaaacccatttttcccaacccaaagaccacgaactctgtggccccaaatccctccaaccccaattaacccctggtgagcttcgggccccccatttatttgccggggaccaaattgggggcctacccccaaacctttttttttaccgggaccgcaaggtagtccgagaagttcttgagggggccct

SEQ ID NO: 15891 - DNA, 212 bp, Oryza sativa
  Clone ID: PAT_MRT4530_21692C.1
acaccacagggggttctcataggggtggagggatgggcctgtatgaatttggcttctcgatattgctctgatgccagggagaagttcctggtcctattttggagcatccagaagagctgatggcttctaccctcattgcggcgtcgctacttcagcttgtaacccagtgtgtatgagtgagcaggtaagcatcaagctgggaccggaccgat

SEQ ID NO: 15892 - DNA, 504 bp, Oryza sativa
  Clone ID: PAT_MRT4530_21693C.1
atggcagcagtgtctataggacctgcattgcttggatatcagcggtatgccacaaacattgcagaagaaccacaaccacgtacggacagcttaaaatctttctttggtttcctgacatgcatatatgttcatcgatccctttttgtcataattaaccatagtaactgtctagtacctaagctcatgaagacaagcgatgacgatgagaggatgaatctgactgaggaggaggaggcggccctgaaggtgagacaccaagagtggatgaacaagttcaaccgcgaatacaaagacgaggcagagaaggcttatcgctttgagatattcaagtctactgtccgatttgctgagaagttcaatgctgaacaagtgaaagagcatgggtattgcaaatgcatactaggtaccacccaattcgcagatctcactctagaggaattcggacactgggttgatggtcgtacggacacttttggcccgcctaaggtcactaaatttgattaa

SEQ ID NO: 15893 - DNA, 318 bp, Oryza sativa
  Clone ID: PAT_MRT4530_21694C.1
atgatgttgttcggtgccttggccgcgtcgttcgccctaagcttcttcctcatcaccatcttcatctgccctcgagccctccgcattgcctgtcgccggcgtgatcgtccactggtcatggagcaggagcagcagcagccgacgctgcccaggttcggcctagacaccgccaccatcacgcgcctcccatcgttcatatatgtcacaccccaatctggcaccgccgtacaacggcacctgacaggagcgtgtcgtgggaaaaacggcgcgaaccgcttcctacgaaaccgtgatctcagtaccagtcccaggacatag

SEQ ID NO: 15894 - DNA, 1417 bp, Oryza sativa
  Clone ID: PAT_MRT4530_21695C.1
cgccgcgttgacccgctcgtcgtccgtccgttccgccatccgacggctcggatcctcccgcgccttctccgcatccgccgcggcggccccgcgccgcgacgcgaggggggcggcggccgcggcggtggcggtggctgccgggtcggggctggggatctggctgctgccgccgtcgccgcggccgctggcggactccgggcaggcggggaatgaggtggcggcgttcggcgacgtcgcggaggaggaggagcgggaggagaagcgcaggttcctgttcggagactcgtatcgcagaagggtgttcttcaactacgagaagaggattcggacgcgcagccctcctgaaaagatctttgaatatttcgcgtccatccggaacccagagggtgaagtttacatgttacccgccgatttgatgagggcggttgtccccgtttttcctccatctgaatcgaaaattgtcagggaagggagtctcaggggagagcgcaaccctggcgagctacactgtgccccgtctgaatttttcatgctgtttgacacgaacggagatgggctcatctcctttgccgagtacatcttttttgtgacattgcttagcattcctgaatcaagtttcaacatagctttcaagatgtttgaccttgaccacagtggggaaatagacaaagaagagtttaagaaagtaatggcactgatgcggtcctatcataggcaaggagctgcccatagggatggtttacgttttggtcttaaggttggtcagtcagtggaaaatggtggactggttgagtacttcttcggcaaggatggcaatgaacagttacgctatgataagttctccaattttttgaagcaattgcatgatgagattgttcgcttggaattcagtcactatgatgtcaaatcatccaagacaatatctgtgaaggactttgcattatccatggttgcttctgcagatatgaatcacataaacaagctacttgacagagttgatgattttgatgattatcctgatctcaaggatttgcgcattacctttgaggagttcaaggcttttgctgatctgcggcgaaaattagaaccatttgcaatggcaatcttcagctatggcaaagtaaacggtttgctgaccaagcaggatctaaaacgtgcagcaactcatgtttgtgaagtggacttgactgataaagtggtggacgtcattttccttgtgttcgatgcaaaccgggatgggagccttagcgcagatgagttcttgagggcattgcaaagacgagaaagtgatattcgccagccagcttcttcagactgtgatctagtgctggggagcgaaaacgaccacccactggagttctgcaaacacgattttgctgtaaatagtcttgcttatcaaagttaccgaaacatgtag

SEQ ID NO: 15895 - DNA, 570 bp, Oryza sativa
  Clone ID: PAT_MRT4530_21696C.1
atggcgctgccgcctcaggcctacttcgtccccgccgcgccgccgccgccgttccaagaagccactgctgcgctcgccgccggcgacgacgccaccgccgcgttggcggtgtttgagctggagcgcatcctggaagaagcggccgccgcgggcggcggcggcggcaatggctcaccgagctcgggctccgacgggtgctgctacggcctgcagggcgtggctccggcggcggaggaggagcggcggcggcggcggatggtgtcgaaccgggagtcggcgcggcggtcgcggatgcgcaagcagcggcagctcagcgagctgtgggcgcaggtcgagcacctccgcggcgccaaccgccgcctcctcgacgagctcaaccgcgcattgaggggctgcgccgacgtccgccgcgagaactcccgcctccgggacgagaaggccgagctcgccggcaagctccagctgctgctcccgcggcagccggcgccggagaagaacgccgccgacgaccagagtagctgctcctcggagccatgcaagaacagcactacgactaccgctgctgaatga

SEQ ID NO: 15896 - DNA, 466 bp, Oryza sativa
  Clone ID: PAT_MRT4530_21697C.1
gggcgcatgctttttgatgcgcccgaagcaattttattcaacttggccagaaccaattttttaccgaggaccacttttgaatgggtagaaattacccaggggccccgggctgctcgtcccgtgtttttgaacgggacacaaccgtggcggaacattaactcatgacccctaagtctcactaccatccatctcaccggttttcaaaaccttggcaaaatgtggcgccggggggtgaaaacatgttagccggagggccccggcccctccatggatccgggcacaaggatccatgcgcccttctactgacccgattagagccgatccttgagaggcccgggtggagccaaccatgccttgtccattgccgggacggagggtaccacgaggtccttaaagaagaggaccacctctagggctggcctgccgtttacatcgggacccctcataacctgggggcgagtaatgc

SEQ ID NO: 15897 - DNA, 2790 bp, Oryza sativa
  Clone ID: PAT_MRT4530_21698C.1
atggatcggcaatggatgtatgctgaccggcggtccaaagagtttattgacagtgtgcattattttttgagagtggccggagctaacaggcataagggttttatttgttgtccatacaagcaaggtgttgaaatggaagaagatgaagtggaagacgacaatattctggactttgctcagtacgttggatttgaaagaaatcaaacgggcgaggaggaaagggatgctgatggttgcgagcaggggcacaaaaagttggataccactctggagttcttgcaatggaaggcaaaaaatggtgttagtgacaagacatttgtcgatttattgaaactcgtcaagaacattcttccggagggaaacaaattgcccgagacaacgtacgaggcaaagaagatagtctgccctctaaggctggaagttcagaagattcacgcatgtccgaatgattgtatcatatatcgcggtgaggagtacgagaacctgattgtttgcaaagcactacgatacaagattagacgagacgatccaggagaagttaacgagcagctaacaaaaaagagaattcttactaaggtgatgtggtatttccctataatactatggctaaggcgtttgttcaggaataaggtgaatgctagaatgatgcgatggcacgctgaagagcgtcaacaggacgggatgctgagacaccccgccgatggttcgcagtggcgaaacatcgacagaaaatttaaagactttggaaaggacgcacgaaacacacggtttggtttaagccccaagcaacctggtaacgacatcgatgtgtacctaacaccactggtcgaagatcttaaactgttgtggaaaaaggaaggtgtccccgtgtgggacgaggacaaacaggaggagtttaacctacgagcgctgctgttcgtaaccattaacgattggcctgcacttagcaacctttccggtcagtccaacaaggggtacaaggcttgcactcactgtatggatgaaacaaaaagtatgtatcttaagcactgtaggaaggttctgtacatgggtcatcgtcgattccttgctgcaaaccacccggtacggaagaaaggcaagcactttgaacataaggcggaccaccgtacgaagcctaaacatcgcagcgggaaaacagtatttgctatggttaaagatcttaaagtagtgttcggaaaggggcctaaagttgaaagtacactagaagcacgtaatgatctaaagcatatggaacaacgcggcgaccttcacctggaaccaaaggagaaaggaagccattacttgagtccagccagctacactcttagcaaggtagagaaggaaagtatgtttgaatacttggagagcataaaggtaccgtctggacactccacgaatatcaagcgaataataagcacgaaggagaagaagttcacaaatctaaagtctcatgactgtcatgtgttgatgacacaactgctaccagttgtaataaggggtatccttccagacaatgtccgggcaacaataacaaagctatgtgctttcatgaacgcaatttcgcagaaggtcatcgatccggatagattagaagcccttcagaatgatgtggtgcaatgtcttgtcagttttgagttgatatttccaccttcatttttcaatataatgacacatctgctttgtcaccttgtcaaagagatcagtattctcgggcctgtgtacctacacaacatgtttcctttcgagaggtacatgggcgttctgaagaagtatgttcgtaactgtgctcgtccagaggcaagcatcgccaaggggtatggaacagaggaggtcatcgaattttgcgtagaatttattgaagaccttcgcccaatcagggtacctgaatcacgccacgaagggagactgcggggaaagggaactctcggaaggaaagcaataatgacggtagacaacaatttattccgtaaagcccatttcacggttctgcaacaatcttcattggtagctccttacatcgaggagcacttggctctagttcgcgccagaaacatcggtaagtctgatgcatggaatacacggcatcacattgatactttccccgcgtggctacgacaacatctcatgggtaacgagacgatcaaccaacaactggccttcctggcgaggggaccatctggattaatcgcgacattccaaggatatgagatcaatgggtacacattctacacgagagcccaagacatgaagagcacgaaccaaaacagcgttgttcgtatcgatgccataggatacgatggaacaactggcacatattacggtgccatcgaggacatatgggaacttgactatggtcctctcaaggtccctctgttccggtgccaatgggttcggttgactggtggaggcgtaatgattgatgacagtgggatgacaacggttgaccttaacaaggttggatactcggacgaaccttttgtccttgccaatgatgtaacgcaagtcttttacgtgaaggacatgtctagcaaaggaaagaagggcagagggcctgacgagccgaagcgtcacgtggttctcccaggcaaaagaaaaatcgtcggagttgaggacaagactaacgaggattacgatcagttggatgggcaaccccctttcatggtgacgattgaccctagcatcctcctatcaaatgaatacaccccttactcacgtagcgatcacaaggagggaacaatagtgaggagaaagtatgtgcggtcaaccgtcatcgccgatgtattgccgtaa

SEQ ID NO: 15898 - DNA, 1974 bp, Oryza sativa
  Clone ID: PAT_MRT4530_21699C.1
ccaagaagaggttgcagcggcgcgcacccaaaccctctcggcatccggggaaaaccaagggtaaattaggcctgcgtgattcaagaaccgcacctaaagtttgtatttttccaatggattctatgggggtttatgttgttttttcgtaaagatgatctgatccgtcatccgtgaatattttgttgtctgaacgagttatcctattagtaaacaaggaagttcctgtgttcttgatagagattttgactgatgattaggcagtagtgagctagtgatattcattccaaaggagcagtagaagtaatagcatcagcaagaatgcgagggagacggcggagagctcgggaagctgaccctgtgcctgagccattcaccattgacgatgaggtctcccatctcaccaggattagatcagagccaagtcaaaagactcttggtgctttttacgccggtcgcaagaggggcatctcaacgttcgggctgttgtccgggagggagtctggccgttcgggtgctggtggattctctagagccgattgcgcttacgctgcccggaaacacctgccaacaaaaggaccatggtgtgtggatgacatgactagtgaggcgtatgtgtcgcagttctctagtgatggttcactgcttgttgctgggtttcggggaagccgcatcagaatttacgatgccgataacgggtggaaggttcataaggatataagctgccgaagcctgcagtggacggtttcagatattgctctatcacctgatcagcaattacttgcatattccagtttgtcgcctactgttcacatagtgaatgtgcagagttctgcaaaggaatcacaagctaatgttactgaaattcatgatggtttggagttttctaatgatgacgatgatgaatattcttttggaatattttctgtgaagttttcaaaggatggtcaagaaattgttgttggcaatagtgatagatctataaatgtttatgatcttagagcaaataaagtgtctgttcgcatccgtgctcatgcggctgatgtcaatgcagtcaccttcgctgatgaaagtggtaatctattgtactctggaagtgatgataatctctgtaaggtgtgggataggcggtgccttgctagagaaaaaccagcaggtgttttgacaggacatttagatgggattacatttattgatagccgtggtgatggacgttatttcatatccaactgcaaggaccaaacgatcaaactttgggatgtgaggaaaatgtccgcttctattaaaggccgtcaaccgagattttttgactgggattacagatggatgtcattcccgttggaagctcgacactgtaagcatccaaacgatcagtctctggccacatacagaggccattcagttctgcggacacttatccgttgctacttctccccagtgtacagcacgggtcagagatacatatacacaggatccagcgacgagtatgtctacatctatgacgtggtaactggggatatcgtcgagaagctttcgtggcatggatcgatcatcagggactgtacctggcatccttacaacctgacaatcgtcagctcttcctgggacggctacctggcaaggtgggaggcatcaggggacgaggacgacctttctgtgctcacggaaaacgaacagaggacgagtccttaccgtcagtcgtacacacggcaccttctgctgtagggaagagaagtcattttggtttcctgtaaggagttgtgatgttgctacatctgtaatcgcctgattgcaatgctcattgcaacagtgtataggactgggtgctgcccaacggcattttctgttgtagagaggccattggtcgcctgcaaagagttatatttgtgctcttctgattgcaacagtgtatatagggatgaaaaccagtcgaaaacggtagcgtttctttgggcacaaaaaaaaaaaaaaaaaaaa

SEQ ID NO: 15899 - DNA, 257 bp, Oryza sativa
  Clone ID: PAT_MRT4530_2169C.1
ccgggagtaccaggaaaagggcttatagcatccccccggttttgatttattgctagccaaaaaggatggacagattcggtttctcaaaattttttgccagctcataactgctttcaactcttgaattattgccatatttctatattctacaaacccttctcattcttcatattaaaagcttaccccagcgaatggcggcaggatgttttggaattcatgcccaatttgacccaaaccaaagtgcccatttgtagaaa

SEQ ID NO: 15900 - DNA, 522 bp, Oryza sativa
  Clone ID: PAT_MRT4530_216C.1
atggccggcatgcctccgttctggctaggggcaggcaggctgcaggggctcagcttctctgggctagaggtggcgggagggacgcggcggcagcaacaggcggcggcgggagaagaggcggcggcggcgggcgacaccctcctccgccagatctggcgggaggggaggtggcttcggcggcccgacggcggcggatcggtggcaggaggggaggcggcggtggtccgacggcccggcggctgcgccctcccctccgccagatctggcggaaggggaagtggcggtggcgggtcggcggcgggaggtggcaacgacagcttccttggcagcggcaacggtggtggcggcgccctcgtcctctccatccggcggtggcggggtggtgatgaaggcaagcctcctcctcgatccgatttagtcttgatgaatctcatgggcacctcaaaggtgccggttttggaaccagcacctttgacattgggtgatcagtgccgcctcctgggtgatggtgagagccagtag

SEQ ID NO: 15901 - DNA, 2904 bp, Oryza sativa
  Clone ID: PAT_MRT4530_21700C.1
atggaggttgcggtgcgagagattgctatgtactggttcgagaaccagcgagcgagtagaatcatctctcgaacaccaatggaagttgcggtgtgggagattgctacgtactggttcgagaaccagcgagcgagtacaatcatctctcgaacaccaatggaggttgcggtgcgggagattgctacgtattggttcgagaaccagcgagcgagtagaatcatctctccaacaccaatgaaggttgcggtgcaggagattgctacgtactggttcgagaaacagcgagcgagtagaatcatctctcgaacaccaatggacgttgcggtgcgggtgattgctacatactggttcgacaaccagcgagcgagtagaatcatctatcgaacaccaatggagttttgcggtgcgagagattgctacgtactgatggatcggcaatggatgtacgctgaccggcagtccaaagagtttattgacggcgtgcattattttttgagagtggccgaagctaacaggcataagggttttatttgttgtccatgcaataagtgtaagaatcagaaggagtattctgcatccaggactattcatttccacttgtttgagtcggggttcatcccaagctataactgttggacatcccatggagagcaaggggttgaaatggaagaagatgaagtggaagacgacaatatttcggactttgctcagtactctggatttgaaggaaatcaaacgggcgaggaggaaatggatgctgatggttacgacgttgcggatgatcttggtcagatgttgcaggacgccaaggaggactgcgaaagtgaaaagggggcccataaattggacaggatgttagaggaccacagaacgtcgttgtacccaggttgcgagcaggggcacaaaaagttggataccactctggagttcttgcaatggaaggcaaaaaatggtgttagtgataaggcatttggcgatttattgaaactcgtcaagaacattcttccggagggaaaccaattgtccgagacaacgtacgaggctaagaagatagtctgtcctctaggactggaaattcagaagattcacgcatgttcgaatgattgtatcctatatcgcggtgaggagtacgagaacctagaagcatgccccatttgcaaagcactacgatacaagattagaagagatgatccaggagaagttgatgagcagctaacgaagaagagaattcctgctaaggtgatgtggtatttccctataataccacgtctaaggcgtttgttcaggaacaaggggaatgctagaatgatgcgatggcacgctaaagagcgtcaacaggacgggatgttgagacaccccgccgatggccccaagcaacctggtaacgacatcgatgtgtacctaagaccactggtcgaagatcttaaactgttgtggaagaaggaaggtgtccccgtgtgggacgaggacaaacaggaggagtttaactccaacaaggggtacaaggtttgcactcactgtatggatgaaacagaaagtacgtatcttaagcactgtcggaaggttgtgtacatgggtcatcgtcgattccttgcagcaaaccacccagtacggaagaaaggcaagcactttgaacatacggtggaccaccgtacgaagccaaaacatcgcagcggtaaaacagtgtttgctatggtgaaagatcttaaagtagtgcttggaaaggggcctagcagccagcctatagagagcgaagatggtgtatatggaaagtcgaaagatacactggaagcacgtaatgatctgaaacatatggaacaacgcagcaaccttcacccggaaccaaaggagaaaggaagccattacttgagtccagccagctacactcttagcaaggcagagaaggacagtatgtttgaatgcttggagagcatcaaggtatcgtcaggatactccacgaatataaagcgaataataagcacgaaggagaagaagttcacaaacataaagtctcatgactatcacgtgttgatgacacagctgctaccagttgtaataaggggtatcctcccagacaatgtccgggcaacaataacaaagctatgtgctttcatgaacgcaatttcgcagaaggtcatcgatccggatagattagaagcccttcagaataatgtggtgcaatgtcttgtcagctttgagttgatatttccaccttcatttttcaatataatgacgcatctgctttgtcaccttgtcaaagagatcggtattctcgaccctgtgtacctacacaacatgtttcctttcgagtggtacatgggcgttctgaagaaatatattcgtaaccgtgctcgtccagagggatatgaaatcaatgggtacacattctacacgagagcccaagacatgaagagcacgaaccagaacagtgttgttcgtatcgatgccatgggacacgatggtacaactggcacgtattacggtgccatcgaggacatatgggaacttgactatggacctctcaaggtccctctgttccggtgcctatgggctaggttgactggtggaggcgtaccgattgatgacagtgggatgacaacggttgaccttaacaagttttttacgtcaaggacatgtttagcaaaggaaaaaaagggcaaagggcctgacgagccgaagcgccacgtggttctcccaggaaaaagaaaaatcgtcggagtagagaacaagactgacgaagattacgatcagtttgatgggcaaccccctttcacagtgacgattgaccctagtatcctcctaacaaatgaagacaccccttactcacgtagcgatcacaaggaaggaacaatagtcaggagaaagtacgtgcggtcaaccgtcaccgctgatgtattaccgtaa

SEQ ID NO: 15902 - DNA, 3138 bp, Oryza sativa
  Clone ID: PAT_MRT4530_21701C.1
atggatcggcaatggatgtacgctgaccggcggtctaaggagtttattgacggtgtgcactattttttgagagtggccgaagctaacaggactattcatttccacttgtttgagtcggggttcatgccaagctataattgttggacatcccacggagagcaaggtgttgaaatggaagaagatgaagtggaagacgacaatattccggactttgctcagtatgttggatttgaagaaaatcaaacgggcgaggaggaaatagctgctgatggtaacgacgttgcggatgatcttggtcagatgttgcaggatgccagggaggactgcgaaagtgaaaaggaggcccataaattggacaagatgttggagaaccacagaacttcgttgtacccaggttgtgagcaggggcacaaaaagttagataccactctggagttcttgcaatggaaggcaaaaaatggggttagtgacaaggcatttggcgatttattgaaacccgtcaagaacattcttccggggggaaacaaattgcccgagacaacgtacgaggctaagaagatagtctgcccgttaggactggaagttcataagattcacgcatgtccgaacgattgtatcctatatcacggtgaggagtatgagaacctaaaagcatgccctttttgcaaagcactacgatacaagattagacgagacgatccagaagaagttgacgggcagctaacaaagaagagaatacctgctaaggtaatgtggtatttccctataataccacggctaaggcgtttgttcaggaacaaggggaatgctagaatgttgcgatggcacgctgaagagcgtcaacaggacaggatgctgagacaccccgccgatggttcgcagtggcgaaacatcgacagaaaatttaaagaatttggaaaggacacacgaaacgtacggtttggtttgagtacggatggcatgaatccttttggagagatgagcagcggccatagcacttggcccgttacgatgtgtatctacaacctccccccctggctatgcatgaagaggaagtacataatgatgccgattattattcaaggccccaagcaacctggtaacgacatcgatgtgtacctaagaccactggtcgaagatcttaaacagttgtggaagaaggaaggtgtccccgtgtgggacgaggacaaacaggaggagtttaacctacgagcgctgctgttcgtaaccatcaacgattggcctgcacttagcaacctattcggacagtccaacaaggggtacaaggcttgcactcactgtatggatgaaacagaaacaaaccacccggtacggaagaaaggcaagcacttcgaacataaggcccaccaccgtacgaagcctaaatatcgcagcgggaaaacagtgtttgctatggttaaagatcttaaagtagtgttcggaaaggggcctggaagccagcctatagagagcgaagatggtcacgcgacgatgtggaaaaagaactctatattttgggagttaccatattgggaattcttggacatacgccacgcaatcgacgtgatgcacctcactaagaacctttgcgtaaaccttcttggcttcctaggtgtatacggaaagtcgaaagatacactagaagcacgtaatgatctgaagcatatggaacaacgcggcgaccttcacccggaaccaaaggagaaaggaagccattacttgagtccagccagctacactcttagcaaggcagagaagggaagtatgtttgaatgcttggagagcataaaggtaccgtctggatactccacgaatatcaagcgaataataagcacgaaggagaagaagttcacaaacctaaagtctcatgactgtcacgtgttgatgacacaactggtaccagttgtaataaggggtatccttccagacaatgtccgggcaacaataacaaagctatgtgcattcatgaacgcaatttcgcagaaggtcatcgatccggatagattagaagcccttcagaatgaagtggtgcaatgtctcatccttattctcgggcctgtgtacctacacaacatgtttcctttcgagaggtacatgggcgttctgaagaagtatgttcataaccatgctcgtccagaggcaagcatcgccaagggttatggaacagaggaggtcatcgaattttgcgtagaatttatcgaagaccttcgcccaatcggggtacctgaatcacgccatgaagggagactacggggaaagggaactctcggaaggaaagcaataatgatgggatatgagatcaatgggtacacattctacacgagagcccaagacatgaagagcacgaaccaaaacagcgttgttcgtgtcgatgccatgggacacgatggaacaactgccatgtattacggtgccatcgaggatatatgggaacttgactatggtcctctcaaggttcctctgttccggtgccaatgggttaggttgactggtggaggcgtaatgattgatgacagtggtatgacaactgttgaccttaacaaggttggatactcggacgaaccttttgtctttgccaatgatgtaacgcaagtctttttcgtgaaggacatgtctagcaaaggaaagaagggcagagggtctgacgagcctaagcgtcaagtggttctcccaggcaaaagaaaaatcatcggagttgaggacaagactgacgaggattacgatcagttggatgggcaaccccctttcacggtgacgattgaccctagcatcctcctatcaaatgaagacaccccttactcacgcagcgatcacaaggagggaacaatagtgaggagaaaaaacacatattgcgcaaagcaaaagcagggaactaacttgtgcggctattacgtgtgcgagtattgccactgccttgcagaccaaatcatcaccacaagagagctcgattttattcgcacgagggataacctgaccacacacaaggaatttatcgcggcggttcaagaacaactcatgggattcatcaacgaagaaatccttgatcccaagggtgaattctactacgacggaaacacaattcactggtccttagcttctgagctagcagcgagtactactactacgtcgaaatcgtag

SEQ ID NO: 15903 - DNA, 2502 bp, Oryza sativa
  Clone ID: PAT_MRT4530_21702C.1
atgggcttgggaggaggaggtcgaccagtggaggtgtccctcgagggcttgaggagcctagctgtaacatcccggcctaggcaaaacctgccttggtttggtaaagtgtccggtattgataaatggaggatggatcggcaatggatgtacgctgaccggcggtccaaagagtttattgacggcgtgcactattttttgaaagtggccgaagctagtaggcaaaggggttttatttgttgtccatgcaataagtgtaagaatcagaaggagtattctgcatccaggactattcatttccacttgtttgagtcggggttcattccaagctataattattggacatcccacggagagcaaggtgttgaaatggaagaagatgaagtggaagacgacaatattccggactttgctcagtatgttggatttgaaggaaatcaaacgggcgaggaggaaatagctgctgatggtaacgacgttgcggatgatcttgatgttggaggaccacagaacttcgttgtacccaggttgcgagcaggggcacaaaaagttggataccactctggagttgttgcaatggaaggcaagaaatgggttagtgacaaggcatttggcgatttattgaaactcgtcaagaacattcttcctgggggaaacaaattgcccgagacaacgtacgaggctaagaagatagtctgcccgttaggactggaagttcataagattcacgcatgtccgaacgattgtatcctatatcgcggtgaggagtatgagaacctagaagcatgccctgtttgcaaagcactacgatacaagattagacgggacgatccaggagaagttgacgggcagctaacaaagaagagaattcctgctaaggtgatgtggtatttccctataataccacggctaaggcgtttgttcaggaacaaggggaatgctagaatgttgcgatggcacgctgaagagcgtcaacaggacgggatgctgagacaccccgccgatggttcgcagtggcgaaacattgacagaaaatttaaagaatttggaaaggacgcacgaaacatacggtttggtttgagtacggatggcatgaatccttttggagagatgagcagcggccatagcacttggcccgttacgatgtgtatctacaccctccccccctggctatgcatgaagaggaagtacataatgatgccgattattattcaaggccccaagcaacctggtaacgacatcgacgtgtacctaagaccactggtcgaagatcttaaacagttgtggaagaaggaaggtgtccccgtgtgggacgaggacaaacaggaggagtttaacctacgagcgctgctgttcgtaaccatcaacgattggcctgcacttagcaacttatccggacagtccaacaaggggtacaaggcttgcactcactgtatggatgaaacagaaagtatgtatcttaagcactgtaggaaggttgtatacatgggtcatcgtcgattccttgcagcaaaccacccggtacggaagaaaggcaagcacttcgaacataaggccgaccaccgtacgaagcctaaacatcgcagcggaaaaacagtgtttgctatggttaaagatcttaaagtagtgttcggaaaggggcctggaagccagcatatagagagcgaagatggtcacgcggcgatgtggaaaaagaactctatattttgggagttaccatattgggaattcttggacgtacgccacgcaatcgacgtgatgcacctcactaagaacctttgcgtaaaccttcttggcttcctaggtgtatacggaaagtcgaaagatacactggaagcacgtaatgatctgaagcatatggaacaacgcggcgaccttcacccggaaccaaaggagaaaggagattcaaagggcccgacggcggagggttttcgatactggattcatcgaccctcggaaagtaaacgtcgcaatgctcgaccaatatccacaagaaacagaggacaatctcgtccatctcctgaaggcgcagcattacaagacgttcatactgttgccatacaacacagagcctgcaccgtcaacgtatatgactcaatggataaaaaagagtctacgtttgacaaggttttcgaacttatagacagggcttggtatcggttccgtcatttggtccgcggcaaatggagagaaagacttaggcggaagttcaaatttccttgcgcaaagcaaaagcagggaactaacttgtacggctattacgtgtgcgagtattgccactgccttgcagaccaaatcatcaccacaagagagctcgattttattcgcatgagggataacctgaccacacacaaagaatttatcgcggcggttcaagaacaactcatgggattcatcaacgaagaaatccttgatcccaagggtgaattctactacgacggaaacacaatttaccggtccttagcttctgagctagcagcgagtactactacgtcgaaatcgtag

SEQ ID NO: 15904 - DNA, 2325 bp, Oryza sativa
  Clone ID: PAT_MRT4530_21703C.1
atggaagaagatgaagtggaagacgacaatattccggactttgctcagtacgttggatttgaaggaaatcaaacgggcgaggaggaaagggatgctgatggtaacgacgttgtggatgatcttggtcagatattgcaggacgccaaggaggaccgcgaaagtgaaaagggggcccataaattggacaagatgttagaggaccacagaacgtccttgtacccaggttgcgagcaggggcacaaaaagttggataccactctggagttcttgcaatggaggcaaaaaatggtgaacaaggggaatgctagaatgatgcgatggcacgctgaagagcgtcaacaggacgggatgctgagacaccccgccgatggttcgcagtggcggaacatcgacagaaaatttaaagactttgcaaaggacgcacgaaacatacggtttggtttgagtacggatggcatgaacccttttggagagatgagcagcggccatagcacttggcccattacgatgtgtatctacaacctccccccatggctatgcatgaagaggaagtacataatgatgccgattattattcaaggccccaagcaacctggtaacgacatcgatgtgtacctaagaccactggtcgaagatcttaaactattgtggaagaaggaaggtgtccccgtgtgggacgatgacaaacaagaggagtttaacctacgagcgctgctgttcgtaaccatcaacgattggcctgcacttagcaacctatccggacagttcaacaaggggtacaaggcttgcactcactgtatggatgaaacagaaattacgtatcttaagcactgtaggaaggttgtgtacatgggtcatcatcgattccttgcagcaaaccacccagtacggaagaaaggcaagcactttgaacataaggcggaccaccgtacgaaacctaaacatcgcagcgggaaaacaatgtttgctatggttaaagatcttaaagtagtgttcagaaaggggcctggaagccagcctatagagagcgaagatggtcacgcggcgatgtggaaaaagaactctatattttgggagttaccctattgggaattcttggacgtccgccacgcaatcgacgtgatgcacctcactaagaacctttgcgtaaaccttcttggcttactaggtgtatatggaaagtcgaaagatacactggaagcacgtaatgatttgaagcatatggaacaacgcggcgaccttcacccggaaccaaaggagaaaggaagccattacttgagtccagccagctacactcttagcaaggcagagaaggaaattgtaataaggggtatccttccaaacaatgtccgggcaacaataacaaagctatgtgcattcatgaacgcaatttcgcagaaggtcatcgatccagatagattagaagcccttcagaatgatgtggtgcaatgtcttgttagttttgagttgatatttccaccttcatttttcaatataatgacgcatctgctttgtcaccttgtcaaagagatcagtattctcgggcctgtgtacctacacaagatgtttcctttcgagaggtacatgggcgttctgaaaaagtatgttcgtaaccgtgctcgtccagaggcaagcatcgccaaggggcgaggggaccatctgggtaacgagatgatcaaccaacaactggccttcctggcgaggggaccatctgggtcgatcgcgacattccagggatatgagatcaatgggtacacattctacacgagagcccaagacatgaagagcacgaaccaaaacagcgttgttcgtatcgatgccataggacacgatggaacaactggcacgtattacggtgccatcgaggacatatgggaacttgactatggtcctctcaaggtccctctgttccggtgccaatgggataggttgactggtggaggcgtaatgattgatgacagtgagatgacaacggttgaccttaacaaggttggatactcggacgaacattttgtccttaccaatgatgtaacgcaagtcttttacgtgaaggacatgtctagcaaaggaaagaagggcagagggcctgacgagccgaagcgtcacgtggttctcccaggcaaaagaaaaatcgtcggagttgatggcaagactgacgaggattacgatcagtttgatgggcaaccccctttcacggtgacgattgaccctagcatcctcctatcaaatgaagacaccccttactcacgtagcgatcacaaagagggaacaatagtgaggagaaagtacgtccggtcaaccgtcaccgccgatgtattgccgtaa

SEQ ID NO: 15905 - DNA, 605 bp, Oryza sativa
  Clone ID: PAT_MRT4530_21704C.1
atcttcaggaaaagactaaatggacactatggtgtggccgcatttgtcatctccaatacattgtcatccataccataccttctccttaatgctgtagtacatggtgcaattgcatactatcttactggcttacaagggaaaattgaacattttgtctattttgcgctagtactttgtgcatgcacaatgctagtcgaagccctaatgatgatcgtagcaaccattgtaccagatttcctaatggggataatcacaggtgctggtatacaaggtattatgatgcttactagtggattcttccaaatacctaataaccttccaaagatagtatggaagtacccaatgtactacatttcctttcacaagtatgcactgcaggggttttacaagaatgagttctcagggttagtcttccaaagtaacctaggaggacaggaaacagtgagtggtgaaaaagttattgttgagttatttcaagtggaaacaggtcattcaagatgggtggatcttgcggtactttgtggcatgattgtcatctataggctattgtttgtagtgattatcaaggttattgatgtggtcaagcccatgcttttggggttgac

SEQ ID NO: 15906 - DNA, 3216 bp, Oryza sativa
  Clone ID: PAT_MRT4530_21705C.1
atgaagaggcctaggactacattgaaatctttttatgccccagcaacaccccaatccaatttagacccaaatcctccacaaacagcgggaaccggaggtagtaatactcagcaagcagcagctgttgttgaggcagccataggagaaactggagctagagctagtaacattcaagttcaacatgcccctagtacttgtgaggcagcccctagtattgttgagacagtggggagtaatattccacaaccagaacaagaacctcacaattcagagacagttgagcttaatccggctgacatagttgctgatcctgggcttagaaaaccaattgagcaatttcatatagacattagagatgctgttagaagggaatacttgtcaagaggtccatgccaaccaattggtcataaatatccacagaagttaatgggaaatcgacaaagaagctttcatgactcgtggttcaaaatgcataattggttggagtatagtattgccaaagatgcagcattctgtttttattgttatcttttcaagcaaccaagacctgataattttggtgttgatgctttcacaagtaagggctttactaattggaaacatgcaactggatcttttaatgaacatgttggtaaagtagatagttttcataatagagctagaaaacattgtgaggatttcaaaaatcaaaggcaaagtgtatcatataagatggatagtggatctaagaagttagagcaacaatattatggtcgtataactatgatattgggtgttgtgagatttcttttattgcaagcacttgcttttcgtggtcatgatgaatctcatggatctagcaataaggggaactttctagagatgatagaatggtacaaggagaaggataaagatgcccaaaaattacttggaaattctcctgggaatcatctattgacttcaccaaaaatacaaaagcatttgtgcaaggcttgtgcaaataagacaactaaagccattctaaaggatattggtgagagaaatttcgccattcttgttgatgagtctcgagatgcatctattaaagagcaaatggctgttattttgaggtacatcaacagcaaagggcaggtgattgagagatttcttggggttgaacatgttcctgatacaacatcagttgcactgaaaatagctttggatgccatgattgttagtcatggtttatctatgcataaagtgagagggcaaggatatgatggcgcatcaaacatgagaggtgaatttcatgggctgcaaagacgggtattggatgaaaacccctatgccttttatattcattgttttgcccatcagttgcagctagtggttgtgtctgttgcaaaatgttgttctcctgtctcagatttctttaactatacccccatgattgttaacactgtcaatggttcttgtaagagacatgatcagctggcccaagaacaccatgataatcttgtgagtagtttagagactggggagatattttcaggaagagggaaaaaccaagcaactaaccttgcaagacctggggatactcggtggggttcacatcacaaaaccttgtgtcgtttgcagcacatgtggaaagcagtcctagaggtattagaaaatatatgtgaggataaccccactacaaaaataactgctacaggtttgctaaaacagatggagagctttgaatttgtgcttatcatgcacctaatgattagactattgggtaaaactaatgatctgtcacaatgcttgcaaaagaaagaccaaaatattattcgtgctataggattgattgggaccacattgcaaaaaattaaccacataaggcagcatggttggcaagaactctttgaagagacaaagacattttgtctcaagtataacatcattgtgccagatatgtcagatacaactactactaggggtcgttcaaggggtcgtggaggtcaattgataacttaccaacatcatttcaataatgaaatctttaatgtggtacatgaccagcttattgtggagttaaacaatcggtttgctgagagatctacccagttattgagatgcattgcttgtcttgatcctaggaattcttttgccaattttgatgaagataagttaattgagcttgctagaatgtatgctgccgacttctctccatatgattgcatagtcctaaaggaccaacttgagacatttatagctgatgtgagagcagacccacatttcctaagttgcagtgaccttggtaatcttgcaatgaagatggttcagagtgatagacatacagtttttcctttggtttatcggctcattgaattggctttgattttgccggtggcaacagcaacagttgaaagggctttttcagctatgaatatcatcaaaactgagttgcggaataaaatggctgatgaatggctcaatcatcgcgtggtctgctatattgagagagacatatttgcaagcattgataatgataagatattaactcattttcaagaattgagaaccagaaagatgaagctacctctccctagtgctggcacttatgtacaagtaaaaagatctaatggtcgacttggcgtatacaaggaattctcaaatgaagtgtcaatgcttatgttggaagctgatccccaaaacgcaacatccatttataatcttcataaggatgccaaggacaaattaaataaatcatcaatgaaagatgctaagtcactaactcagacatatacaagcaacacttctttagttgcaatactgattgctacaattacatttgctgctgcattcaccttacctggagggtatagcagcgatgctggaaacttgggatttcccatcatggcaagaaaattcgtatttcagtcattcttgattgcagacacattggcaatgtgttcctcacttgttgtcgccttcatttgcatcatagcaaggtgggaggatcttcagttcttgcttcattataggtccttcactaagaagctcatgtggtttgcatacatggcaactactgtggcatttgcaactggtttatacaccgtattagccccacgattgctatggctggctattggaatttgtttgctatcagttttattgccggcaataactaaggttattggtgaatggccagtcttgaagctcagatttcggttgggtaaaacttataactctgatctccttgatatggtctga

SEQ ID NO: 15907 - DNA, 2957 bp, Oryza sativa
  Clone ID: PAT_MRT4530_21706C.1
gaagatagaagtaggagaagttttcattgttcatctactaaaagatgtttaaatagcaagaattgaacagagcaagacgatgatgtgcgttacgagtaaatacaaagttcatggcaaagatggaacaaattagcagggaaatcaccctttaaaaaaatgcaagggaagaacaaacaacagaaaaaaaataaatagaaagagaggaggaggaaaaacaaaatggcagcattaacatctctctgcccttgttcaatctccaagaactcaacgttacatacaccaacccatcgaagccgaagcctgcgtgattgatcttctcagcaatgtccttcttggctgcagtattgtcgatggctcttgctccagctaggtagcagctaaaccttgtccgtgcagcaatggcgacgcagccgggaagaacaagcttgggtggcagccaccgcaccggctccggcatgtcggcggcgacgaccctggccggactagccttcgtcgccccgccaccaccaccgccactgccgattcccagctggagtagtacgcctcatccgctaccgcaccgccgctgtcgcccgtcgccgcccctcttgctcgccgaactgcacgcccctgcaaacacaacgatggatcggcaatggatgtacgctgaccggcggtccaaagagtttattgacggcgtgcattattttttgagagtgaccaaagctaacaggcataagggttttatttgttgtccatgcaacaagtgtaagaatcagaaggagtattctgcatccaggacaattcatttccacttgtttgagtcggggttcatgccaagctataattgttggacatcccacggagagcaaggtgttgaaatggaagaagatgaagtggaagatgacaatattccggactttgctcatgacaaggcatttggcgatttattgaaactcatcaagaacattgtttcggagggaaacaaattgcccgagacaacgtacgaggctaagaagatagtctgccctctaggactggaagttcagaagattcacgcatgtccgaatgattgtatcctatatcgcggtgaggagtacgagaacctagaagcatgccctatttgcaaagcactacgatacaagattagacgagacgatccaggagaagttgacgggcagctaacaaagaagagaattcctgctaaggtgatgtggtatttccttataagaccacggctaaggcgtttgttcaggaacaaggggaatgctagaatgatgcgatggcacgctgaagagcgtcaacaggacgggatgctgagacaccccgccgatggttcgcagtggcgaaacatcgatagaaaatttaaagaatttggaaaggacgcacgaaacatacgcaacctatccggacagtccaacaaggggtacaaggcttgcgctcactgtatggatgaaacagaaagtacgtatcttaagcactgtaggaaggttgtatacatgggtcatcgtcgattccttgtagcaaaccacccggtacggaagaaaggcaagcactttgaacgtaaggcggaccaccgtacgaagcctaaacatcgcagcgggaaaacagtgtttgctatggttaaagatcttaaagtagtgttcggaaaggggtctggaagccagcctatagagagtgaagatggtgtgtacggaaagtcgaaagatacactggaagcacgtaatgatctgaagcatatggaacaacgcggcaaccttcacctggaaccaaaggagaaaggaagccattacttgagtccagccagctacactcttagcaaggcagagaaggaaaagatcagtattctcgggcctgtgtacctacgtaacatgtttcctttcgagaggtacatgggcgttctgaagaagtatgttcgtaaccgtgctcgtccagaggcaagcatcgccaaggggtatggaatagaggaggtcatcgaattttgcgtagaatttattgaataccttcgcccaatcggggtacctgaatcatgccatgaagggagactacggggaaagggaactctcggaaggaaagcaataatgatggtagacaataatttattccgtaaagcccatttcacggttctgcaacaatcttcattggtatctccttacatcgatgagcacttggctctagttcgtgccagaaacatcggtaagttcgatgcatggattacacggcatcacattgatactttccccgtgtggctacgacaacatctcatgggtaacgagacgatcaaccaacaacttgccttcctagcgaggggaccgtctgggtcgatcgcgacattccagggatatgagatcaatgggtacacattctacacgagagcccaagacatgaagagcacgaaccaaaacagcgttgttcgtatcgatgccatgggacacgatggaacaactggcacatattacggtgccatcgaggacatatgggaacttgactacggtcctctcaaggtccctctgttccggtgccaatgggttaggttgactggtggaggcgtaatgattgatgacagtgggatgacaacggttgaccttaacaaggttggatactcggatgaaccttttgtccttgccaatgatataacgcaagtcttttacgtgaaggacatgtctagcaaaggaaagaagggcagagggcctgacgagcctaagcgtcacgtggttctcccaggcaaaagaaaaatcgtcggggttgagaacaagactgacgaggattacgatcagttggatgggcaacctcctttcacggtgacgattgaccctagcatcctcctatcaaatgaagacaccccttactcacgtagcgatcacaaggagggaacaatagtgaggagaaagtacgtgcggtcaaccgtcaccgccgatcaattgttgtttggcatatgtgaattacgcacgattattagaggttttaacaacttttaa

SEQ ID NO: 15908 - DNA, 2733 bp, Oryza sativa
  Clone ID: PAT_MRT4530_21707C.1
atgaagtggaagacgacaatattctggactttgctcagtacattggatttgaaggaaatcaaaccggacgccaaggaggactgcgaaagtgaaaagggagcccataaattggacaagatgttagaggaccacagaacgtcgttgtacccaggttgcgagcaggggcacaaaaagttggataccactctggagttcttgcaatggaaggaaaaaaatggtgttagtgacaaggcatttggcgatttattgaaactcgtcaagaacattcttccggagggaaacaaattgcccgagacaacatacgaggctaagaaaatagtctgccctctaggactggaagttcagaagattcacacatgtccgaatgattgtatcctatatcgcggtgaggagtacgagaacctagaagcatgccctgtttgcaaagcactacgatacaagattagacgagacgatccaggagaaagaagagaattcctgctaaggaacaaggggaatgctagaatgatacgatggcatgctgaagagcgtcaacaggacgggatgctgagacaccccgccgatgattcgcagtggcgaaacatcgacagaaaatttaaagactttggaaaggacgcacgaaacatacggtttggattaagcttcaagcaacctggtaacgacatcgatgtgtacctaagaccactggtcgaagatcttaaactattgtggaaaaagaaaggtgtccccatgtgggacgaggacaaacaagaggagtttaacctactagcgctgttgttcgtaaccatcaacgattggcctgcacttagcaacctttccggtcagtccaacaaggggtacaaggcttgcattcactgtatggatgaaacagaaagtacgtatcttaagcactgtaggaaggttgtgtacatgtgtcatcgtcgattccttgctgcaaaccacccggtacggaagaaaggcaagcactttgaacataaggcagaccaccgtacgaagcctaaacatcgcagcaggaaaacagtgtttgatatggttaaagatcttaaagtaatgttcgaaaaggggcctggaagccagcctatagagagcgaagatggtgtatatggaaagtcgaaagatacactggaagcacgtaatgatctgaagcatatggaacaacgcggcgaccttcacccggaaccaaaggagaaaggaagccattacttgagtccagccagctacactcttagcaaggcagagaaggaaagtatgtttgaatgcttggagagcataaaggtactgtctagatactccacgaatatcaagcgaataataagcacgaaggagaagaagttcacaaacctaaagtctcatgactgtcacgtgttgatgacacaactgctaccaattgtaataaggggtatccttccagacaatgtccgggcaacaataacaaagctatgtgcattcatgaacgcaatttcgcagaaggtcatcgatccggatagattagaagcccttcagaatgatgtgctgcaatgtcttgtcagttttgagttgatatttccaccttcatttttcaatataatgacgcatctgctttgtcaccttgtcaaagagatcagtattctcgggcctgtatacctacacaacatgtttcctttcgagaggtacatgggcgttatgaagaagtatgttcgtaaccgttctcgtctagaggcaagcatcgccaaagggtatggaacagaggaggtcatcgaattttgcgtagaatttattgaagaccttcgcctaatcagggtacctgaatcacgccataaagggagactacggggaaagggaactctcggaaggaaagcaataatgacggtagacaacaatttattccgtaaagcccatttcacggttctgcaacaatcttcattggtagctccttacatcgaggagaatttggctctagttcgcaccagaataatcggtaagtctgatgcatggattacacggcatcacattgatactttccccggatatgagatcaatgggtacacattctacacgagagcccaagacatgaagagtacgaaccaaaacagcgttgttcgtatcgatgccatgggatacgatggaacaactggcacgtattacggtgccatcgaggacatatgggaacttgactatggtcctctcaaggtccctctgttccgatgccaatgggttaggttgactagtggaggcataatgattgatgacagtgggatgacaacggttgaccttaacaaggttggatactcggacgaaccttttgtccttgccaatgatgtaacgcaagtcttttacgtgaaggacatgtctagcaaaggaaagaagggcagagggcctgacgagccgaagcgtcacgtggttctcccaggcaaaagaaaaatcgttggagttgaggacaagactgacgaggattacgatcagttggatgggcaaccccctttcacggtgacgattgaccctagcatactcctatcaaataaagacaccccttactcacgtagcgatcacaaggagggaacaatagtgaggagaaaaatggagattcaaagggcccgacggcggagggtttccgatactggattcatcgaccctcggaaagtaaacgtcgcaatgctcgaccaatatccacaagaaacagaggacaatctcgtccatctcctggaggcgcggcattacaagacgttcatactgttgccataccacacagagtaa

SEQ ID NO: 15909 - DNA, 1380 bp, Oryza sativa
  Clone ID: PAT_MRT4530_21708C.1
atggaagaagatgaagtggaagatgacaatattccggactttgctcaatacgttggatttgaaggaaatcaaacgggcgaggaggaaagggatgctgatggtaataacgttgcggataatcttggtcagatgttgcaggacgccaaggaggactgcgaaagtgaaaagggggcccataaattggacaagatgttagaggaccacagaacgtcgttgtacccaggttgcgatgaaaaggcatttggcgatttattgaaactcgtcaagaacattcttccggagggaaacaaattgcccgagacaacgtacgaggctaagaagatagtctgccctctaggactggaagttcagaagattcacgcatgtccgaatgattgtatcctatatcgcagtgaggagtacgagaaactagaagcttgccctgtttgcaaagcactacaatacaagattagacgagacaatctaggagaagttgacgggcagctaacaaagaagagaattcctgctaaggtgatgtggtatttccctataataccacggctaaggcatttgttcaagaacaaggggaatgctagaatgatgcgatggcacgctgaagagcgtcaacaggacggaatgctgagacaccctgccgatggttcgcagtggcgaaacatcgacagaaaatttaaagactttggaaaggacacacgaaacatacggtttggtttgagtacggatggcatgaatccttttggagagatgagcagcggccatagcacttggaacatcggtaagtccgatgcatggattatacggcatcacattgatacttttcccgtgtggctacgacaacatctcatgggtaacgagtcgatcaaccaacaacttgccttcctggcgaggggatcgtctgggtcgatcgcgacattccagggatatgagatcaatgggtacacattctacacgagagcccaagacataaagagcacgaaccaaaatagcgctgttcgtgtcgatgccatgggacacgatggaacaactggcacgtattacggtgccatcgaggacatatgggaacttgactatggtcctctcaaggtccctctgttccggtgccaatgggttaggttgactggtgaaggcgtaatgattgatgacagtgggatgacaacggttgaccttaacaaggttggatactcagacgaaccttttgtccttgctaatgatgtaacgcaagtctttcacgtgaaggacatgtctagcaaaggaaagaagggcagagggcctgacgagcctaagcgtcacgtggttctcccaggcaaaagaaaaatcgtcggagttgaggacaagactgagaggattacgatcagttggatgggcaaccccctttcacggtga

SEQ ID NO: 15910 - DNA, 341 bp, Oryza sativa
  Clone ID: PAT_MRT4530_21709C.1
tgatagtgtgtctgtactctccatccctcgcgtatcaccatgtccgttgcatgcgtgatgcgcgagtctagccagaactagacaacgggatacgactcgactcctgcacctgcgcctcctgcggctccaccaccaccaccgctcccgcggccaccacctgatccatccatccatgcgcccaaggaggggcgacgagacgttttttttcgtgtgggtaagcgtgtgtacgtgcgccatgcttagtactcatagctgcttaccccccagtacagctgataagtaaaaagggctcgctgcctgagtcgagccgtatccaaaagcaggctgctgtctggcactcg

SEQ ID NO: 15911 - DNA, 2762 bp, Oryza sativa
  Clone ID: PAT_MRT4530_2170C.1
ataaacagagaaagaaaagatcttatagcataggaaccaatgaggcaggacggcaggagacctgttcgctcgaggtgtctggcctgaagtgcttgccactaggagtgaggcagagaaggggacatggttgctggcggcggagtcgatttgatggtgacgcctatatgcggtgggtctcgaccagtagcgacgagaagaaggcgcgttccccggccgacggcgaggaggcgccgtcccctcggcggcggggtgaaggcctgcagacgaagtcagatgtgcaagagctgctggaaatacttggcagtttaattctttgcatgatattatatggtatatgtgtgcccctattccatatggcgcatgtactgatttcacagttatcatttggagattcaaacaaaagaatccttgcaagggtctccaggctatggaactttgctgatctcaacgatgatacaaaaattttccacactgatcttgtcttactcgatgaaatggggactagcatacatgcccaaatttatccccctataacaaaaaatatgaaacctctccttaaaggaagaaaagacattatgggtgtgatcactgaagttggtgcagtcactactatacgtcctaagtccagaaacgctgagagcttaaaaaggacattacagatccgcgatgcaagcaattcgactcttcctgtcacactctggggagaaagagcaacctcttttgatgttgatgagatatacaatgctagtcaaactcaagctcaagttgttgtgtttgttggaacacttatgaaagattacagaggattaggccttacactaactggaagctcaccatgcaaatggtatattaatctaaatattcctaaagtagcagaattaaacgagaggtacaaagtagtattaattgccggcgatgatgatgctaatgctacatttatccttttcggaaggatcgcacaacgcctactacgcaggccaatagaatctctcattgaagaaaatccaccaaacagtgaatacattccaagtgaaatcacgtcacttattggcagcaattttgcatggaatgttagctttacgcgggatactgtcatgatgagtcaagagtgcctacaagttaatagcattatatcctctggtgcttcaaaccagccactactccttatgtccccagatgcttcacaagtgacatcagctactgtctcagtaagctcaagcagctctgtccaaatagcaccaacaccaagtgaaacaagcaatgaatcacagcagcccattcaaccaagacaaaccatctcaacaccaaccaagttcactatcactcaaggaacacagggcaccccaactagcaaatcaaattcttcaacacctaccaagaaaaacattgttgtctcagtgtctcgcatgcagtctagcaggaccaaacctaaaactgatgataagcccaaaactgacacaaaagctgaagaaaacacctcacatgataaatcttcaattgttgtcctgcctgatactactgaaaataagggaaagggacaaactgccgaagaagccaaacaagcaaccccatcattccctacagatacccaagccaaaaaaggtgctttgatcactcctagaggaatgcctacacctacaacaacacctccggttgctaagaaattgttcaaggatggtgcccagcaaaaaggcaatgacagtgctgatgtcgtagtacctcgtactgatgttgagagcaaggcaaaggtgcatccattggtgcaaggtgatgatgaaatcaagggtgaacagccaaatactgatgcacctttaggggattctgattccttatccgctgcaagtaatgataataaaagggtttctcgtgaagatattgaacttgtccagaatttaatagaacgctgtctacagctatatatgaatagaggagaagttgttaggactctttctactcgtgcaagaattgaacctggtttcactactttagtatggcagaaactcgaagaagaaaattctgagttctttcgggcttactacataaggttgaaattgaaaaaacagattaacttgtttaaccacttattggagcaccaataccatcttatgaagtacccagtaccacagcaggttccgttgaccccaacacagaacggtattcgtcctatgcctgttaacaatttgcctatgggatatccagtactccaacaacctggaatacctgctcctgttcagcctcatgttaattcgatatcttgtggtccacctggttgccatgtggtaaatggaattcctgcaccaggtggttataatccgattcgcatgagctcaggaaatggcatgacagagaatgaagttcctggaactgcacatgctggagccatgtcatcagagatggctgtgagtccatcatctgcaatgtcaagcaatcatgtttctttcactcctgatatatcagggatggatgtggatgcatctactgtaaatgccacctttggagatgatttagggaatggaggacctctgcaaataggaccaaatggtggtgatagctcttccttggggcagcagatctgggatttcagtctttctgatttatcagcagatttgacaaatctgggagacctggcagcccttgaaaactattcaggcaacccattcctgccttcagactctgatatttttgaatccccggatgatgacatagttgagtattttgctgatgccatcaatgggccttctcagtcagacgaagagaaatag

SEQ ID NO: 15912 - DNA, 5352 bp, Oryza sativa
  Clone ID: PAT_MRT4530_21710C.1
atggatcggcaatggatgtacgctgaccggcagtccaaagagtttattgacggcgtgcattattttttgagagtggccgaagctaacatgcaaaagggttttatttgttgtccatgcgataagtgtaagaatcagaaggagtattctgcatccaggactattcatttccacttgtttaagtcggggttcatgccaagctataattgttggacatcccacggagagcaaggtgttaaaatggaagaagatgaagtggaagacgacaatattccgcactttgctcagtacgctggatttgaaggaaatcaaacaggcgaggaggaaagggatgctgatggtaacaacgttacggatgatcttggtcagatgttgcaggacgccaaggaggattgcgaaagtgaaaagggggcccataaattggacaagatgttagaggaccacagaacgtcgttgtacccaggttgcgagcaggggcacaaaaagttggataccactctggagttcttgcaatggaaggcacaaaatggtgttagtgacaaggcatttggcgatttattgaaactcgtcaagaacattcttccggagggaaacaaattgcccgagacaacgtacgaggctaagaagatagtctgccctctaggactggaagttcagaagattcacgcatgtccgaatgattgtatcctatatcgcggtgaggattacgagaacctagaagcatgccctgtttgcaaagcactacgatacaagattagacgagatgatccaggagaagttgacgggcagctaacgaagaagagaattcctgctaaggtgatgtggtatttccctataataccacggctaaggcgtttgttcaggaacaaggggaatgctagaatgatgcgatggcacgctgaagagcgtcaacaggacgggatgctgagacaccccaccgatggtttacagtggcgaaacatcgacagaaaatttaaagactttggaaaggacacacgaaacatacggtttggtttaagtacggatggcatgaatccttttggagagatgagcagcggccatagcacttggcccgttacgatgtgtatctataacctccccccgtggctatgcatgaagagaaagtacataatgatgccgattataattcaaggccccaagcaacctggtaacgacatcgatgtgtacctaagaccactggtcgaagatcttaaactgttgtggaagaaggaaggtgtccccgtgtgggacgaggacaaataggaggagtttaacctatgagcgctgctgttcgcaaccatcaacgattggcctgcacttagcaacctatccgggcagtccaacaaggggtacaaggcttgcactcactgtatggatgaaacagaaagtacgtatcttaagcactgtaggaaggttgtgtacatgggtcatcgtcgattccttgcagcaaatcacccggtacggaagaaaggcaagcactttgaacataaggcggaccaccgtacgaagcctaaatatcgcagcgggaaaacagtgtttgctatggttaaagatcttaaagtagtgtttggaaaggggcctggcagccagcctatagagagcgaagatggtcacgcggcgatgtggaaaaagaactctatattttgggagttaccctattggaaattcttggacgtccgccacgcaatcgacatgatgcacctcactaagaacctttgcgtaaaccttcttggcttcctaggtgtatatggaaagtcgaaagatacactggaagcacgtaatgatctgaagcatatggaacaacacggtgaccttcacccggaaccaaaggagaaagaaagccattacttgagtccagccagctacactcttagcaaggcagagaaggaaagtatgtttgaatgcttggagagcatcaaggtaccgtctagatactccacgaatataaagcgaataataagcacgaaggagaagaagttcgcaaatctaaagtctcatgactgtcacgtgttgatgacacagctgttaccagttgtaatctatcatcgatcctgatagattagaagccctgcagaatgatgtggtgcaatgtcttgtcagctttgagttgatatttccaccttcatttttcaatataatgacgcatctgctttgtcaccttgtcaaagagatcggtattctcggtactgtgtacctacacaacatgtttcctttcgagaggtacatgggcgttctgaagaggtatgttcgtaaccgtgctcgtccagaggcatgcatcgccaatgggtatggaacagaggaggtcattgaattctgcgtagaatttatcgaagaccttcgcccaatcggggtacctgaatcacgccatgaagggagactacggggaaaggggagtctcggaaggaaagcaataatgatggtagacaacaatttattctgtaaagcccatttcacggttctgcaacaatcttcattggtggctccctacatcgaggagcacttggctctagttcgcgccagaaacatcggtaagtccgatgcatgggtaacgagacgattaaccaacaactagccttcctggcgaggggaccatctggcttgatcgcggcattccagggatatgaaatcaatgggtacacattctacacgagggcccaagaaatgaagagcatgaaccagaacagtgctgttcgtatcgatgccatgggacacgatggtacaactggcacgtattacggtgccatcgaggacatatgggaacttgactatggacctcttaaggtccctctgttccggtgccaatgggttaggttgactggtggagacataacgattgatgacagtggatgacaacggttgactttaacaaggttggatactcggacgaaccttttgtccttgccaatgatgtaacccaagttttttacgtcaaggacatgtctagcaaaggaaaaaagggcaaagggcctgacgagccgaagcgccacgtggttctcccagtgcactctcgtcttctccaccaacacttagacgtttttccatctcggcttctccttcgccgccaccgtgcctagggcaaccccgcgccgacgccgctgtcgtctctcgccgtcgcttggcggtcctcgccgcctccgccgcagacgccgccgtcgcatctcttgggtgttttttgtatgcacagatggctgatcgcgatgaggaacagatactatacgatacaatcgcagagggaagcagccagtactggaacgaagaaaaggggaacgaggatccaaaccagtacttgaacgaggaggggaacgtggagagggatgcggaggggaacgaggaggggaacgatgaggaggaggctagtggaagtcatccctccgctggacagaagagggcacgcggacaacgaagtgccgcgaagaagatagagggtcggcacatcataactgaggtggacgaagacggccgacctagtgccctggcagaagcagccaagaattttgtacgccacagcggttgggttgggttgtgagggacaacgtgcctgtcagcacggtgtactggcgtagaacaagggcacgcggggataatgacagctttgtcccggactcagagaaagagatgctgtggaccacaatgctcgagacgttcacgctacctgcgggtacggagaacatagtgaaatagtggactctgaagaaaatggcaaaacagttctagagcttcaagggagatctctacaagaaatacatcctgaagggacaaacaccgaacttcgacacattcccaaagctaagggatcattgggacgagttcgttgcttacaagacagggcaacaaggggaagcgatgatggccagaaacaaagaaaatgccgccaagaagaagtaccatcaccacttggggttaggcggatatagcgtcgcaatgccgaagtgggaggagatggaggcaagtttgattgagaggggtatcgaaccggccaccgctaaatggccggatcgatcgaagttctggtactatgctcacggtggaacgcttaacccagttgatggctcccttgtcttcaacgatcagatacgcgaggctgccagtcgactaacggacgcagtggtagtctcttctcagggcacattccgacccgatagagagaaggatgagctgtcactcgccctacaaactcccgagcatccaggacgaacacgagggaaaggcgtgattccctggaagattggatttaaggaggacatccacacgtacaggagtcggatgaggagcaagagagataccgagcgtgaagaacttcttcaagggaatgtccacaacaaacaaggaggcgttacagatatcggactatgaccgaacagttcagagagcctatcacaagaagtccaaaccagtccctcagcttatagaacaaccaaaccaagaggtcgagcctttcgtgaccggcgaagattttggcataacggaattcatttcagacaccggtctaactgtggatcagctgattcgaggtgcaccaatcccgaaggcggaagtggcatacaagtttgaactcggtaaaccgcttgtcaaacctgaacagctgcagtccctaccgacatagatgtacaaattccatgaacggtacatggaaatgagcgccaagggtagagagatgttcggagcgaggatcaaaaaccccgacttcttgcaaggagaagatgttctctggatccatttcaaggatctcttcgatctgtaccagctggacgccctcgacgtctctcttctgagctcatggattttaatggagattcaaaggacccgatgacgagggtctacgatactgggttcatcgaccctcggaaaatcaacaccgaaatgatcgacaagtacgagaaagacacagaggacaatctcgtccatctcctaacgcagcagcatttcaggacgtacatactactgccgtacaacacagaattccactgggtcctgttattcttcgacttggacgcatgcaaagtcactgtgtatgactcaatgaataaagaggagaagatttttgacaaggtcgtcaaactgatagacagggcttgggatcggttccgtcaattggtccgcgggacttggaaagaaaaacttggacggaggtttcattttccacatattcacatgagggataatctcccacgcaaggattttatcacggctgttcaagaacaactgataggattcatcaacgaagaagtccttaatcccgatggtgaattctactatgacggatcgacaattcataacgtcggtccttcctcttctgacataacgccggcgtcgaagtcgtagctatagctaggttggtgatcatttgaacataca

SEQ ID NO: 15913 - DNA, 4638 bp, Oryza sativa
  Clone ID: PAT_MRT4530_21711C.1
atggatcggcaatggatgtacgctgaccggcggtccaaagagtttattgacggcgcgcactattttttgagagtggccgaagctaacaggcaaaggggttttatttgttgtccatgcaataagtgtaagaatcagaaggagtattctgcatccaggactattcatttccacttgtttgagtcggggttcaggccaagctataattgttggacatcccacggagagcaaggtgttgaaatggaagaagatgaagtggaagacgacaatattccggactttgctcagtacgttggatttggaggaaatcaaacgggcgaggaggaaagggatgcggatggttgcgagcaggggcacaaaaagttggataccactctggagttcttgcaatggaaggcaaaaaatggggttagtgacaaggcatttggtgatttattgaaactcgtcaagaacattcttccggagggaaacaaattgcccgagacaacgtacaaggctaagaagatagtctgcccgctaggactggaagttcagaagattcacgcatgtctgaatgattgtatcctatatcgcggtgaggagtacgagaacctagaagcatgccctgtttgcaaagcactacgatacaagattagacgagacgatccaagagaagttgacgggcagctaacaaagaagagaattcctgctaaggtgatgtggtatttccctataataccacggctaaggcgtttgttcaggaacaaggggaatgctagaatgatgcgatggcacgctgaagagcgtcaacaggacgggatgctgagacaccccgccgatggttcgcagtggcgaaacatcgacagaaaatttaaagaatttggaaaggacgcacgaaacatacggtttggccccaagcaacccggtaacgacatcgatgtgtacctaagaccactggtcgaagatcttaaactgttgtggaagaaggaaggtgtccccgtgtgggacgaggacaaacaggaggagtttaacttacgagcgctgctgttcgtaaccatcaacgattggcctgcacttagcaacctatccggacagtccaacaaggtgtacaaggcttgcactcactgtatggatgaaacagaaagtacgtatcttaagcactgtaggaaggttgtatacatgggtcatcatcgattccttgcagcaaaccacccggtacggaagaaaggcaagcacttcgaacataaggttgaccaccgtacgaagcctaaacatcgcagcgggaaaacagtgtttgctatggttaaagatcttaaagtagtgttcggaaaggggcctggaagccagcctatagagagcgaagatggtcacacggcgatgtggaaaaagaactctatattttgggagttaccctattgggaattcttgaacgtccgccacgcaatcgacgtgatgcacctcactaagaacctttgcgtaaacattcttggcttcctaggtgtatacggaaagtcgaaagatacactggaagcacgtaatgatctgaagcatatgaaacaacgcggcgaccttcacccggaaccaaaggagaaaggaagccattacttgcgtccagccagctacactcttagcaaggcagagaaggaaagtatgtttgaatgcttggagagcataaaggtaccgtctggatactccacgaatatcaagcgaataataagcacgaaggagaagaagttcacaaatctaaagtctcatgactgtcacgtgttgatgacacaactgctaccagttgtaataaggggtatccttccagacaatgtccgggcaacaataacaaagctatgtgcattcatgaacgcaatttcgcagaaggtcatcgatccggatagattagaagcccttcagaatgatgtggtgcaatgtctcgtcagttttgagttgatatttccaccttcatttttcaatataatgacacatctgctttgtcaccttgtcaaagagatcagtattctcgggcctgtgtacctacacaacatgtttcctttcgagaggtacatgggcgttctgaagaagtatgtttgtaaccgtgctcatccagagacaagcatcgccaagggatatggaacagaggaggtcatcgaattttccgtagaatttatcgaagaccatcgcccaatcggggtacctgaatcacgccatgaagggagactacgggaaaagggaactctcggaaggaaagcaataatgacggtagacaacaatttattccgtaaagcccatttcacggttctgcaacaatcttcattggtagctccttacattgaggagcacttggctctagttcacgccaggaacatcgatcaatgggtacacattctacacgagagccaaaacagtgctgttcgtgtcgatgccatgggacacgatggaacaactggcacgtattacggtgccatcgaggacatatgggaacttgactatggtcctctcaaggtccctctgttccggtgccaatgggttaggttgactggtggaggcgtaatgattgatgacagtgggatgacaacggttgaccttaacaagatggctgattgtgatgaggaacatatattgtacgatacaatcgcggagggaagcagccagtactggaacgaagaagaggggaacgaggatccaaaccagtatttgaacgaggaagggaacgtggagagggatgcggaggggaaccaggaggggcacgtgaaaagggatgtggaggggaaccaggaggaggaggctagtggaagtcaaccctccgttggacagaagagggcacgcgggcaacgaggtgccgcgaagaagcttgagggtcggcacatcataacggaagtgaatgaagacggccgacctagtgccccggcagaagccgccaagaactatgtacgtcacagcggttgggttgtgcgggataacgtgcctgtcagtacggtgtactggcgcagaacaagggcacgcggagatcatgagagctttgtcccagattcggagaaagagatgctgtggactacaatgctcgagacattcacccttcccgcgggtacagaggacaaagtgaaaaggtggactctgaagaaaatggcagaacagtttcagagcttcaagggagatctgtaccagaaatatatcctgaaggggcagacaccgaacttcgacacattcccaaagctaagggatcactgggacgagtttgttgcatataagacaggtgaacaagggcaggcgatgatggaaagaaacaaagaaaatgccgccaagaagaagtaccatcaccacttggggtcaggcggctataccgtcgcgatgcctaagtgggaggagatggaggctagcttgcttgagaggggtatcgaaccggccaccagtaattggccggaacgatcgaagttctggtactatgctcacggtggaacgctcaacccagctgatggctccctggtcttcggtgatcagatacgcgaggctgcgcatcgactaacagacgcagtggaagcctcttctcagggcacgttccgaccggacagagagaagaacgagttgtcactcgccctgcagactccagagcatccaggacgaacacgagggaaaggggtgattccttggaagattgggttcaaggagggcatccacacgtacaggagtcagatgaggagcaagagagataccgaggcgaagattgcagatctagagttcagggtatcgagctacaagctcagcatgcaagaggaggtggcaaggaaggttgatgaacgcatggccgcacatcggtcccatgatcccaagctgaccattcctcctgcaatggtgagcccgtcaggaaaccatagcagctgcgcctcaacggggcaggtggcgtcgggcatggccatcccaacggacccttcaggtacttaccactgcaggccgattccagcaggatactccaaggtcgaagttaagttggtcgaaggtgcgtacgaggacctcgagctggattaccctggaggagatgctcctcttccggcaccttccaagtcaagggccccccaagctccaccgcctgcccccacaagggcaacgaagaaggcgaaagttgacgccaccaagaacaaggacccggggtacgattgcacgcaagaggagcttgaagcttacgtggcatcagaagtcaagagacaattcaagcctcgaagtccagaaaagaagattcctatagacccgagtgtcaggaacttcttcaggggtatgtctgcacctgccaaggaggccataaagctatcggactatgagcgaacgctcaagaaagcatcttctggaaagtccaaaccagtccctcagcttggagagcaaccaaaccaggagatcgagccgttggtgaccggtaaagattttggaatacaagaatttattaatgacaccgggctaactacggatcaattgctaggagacgcaccaatcgaaaaggcggaagtgaaatacatgtacgaactcggtaaaccgcttgtcaagcctgagctgctgcagtccctacccacacaaatatacaagttccatcagctgtacatggagatgagcgccaccggtagagagatgatcggagcgagggtcagggacacggacttcttgcaaggagatgacattctctag

SEQ ID NO: 15914 - DNA, 1290 bp, Oryza sativa
  Clone ID: PAT_MRT4530_21712C.1
cttcgtttcgaacaaatgatcacacatatcaaggcataaatcatcataggtagagaccaggagttcttcacaagagttggtctggatgtagctgttctcatccatggtgagtattccctgggtgaccatttggttggatgggttggaatctggcctgatcttaccattcacctctgctaacttttgtgtggatgctggtgaagacgatgacactgcagtagattctggtggagcttgacgaacacttgacttgattggaccaattccaaggctcttgatgtagttttgcagaagggttccagatttggggttcttggagctagcgcggctcctcctccgtgcgaattgccttctctttgttgcattccagtgattcttgatggagttttctgttctaccaggcaggtgcttagctatctctgcccatttgttgcccacttctttgtgtgtttggattagaactatgtcttcctcttcactccatgtatctttcttgatgttaggcctcaaatggttgtgccatctttctctgcactgtttgccaactcttccaggaagaatttgagcaatgtgagaccacttccttagtccaaactgttcgactaatttcacaagcttcctgtcttcttccaatgtccactggcctttgacaacattagccttcttcagagacttacccgaagccgaaacctcagatttaggtgtgaagagaggcaggtgaggcgaagctttacgaatagtcggcgaagcccgatcgacgacgacagcatccttttctcctccttgagggtagtactcatggccaagatcatagtaggttgcaaagggaagaaaagatccaccagcagatggagaatagtattcatggccgtcagtgacattgttgaatggatgatcaacaagatggagctcctgatggccattttgctgcctgttgaagtaggccttcttgttgacactgttgtcatgaatcctccctttgggacaagcagaaaaggagctgacatggaattcatttctatgggcatgaaggtgagggcactgggcagcagttgccatcatacacatgactgagattagtttatgtgggcttttggtccacttgtggtggtgggctttggtcgcgtggcatctttagcccacatggtgaagcaacggcccgactaagatttggaagttggaacccatcgtccattgcgcatggtccacatttgactgctgttcttgtgaacttgtatatacgtgcatgtatgtacgaacaaaaccaaactcttactgtatttgcgaatg

SEQ ID NO: 15915 - DNA, 285 bp, Oryza sativa
  Clone ID: PAT_MRT4530_21713C.1
atggggacagggaaggaggtgccatcgctggcggtcacgccgacggtggcgagtcaaggtggaacagaagaaaacgaggaaaggaaagggagagggaaggaggaaaggggaaaaggggtgggaggcgccaccaccgccgcaccgccgtcgccggtggcagcgacgcgagcggacgtggctggggagcattcgctcggggctgccgtcgccgttgatgtactagtgcagccagctaatgtcatcctgctatctactctctccatggccgctgcaagtacttgttga

SEQ ID NO: 15916 - DNA, 1067 bp, Oryza sativa
  Clone ID: PAT_MRT4530_21714C.1
agcccagctatttcattcacacctcgatcaatctcgatcgtctctctcgtctactactagtactagcttcttctcctccatttctgacctgagctagctcagaacagagagctgagaatcatcagctagctagctaggcgtctggggagagagcaggagccatgtcggagtcggaggtgtcggtgatcaaccagctggaggaggaggagactcggctggagctgccgccggggttccggttccaccccaccgacgaggaggtggtgacccactacctcacccgcaaggcccaggaccggagcttctcctgcgtcgtcatcgccgacgtgaacctcaacaactgcgagccatgggacctcccaagcaaggcgaagatgggggagaaggagtggttcttcttctgccacaaggaccgcaagtacccgacggggatgaggacgaaccgggcgacggccagcgggtactggaaggccaccgggaaggacaaggagatcttccgcggccgcggcctcctcgtcggcatgaagaagacgctcgtcttctacatgggccgcgccccccgcggcgagaagaccccctgggtcatgcacgaataccgcctcgacggcaagcttccccccaacctcccccgctccgcaaaggaggaatgggcggtttgccgggtgttcaacaaagacttggcggcaaagattgcccaaatgccgccgcctcccttcccgcgcaacgactccttcgacctcgacctcgacgacttcctccacctcgacgccgacctgccgccgctcatcgacgaccccttcgcctccacctccacgctcaagacggagccacctccgccggccaacctgatgcacaaccactacggctacttctccctcccggcgtcagcgaccaattataaccacagctccggcgccatggcggaccaggcgattcggaggttctgcaaggcggaggcgtcgacggcgtgcttctccggcgccgacgctgacgtggatccggtggtggacgagctgctctccttcccggactccatcacggactactcctacatatggaaggcctga

SEQ ID NO: 15917 - DNA, 462 bp, Oryza sativa
  unsure (1)..(462): unsure at all n locations
  Clone ID: PAT_MRT4530_21715C.1
cccacgcgtccgcaaaggcattttgagtggagcatcgtttaacgaagcggggaggatgcaggaaaggaagattcattgtgggcttcttctaggggcagatggtgccagaagcacagtgcgtgaattggctggcatacatatgaaaggtcagagagacctgcagaaactggtcagtgtgcattttcggagcaaagatctcggcaagtatctatctcgtgagaggccagggatgctattctttattttcaatcctggtgcaatcggtgtgctggttgcacatgacctggaacatggagaatttgtattgcagattccattttatcctccccagcagatgtttgaagatttcagcacanagatatgcgaagaaattatagtcaaattggttggatgggagccatcagatggtcaggttttagacataaaaccatgggtaatgcatgctgaagttgcagagaaata

SEQ ID NO: 15918 - DNA, 405 bp, Oryza sativa
  Clone ID: PAT_MRT4530_21716C.1
atgcgccgtcccatcgccgtcgcgtcgccggccacgtcgccgtcgccatcatcgcgtcgcgtcgcctcaagccccttccctcagcgcgtgctgtcgccgtcgccccgcctcgcgccccgcgcccctgccgcgccgcgcgcgtcgctgtcgcccgtcgccgtcgcctatctccgcgcagctcatgttgccgtcgccgtcggctgcgccgcgccgagccccgcgccgctcatgtcgccgttgctgttacccgcgccgcgccgagccccgtgctgctgccgcgccatcgcgtcaccaccgtcgccaacaagcctcgagccccgcccgtgccgcgcactgtcgccgtcgtgcccgccgtcccatcgccgcgccgcgccgtcccgtcgccgcgcgtcgccatcgccctga

SEQ ID NO: 15919 - DNA, 168 bp, Oryza sativa
  Clone ID: PAT_MRT4530_21717C.1
atggcgattggaccggcggcgatgacaggtgttggcggcgcggtaggcgatcagactagagcttcaacaccagttaggccggaggtcttcgattggtcagattggtgtatatactccgctccaaaagagatggaggtggaggtggaggtggaggtggagctgtgctaa

SEQ ID NO: 15920 - DNA, 399 bp, Oryza sativa
  Clone ID: PAT_MRT4530_21718C.1
cagttgtcttttgagctgatagaatttttgctggtgggtctcacgaatctgtcttccatagttattaggatcaaaccggatcggcggtccgaccggggaaaaccaggtcagaccgggctggcttttggtgatgggctgaggcgaggcccgctgagcaaagtccaccaaaaatcgctggaaaaggatggggattcgaccttgggcagtgacctatgcctcccctatcacaaaaacgacacccgtggcggtcagttgtcttttgagctgatagattttttgctggtgggtctcacgaaatcgctggaaaaggatggggattcgaccttgggtcgcacggttgagagctgcacgcgctacccaccacaccatcgcttcgcttctgttggtctaagacattaa

SEQ ID NO: 15921 - DNA, 286 bp, Oryza sativa
  Clone ID: PAT_MRT4530_21719C.1
gtcttccccagcttctccgccgtggagacgaccaccgggtgcgcgagcacattgcccaccgctttcaccgacgctgtcctcggcgagcccaacggcgagtacgcctgcagtgacgcatgacaaagaagaagatttgaagcacattactaggataatgcactgaaggagaagttcagagttgcgtgatatcctgtccagaatagcttcagctgttcagtatcaggcaggttaattactctctttctatgtgttctacaattgattgtactggcggtagttataattt

SEQ ID NO: 15922 - DNA, 2087 bp, Oryza sativa
  unsure (1)..(2087): unsure at all n locations
  Clone ID: PAT_MRT4530_2171C.1
ctagaggttgtgggcggcgaagaaggcgtcgacgtcggggccggagtagaagtccctgcgctggcggtgctgctcctgcatctgcgacacgggccccggcgccgccctcctcttcctcggcgccccggggcactctcccgccaccgccgcgcctcgtcccccctcccgcgccccgccgccgcccggcgtcctgcacccagcggcggccgcggccgacgacgccgccgactccttcccggcagcgacgacacccgccgcctcgccgccgcaccaagcatatgaataaacagttttgtagtgaggcgacacacgaatgaagatgaagccgcgccaccgccgtcgcttcctagcggggtcaggcttggtctcttgcttcttcttggctggggtgagggcccgcgggtgcgcctcctgcggtttcgtagcgggcgtggagatggaggagtggcagacgagtagcgtgatgccgcagccgacgaggacggcgagggaagtgatgagtaggacgaggagctggaggttctcgacgagcaagagcgaccacccctcctcgtccggtccacgccccgtgagaagctgagccaccaccaccaccgtcgcttcccagcgccgcttgaccgtcaccgtaaccagccgaagccgcccctcaaaaaccaaaggcatggactccccagcgacccccacggacttctcgccgcttctcagtctggcaccccgtaatgaactatgccacgagccaaacgacaaacgacgatggccggcgacgaaggggcggcgacggcggctcggcttgcacggggcggcggagctccggtaaccggcgacggaaaaggaagggtggccgagcttcccctcaccacggcgcacccaacggtggtgacggctaccggcgaagacgatggagacggcggcgcggcggcaccggatatggccggcggcgacggtttgcttggcggcggtggcgacggagctacggagcacgggaaggcttgggaataggggcaaacgaaagaggaggactagggggtccaccgtcaaagcagaagctgcttgcccgccaccgtcaccagctgtcgttaaaaaagaagccggtcgccagttgctgccaccatcaaagcaaccggtcacccgccgccgccgccgcaaccagccacggccgatgccgaagccgccgccgccgccttcgccgtcaccaccagtagcgatcaccggaagcccaaacttgggcttgagcgtgatcaaatccacgggcgcgtgcacgtacccgggggagacgcggaacgagagcctccgcagcatcgcggccatggccgccttcgcctccagcatcgcgaagccctggccgatgcacgacctcggcccgatcgagaaggacaggagcgcgtgcgggatccccgccgccgccgccgccctcgccgccccgtcccggaacctcagcgggttgaactcgccggcgtcgtgcccccagacctccctgtcccggtgcatgatcgggaccgggatgtagacggcgacggccggcggggatcgccaagcgatcccaccgtngatgtccgccgtgggcttcctctggatgaagagcgccgggttgtacagcctcagtgtctccaggagcaccattgtcatctgcaaacaaacaaaatgtagatgctactcttgtagttaattactcgcttcgtcgtttcggaatgtaaggtgtttttgatttggtcccaagtaaaaagaccctatttgatccaggttctcgaacagtacagattctcacatgtactctaagaatctgtaggtataaagaagaatatagaaaatgaaatggaacataaaagttaggaaacccggcagattcttagaagctaactgacaaacagttacttatcagaattttaagctcctcaaacataacctaaatatctgatcaagttggaggaattgcattcatgtcaaattaatttcattacatccaccattagatattctttataatatatttgtttggtgccaataatgttgctaagttttttataaacttagtcgaaacaccttatatcctaaaacggaacaagttgctttctaaacacttaaaacat

SEQ ID NO: 15923 - DNA, 595 bp, Oryza sativa
  Clone ID: PAT_MRT4530_21720C.1
cccgggtcgacccacgcgtccgaatctctactttttctgttggaagttctacaactgctttggcgtatttcactcaactgtctttcaatattggaagtatctctgaaacatgcatttatattgcattgccttctgatttcgtataaatccaaactttgcagtttgtcatccattattttgtttataccttgacttgggtgtatggattatgcgtatcattatttgaacagtatatttcacattgcaccatatattttgaccaaagtttcacaatgggcaaggtccaaaccaaccttttttcacttaacaccacatatctttgcactagttggcactttggactagggttgagcacattaatgaaagttgtcagagaaaagcagtacaatatttggggtagcctatctaactgttgtcgacatggcggtctgaagttctgactcgtagtcgataacatggtagtcttcctcctcgaatctgtgcctggcaagatcagagacagcgctatgtctctcctaacagtctccggagacaccgtaggggactggccatgcctatctctaaagtcgatatccggcgtcttgtcttggcgcat

SEQ ID NO: 15924 - DNA, 492 bp, Oryza sativa
  Clone ID: PAT_MRT4530_21721C.1
tttactcgtctgctccggcatcccggcgacgagagagagagagaggggagaaggctgcgcggcggagatggcggtggcggacgtggcgttcaaggcgctgacggcggggctcggggtggcgacgctctacctcgccggaaccttctccgtcaacgtctaccgcggcctctcgtggcactcggagcaatccgtaagcaaaaccctcgcccgcctcgaccaccaaacccttgacttctccccgccgctcgctggggagccgctgattcggggtccttctccgacgatctggtgctactcgctgcatctcccatgtcgaatctccccccttcctttgggcctaggacgagggtttgggtggatatccttcgacctttgttctgttgttttttttttgcatcgacccatgcctgccaaattggaacatgtttggccctttgacttgatgcgagcacatatatttttgcgtgatgctgctgtactgtgcaggagcta

SEQ ID NO: 15925 - DNA, 168 bp, Oryza sativa
  Clone ID: PAT_MRT4530_21722C.1
atggacgaccaccaaacccaggatctcgtcaaggagctcgtccaccgcctcatctccgccgaatccggcggcggcgggagggatgcggggggcgcgctgcggttcgcgaccggctgctctcgagccgcctcgcgccagccgtcctcccgacgagcacgcgctcgcgga

SEQ ID NO: 15926 - DNA, 435 bp, Oryza sativa
  Clone ID: PAT_MRT4530_21723C.1
atggcagctctcaatcaccagcctcatactcctcgccgtctccgtcgtcctcatcttctggagccggcgccgaaggaaccccagcagccgcctcaagctgccgcccggcccgacgaggctccccatcatcggcaacctgcaccagatcggccgtctgccgcaccggagcctggaggcgctggcggggtggcacggctgggcacggtgtcggtggtcgtgctgtcgtcaccgaaggccgcgcgggaggcgctgaaggtccatgaccccgagtgctgtagccggtccccgtcggcggggccacggatgctgtcgtacggatacaaggacgtggccttctccccctatagcaactacgtccgcaacatgcgcaagctcttcgtcgtcgagctgctcagcatgcgccgcgtccaggccgcctgttacgggcccttctaa

SEQ ID NO: 15927 - DNA, 1115 bp, Oryza sativa
  Clone ID: PAT_MRT4530_21724C.1
tttttttttttttttgtcattaggcagcgacgttggtaatgccccaggagcggtcggcgaggtggaggcattcagggaagcggaagcagtcgacgaggtggtcgatgacgatgccggaggcctgcatgaaggagtagacgatgacggggccaacgaggcggaagccgcggcggacgaggtccttgctcaccgcctctgacttgggcgtccggaacgggatgtacttgtggtgcttgtacctccccaccgtcggccggtggttcacgtgcccccatatgtatccgctgaacgacccaaactccttcgccaccttctgaatgcatttggcgttctcgatgatgcaccggaccctgcactcggccagcttgagctccttgttgccgctgatctccgcgacgtcgttctcgtccatcttcgccaccgtgctgggatcgaagtccgcgaacgcttccctgtacatgtctcttctcttgagtatctcagtccagttgtggtcgatgagcatgcctgacaacgcaagcagctcgaacagacggttgtcgttgtacactgggacaccccagcactcgtcgtgaaactgaacgtacgcctcatcactgttcttggtgatccagctgcacctatgcaagctcccaggctcactgcaatcaaaatcctcttctcccccctcaacatcatgatcactaaccttgtcatcatcttcttccctcctcctctccagggacacaagcacatcaccccaggggctaaatgtgccaccatacagcaggggcaccttgggctcccagctagagtttgagctgctgagtgaagaatcattggagttctgtgacagggagagtgatgagagtgtgaggttggagctgctcctctggatccccagagggtagatcctctgcatgtacttgcttgctgcatggttcatggcactctgaagaagatcatgcttgttcctgtctgctatgttcttcatcatgctgtggttggggctcctctcaaatgcatggtggtgcctgctatgtgatgatgtggtgagcattgtgaatgctaagtggcaagagtttttggaggcaagattcaaggagaatgggacgcgtgggcgaacgcgtggacga

SEQ ID NO: 15928 - DNA, 339 bp, Oryza sativa
  Clone ID: PAT_MRT4530_21725C.1
atgggcgcgggagatccggccgccattgatggcgccggcgagggcaatggcgggtggagagacgatgggcatgcgcagatgcaggcggtgggcgagcgctgtggcggagcatggcgacagagcagcgaagcggtggcaggctgcggcggagtagacggcgggcgagcgccgcggcagaacgcagcggcagagcagcgaagcggcgccgggctgcgggcagagccgacagcgggcgaggcggtggaggaggcggcgctgggcaggggtgcctggggtggcagagtcgagggcggagtcgtcagagtcgatgtgggagaagagggcgtgggagatggcgat

SEQ ID NO: 15929 - DNA, 133 bp, Oryza sativa
  Clone ID: PAT_MRT4530_21726C.1
tttggtgttttttaaaaaagggggcatgattcttctccaacttcacagtacacatggaaataataaggaatgcccaaaaggcatagctcgttcttcactcttactgagcaacataactaatgagggccaacac

SEQ ID NO: 15930 - DNA, 133 bp, Oryza sativa
  Clone ID: PAT_MRT4530_21727C.1
gccattcagacgcgcaatttttcgcagaaatagccagatacagggtgccagctatgcaactcacaagcacagaagccggaatagcggcgaagagcaagaatactagccaaaaggagcgacaacaatgaggacg

SEQ ID NO: 15931 - DNA, 234 bp, Oryza sativa
  Clone ID: PAT_MRT4530_21728C.1
atgaactaggttcggcattgggatcaaagtggattcggcaaagagtttgattcaaagaacgaattgtgcatcggctgcgaaggcatcggctgggtaatgcatcagctgagatggatgggacagaggacaactgatatagccgatacagccgatacgaccgattttgttgaagtcagttgtaaaactgcttctagacttgatcaacgtgctatacaaggattgccacgatggaga

SEQ ID NO: 15932 - DNA, 3628 bp, Oryza sativa
  Clone ID: PAT_MRT4530_21729C.1
ggacaaagatggtgctcccatttacataatgataattacatttgaagttgtcaacagggaggcttctctttctggttcaagaaagacacctctttttctcatagaccacaccaattccgtgatgatatactctccaatttgcagcatttgacacaagttacatacacacatacatgtatagctcgtgatagaggcactgctccccacagtttcttctctacacgttgcaatggcaaaaacaaacaaaaaagaattaacctatatatatgtatataccgctatacataaagaacgaatcgagtgggtgttgaatccggttgaccctctaagaccatgcacacggatatgcatatattcctctttcaaaataaacggaaaattgccacatcattcggtttattatcggcttgagatttcttttctttgctcatctatgtgaagaacttggtggcatgatagacttgctgctgcaggctcaacctctaacaaccagcagccctgcgaaaattgtcgtatggacttgatgccggcaacctcaggaaatgttgctgggcttgctcataagttggctgtggattggcttcgttcatgttcatgtactgggggtaaccatacaggttatcgtcgacgaacggattcgtgttcggcaccccaacctgaggcggatatgggtcatggaaaagggacaaatccgtctggaacggctgattggttgccatgggatccattgtcatatcctgcgagaagctcatgaaggaggccattttctgatgtttcctgacagtgagggcttcgcattggctactcatctccttgaatggcatgtctgttgatacagacactcgttctgtatgaggtgccgggtctgtgacaacctcatcagaagagtacaacaagaacatagaaaatgagtttaagagagcaaggcatactgtttcaagaagctgatcgatactcagaagatctgttacaggcacagcatttgcagaagcagctgtactttctgaagcttccccaaagatatcgtggtcatttcccaggtcgatcagcacagcctctggatggtgatcattatcatgagatcctggtgatgagttatcaccagttgcttcaaaaaaatgagtgcttgttggacacatgtcatcgggagagaaatcgcttagcagttgattcttcacactattcaactccgcctctagcatatttgttatgttgttcatgattgtggagacaatgcattctcgggattgactctctgatagttctatcgctgaaagggacttcagtgcgttagtattatcctctggtgatccgtagattttcgacggatcatccacggaatctttcacagcctgaagcttgcactcatccaccaaacggaggaatggatcacctgttctctcattcagcatttgtttacatattggaataagaggtaacacgttgaaagttcttgaagagaaaatgatcatagctgtagcaagagtaaacaaggaacggcgccgacatggtggtaatgaatctggttcagtcagtgaatagcccctcagtgaaaatgcaacctgaaaactctgagtaagagcctcaaaaactgatgccttggctccagagaacaatagaagcaaactataagtgtgagcaatggcttcatagtttgctggagtattttcaggagatgttgcttgagcccaaatggatgaaagcaaaagtgtgatctggcgactgctcagcttcagcaaaactgattccatttcatcttctggatggcttgaggaaccatggtctgcctttatagacatggaaggtgctctcaaagacatcgaagtaactctgagagatatggaaggggctctcagggctactgaaggagctctcatagccattgaaggacccctcttcatggaaaaattaggaattttcatgctacgtcggcgactttgagacacaggtaggttcgaacgtttggcattactagactcttcactgatactatgcaagccactgctatcaccttgtgagttgtctgagtgcttgtcctttttcaacttgtcaaagatggcagctgaagatgaaaacaccgagacagccctagagagtgtcctctgcatgtcatgtttcttagcctgacctgatacacttgcttgaatcgagggggcaacggaagaggggaccaagacaatagcgaaaatgcggtgcgcagctactcgagcttcatgatcagggtggatcatcgttaagagcaactgatgaaacagagcttctggaaacaccttattctgataggtaatatttggaacagaagcaattatttgagctgtacgataaacagcagctgcagttgatctagctacaacaggagtgctagcaatattttctagcatcacggccatcatgtccagaactggtccagcatcagttacctgttcaacaaaatacccttgataaaccttcttctttgccagctgtcctagacaatcatctatagcctttcggaacttttcattccattttactagctccgaatctttgctgccgagagtaatatgaaatgtccttttcaaatgcctgacaagatcacttatggcacctatagttgctgctgaagcctgagcgatggattgttctgctagggtggctgctacctccacgatactaagctgcatctcctgttgcttcaccatggtcttgtgttcaatatgattaactatgttctcccacaaggggacagcagagatgacaaagggggaagagtcctccgttttggagtcctctgctttggagtcctccgttttgggggcttcttgctccaactggtcgcttgaatccttggtaacttgaccatcattttgcatcttctgaggtcggtagttttcaagtactacttgaaccacattatcgaattccgatgaaatatgtgagagctctcccatgaaccaaatcatagctgaaagggcttgcagggctgcagcgcgtagggcaatggtctgctcatcctctcctacttcttgagatagctcacatagtcttgggactagcccttccaaattgaactgatatgtaccatccacctgattaactgcaaagtcaaacaaggtttcacatcctatgatgcgcatatcatcctgcctcttttgatctaaaagagtgtgtacaatacttaataagctacttgcaaatagtggcatctgctctttacaagaaaccaacaatctacggtatattagcatcaccacttttgcaaagccatactgttcacttctcaattccttgtagatcctttgctccaaggaaaccgtgatcttgggcactcggagagggttcctcgagcaatactcgcacaacttcccgatccttctctcattcggttcttcatcctgcgttttggggaagatctcagcaaggatcgacttgtacctcttaacaggctgccttgatcttgccctcaacccggggcagaaatagcagaggctcccgcacgccggcaggaccttccgagatatcacgcccatcccctactgcaacaacagaagcaatggttcgaaccccaatctctcgaccaatcaaacataatttaattaaaacgctatggaaggagatcgatagatcgatcgatggaggagggcaaaaa

SEQ ID NO: 15933 - DNA, 3046 bp, Oryza sativa
  Clone ID: PAT_MRT4530_2172C.1
ggtcgttttgggacgtgacaaccatcaaaaagagttacgtggtgagtctgtagatgggatcgtagatgcgattgataaaggtgtcactgatggtgattcaattggaaagcgtgtcatacttcctgccagtttcactggagggagaaggtatatggtgatgaactatcaagatgcaatgacaatatgccgtgtttatggatcacttgacctctttgtgacatatacatgtaattcaaaatggcaagaaattgctgaagcgattcgatttgagcctagtcaacaaccatctgatagagccgatatcattgttcgtgtatttaatatgaaggttaatgaattcatagctgatattagagagggcagaacttttggtaaagttcttgcaggccaagaccgagctaaaatctacttcgaaacaatagctaagacaacaaatgcatcaccgaatcatgaccttgctccacgtgatgaaatattagaatacatggatgcaagatttgtttcgacctgtgaggcacttcatcgattgtttgaatttgatatacactatagagtacctcctgttgaacgattggttgtccacttacctgggaaaaactatgttagatatgagaaaggatcggacttacgagcagtgcttgaaagtcctgctacgaagcgttcaatgttaactgaatggtttgaagctaacaaaaaatattctaaagcccgttcattaacatactgtgaatttccgaaagagtggtcatgggagtcgtcatctagagtatggtgccagcgaacacctgctgcaaaaattggtagaatatattatgtgcatccaactgctagtgaactttactacctacgcatgttgttaatgattgttaaaggtgctcaaagttatgttgatgtgcgtacatttaataatattgtctatgccacatttagagaagcatgtgaggcacgagggctccttgagggggacaatgaatggtatctacttttcgatgaagcaatagtctctgcatcttcacagcaccttagacaactttttgtgactatacttctttactgctctgttagtgatgtgcgatcattgtttaacaagtattggttatatatgatagatgatatacatagcaaactaaaaaaagcattggataacccgaattgtatcattccacctgaccatttgcttaatcttcttctccacgaacttgctaatgtgtttgcgaatagtggtggtaatataaaggattttaacctgccacatccatcgtctgtaccgcatattcctggtatttgcaatgtaaaacgaggaactatgcttgctgagcttttaattgagactgcattaatcatatgggatgaagctccaatgacacataggcgatgctttgaagcactagaccgcacattatgtgatatactttctgagacatgccctttgaattctattataccttttggaggaaaacctgttgtcctaggtggtgacttcagacaaatattgccagttgttcctaaaggctcccgtcgtgctataatcaatgcatcggtcacaaactcagacttatggaaacatgtgacaatattaactatgaatataaaaatgagattacttaatacaatgctacctaaaaatgaaaaaaaggacatggatgattttagccagtgggttttggctgttggtgatggcactttaccaatgatagcaaaggaaggtgaaagctatcctacatggatcacaattcctgatgatttactcattataactgatggtgataaaataaatgccattgtcagcgaagtataccctgatttccttgcatcatacaaaaatcctgaatacctagcttcacgtgcaattgtttgccctaataatacaacagttgatgaaataaatgactatattattggtttgcttcctggagatgcaaaaatatactcaagttgtgatacaatatcaaaatgctctgaacaaataccagattttgacttgctatatccacctgagtttcttaactcaatagacgccactaacttccctacatatagacttattcttaaagaagctgctgtggtcatgctacttcgaaatctgaatcaatcaattgggctatgtaatggaacaagattattagttacagattcaaacaaaagaatccttgcaagggtctccaggctatggaactttactgatctcaacgatgatacaaaaattttccacactgatcttgtcttactcgatgaaatggggactagcatacatgcccaaatttacccccctataacagaaaagatgaaacctctccttaaggaagaaaaggtttactacattgactcattcactgttagggctgcaaacagaacatacaggctagttgcaaacaacctaatgatcctcttcagtaaatggacaacacttgaagaacacattaatgtccctcctcatttccctggtattacattttcactgacaccattcgaagatgttccttcccttgtcgagaaaaaatcattctacgttgctttagcacaaactttcaaccaatcaagtgggttgatgagcctgctacaggatacaaccaggatgtaccagaagaaaagaggaacacgttttatagtaaatgtgactgtcagaaggatatgtaatgaatattcttggtggtacaaagtagtattaattgccagcgatgatgatgctaatgctacatttatccttttcggaaggatcgcacaacggctactacgcaggcccgtagaatctctcattgaagaaaaaccaccaaacagtgaatacattccaagtgaaatcacgtcacttattggtagcaattttgcatggaatgttagctttacgcgggatactgttatgagaagtcaagagtgcctacaagttaatagcattatatccgctggtgcttcaaaccagccactactccttatgtccccagatgcttcacaagtgacatcagctattgtctcagcaagctcaagcagctctgtccaaacagcaccaacaccaaatgaaacaagcaatgaatcacagcagcccatttaa

SEQ ID NO: 15934 - DNA, 890 bp, Oryza sativa
  Clone ID: PAT_MRT4530_21730C.1
ccccgggctccacccactcccccctacgagaagctcaacccaatcccctcctctcccccaattccgccgccgccccctgctcggatcctcccccacccccgccgccggcgagaagggcccgtaggcgcggcctcgtctccttgctgatcccgactccgcgcgcacggccggtgactcgactgcctcgtctcggttcgaatcgagctgggagatattgaggagcacttggactgaagaactcaattttggagcacttggattagcatcagttttctacctctgagcattggtcaccctgctggactcactgactgttaaaacggctctggtttaaggagttgtttctcttgtggtcattctttggattatgggagctctttgttcatgtttgcaagctgattattccgaccaccatgggcatcatgcttcaccggcattagggggatgcatgtgcctcagatgttttactcagcagctcatcaatgcgtacactgttttattccgagctgggacagtgcacgcagtttctcagtctatagaagccactcctgttgattcatctgaaagttcatttgacacatatcgttcacccccaagaccacttccatatgatgatcctagattctcccctcctcagcgtgattggttagtgtcaaggcatggaccttcatgccattccccagaggaatcagaaccactgagggcaaatgatgacgaggaaatggaaacaccaagttcaacacataagtcaagtaaaacaaactatgacacaaaaatgaaaagaagcagctctactcatggagagaagctgccaacaaaggaacctggaaattatttcacatactattacccatccgctgaagatgagatgtactgccaacatgtcttga

SEQ ID NO: 15935 - DNA, 1278 bp, Oryza sativa
  Clone ID: PAT_MRT4530_21731C.1
atgggcgttctgaagaagtatgttcgtaaccgtgctcgtccagaggcaagcatcgccaaggctccttacatcgaggagcacttggctctagttcgcgccaggaacatcggtaagtccgatgcatggattacacggcatcacattgatactttccccgcgtggctacgacaacatctcatgggtaacgagtcaatcaaccaacaacttgccttcctggcgaggggaccgtctgggtcgatcacgacattccagggatatgagatcaatgggtacacattctacacgagagcccaagacatgaagagcacgaaccaaaacagcgctgttcgtgtcgatgccatgggacacgatggaacaactgccacgtattacggtgccatcgaggacatatgggaacttgactatggtcctctcaaggttcctctgttccggtgccaatgggttaggttgactggtggaggcgtaatgattgatgacagtgggatgacaactgttgaccttaacaaggttggatactcagacgaaccttttgtccttgccaatgatgtaacgcaagtctttttcgtgaaggacatgtctagcaaaggaaagaagggcagagggcctgatgagcctaagcgtcaagtggttctcccaggcaaaagaaaaatcgtcggagttgaggacaagactgacgaggattacgatcagttggatgggcaaccccctttcacggtgacgattgaccctagcatcctcctatcaaatgaagacaccccttactcacgcagcgatcacaaggagggaacaatagtgaggagaaaatcttcctctagttcaacgaggctggcagtgggacggcagcgactggcaaaagggcggtggcgggggagctcaagcgacttgggcggcgtcaagggtcctcatgcgatgctctcgcggctagctcttccgacccagccgagtgcaagggagccaagcaagatccggggcggggacgagcacatcgagcagcttgagccacgaggacgtgccgccgagcggcgacatggacctcatgcgcggtgcacggatctgctccgcaatgatggctcaggtgtagcagatgccgagcttgacgaggttggggaagacattgacgccagggcagaggtgttcggtgtcggggaacaacctctagaggacaaggtagaggtggcggacggaggcgacgcggaggagctgctatcgatgccatcgtcctgctgcctgccggccgttgccacctgccaccgtcctgctgccgacctcatcgattga

SEQ ID NO: 15936 - DNA, 3408 bp, Oryza sativa
  Clone ID: PAT_MRT4530_21732C.1
atggcgggtagccggaatgtgaagtggaaggagttggaggcggaggcggagaaggctgagccggcggactggcttccggcggtagccagagctttctgtttgctccaggagatcaacgagcgggagaagagggatgaggaggagctgcgtgaggagatggagttcgccgcgtgggtggcggcgacaagcgccgagagctacgcgaggttcaatctcccgccgatgacgctggaggaggaggcggaggttgaggctgccatccgccaccatagttcatcagtcggagcgtcttttgcgcattgctcaggaagccactctgatcccgcgatgcagctgattggcatgccgctgttgatggatcggcaatggatgtacgctgaccggcggtccaaagagtttattgacggcgtgcactattttttgagagtggccgaagctaacaggcaaaggggttttatttgttgtccatgcaataagtgtaagaatcagaaggagtattctgcatccaggactattcatttccacttgtttgagtcggggttcatgccaagctataattgttggacatcccacggagagcaaggttttgaaatggaagaagatgaagtggaagacgacaatattccggactttactcagtacgttggatttgaaggaaatcaaacgggcgaggaggaaagggatgctgatggtaacgacgttgcggatgatctttgtcagatgttgcaggacgccaaggaggactgcgaaagtgaaaagggggcccataaattggacaagatgttagaggaccacaaaacttcgttgtacccaggttgcgagcaggggcacaaaaagttggataccactctggagttcttgcaacggaaggcaaaaaatggggttagtgacaaggcatttggcgatttattgaaactcgtcaagaacattcttccggagggaaacaaattgcccgagacaacgtacgaggctaagaagatagtctgcccgctaggactggaagttcagaagatttacgcatgtccgaatgattgtatcctatatcgcggtgaggagtatgagaacctagaagcatgcgctgtttgcaaagcgctacgatacaagattagacgagacgatccaggagaagttgacgggcagctaacaaagaagagaattcctgctaaggtgatgtggtatttccctataataccacggctaaggcgtttgttcaggaacaaggggaatgctagaatgatgcgatggcacgccgaagagcgtcaacaggacgggatgctgagacaccccgtcgatgcaaaccacccggtacggaagaaaggcaagcacttcgaacataaggctgaccaccgtacgaagcctaaacatcgcagcgggaaaacagtgtttgctatggttaaagatcttaaagtagtgttcagaaaggggcctggaagtcagcctatagagagcgaaaatggtcacgcggcgatgtggaaaaagaactctatattttgggagttaccctattgggaattcttggacgtacgccacgcaatcgacgtgatgcacctcactaagaacctttgcgtaaaccttcttggcttcctaggtgtatacggaatgtcgaaagatacactggaagcatgtaatgatctgaagcatatggaacaacgcggcgaccttcacccggaaccaaaggagaaaggaagtcattacttgagtccagccagctacactcttagcaaggcagagaaggaaagtatgtttgaatgcttggagagtataaaggtaccgtctggatactccacgaatatcaagcgaataataagcacgaaggagaagaagttcacaaacctaaagtctcatgactgtcacgtgttgatgacgcaactgctaccagttgtaataaggggtatccttgcagacaatgtccgggcaacaataacaaagctatgtgcattcatgaacgcaatttcgcagaagatcagtattctcgggcctgtgtacctacacaacatgtttcctttcgagaggtacatgggcgttctgaagaagtatgtttgtaaccgtgctcgtccagaggcaagcatcgccaagggttatggaacagaggaggtcatcgaattttgcgtagaatttatcgaagatcttcgcccaatcagggtacctgaatcacgccatgaagggagactacggggaaagggaactctcggaaggaaagcaataatgacggtagacaacaatttattccgtaaagcccatttcatggttctgcaacaatcttcattggtagctccttacatcgaggagcacttggctctagttcgcgctaggaacatcggcgtaatgattgatgacagtgggatgacaacggttgaccttaacaagcttggatactcggacgaaccttttgtccttgccaatgatgtaacgcaagtctttttcgtgaaggacatgtctagcaaaggaaagaagagcagagggcctgacgagcctaagcgtcacgtggttctcccaggcaaaagaaaaatcgtcagagttgaggacaagaccgacgaggattacgatcagttggatgggcaacccccttttacggtgacgattgaccctagcattctcctatcaaatgaagacaccccttactcacgtagcgatcacaaggagggaacaatagtgaggagaaaaaaagacgttgtcggagttgtccctcaagccagagtgaagagggcacacgggcaacgaggtgccacgaagaagcttgagggtcggcacatcataacggaagtggaagaagatggacgacctagtgccccggcagaagccgccaagaactatgtacgtcacagcggttgggttatgcgggataacgtgcctgtcagtacggtgtactggcgaagaacaagggcacgcggagatcatgagagctttgtcccagattcggagaaagagatgctgtggaccacaatgctcgagacattcacccttcccgcgggtacagaggacaaagtgaaaaggtggactctgaagaaaatggcagaacagtttcagagcttcaagggagatctgtaccagaaatatatcctgaaggggcagacaccgaactttgacacattcccaaagctaagggatcactgggacgagttcgttgcatataagacaggtgaacaagggcaggcgatgatggaaagaaacaaagaaaatgccaccaagaagaagtaccacaccacttggggtcaggcggctatagcgtcgcgatgtcgaagtgggaggagatggaggctagcttgcttgagaggggtatcaaaccggccactgctaattggccggaacgatcgaagttctggtactatgctcacggtggaacgctcaacccagctgatggctcacttgtcttcggcgatcagatacgagaggctgcgtgtcgactaa

SEQ ID NO: 15937 - DNA, 450 bp, Oryza sativa
  Clone ID: PAT_MRT4530_21733C.1
gaacaacatcagagaacaacaccatctgcgctggcagtaccaccgtattcacaacttgaagataaggtgaataatgctacaggcaagggatgtaggagatcgaccacacggcaacacagaccagccgagacgggaacgacggtgtagatcgcggcctcggcacacaggcaaacacgtacgaatcatggtagcagcttcgctggagacataaatcgaggccggtagaacgccggagaggcaaacacaaggatggcgcgacgccggagacgcggacgtgcatggcggcggtagagcaggtggcgccgtggcggcagggagccgatcgagcagccggtggtggcgagttgaaaagaaagttttcccctgctatttcccctgttaaccaagcaccatccggatgacatgggggtttaacacccaacgtggaaggggattgggtggtgggagggt

SEQ ID NO: 15938 - DNA, 5160 bp, Oryza sativa
  Clone ID: PAT_MRT4530_21734C.1
atggaagaagatgaagtggaagacgacaatattccggactttgctcagtatgttggatttgaaggaaatcaaacgggcaaggaggaaatagctgctgatggtaacgacgttgcggatgatcttggtcagatgttgcaggacgctagggaggactgcgaaagtgaaaaggaggcccataaattggacaagatgttggaggaccacagaacttcgttgtacccaggttgcgagcaggggcacaaaaagttggataccactctggagttgttgcaatggaaggcaaaaaatggggacgggatgctgagataccccgccgatggttcgcagtggcgaaacatcgacagaaaatttaaagaatttggaaaggacgcacgaaacatacggtttggtttgagtacggatggcatgaatccttttggagagatgagcagcggccatagcacttggcccgttacgatgtgtatctacaacctccccccctggctatgcatgaagaggaagtacataatgatgccgattattattcaaggccccaagcaacctggtaacgacatcgacgtgtacctaagaccactggtcgaagatcttaaacagttgtggaagaaggaaggtgtccccgtgtgggacgaggacaaacaggaggagtttaacctacgagcgctgctgttcgtaaccatcaacgattggcctgcacttagcaacctatccggacagtccaacaaggggtacaaggcttgcactcactgtatggatgaaacagaaagtacgtatcttaagcactgtaggaaggttgtatacatgggtcatcgtcgattccttgcagcaaaccacccggtacggaagaaaggcaagcacttcgaacataaggccgaccaccgtacgaagcctaaacatcgcaacgggaaaacagtgtttgctatggttaaagatcttaaagtagtgttcggaaaggggcctggaagccagcatatagagagcgaagatggtcacgcggcgatgtggaaaaagaactctatattttgggagttaccatattgggaattcttggacgtacgccacgcaatcgacgtgatgcacctcactaagaacctttgcgtaaaccttcttggcttcctaggtgtatacggaaagtcgaaagatacactggaagcacgtaatgatctgaagcatatggaacaacgcggcgaccttcacccggaaacaaaggagaaaggaagccattacttgagtccagccagctacactcttagcaaggcagagaaggaaaacaatgtccgggcaacaataacaaagatatgtgcattcatgaacgcaatttcgcagaaggtcatcgatccggatagattagaagcccttcagaatgaagtggtgcaatgtctcgtcagttttgagttgatatttccaccttcatttttcaatataatgacgcatctgctttgtcaccttgtgaaagagatctgtattctcgggcctatgtacctacacaacatatttcctttcgagaggtacatgggcgttctgaagaagtatgttcgtaaccgtgctcgtccagaggcaagcatcgccaagggttatggaacagaggaggtcatcgaattttgcgtagaatttatcgaagaccttcgcccaatcggggtacctgaatcacgctatgaagggagactacggggaaagggaactctcggaaggaaagcaataacgacggtagacaacaatttattccgtaaagcccatttcactgttctgcaacactcttcattggtagctccttacatcgaggagcacttggctctagttcgcgcaaggaacatcggtaagtccgatgcatggattacacggcatcacattgatactttccccgcgtggctacgacaacatctcatgggtaacgagtcgatcaaccaacaacttgccttcctggcgaggggaccgtctgggtcgatcgcgacattccagggatatgagatcaatgggtacacattctacacgagagcccaagacatgaagagcacgaaccaaaacagcgctgttcgtgtcgatgccatgggacatgatggaacaactgccacgtattacggtgccatcgaggacatatgggaacttgattatggtcctctcaaggttcctctgttccggtgccaatgggttaggttgactgatggaggcgtaatgattgatgacagtgggatgacaactgttgaccttaacaaggttggatactcggacgaaccttttgtccttgccaatgatgtaacacaagtctttttcgtgaaggacatgtctagcaaaggaaagaagggcagagggcctgatgagcctaagcgtcaagtggttctcccaggcaaaagaaaaatcgttggagttgaggacaagactgacgaggattacgatcagttggatgggcaaccccctttcacggtgacgattgaccctagcatcctcctatcaaatgaagacaccccttactcacgcagcgatcacaaggagggaacaatagtgaggagaaagccgccgccgccgtcgccacgccgccgcgccaaccgccgccccgatgccgccacaccgccgttaacgaacgagaacgagaacgatcgaacgaacgagagcgagaacgaacacgtcaacgtacgttgccgcgacaacgtgaacgagaacgagaacgatcgaacgaacgagagcgagaacgagaacgatcgaacgaagacaagcgagaacgagggaacgaacgtgaatgagaacgagcgaacgaacgtgaacgagctagggaacgggcacgtggaaagggatgtggaggggaaccaggaggaggaggctagtggtagtcaaccctccgttggacagaagagggcacgcgggcaacgaggtgcagcgaagaagcttgagggtcggcacatcataacggaagtggaagaagatggacgtcctagtgccccggccgaagccgccaagaactatgtacgtcacagcggttgggttgtgcgggataacgtgcctgtcagtacggtgtactggcgaagaacaagggcacgcggagatcatgagagctttgtcccagattcggagaaagagatgctgtggaccacaatgcttgagacattcacccttcctgcaggtacagaggacaaagtgaaaaggtggactctgaagaaaatggcagaacagtttcagagcttcaagggagatctgtaccagaagtatatactgaaggggcagacaccgaacttcgacacattcccaaagctaagggatcactgggacgagttcgttgcatataagacaggtgaacaaggacaggcgatgatggaaagaaacaaagaaaatgccgccaagaagaagtaccatcaccacttggggtcaggaggctatagcgtcgcgatgccgaagtgggagcagatggaggctagcttgattgagaggggtatcgaaccggcaacagccaattggccggaacgatcgaagttctggtactatgctcacggtggaacgctcaacccagctgatggctcactggtcttcggctatcagatacaagaggctgcgcgacgactaacagatgcagtggaagcctcctctcagggcacgttccgaccagacagagatagggacgagctgacactcgccctgcagactccagagcatccaggacgaactcgagggaaaggggtgattccttggaagattggtttcaaggaggacatccacacgtacaggagtcggatgaggagcaagagagataccgaggcgaagattgcagacctagagttccgggtatcgagctacgaactcaacatgcaagaggaggtggcaaggaaggttgatgaacgcatggccgcacatcggtctcatgatccccagccgaccattcctcctgcaatggtgagcccgtcaggaaaccgtagcagctgcgcctcaacggggcaggtggcgtcgggcatggccatcccaacggacccttcaggtacttaccactgtaggccgattccagcaggatactccaaggtcaaagttgagttggtcgaaggcgcgtacgaggacctcgagctggattaccctggaggagacggcggtacatcatcctccctgggcgacaagcggcgtctcgctccagcatcgactcctcaggatcctgcaccgactcctcctcgtgctcctacacctactcccccgcaagctcctcttccggcaccttcaaagtcaagggcccccccagctccaccgcttgcccacacaagggcaacaaagaaggcgaaagttgacgccgccaagaacaaggacccggggtacgattgcacgcaagaggagcttgacgcttacgttgcatcagaagtcaagagacaattcaagcctcgaagtccagaaaagaagattcctatagaccccagtgtcaggaacttcttcaggggtatgtctgcatctgtcaaggaagccatcaagctatcggactatgagcgaacgcagaagaaagcatcttctggaaagtccaaaccagtccctcagcttggagagcaaccaaaccaggagatcgagccgttggtgaccggtaaagaaatgacgatagaacaatttattactgacaccggtctaactacggatcaattgctaggagtcgcaccaatcgaaaaggcggaagtgaaatacatgtacgaacttggtaaaccgcttgtcaagcctgagctgctgcagtccctacccacacaaatgtacaagttccatcagctgtacatggagatgagcgccaccggtagagagatgatcggagcgaggatcagggacacggacttcttgcaaggagatgacattctctggatcaatttcaggggaatctacgaactataccagctggacgccctcgacgtctctattatgagttgctggattttaatggagattcaaagggcccgacggcggagggttttcgatactggattcatcgaccctcggaaagtaaacgtcgcaatgctcgaccaatatccacaagaaacagaggacaatctcgtccatctcctgaaggcgcagcattacaagacgttcatactgttgccatacaacacagaattccactgggtgcttttactcatcgacctggaggcctgcaccgtcaacgtctcttggagccaaacagccgcctacgaaaatggcaacgggaggcagatctcttaa

SEQ ID NO: 15939 - DNA, 1563 bp, Oryza sativa
  Clone ID: PAT_MRT4530_21735C.1
atgctcgcctcatgccgccgcgtccgcctgcgcttccgctccgctctcgccaccgccgccgcctcccccgtcgaagcttccatttccacctccgactccgacgtggaccccgaatcccacggccccgcggatgccacgctcctccgccgccgcatgcgggcgtcggccgccgaggggaacctggccgcggcgctggacgcgctcgccctcctccggcccgcgcccgcaggcgcccacgactacaacgccctcctccacgcctacctccggtccgggcaagccgccgcgcaacacgtcgccgccgcggagcatgtagccgccgtgctgtgtcacatgcgctccgtcggcccggcgcccaacgccctcaccttcaataccgccttcaacgggctgctccggctaggccacctcgacgcctcgcacgcggtactcgaagagatgtggtctcgctgcggattcgtgccttcgttcaccacggtagatagactcatcaagaaagctgttagtggctctaactttgaacttgcactgaaggtgttcgacctaatgctcagtctgtgttactttccgactctccctatcgccaatgccattgtctcgattctattgaaaagtggcagcgctgagattgcatatgaggttttcatggtgcttgtaaataggaagtttgtgccagatgtgtatatgtacaaccaaattctgtttggtctttgcaagtcaggttgcagcaataaggcattgactctgttctgtaacttgaagaagagaggactctctctaaacgtttattcgtatacagcattggtcttaggattatgcaaggagaagatgtgggccgacgcatacagggcattggagaagatgtgcgatgaagagtgcaaaccctctgttgtaacatataccgtaattgtgaatttcctctgtagagatggtaagattgatgctgcgatgcatgttttcaggatggcatgcaaaaatggctgttgtcttgatagcaccatatgcaatgtgctactccatgcactctgctgcgaagatagaataccagaagctcgggtgattgttgatttgatggaggaggcaggattggtccctgactatttcaccatttcttctctggctgctggctttctgaaaactggggatgtcatgacctgtcagaattttatacgaatggttaagaaagcattagctttggttagtggaatgatggagagaggacttgtaccatctactacaacatataacactatactgaaaggcttctgtatggagctggatcttcagggggcattgcagatgttggaccattttagctctactggtgttccctgtgattcagtctccttcaacactatcctctctgcagcctgcaggcagcagaatgcttcagttatccgtatggttctctatcgtatgcatgtggaaggaatcaaccttgatgccatcagtatgacatgcttactccggtactttcacaaatgtgggaagtttgctgaaagtgttaaccttgttgagagtctgcgaattcagggcagcctactgtttgtgcatggtacttga

SEQ ID NO: 15940 - DNA, 2868 bp, Oryza sativa
  Clone ID: PAT_MRT4530_21736C.1
atggatcggcaatggatgtacgctgaccggcagcccagaaagtttattgacggcgtgcattattttttgagagtggccgaagctaacaggcataagggttttatttgttgtccatgcaataagtgtaagaatcagaaagagtattctgcatccaggactattcatttccacttgtttgagtcgggcttcatgccaagctataactgttggacatcccacggagagcaaggtgttgaaatggaagaagatgaagtggaagacgacaatattccggactttgctcagtacgctggatttgaaggaaatcaaacgggcgaggaggaaagggatgctgatggtaatgatgttgcggatgatcttggtcagatgttgcaggatgccaaggagaactgcgaaagtgaaaagaacaaggggaatgctagaataatgcgatggcacgctgaagagcgtcaacaggataggatgctgagacaccccgccaatggttcgcagtggcgcaatatcgacagaaaatttaaagactttgaaaaggacgcacgaaacatatggtttggtttaagtaaggatggcatgaatccttttggagagatgagcagtggccatagaacttggcctgttacgatgtgtatctacaacctccccccttggctatgcatgaataggaagtacattatgatgctgattattattcaaggccccaagcaacctggtaacgacatcgatgtgtacctaagactactggtcgaagatcttaaactgttgtggaaaaaagaaggtgtccccgtgtgggacgaggacaaacagcaggagtttaacctacgagcgctgctgttcataaccatcaacgattggcctgcacttagcaacctttccgaaagtacgtatcttaagcactgtaagaaggttgtgtacatgggtcatcgtcgattccttgctagaaaccacccggtacggaagaaaggcaagcactttgaacataaggcggaccaccgtacgaagcctaaacatcgcagcaggaaaacagtgtttgctatggttaaagatcttaaagtagtgttcggaaaggggcctcaaagccagtctatagatagccaagatggtcacgcggcgatgtggaaaaagaactctatattttcggagttaccctattgggaattcttggacatccgccacgcaatcgacgtgatgcacctcactaagaacctttgcgtaaaccttcttggcttcctaggtgtatatggaaagtcgaaagacacactggaagcacgtaatgatctgaagcatatggaaaaacgcggcgaccttcacccggaaccaaaggagaaaggaagccattacttgagtccagccagctacactcttagcaaggcagagaaggaaagtatgtttgaatgcttggagagtataaaggtaccatctggaaactccacgaatatcaagcgaataataagcacgaaggagaagaagttcacaaacctaaagtcttatgactgtcacgtgttgatgacacaactgctaccagttgtaataaggggtatccttccagacaatgtccgggcaacaataacaaagctatgtgctttcatgaacggaattttgcagaaggtcatcgatccggatagattagaagcccttcagaatgatgtggtgcaatgtcttgccagttttgagttgatatttccaccttcaattttcaatataatgacgcatctgctttgtcaccttgtcaaagagatcagtattctcaggcctgtgtacctacacaacatgtttcctttcgagaggtacatgggcgttctgaagaagtatgttcgtaaccgtgctcgtccagaggcaagcatcgccaaggggtatggaacagaggaggtcatcgaattttgtgtagaatttattgaagaccttcgcccaatcggggtacctgaatcacgccatgaagggagactacggggaaagggaactctcggaaggaaagcaataaagacggtagacaacaatttattccgtaaagcccattttacggttctgcaacaatcttcattggtagctccttacatcgaggagcacttggctctagttcgtgccagaaacatcgctaagtccgatgcacggattacacggcatcacattgatactttccccgcgtggctacgacaacatctcatgggtaacgagacgatcaaccaacaactggtcttcctggcgaggggaccatttggctcgattgcgacattccagggatatgagatcaatgggtacacattctacacgagagcccaagacatgaagagcacgaaccaaaacagcgctgtttgtatcgaggccatgggacacgatggaacaactggcacgtattacggtgccatcgaggacatatgggaacttgactatggtcctctcaaggtccctctgttccggtgccaatgggttaggttgactggtggaggcgtaatgattgatgacagtgggatgacaacggttgaccttaacaaggttggatactcggacgaaccttttgtccttgccaatgatgtaacgcaagtcttttacgtgaaggatatgtctagcaaaggaaagaagggcagagggcctgacgagccaaagcgtcacgtggttctcccaggcaaaagaaaaatcgtcggagttgaggacaagaccgacgaggattatgatcagttggatgggcaaccccctttcacggtgacgattgaccctagcatcctcctaccaaatgaagacaccccttactcacatatcgatcacaaggagggaacaatagtgaggagaaagtacgtgcggtcaaccgtcaccgccgatgtattgcccgggaaaatatctttagtccccgttgatgagaacaaccgagagtaa

SEQ ID NO: 15941 - DNA, 2835 bp, Oryza sativa
  Clone ID: PAT_MRT4530_21737C.1
atggatcggcaatggatgtacgctgaccggcggtccaaagagtttattgacggcgtgcactattttttgagagtggccgaagctaacaggcaaaggggttttatttgttgtccatgcaataagtgtaagaatcagaaggagtattctgcatccaggactattcatttccacttgtttgagtcggggttcatgccaagctataattgttggacatcccacggagagcaaggtgttgaaatggaagaagatgaagtggaagacgacaatattccggactttgctcagtatgttggatttgaaggaaatcaaacgggcgaggaggaaatagctgctgatggtaacgacgttgcggatgaacttggtcagatgttgcaggacgccagggaggactgcgaaagtgaaaaggaggcccataaattggacaagatgttggaggaccacagaacttcgttgtacccagcactacgatacaagattagacgggacgatccaggagaagttgacgggcagctaacaaagaagagaattcctgctaaggtgatgtggtatttccctataataccacggctaaggcgtttgttcaggaacaaggggaatgctagaatgttgcgatggcacgctgaagagcgtcaacaggacgggatgctgagacaccccgccgatggttcgcagtggcgaaacatcgacagaaaatttaaagaatttggaaaggacgcacgaaacatacggtttggtgtccccgtgtgggacgaggacaaacaggaggagtttaacctacgagcgctgctgttcgtaaccatcaacgattggcctgcacttagcaacctatccggacaatccaacaaggggtacaaggcttgcactcactgtatggatgaaacagaaagtacgtatcttaagcactgtaggaaggttgtatacatgggtcatcgtcgattccttgcagcaaaccacccggtacagaagaaaggcaagcacttcgaacataaggccgaccaccgtatgaagcctaaacatcgcagcgggaaaacagtgtttgctatggttaaatatcttaaagtagtgttcggaaaggggcctggaagccagcatatagagagcgaagatggtcacgcggcgatgtggaaaaagaactctatattttgggagttaccatattgggaattcttggacgtacgccacgcaatcgacgtgatgcacctcactaagaacctttgcgtaaaccttcttggcttcctaggtgtatacggaaagtcgaaagatacactggaagcacgtaatgatctgaagcatatggaacaacgcggcgaccttcacccggaaccaaaggagaaaggaagccattacttgagtccagccagctacactcttagcaaggcagagaaggaaagtatgtttgaatgcttggagagcataaaggtaccgtctggatactccacgaatattaagcgaataataagcacgaaggagaagaagttcacaaacctaaagtctcatgactgtcacgtgttgatgacacaactgctaccagttgtaataaggggtatccttccagacaatgtccgggcaacaataacaaagctatgtgcattcatgaacgcaatttcgcagaaggtcatcgatccggatagattagaagcccttcagaatgaagtggtgcaatgtctcgtcagttttgagttgatatttcaaccttcattttttaatataatgacgcatttgctatgtcaccttgtgaaagagatccgtattctcgggcctatgtacctacacaacatgtttcctttcgagaggtacatgggcgttctgaagaagtatgttcgtaaccgtgctcgtccagaggcaagcatcgccaagggttatggaacagaggaggtcatcgaattttgcgtagaatttatcgaagaccttcgcccaatcgggctacctgaatcacgccatgaagggagactacggggaaagggaactctcggaaggaaagcaataatgacggtagacaacaatttattccgtaaagcccatttcactgttctgcaacactcttcattggtagctccttacatcgaggagcacttggctctagttcgcgccaggaacatcggtaagtccgatgcatggattacacggcatcacattgatactttccccgcgtggctacgacaacatctcatgggtaacgagtcgatcaaccaacaacttgccttcctggcgaggggaccgtctgggtcgatcacgacattccagggatatgagatcaatgggtacacattctacacaagagcccaagacatgaagagcacgaaccaaaacagcgctgttcgtgtcgatgccatgggacacgatggaacaactgccacgtattacggtgccatcgaggacatatgggaacttgactacggtcctctcaaggttcctctgttccggtgccaatgggttaggttgactggtggaggcataatgattgatgacagtgggatgacaactgttgaacttaacaaggttggatactcggacgaaccttttgtccttgccaatgatgtaacgcaagtctttttcgtgaaggacatgtctagcaaaggaaagaagggcagagggcctgatgagcctaagcgtcaagtggttctcccaggcaaaagaaaaatcgtcggagttgaggacaagactgacgaggattacgatcagttggatgggcaaccccctttcacggtgacgattgaccctagcatcctcctatcaaatgaagacaccccttactcacgcagcgatcacaaggagggaacaatagtgaggagaaagtacgtgcggtcaaccgtcaccgccgatgtaatgccgtaa

SEQ ID NO: 15942 - DNA, 366 bp, Oryza sativa
  Clone ID: PAT_MRT4530_21738C.1
gaggtagaacccattcggtaggttcggaggttctgaactgttaacaaattgtcaggttacacttgagatgagatggatgaatgcccaaggccattacaactctggaggttgccacacgcttgtgtagtgcagagaacattgtttgagctttgttgtttgccacatggtgaactcactctaccaatcggcgaggggctctcttcaggcctagatagactgttacaaaatacagacttactacttagtatgggactacttgccttcatctactctatcccaagttcgaacgacagctataggcgcgacttgttgttgcccagcatctgcatacggttctgcacatgatgctattcgtagcttgattgc

SEQ ID NO: 15943 - DNA, 2862 bp, Oryza sativa
  Clone ID: PAT_MRT4530_21739C.1
atggatcggcaatggatgtacgctgaccggcggtccaaagagtttattgacggcgtgcactattttttgagagtggccgaagctaacaggcaaaggggttttatttgttgtccatgcaataagtgtaagaatcagaaggagtattctgcatccaggactattcatttccacttgtttgagtcggggttcatgccaagctataattgttggacatcccacggagaatgttgcaggacgccagggaagactgcgaaagtgaaaaggaggcccataaattggaaggcaaaaaatggggttagtgacaaggcatttggcgatttattgaaactcgtcaagaacattcttccggggggaaacaaattgcccgagacaacgtacgaggctaagaagatagtctgcccgttaggactggaagttcataagattcacgcatgtccgaacgattgtatcctatatcgcggtgaggagtatgagaacctagaagcatgccctgtttgcaaagcactacgatacaagattagacgggacgatccaggagaagttgacgggcagctaacaaagaagagaattcctgctaaggtgatgtggtatttccctataataccacggctaaggcgtttgttcaggaacaaggggaatgctagaatgttgcgatggcacgctgaagagcgtcaacaggacgggatgctgagacaccccgccgatggccccaagcaacctggtaacgacatcgacgtgtacctaagaccactggtcgaagatcttaaacagttgtggaagaaggaaggtgtccccgtgtgggacgaggacaaacaggaggagtttaacctacgagcgctgctgttcgtaaccatcaacgattggcctgcacttagcaacctattcggacagtccaacaaggggtacaaggcttgcactcactgtatggatgaaacagaaagtacgtatcttaagcactgtaggaaggttgtatacatgggtcatcgtcgattccttgcagcaaaccacccggtacggaagaaaggcaagcacttcgaacataaggccgaccaccatacgaagcctaaacatcgcagcgggaaaacagtgtttgatatggttaaagatcttaaagtagtgttcggaaaggggcctggaagccagcatatagagagcgaagatggtcacgcggcgatgtggaaaaagaactctatattttgggagttaccatattgggaattcttggacgtacgccacgcaatcgacgtgatgcacctcactaagaacctttgcgtaaaccttcttggcttcctaggtgtatacggaaagtcgaaagatacactggaagcacgtaatgatctgaagcatatggaacaacgcggcgaccttcacccggaaccagaggagaaaggaagccattacttgagtccagccagctacactcttagcaaggcagagaaggaaagtatgtttgaatgcttggagagcataaaggtaccgtctggatactccacgaatatcaagcgaataataagcacgaaggagaagaagttcacaaacctaaagtctcatgactgtcacgtgttgatgacacaactgctaccagttgtaataaggggtatccttccagacaatgtccgggcaacaataacaaagatatgtgcattcatgaacgcaatttcgcagaaggtcatcgatccggatagattagaagcccttcagaatgaagtggtgcaatgtcttgtcagttttgagttgatatttccaccttcatttttcaatataatgacgcatttgctttgtcaccttgtgaaagagatccgtattctcgggcctatgtacctacacaacatgtttcttttcgagaggtacatgggcgttctgaagaagtatgttcgtaaccgtgctcgtccagaggcaagcatcgccaagggttatggaacagaggaggtcatcgaattttgcgtagaatttatcgaagaccttcgcccaatcggggtacctgaatcacgccatgaagggagactacggggaaagggaactctcggaaggaaagcaataacgacggtagacaacaatttattccgtaaagcccatttcactgttctgcaacactcttcattggtagctccttacatcgaggagcacttggctctagttcgcgccaggaacatcggtaagtccgatgcatggattacacggcatcacattgatactttccccacgtggctacgacaacatctcatgggtaacgagtcgatcaaccaacaacttgccttcctggcgaggggaccgtctgggtcgatcgcgacattccagggatatgagatcaatgggtacacattctacacgagagcccaagacatgaagagcacgaaccaaaacagcgctgttcttgtcgatgccatgggacacgatggaacaactgccacgtattacggtgccatcgaggacatatgggaacttgactatggtcctctcatggttcctctgttccggtgccaatgggttaggttgactggtggaggcgtaatgattgatgacagtgggatgacaactgttgaccttaacaaggttggatactcggatgaaccttttgtccttgccaatgatgtaacgcaagtctttttcgtgaaggacatgtctagcaaaggaaagaagggcagagggcctgatgagactaagcgtcaagtggttctcccaggcaaaagaaaaatcgtcggagttgaggacaagactgacgaggattacgatcagttggatgggcaaccccctttcacggtgacgattgaccctagcatcctcctatcaaatgaagacaccccttactcacgcagcgatcacaaggagggaacaatagtgaggagaaagtacgtgccgtaa

SEQ ID NO: 15944 - DNA, 453 bp, Oryza sativa
  Clone ID: PAT_MRT4530_2173C.1
agatagtaatgctgaataaaaatcccaagtcacttgcccttagttgctggtctacttgtctatcatttggagattcaaacaaaagaatccatgcaagggtctccaggctatggaactttactgatctcaacgatgatacaaaaattttccacactgatcttgtcttactcgatgaaatagggactagcatacatgcccaaatttatccccctataacagaaaagatgaaacctctccttaaggaagaaaaggtttactacattgactcattcactattagggctgcaaacagaacatacaggccagttgcaaacaacctaatgatcctcttcagtaaatggacaacacttgaagaacacattaatgtccctcctcatttccctagtattacattttcactgacaccatttgaagatgttccttcgcttgtcgagaagaattcattctacgttg

SEQ ID NO: 15945 - DNA, 3240 bp, Oryza sativa
  Clone ID: PAT_MRT4530_21740C.1
atggatcggcaatggatgtacgctgaccggcagtccaaagagtttattgacggcgtgcactattttttgagagtggccgaagctaacaggcaaaggggttttatttgttgtccatgcaataagtgtaagaatcagaaggagtattctgcatccaggactattcatttccacttgtttgagtcggggttcatgccaagctataattgttggacatcccacggagagcaaggtgttgaaatggaagaagatgaagtggaagacgacaatattccggactttgctcagtatgttggatttgaaggaaatcaaacgggcgaggaggaaatagctgctgatggtaacgatgttgcggatgatcttggtcagatgttgcaggacgccagggaggactgcgaaagtgaaaaggaggcccataaattggacaagatgttggaggaccacagaacttcgttatacccaggttgcgatgacaaggcatttggcgatttattgaaactcgtcaagaacattcttccggggggaaacaaattgcccgagacaacgtacgaggctaagaagatagtctgcctgttaggactggaagttcataagattcacgcatgtccgaacgattgtatcctatatcgcggtgaggagtatgagaacctagaagcatgccctgtttgcaaagcactacgatacaagattagacgggacgatccaggagaagttgacgggcagctaacaaagaagagaattcctgctaaggtgatgtggtatttccctataataccacggctaaggcgtttgttcaggaacaaggggaatgctagaatgttgcgatggtacgctgaagagcgtcaacaggacgggatgctgagacaccccgccgatagttcgcagtggcgaaacatcgacagaaaatttaaagaatttggaaaggacgcacgaaacatacggtttggtttgagtacggatggcatgaatccttttggagagatgagcagcggccatagcacttggcccgttacgatgtgtatctacaacctccctccctggctatgcatgaagaggaagtacataatgatgccgattattattcaaggccccaagcaacctggtaacgatatcgacgtgtacctaagaccactggtcgaagatcttaaacagttgtggaagaaggaaggtgtccccgtgtgggacggggacaaacaggaggagtttaacctacgagcgctgctgttcgtaaccatcaacgattggcctgcacttagcaacctatccggacagtccaacaaggggtacaaggcttgcactcactgtatggatgaaacagaaagtacgtatcttaagcactgtaggaaggttgtatacatgggtcatcgtcgattccttgcagcaaaccacccggtacggaagaaaggcaagcacttcgaacataaggccaaccaccgtacgaagcctaaacatcgcagcgggaaaacagtgtttgctatggttaaagatcttaaagtagtgttcggaaaggggcctggaagccagcatatagagagcgaagatggtcacgcggcgatgtggaaaaagaactctatattttgggagttaccatattgggaattcttggacgtacgccacgcaatcgacgtgatgcacctcactaagaacctttgcgtaaaccttcttggcttcctaggtgtatacggaaagtcgaaagatacactggaagcacgtaatgatctgaagcatatggaacaacgcggcgaccttcacccggaaccaaaggagaaaggaagccattacttgagtccagccagctacactcttagcaaggcagagaaggaaagtatgtttgaatgcttggagagcataaaggtaccgtctggatactccacgaatatcaagcgaataataagcacgaaggagaagaagttcacaaacctaaagtctcatgactgtcatgtgttgatgacacaactgctaccagttgtaataaggggtatccttccagacaatgtccgggcaacaataacaaagctatgtgcattcatgaacgcaatttcgcagaaggtcatcgatccggatagattagaagcccttcagaatgaagtggtgcaatgtctcgtcagttttgagttgatatttccaccttcatttttcaatataatgacgcatctgctttgtcaccttgtgaaagagatccgtattctcgggcctatgtacctacacaacatgtttcctttcgagaggtacatgggcgttctgaagaagtatgttcgtaaccgtgctcgtccagaggcaagcatcgccaagggttatggaacagaggaggtcatcgaattttgcgtagaatttatcgaagaccttcgcccaatcggggtacctgaatcacgccatgaagggagactacggggaaagggaactctcggaaggaaagcaataacgacggtagacaacaatttattccgtaaagcccatttcactgttctgcaacactcttcattggtagctccttacatcgaggagcacttggctctagttcgcgccaggaacatcggtaagtccgatgcatggattacacggcatcacattgatactttccccgcgtggctacgacaacatctcatgggtaacgagtcgatcaaccaacaacttgccttcctggcgaggggaccgtctgggtcgatcgcgacattccagggatatgagatcaatgggtacacattctacacgagagcccaagacatgaagagcacgaaccaaaacagcgctgttcttgtcgatgccatgggacacgatggaacaactgccacgtattacggtgccatcgaggacatatgggaacttgactatggtcctctcaaggttcctctgttccggtgccaatgggttaggttgactggtggaggcgtaatgattgatgacagtgggatgacaactgttgaccttaataaggttggatactcaaacgaaccttttgtccttgccaatgatgtaacacaagtctttttcgtgaaggacatgtctagcaaaggaaagaagggcagagggcctgatgagcctaagcgtcaagtggttctcccaggcaaaagaaaaatcgtcggagttgaggacaagactgacgaggattacgatcagttggatgggcaaccccctttcacggtgacgattgaccctagcatcctcctatcaaatgaagacaccccttactcacgcagcgatcacaaggagggaacaatagtgaggagaaagtacgtgccgtaa

SEQ ID NO: 15946 - DNA, 2937 bp, Oryza sativa
  Clone ID: PAT_MRT4530_21741C.1
atggatcggcaatggatgtacgctgaccggcggtccaaagagtttattgacggcgtgcactattttttgagagtggccgaagctaacaggcaaaggggttttatttgttgtccatgcaataagtgtaagaatcagaaggagtattctgcatccaggactattcatttccacttgtttgagtcggggttcatgccaagctataattgttggacatcccacggagagcaaggtgttgaaatggaagaagatgaagtggaagacgacaatattccggactttgctcagtatgttggatttgaaggaaatcaaacgggcgaggaggaaatagctgctgatggcaacgacgttgcggatgatcttggtcagatgttgcagaacgccagggaggactgcgaaagtgaaaaggaggcccataaattggacaagatgttggaggaccacagaacttcgttgtacccaggttgcgagcaggggcacaaaaagttggataccactctggagttgttgcaatggaaggcaaaaaatggggttagtgacaaggcatttggcgatttattgaaactcgtcaagaacattcttccggggggaaacaaattgcccgagacaacgtacgaggctaagaagatagtttgcccgttaggactggaagtttataagattcacgcatgtccgaacgattgtatcctatatcgcggtgaggagtatgagaacctagaagcatgccctgtttgcaaagcactacgatacaagattagacgggacgatccaggagaagttgatgggcagctaacaatgaagagaattcctgctaaggtgatgtggtatttccctataataccacggctaaggcgtttgttcaggaacaaggggaatgctagaatgttgcgatggcacactgaagaacgtcaacaggacgggatgctgagacaccccgccgatggttcgcaatggcgaaacatcgacagaaaatttaaagaatttggaaaggactcacgaaacatacggtttggccccaagcaacctggtaacgacatcgacgtgtacctaagaccactggtagaagatcttaaacagttgtggaagaaggaaggtgtccccgtgtgggacgaggacaaacaggaggagtttaacctacgggcgctgctgttcgtaaccatcaacgattggcctgcacttagcaacctatccggacagtccaacaaggggtacaaggcttgcactcactatatggatgaaacagaaagtacgtatcttaagcactgtaggaaggttgtatacatgggtcatcgtcgattccttgcagcaaaccacccggtacggaagaaaggcaagcacttcgaacataaggccgaccaccgtacgaagcctaaacatcgcagcgggaaaacagtgtttgctatggttaaagatcttaaagtagtgttcggaaaggggcctggaagccagcatatagagagcgaagatggtcacgcggcgatgtggaaaaagaactctatattttgggagttaccatattgggaattcttggacgtacgccacgcaatcgacgtgatgcacctcactaagaacctttgcgtaaaccttcttggcttcctaggtgtatacggaaagtcgaaagatacactggaagcacttgtaataaggggtatccttccagacaatgtccgggaaacaataacaaagctatgtgcattcatgaatgcaatttcgcagaaggtcatcgatccggatagattagaagcccttcagaatgaagtggtgcaatgtctcgtcagttttgagttgatatttccaccttcatttttcaatataatgacgcatctgctttgtcaccttgtgaaagagatccgtattctcgggcctatgtacctacacaacatgtttcctttcgagaggtacatgggcgttctgaagaagtatattcgtaaccgtgctcgtccagaggcaagcatcgccaagggttatggaacagaggaggtcatcgaattttgcgtagaatttatcgaagaccttcgcccaatcggggtacctgaatcacgccatgaagggagactacggggaaagagaactctcggaaggaaagcaataatgacggtagacaacaatttattccgtaaagcccatttcactgttctgcaacactcttcattggtagctccttacatcgaggagcacttggctctagttcgcgccaggaacatcggtaagtccgatgcatggattacacggcatcacattgatactttccccgcgtggctacgacaacatctcatgggtaacgagtcgatcaaccaacaacttgccttcctggcgaggggaccgtctgggtcgatcacgacattccagggatatgagatcaatgggtacacattctacacgagagcccaagacatgaagagcacgaaccaaaacaacgctgttcgtgtcgatgccatgggacacgatggaacaactgccacgtattacggtgccatcgaggacatatgggaacttgactatggtcctctcaaggttcctctgttccggtgccaatgggttaggttgattggtggaggcgtaatgattgatgacagtgggatgacaactgttgaccttaacaaggttggatactcggacgaaccttttgtccttgccaatgatgtaacgcaagtctttttcgtgaaggacatgtctagcaaaggaaagaagggcagagggcctgatgagcctaagcgtcaagtggttctcctaggcaaaagaaaaatcgtcggagttgaggataagactgacgaggattacgatcagttggatgggcaaccccctttcacggtgacgattgaccctagcatcctcctatcaaatgaagacaccccttactcacgcagcgatcacaaggagggaacaatagtgaggagaaagtacgtgcggtcaaccgtcaccgccgatgtaatgccgtaa

SEQ ID NO: 15947 - DNA, 3420 bp, Oryza sativa
  Clone ID: PAT_MRT4530_21742C.1
atggccacggcagcgcaaaacgctgagggcgctgcatttcccagttgcggttttggagggtggttttgctcacgtggtgctgacgtggcgagcgggaagaagcagccgctgcaggggctggaccaccgggtgatggtggcgctgatggatcggaaatggatgtacgctgaccggcggtccaaagagtttattgacggcgtgcactattttttgagagtggccgaagctaacaggcaaaggggttttatttgttgtccatgcaataagtgtaagaatcagaaggagtattctgcatccaggactattcatttccacttgtttgagtcggggttcatgccaagctataattgttggacatcccacggagagcaaggtgttgaaatggaagaagatgaagtggaagacgacaatattccggactttgctcagtatgttggatttgaaggaaatcaaacgggcgaggaggaaatagctgctgatggtaacgacgttgcggatgatcttggtcagatgttgcaggacgctagggaggactgcgaaagtgaaaaggaggcccataaattggacaagatgttggaggaccacagaacttcgttgtacccaggttgcgagcaggggcacaaaaagttggataccactctggagttgttgcaatggaaggcaaaaaatggggttagtgacaaggcatttggcgatttattgaaactcattaagaacattcttccggtgggaaacaaattgcccgagacaacgtacgaggctaagaagatagtctgcccgttaggactggaagttcataagattcacgcatgtccgaacgattgtatcctatatcgcggtgaggagtatgagaacctagaagcatgccctgtttgcaaagcactacgatacaagattagacgggacgatccaggagaagttgacgggcagctaacaaagaagagaattcctgctaaggtgatgtggtatttccctataataccacggctaaggcgtttgttcaggaacaaggggaatgctagaatgttgcgatggcacgctgaagagcgtcaacaggacgggatgctgagacaccccgcagatggttcgcagtggcgaaacatcgacagaaaatttaaagaatttggaaaggacgcacgaaacatacggtttggtttgagtacggatggcatgaatccttttggagagatgagcagcggccatagcacttggcccgttacgatgtgtatctacaacctccccccctggctatgcatgaagaggaagtacataatgatgccgattattattcaaggccccaagcaacctggtaacgacatcgacgtgtacctaagaccactggaaggtgtccccgtgtgggacgaggacaaacaggaggagtttaacctacgagcgctgctgttcgtaaccatcaacgattggcctgcacttagcaacctatccggacagtccaacaaggggtacaaggcttgcactcactgtatggatgaaacagaaagtacgtatcttaagcactgtaggaaggttgtatacatgggtcatcgtcgattccttgcagcaaaccacccggtacggaagaaaggcaagcacttcgaacataaggccgaccaccgtacgaagcctaaacatcgcagcgggaaaacagtgtttgctatggttaaagatcttaaagtagtgttcggaaaggggcctggaagccagcatatagagagcgaagatggtcacgcggcgatgtggaaaaagaactctatattttgggagttaccatattgggaattcttggacgtacgccacgcaatcgacgtgatgcacctcactaagaacctttgcgtaaaccttcttggcttcctaggtgtatacggaaagtcgaaagatacactggaagcacgtaatgatctgaagcatatggaacaacgcggcgaccttcacccggaaccaaaggagaaaggaagccattacttgagtccagccagctacactcttagcaaggcagagaaggaaagtatgtttgaatgcttggagagcataaaggtaccgtctggatactccacgaatatcaagcgaataataagcacgaaggagaagaagttcacaaacctaaagtctcatgactgtcacgtgttgatgacacaactgctaccagttgtaataaggggtatccttccagacaatgtccgggcaacaataacaaagatatgtgcattcatgaacgcaatttcgcagaaggtcatcgatccggatagattagaagcccttcagaatgaagtggtgcaatgtctcgtcagttttgagttgatatttccaccttcatttttcaatataatgacgcatctgctttgtcaccttgtgaaagagatccgtattctcgggcctatgtacctacacaacatgtttcctttcgagaggtacatgggcgttctgaagaagtatgttcgtaaccgtgctcgtccagaggcaagcatcgccaagggttatggaacagaggaggtcatcgaattttgcgtagaatttatcgaagaccttcgcccaatcggggtacctgaatcacgccatgaagggagactacggggaaagggaactctcggaaggaaagcaataaagacggtagacaacaatttattccgtaaagctcatttcactgttctgcaacactcttcattggtagctccttacatcgaggagcgcttggctctagttcgcgcaaggaacatcggtaagtccgatgcatggattacacggcatcacattgatactttccccgcgtggctacgacaacatctcatgggtaacgagtcgatcaaccaacaacttgccttcctggcgaggggaccgtctgggtcgatcgcgacattccagggatatgagatcaatgggtacacattctacacgagagcccaagacatgaagagcacgaaccaaaacagcgctgttcgtgtcgatgccatgggacacgatggaacaactgccacgtattacggttccatcaaggacatatgggaacttgactatggtcctctcaaggttcctctgttccggtgccaatgggttaggttgactggtggaggcgtaatgattgatgacagtgggatgacaactgttgaccttaacaaggttggatacttggacgaaccttttgtccttgccaatgatgtaacgcaagtctttttcgtgaaggacatgtctagtaaaggaaagaagggcagagggcctgatgagcctaagcgtcaagtggttctcccaggcaaaagaaaaatcgtcggagttgaggacaagactgatgaggattacgatcagttggatgggcaacccccttttacggtgacgattgaccctagcatcctcctatcaaatgaagacaccccttactcacgcagcgatcacaaggagggaacaatagtgaggagaaagtacgtgccgtaa

SEQ ID NO: 15948 - DNA, 558 bp, Oryza sativa
  unsure (1)..(558): unsure at all n locations
  Clone ID: PAT_MRT4530_21743C.1
gtttcttcttggttctttcccctttctgttccctgttcttcgtagcaagtatgttgccgattggcctgcttgatttggtttcatggagaggttgcagtgtgggtttgtagtatcttggtttgctttgagtatttacaaggaaaaaaaatgaattaatacagagcagttggcgctgttccatttttgctgctagttactgggcatcatcatatattagttcatcaagcatggcatttcatgattgaatggttaaagagacctgcttgatggataattaattagggtgagtatctcatgtgcaattcaatatctaaagaagaagtctggccaagttcgagttccggtgtgcaagcaagcattgcacactggcacattgaccatggccgggagaatgggacatggtttgcgagtcccattggattgggatttcaaacgttcctttcccatgcggactaagtgcaccatttctgactaaggttcctcaantcccccaacccggggcgtgtccnttaaaatattaaccatatccaagattcatctcaacatagttgttaaaaa

SEQ ID NO: 15949 - DNA, 264 bp, Oryza sativa
  Clone ID: PAT_MRT4530_21744C.1
cgggctgcaggaaaaattcggcacgaggataaattcatctcaactcattttagagcaaactcagtttctatagatccatcaacttatgttttcctataaagtaaaatgaaatagtatacatactttagatcaaatgcctctgaaactattatctttaaaatgactagttttaggtaagctgaaatttagaaattcacataaaattcatcttagaactattttaagtaaacccaagttctgtagaatcaccaaaacatatacttc

SEQ ID NO: 15950 - DNA, 3640 bp, Oryza sativa
  Clone ID: PAT_MRT4530_21745C.1
atggatcggcaatggatgtacgctgaccggcggtccaaagagtttattgacggcgtgcactattttttgagagtggccgaagctaacaggcaaaggggttttatttgttgtccatgcaataagtgtaagaatcagaaggagtattctgcatccaggactattcatttccacttgtttgagtcggggttcatgccaagctataattgttggacatcccacggagagcaaggtgttgaaatggaagaagatgaagtggaagacgacaatattccggactttgctcagtatgttggatttgaaggaaatcaaacgggcgaggaggaaatagctgctgatggtaacgacgttgcggatgatcttggtcagatgttgcaggacgccagggaggactgcgaaagtgaaaaggaggcccataaattggacaagatgttggaggaccacagaacttcgttgtacccaggttgcgagcaggggcacaaaaagttggataccactctggagttgttgcaatggaaggcaaaaaatggggttagtgacaaggcatttggcgatttattgaaactcgtcaagaacattcttccggggggaaacaaattgcccgagacaacgtacgaggctaagaagatagtctgcccgttaggactggaagttcataagattcacgcatgtccgaacgattgtatcctatatcgcggtgaggagtatgagaacctagaagcatgccctgtttgcaaagcactacgatacaagattagacgggacgatccaggagaagttgacgggcagctaacaaagaagagaattcctgctaaggtgatgtggtatttccctataataccacggctaaggcgtttgttcaggaacaaggggaatgctagaatgttgcgatggcacgctgaagagcgtcaacaggacgggatgctgagacaccccgccgatggttcgcagtggcgaaacatcgacagaaaatttaaagaatttggaaaggacgcacgaaacatacggtttggtttgagtacggatggcatgaatccttttggagagatgagcagcggccatagcacttggcccgttacgatgtgtatctacaacctccccccctggctatgcatgaagaggaagtacataatgatgccgattattattcaaggccccaagcaacctggtaacgacatcgacgtgtacctaagaccactggtcgaagatcttaaacagttgtggaagaaggaaggtgtccccgtgtgggacgaggacaaacaggaggagtttaacctacgagcgctgctgttcgtaaccatcaacgattggcctgcacttagcaacctatccggacagtccaacaaggggtacaaggcttgcactcactgtatggatgaaacagaaagtacgtatcttaagcactgtaggaaggttgtatacatgggtcatcgtcgattccttgcagcaaaccacccggtacggaagaaaggcaagcacttcgaacataaggccgaccaccgtacgaagcctaaacatcgcagcgggaaaacagtgtttgctatggttaaagatcttaaagtagtgttcggaaaggggcctggaagccagcatatagagagcgaagatggtcacgcggcgatgtggaaaaagaactctatattttgggagttaccatattgggaattcttggacgtacgccacgcaatcgacgtgatgcacctcactaagaacctttgcgtaaaccttcttggcttcctaggtgtatacggaaagtcgaaagatacactggaagcacgtaatgatctgaagcatatggaacaacgcggcgaccttcacccggaaccaaaggagaaaggaagccattacttgagtccagccagctacactcttagcaaggcagagaaggaaagtatgtttgaatgcttggagagcataaaggtaccgtctggatactccacgaatatcaagcgaataataagcacgaaggagaagaagttcacaaacctaaagtctcatgactgtcacgtgttgatgacacaactgctaccagttgtaataaggggtatccttccagacaatgtccgggcaacaataacaaagctatgtgcattcatgaacgcaatttcgcagaaggtcatcgatccggatagattagaagcccttcagaatgaagtggtgcaatgtctcgtcagttttgagttgatatttccaccttcatttttcaatataatgacgcatctgctttgtcaccttgtgaaagagatccgtattctcgggcctatgtacctacacaacatgtttcctttcgagagaggcaagcatcgccaagggttatggaacagaggaggtcatcgaattttgcgtagaatttatcgaagaccttcgcccaatcggggtacctgaatcacgccatgaagggagactacggggaaagggaactctcggaaggaaagcaataacgacggtagacaacaatttattccgtaaagcccatttcactgttctgcaacactcttcattggtagctccttacatcgaggagcacttggctctagttcgcgccaggaacatcggtaagtccgatgcatggattacacggcatcacattgatactttccccgcgtggctacgacaacatctcatgggtaacgagtcgatcaaccaacaacttgccttcctggcgaggggaccgtctgggtcgatcgcgacattccagggatatgagatcaatgggtacacattctacacgagagcccaagacatgaagagcacgaaccaaaacagcgctgttcgtgtcgatgccatgggacacgatggaacaactgccacgtattacggtgccatcgaggacatatgggaacttgactatggtcctctcaaggttcctctgttccggtgccaatgggttaggttgactggtggaggcgcaatgattgatgacagtgggatgacaactgttgaccttaacaaggttggatactcggacgaaccttttgtccttgccaatgatgtaacgcaagtctttttcgtgaaggacatgtctagcaaaggaaagaagggcagagggcctgatgagcctaagcgtcaagtggttctcccaggcaaaagaaaaatcgtcggagttgaggacaagactgacgaggattacgatcagttggatgggcaaccccctttcacggtgacgattgaccctagcatcctcctatcaaatgaagacaccccttactcacgcagcgatcacaaggagggaacaataggcaaatccccgcgccgacgccgccgtatctcgccgtcgtctcgagctcgtcgtcctcgccgccgcctccgcctcctccgctgccgccgcatctctggggtgagagccgccgccgccagatctcccttcatgcatctcgatctctccgatctcgatcccggccacgtggctgagccatctttatccggcgccgcgagcatgagggccaccaccccgccggcccagtcgatgccccaccgccaccaagcgccgccgcctgccctcgacgccccgcacatcactccgccgccgccgagcgcccccaccgccacagtttgccgccggcaccctcccccccccccccccaacacaagctttaatccactcaatccacttagaaggaaaacccttaagttgggtaccgag

SEQ ID NO: 15951 - DNA, 316 bp, Oryza sativa
  unsure (1)..(316): unsure at all n locations
  Clone ID: PAT_MRT4530_21746C.1
ggggggaaggggacattaaataggcacgggggacaaaagcaagggaaaaggggggccctttacaaaaaaggggtataccatcatttttccaagatcaacaaaaaccaaggccatccacattattaggcgggggaaaaagagaagaggggggccngagttagggacccggggggttcagggcaaggggcccctggcgccctttataaacctaaatctccggggtaaaaaggggggctatagttaaggggttaagggtatccgggccataaacggggaacccatccaaatgcccgggggaaatcatcatcaaacccaa

SEQ ID NO: 15952 - DNA, 3123 bp, Oryza sativa
  unsure (1)..(3123): unsure at all n locations
  Clone ID: PAT_MRT4530_21747C.1
ccacgcgtccgcacgtctttacaatgatgcttttgtagctttccctcatttttaagattgaaggtttttatgttggattaattttgccatcggatatcaattgacagcgtattacattgatgcaatttttcttttagctatttcttatcataccctacaggtaattctcaaaatcggagagatttacaaggacacaatagcgatataagtatgactccctcggagctctaattatatagcacaaggatgattcaggactcatccaccatataactataactctctcagggctccaatcatatagcacaaaaaggattcagaactcatccataaacagtgacgatgacccgcaaccactgcgagaaaaccttgaccacggacaacgtcagagattttagccacaggataacaaactcacaggaaatggaaggaaagtgagaaatatctgcagccgccgtcagcctcaggcctcagccgctggcaaacgcaccgcatcagcagcagcagcagcagcagccatcccaagcgagagagctttgctttcgcgagtcgcgcgactccgccaggacaggaaaaaaccggaaaaaaaaaaccccgcaataaaatttccccaacttccgctttttccttgcctctccccaccacaccacaccaccccatctcccatctcaccatccccctttcccaccctcccgtgcgaacacacccgcggcgcggagcccagatcgggatcgcgacggatcggcggcggcggcggcgatgggaggcgaggcgggggagcggcggctggggagggcgatgagcttcgggatcccggacgtggcgctggggctggtgatggggttcgtggaggacccctgggaccgggacgccatctcgctcgtgtgccgccactggtgcagggtcgacgcgctcagccgcaagcacgtcaccgtcgccatggcgtactccaccacgcccgaccggctgttcaggcggttcccctgcctcgagtcgctcaagctcaaggccaagccccgggcggccatgttcaacctcatccccgaggactggggcggctccgcctcgccgtggatccgccagctctcggcctcgttccacttcctcaaggcgctccacctccgcaggatgatcgtgtccgacgacgacctcgacgtcctcgtccgcgccaaggcgcacatgctctcctcgttcaagcttgaccgctgctctggcttctcaacatcctccctcgccctcgtcgcccgcacctgcaagaaacttgaaacgttattcctggaggatagcataattgctgagaaagaaaatgacgaatggattcgggagcttgctaccaacaatagtgtccttgagacactgaatttctttttgacagatctcagggcatccccagcatatcttaccctccttgtgcgcaattgtcgaaggctgaaagttttgaagattagtgagtgcttcatgcttgacctggttgatttgttccgtacagcagaaatattacaagactttgccggtggttcctttgatgatcagggtcaagttgaagagagtagaaattatgaaaactactatttccctccttcattgctccgcttgagtttgctctacatgggaacaaaagagatgcaagtgctatttccatatggtgctgcactcaagaagttggatcttcaattcacattcctttccacagaggatcactgtcagctggtccagcgctgcccaaatctggaaatcttagaggtgagggatgtcataggggatcgtgggttagaagttgttgcacaaacctgcaagaaattacagagacttcgagtagagagaggagatgatgatcaaggaggtcttgaggatgaacatggtatggttacacaggtggggttgatggctgtagctcaaggctgccctcatttagaatactgggcagtgcatgtcactgacattacaaatgctgctctagaagccatcggtacatacagcagcagtcttaacgatttccggcttgtcctgcttgatagagaagcaaatataacagaatcaccccttgacaatggggtgcgtgctttactgagaggctgcaccaagctccggaggttcgcattttatgtaagacctggggctctatcagatgttggccttgggtacattggtgaatttagtaagacaatccgttacatgttacttgggaatgttggggagtctgaccaaggactgcttcaactctcaacaggatgcccaagcttgcagaaattggagctgaggggttgtttcttcagtgaacgtgcattggctgttgctgttttacaacttaaatcactgagatacctatgggtgcaaggatacaaggcatctcccaatggcactgatctaatggcaatggtgcgacccttctggaacattgagattattgccccgaatcaagatgaagtttgcccggacggtcaggcacagattcttgcatattactcacttgcaggaatgagatcagattaccctcactcagtaattcccctctatccttcggtttgagtgtatatgtctgataccaggttgcgaaactcacactctagtataggccgatattgttccaaattctacagtttgctgctcttattctgtttagcaatgagcacagaacaaatgacaaataaaagcaggatagctgttagttcgaggaacatattataacatcttgggactaagaattttattgcatatctgaggggtatcacttctgcgaaagctcagctcaattggccagcacggatatgtaaacttctccattttgattaggatcggacacacaattttgtaataatgttccttgttcaatgtttagtagtattatttgactctttagctttgtgtcacattgtctcttggaagatcgccgcactgtgttctaataagtcattcgctgtacaatatttttatcatccacagatcacactactggctgtattcttgctgtgacttttctatttcttctctctttggttgtgtaacgccccttgattggtctgtatgatggcgcgctgcttcttactttatcttgtttggtggaaatgtggaatcatgcatatcgatatgtaattacatactccaataagagnnnccatagcc

SEQ ID NO: 15953 - DNA, 334 bp, Oryza sativa
  Clone ID: PAT_MRT4530_21748C.1
acaattggtacgctgttctttgatttttaggtacaccgaaagaagaaggcccccccggggggggagaatataaaccggggggggggagggctgcacaaaaaaacaagggccccaacaaaaggaacccggggctaaatcaggagcgcggcccaaacgggtagcgggagggggggtccaaaggggcccctgggctaaaagggaagggggggccgcaagggcgcttccaccaggggggggaacaacaggcggggcccgaaaccaaagggggaacccgccggggggggaccatgcgaggggagctttggtatgcccccggggaggggcaaaatccccc

SEQ ID NO: 15954 - DNA, 343 bp, Oryza sativa
  Clone ID: PAT_MRT4530_21749C.1
gttcaactttgcgtcccatgcggcggacgcgtcagacggcgttcctgaagcgtaccgaggccgagcccacgatctgatcgacggcgggtgccaaggcctgctagaccttggacacggggactgcggtcttgtcggccggccgctacgaggaggcggcgcggcacttcactgacgccatcgcgctcgccccggggaaccacgtcctatactccaaccgctccgtcgcgctcgccttggtccaccgctactccgaggcgctcgccgacgccgagaagaccgtctagctgaagcccgactgggctaaagtggtctcccgccttggagtcgcccacctggacttccg

SEQ ID NO: 15955 - DNA, 734 bp, Oryza sativa
  unsure (1)..(734): unsure at all n locations
  Clone ID: PAT_MRT4530_2174C.1
ccggccgggatttttccccgtccattcccacctcgtcgtcgactcctcgtgagctcgcccgccgcctgcgcgtccccatccatcccggcgagcgagcaggtgcgccgtcgttcgtccagctgctgcttcggccgcatccatcctgctcttttcaggagaagtgttaatctgacgaacacgtgggggcttgagccgcaatgaaggagggttcccaggatgttgagagcaaggcaaaggtgcatccattggtgcaaggtgatgatgaaatcaagggtgaacagccaaatactgatgcacctttaggggattctgattccttatccgctgcaagtaatgataataaaagggtttctcgtgaagatattgaacttgtccagaatttaatagaacgctgtctacagctatatatgaatagaggagaagttgttaggactctttctactcgtgcaagaattgaacctggtttcactactttagtatggcagaaactcgaagaagaaaattctgagttctttcgggcttactacataaggttgaaattgaaaaaacagattaacttgtttaaccacttattggagcaccaataccatcttatgaagtacccagtaccacagcaggttccgttgaccccaacacagaacggtattcgtcctatgcctgttaacaatttgcctatgngatatccagtactccaacaacctgnaatacctgctcctgttcagnctcatgttaat

SEQ ID NO: 15956 - DNA, 663 bp, Oryza sativa
  unsure (1)..(663): unsure at all n locations
  Clone ID: PAT_MRT4530_21750C.1
ttgngnaaaaaaaaannacctctgatcctctccggnaanggnccccgntanctcnanaccaggcntccncntctggattcgcctccgcctcggnntgcnacggcagcancgatnccnataaatcnnaccaccactccccggccntgggctcctccnagnatcacaaccaacatcagcangccggncccgaccgtccccntcnacacnccctctccncanttcctgggggggggnttgggccatcnaccaactcctccattttctccnantnccaaanngggggaggtagttncanatcgaatcntcgncatccctcgggttccccnatttngantcntnngcnnacatcccacttttttttttttnngcnttccnacggaagggccccccccntnccngntcactnccgatgtccccacctnttcgnttttngnngntntttnncacttnnccttctcttngnntccnntttaaacttcntctattcccntccctntnttaaccngcttcnncatcnaaaangcccnctttanttcnccantaaacanaaatagggttcntttttcctcntntgggnnaccnncttccccncntntncgaccnngntgcccacttccctggggcnatctcntgtttnnggnnattngnctcttcnttntcccn

SEQ ID NO: 15957 - DNA, 834 bp, Oryza sativa
  Clone ID: PAT_MRT4530_21751C.1
atgaagtttgggaagaggctgaagaagcaggtggaggagagcctcccggagtggagggacaagttcttggcgtacaagcgcctcaagaagctcgtcaggctcgtctcctcctcctccggcgatgtcggcggcggcggcggcggcgaggccgaattcgtgcggctgctcgacggcgaggtcgacaggatcaacgccttcttcctcgagcaggaggaggagttcgtcatacggcagagggagctgcaggagacagtggagaaggtggccggcggcggcggtggagggcggcggccggcggcggcggagatgaggagggtgaggaaggagatcgtggacctgcacggggagatggtgctgctgcttaactacagcgccgtcaactacacagggctggccaagatcctgaagaaatacgacaagcgcaccggccgcctcctccggctgccgttcatcgagaaggtgctccggcagccgttcttcacgacggagctcatctcgaggctcgtccgcgactgcgaggccaccatggaggccatcttcacctcctccgtggcgacgacggcgatggccggcgatcgccggacatggaaaggatgctccggcgacgccgggatggctccgatggcagaccagcagggcatcttccggaacaccgtcgccgcgctggcgacgatgaaggagctccggagcgggagctcgacgtacgggcggttctcgctgccgccgatggcggcgccggcctcgccggagtccgacgtgctgcagtccatccgatccgatccccatctgaaagagaatggaagaattccaagtttacagtttttttatgcctaa

SEQ ID NO: 15958 - DNA, 358 bp, Oryza sativa
  Clone ID: PAT_MRT4530_21752C.1
ggagtggatcaacgcgtcaggggatgcattcgtaagaaagtataataatcaaatgggataacctgatcactaactgcgctaattaaaactgtgcccatgtgagccaagggcggaaaaagggaccgagctatcaagacccaatgcttgaagaaaggaacaacctttggcgggaggttacctgaagccaggaaaacccactttgaggaggcggcccccggtgaggataaccgggctggaaagggcggaaccgaatgctcctgccccccctgcaattgcggccggcgaggtacctacctaactgagccctcactgaaggccagccacttaacttaggtaggccacagtaaaaaccacccct

SEQ ID NO: 15959 - DNA, 1347 bp, Oryza sativa
  Clone ID: PAT_MRT4530_21753C.1
atgagcagcacggcgaaggcggcggccgccggggcggtgggtgccaagtcggcgcgggcgtgcgacggctgcctgcgccggcgggcgaggtggtactgcgcggcggacgacgcgttcctgtgccaggggtgcgacacgtcggtgcactccgcgaacccgctcgcgcggcgccacgagcggctgcggctgcggccgtcgtcgccgccgccgctggtgccgccgtcggggtcggggcggcgcgacgaggccgtccccgcggcgtggttcaagcgcaaggcgcggaccccgcggtcgcacgccgccaagagcgccgccgccttcgggcagctgctgtcgaggcggctcgtcgtcgttcccgaggcggcggctggtagtggaggggactcgccggaggagcggaaggacgagggggagatcgtggaggagcaggagcagctgctgtaccgcgtccccatctttgacccggccctctcggagttctgctcgccgcctcccctcgaggacgcggcggccgccgtgtcctgctgcaatgaggacggcgccgtcgagaacccgacgaagccgtccatgacgacgacgacggctacaacgccaccgctccagttcttccccgacggccaagccaatttcgggccgaccgacgccgagctgagggagttcgccgccgacatggaggccctcctcgggcgtggcctggacgacggcaacgacgaggactccttctgcatggagacgctggggctcatcgagccggtggacgacgacgccgggcgggtcaaggtggaggccgacggcgacgccgggatgaccctagcgtggtgccacgagctggacacggagacatcgtccggcgagatgctggacatcgacttcgactgcggctcacctcaggcggcgacgacacccgacgagaaggtcgggagcagcgggcccgccgccgccgacgacgacgcgcagctccagcagagcaacctcgccctcagcctcaactacgaggccatcatcgagagctgggggacctcgccgtggaccgacggcgagcggccgcacgtcaagctcgacgactcctggccccgcgattactcgggggtgtggatggcggcggcaggggtgttcgggcacggcggcgaggagcaggcgctgacgccgaggctggggatggacggcggcagggaggcgcgggtgtcgaggtacagggagaagcggcggacgcggctcttctccaagaagatccggtacgaggtgcgcaagctcaacgccgagaagcggccgcggatgaagggccgcttcgtcaagcgcgccgccgccgccgccaccgccgccgtcgccacggcgtgcgtcgcgtag

SEQ ID NO: 15960 - DNA, 222 bp, Oryza sativa
  Clone ID: PAT_MRT4530_21754C.1
attcctaagcagccctgcagaatcgtgaattgtggcgagctgcccgtggacggttgattaagtcaaatggttcagttgtcggattaagccaacatttttcattttgttctgcggcatattgaatcttaggggagggctaattgaatcttgttctgttagaacacttttggtatagtgaggatacttgcgaggcattcggcaagatagatgaacatccctctt

SEQ ID NO: 15961 - DNA, 1186 bp, Oryza sativa
  Clone ID: PAT_MRT4530_21755C.1
cttttaatcatctactcccaccctaatttaatttagacggacctagttaatggccatcgtcgactctagaggatcccccaacatcggcgaaggctcaggctcgtcggagtgggagctgggcgtccggcagctgtgcgacagcggcatcaccaccctgcccgcccgctacgtcctcccgcccgccgaccgccccgcccgctacgtcacaccacctgctctgctccccgtcgtcgaccttgccgccctccgtgctcgagacccctgtcagctcgccgcgctccacgccgcctgccgggactacggcttcttccagcttctcaaccacggcgtgccccccgacgccatgctgtacgccgctcgccgcttcttcttcgaccttcccctgcccgcccgtaagcgctacatgtccgccgacatccgcgccgccgtccgctacggcaccagcttcaaccagctcaacgacgccgtcctctcctggcgcgacttcctcaagctactcatccgcgacacgcgccgcctcgccgacgtcctcccctcctggcccgacgcccccgacgacctcaggccggccgccgcggcgtacgccacggcgtgccagaggctgttccgggagctcatggaggcggcgctggatgcgctgggcatcgtgcggtgccgccgccagctgctggaggagtgcgacgccgggtcgcagatgatgatggtcaactgcttcccggcgtgcccggagccggagctgacgctgggcatgccgccgcactccgactacggcctgctaaccatcctcctgcaggacgaggtgagagggctggaggtgagctacggcgacggcggcgggtgggcggtggtggaaccgcttcccggcgcggtggtggtgaacgtgggcgaccacctggagatactgagcaacgggctgtaccggagcgtgctgcaccgtgtgcgcgtgaacggtcggcgggcgcgcgtgtcggtggcgtcgctgcacagcctggcggcggagcgtgtgatcgggccgccggcggagctggtggacgagcagcggggcaggccgcggcggtacatggacaccgacatggccgcgttccttgcctacctcgcctccgcagagggcaaccacaagtccttcctccactcccgcaggatcaacaccatttcttcttccggactgacccaacccagcaactaa

SEQ ID NO: 15962 - DNA, 126 bp, Oryza sativa
  Clone ID: PAT_MRT4530_21756C.1
atgaagctcggcgcctatggacattacctgcgatctcaagatttgggggggcgcctccagttcgtctttcggcgcgtttccgactcgctgaggactgaattcgggttagtgagcagattacagtga

SEQ ID NO: 15963 - DNA, 4074 bp, Oryza sativa
  Clone ID: PAT_MRT4530_21757C.1
taacggggtttcctttttttttttttttttttttttcccgtcaaatgaatctatcttcattcatactgcgatcctaaaacacacttttggacgacaacatggcatataagtcgatcaaaaggaagtaaaaatgctatgaaaaaccgaatggctatcagaggctataccgaaatcgtcaaatcattttatacaagggctgcaaagcagccatgaaactagagctaaaactcatttccatgtttcagccacgagcctgacgatttattgtggagttagattagacagtacaaagagccaaagccattggaatgggaataattatgctcagatacaccctgttgaagctatcgaaattgtgctgaggtctttggctagtttttacccatgccctttatgtgctggtgactgggccacggtcccacgcccgagttatacaactgaccacttctcccaagtgttaaaatggtaccaaataaataaagacgatagcagctctcccgaaataaataacttatgtagaaagagagaatagttgtagtgaggcagcaccttgcgatatgcttgtttcttattcgactactactcaaatcgtatgcagtatgatttgattgataaatcaagaaagggaggaaaattgattggattatcattgcctgggaagcttgtgctactacttgagcaaaggggctgaggtgcttctggtaaccatccgggacatccttgtcgctgagggggtccttatactccacctcgtacagctccgggtaaacattgcacgtcggagcgccccatcaccgagcacagatagtctgtcgggtgctacatacatctgcatgcaccagctcaatccgtgttcagccgcacaggagcataaagctttcccagctgctcgtttgtcagtgctacctaatctgcgaagatgctatcctacgtcaggatgttcaagagatgtatgcaaacgcgattcatcgcgtaaaccatttatatattaagaggagaagcgaagaattctacaactctgagttgtttgattgcccattggatgatgtggctaaaaacactttattgctaatggaccgaggaagcgtcaaactgcaaagtttacagctctttaataaccatattgctgcttaatgaacttctaaatgggctaccaaaagttactgcgtatcgcctaccagcatctacagagacaaatgggctgctagcgggaggtcgggagacttctgatgtttctccaccatatgacgtttgatctaagtactcacagttgctccattcacttggttggaccaataggcggtaattgaggacccaactgtggaattatcatgatgataaacgatgacgaatccctgggcgaaacaagattgtaaccttcataggtggcaagcaggaacaaagatagctaaaaattgacgaagcccactggaggagggaggaacacgatcagccagcaaagtcagcagtaatcatcgattctatctaaggcaggtgctttctttcagggatttgaaccctcttggccagggttgggcctctgtggagtgtcgcgggctgctggactggggtatcatgttcagctaccgtgaccagctacgacgagcgcaacggcagcaacggcagtgctgatgctgaagcacgcgacggcgatgcagtgcttggcgacgtcgtgtaattggaggccgaggagttagggcaccaagttggagggcccacctacttgcgaatagcgctgtatcttatagcaatgcaagtagcacgtgataatgccttagaagcatctgaaaccaattgtttgatggacaaactgcattgtcccataaagcagcagttttgggacatctgagtgtggaggtgttccctctttagtaatttgtccaggcctcatcaacagttgatccattgggatgggtacatggattagacgcacaactcctttacccatgcagttgtatgcacctctaccaaagttttgcaccgatatctccaagggtagcacctggagggggagagtggtcctgtaggcttcgtatgttgcacttggccagtttggggttgggttttcactcagcttttcttgtagcggaaaaggttgtggtctccactaagagccccaaatcagataagcaatatgtatgggaaggtgtagctgacagtagctcttatgtcatcaaggaagagactgatcctgaaaaaatgcttacacgtggcactcagaacattcgaaccttgaccaagttcagtctgagcatagcatccaattatttggaacctgtaggccagaggtagccacttcttctgctgctcttcagtcccttggccttttatagcaggaacaaacatgccccagtgcagatcaacataaccaggctggtccacgtatagccttagcaaatttgcctcctcttctgtaagacggagctcgacgatacgcttccacgcatgggctgcctttctgagtgtgtccttgaacagctccttcctggggagcatagtcctgttatccttgcggaacacggggtcggaagcgacgaggcgcgccatgcggtcggcgacatcgacggcgtggcgggagccagcccaggcaaccttcatgtgttcaacgtcgaactgcgcggtggccctctcgccggcgaggtggtccacctccccccctacgccgccctccatctttccttcctttcttgtccacaccacaccacgagagagagagagagagcgagccagcaaaacaatccaatccaatcgaatcgaaaaggccacaggcaggaagaagaagagaaggaggggattgggatttttatttattctattatgcgaaagagacttgttaggaagacatttgatatgattgaggagatttctgaaaaggatgacaaggaggattacaagaagttctgggagagctttggcaagttcatcaaacttggttgcattgaggacaccggaaatcacaagcgtcttgcacctctgctgcgtttccacacttctaaaaatgagggagatttgataagtcttgatcaatatgtagaaaacatgccagagaaccaaaaagcaatctattacattgctacagatagtctccagagtgcaaagactgctcctttcctagaaaagttggttcagaaagacattgaagttctctacctcattgagccaatagatgaggttgccattcagaatttgcagacctataaagagaagaagtttgttgatatcagcaaagaggacctggagttgggtgatgaagatgaggacaataaggaaagcaaacaggaatacactcttctgtgtgactgggtaaaacagcagcttggtgacaaggtagcaaaggttcaaatatcaaagcgcctcagtttgtcaccatgtgttcttgtatctggcaagtttggttggtctgccaacatggaaagactcatgaaagcacaaacacttggggacacatcaagcttggagttcatgaggggtagaaggattttcgaaattaaccctgaccaccctattgtcaaggacttgaatgctgcctgcaaaaatgagcctgaaagtacagaagctaagagggctgttgagctgttgtatgagactgctctgatctccagtggatatactcctgacagtcctgcggagttgggtggtaagatctatgagatgatgacaattgcccttggcgggagatgggggaggtcagacaccgagactgaagcagcaaccactggtgatgccagcacagagacaggctcatctgaagccacggtgacggaggtgattgagccttctgaagtgaggcctgagagtgacccatggagggattaataagtgagttctcttgggcatcctttgttagaacttcagaaatagttgctatgggatataatcatggtttaaaaacatgattttgtcatagatattacttgggttgttacccagcatttttgtaggtgcagtagagtctgtagactcattggccacctctatctattggagggggtggtcttatcaataaaacatgaaaaataatcagtacaaaaaaaaaaaaaaaaaaaagttttctaaaaaaaaaaaaaaaaaaaa

SEQ ID NO: 15964 - DNA, 483 bp, Oryza sativa
  Clone ID: PAT_MRT4530_21758C.1
attttcaagaggtcatcaacctaatgaacacaagccatgggctcgcttcatccacacaagaatcaggttttagggcccctttaaagaaaaactccatataaagacggactttccgtgtatgaggcacggaggacgggaacacacctatgcggctactacgtgtgtgagttcatgtacgagtttgtacgaccgaatgccccatgactgtagaggaattcgagaatggaagaatgcctcatgcctagtaaaagaatcagggtggtacaagaacaactttgcggatttctgatggacgaggccgtcatccccaaggagaattctacgacgatggatcctggtaccaaccgcgtccagacggtccaccagaagatcaagcatggccgtatgatcattgaattgcatggtgcaggtggaacccttggaaaaacgggaatattttgaaatatatatatgtgttatatgtaaaaaaaaaaaaaaaaaaaa

SEQ ID NO: 15965 - DNA, 1364 bp, Oryza sativa
  Clone ID: PAT_MRT4530_21759C.1
atggcgcttcccaaggacgacgacctcgacgccggcaaggtcgccgacgtcctcggcttccggctgcccgacgtggaaggggccgtgagggccttttttaggagtcgagaggttagagaatttgccagtggagcattagctggtgctatgtctaaagctgttcttgctcctctcgagactatcaggacaagaatggttgtaggagtaggatctaggcatatcggtggtagctttgtagaaatcatcgaacaaaatggatggcaagggctttgggcaggtaacacaatcaacatgatccgtattattccaactcaagcaattgagctcggaacattcgagtgtgtcaaaaggacaatggcggaagcgcaagagaaatggaaagaagatggatgcccaaagatacaaattggtaaagtgaaaattgaatttccacttcaatttttatctcctgttgctgtagctggtgcagctgctggaatagctggcacattggtgtgtcatcctcttgaagtcattaaggatcgcttaactattaaccgagaagtctatcctagtattagcgtcaccttcagcaagatataccgaactgatggaattcgtggtctctatgctggcctctgtccaacactaattgggatgcttccttatagcacatgctattactttatgtacgacacaatcaagacttcttactgccgcttacataagaagacgtctttgactcggcctgagcttctagttattggagctctgtcaggcctgaccgcaagcacaatcagcttcccgctggaggtggcgcggaagcggctcatggtgggtgccctgcaagggaagtgcccaccccacatgatcgcggccctggcagaagtgatccaggaggagggcctcccggggctctaccgcgggtggggggccagctgcctgaaggtgatgcccaattccggcatcacctggatgttctacgaggcctgtaaggacatccttttggcggacaaggacaagcgcaaagcttaaggggaatgtggcatcgagcaactgcaacctgacgcattgcatatttgcaacgtagaaaacaataatgagttacaagattcttgtatcggtgggattcctgatcttttcccagttttcgagtcccaccctggatgacgccgaaaaagtggctagataggagacgctgttcttttttttggctggtggctgggagagcatgtgttgtttctcgctaatttggaatgcctgattaattacatgttgtctaagtgttaaccgtggggtttacacacgagaatggctgaaaatgttggcatgtacctctacctgatcttcaggtgaatactatcaaatcctgtgaaatttctctc

SEQ ID NO: 15966 - DNA, 4458 bp, Oryza sativa
  Clone ID: PAT_MRT4530_2175C.1
attgtcacaattgttataacgaccaatttgttccttttactatctgttaagtcgatgggtgtgcatagctttcttctcaactttatcttgcgatgatagtatgtcgccttcttatatatacatacttcttaccttctcctcggtatttcgtcattagatatatgcaaatgaatgaagaaagtaccaatagagtacgcagagttcgtgctagccggcaaagacgagttgcaaatattctttctcggcaacctgcgatgcatatagaacatgctataatcataccaaatcaagcgagtgaacaaagtgaccgtaagagatcactcatggattttacacctgaattgactaaattaaatagacaaaggcgttgcttcttgcgttcaaaaataccttcgtcgccgactgaaggccgtagacatggtggtcaaatacaattacctaagttacgtcctcctcctgaaccacttgcaacattattaaactttaatggtgatgcacgatcaaaaagatttttgagacaaatacgattatataactcaatgtttgttttcacttcaatgggtgctactgttgacaaatcgattaatactgggaatgcaccttatgttttcaagatcaatggagttgtgcaccaccgaattggtactcttgtgcgatctcgtggttcacctccgaaattcgctcaattatacatctatgattcagaaaatgaaatacaaaacaggctaaatatatttgaaaatgatggtgataatgtagataaagcagattctgaaatacttgctgccctgtcattgatgtttgatgctgagaatgcccttgtccaaaacttcagatatgctaaagaacgtctttctgaacatggtgatcagcaaataacccttcgccgtttaggttgcaacgcaaaagacgatgttcagtataacctaccaacaagtggtgaaatcgtggaataatagtaggtgaattttctgcaaaagaatacaaatttgatatgcttgtgtatgataaaaaccatggactgcaccagatttctccattgcacccatcttatatggccttgcagtaccctttattattcccatatggtgaacgcggattccatcttggcattaaatataataattatgacggagttggaagaaaatacgtcacaatgccagaatattatagatatatgatgcactatagactaaatgaaccaaatcctttgacatgttatggtcgattaagtgatcaaattgatgttgatatattttctacaattgaagctaatagactacaatttttcattgaccattgtcacgaccggaaataacccaacgggcgttccttacgtgagtctgtagatgggatcgtagatgcgattgataaaggtgtcactgatggtgattcaattggaaagcgtgtcatacttcctgccagtttcactggagggagaaggtatatgattgaattaaggatagcacactcatagtattctctcttaagttattacagtcctctacactgttgagttccagaaacgtgggcttccgcacatacattgcttggtttggctcgcagctcccactgctgacgtgtcagcatctatcatagatggcttcatatgtgctgaaatacccgattatgacactgatcgactaggatatgaattggttagcgagttcatgatgcatggtccctgtggtgatgcaaacaaaagttgtccttgcataaaaaacgataaatgctaaaaaaaaactaccctaaagattttcaagatgaaaccattattgatgaagctggttttacaatttatagacgaagaaatgatggacgatgtattataaaaaatggaattcccttggataatagatctgttgtcccctataacatgaaattacttaaaaaatacgaggcacacataaatgttgagtggtgtaacaaatcaaatttgataaatatttatttaaatatatcatgaaaggccaagaccgagctaaaatctacttcgaaacaatagctaagacaacaaatgcatcaccgaatcatgaccttgctccacgtgatgaaatattagaatacatggatgcaagatttgtttcgacctgtgaggcacttcatcgattgtttgaatttgatatacactatagagtacctcctgttgaacgattggttgtccacttacctgggaaaaactatgttagatatgagaaaggatcggacttacgagcagtgcttgaaagtcctgctacgaagcgttcaatgttaactgaatggtttgaagctaacaaaaaatattctaaagcccgttcattaacatactgtgaatttccgaaagagtggtcatgggagtcgtcatctagagtatggtgccagcgaacacctgctgcaaaaattggtagaatatattatgtgcatccaactgctagtgaactttactacctacgcatgttgttaatgattgttaaaggtgctcaaagttatgttgatgtgcgtacatttaataatattgtctatgccacatttagagaagcatgtgaggcacgagggctccttgagggggacaatgaatggtatctacttttcgatgaagcaatagtctctgcatcttcacagcaccttagacaactttttgtgactatacttctttactgctctgttagtgatgtgcgatcattgtttaacaagtattggttatatatgatagatgatatacatagcaaactaaaaaaagcattggataacccgaattgtatcattccacctgaccatttgcttaatcttcttctccacgaacttgctaatgtgtttgcgaatagtggtggtaatataaaggattttaacctgccacatccatcgtctgtaccgcatattcctggtaataatagattgattgaagaacttgcacttgatccacttatgttaagcatgcatgcaaattctttgatacaccaattgaacaatgatcaaaaaaaacattttcgacatcataacttctcgtattgctgcgaatcaacctggttttttctttgtgtgtggccatggtggaactggaaaaatattcctgtggaatgctattattgcaaaacttagatcacataataaaattgttcttgccgtcgcttcatcgggcgtagcgtcactgctattacctagaggcagaacagctcattctcgatttaaaataccaattgacattgatgaaataggtatttgcaatgtaaaacgaggaactatgcttgctgagcttttaattgagactgcattaatcatatgggatgaagctccaatgacacataggcgatgctttgaagcactagaccgcacattatgtgatatactttctgagacatgccctttgaattctattataccttttggaggaaaacctgttgtcctaggtggtgacttcagacaaatattgccagttgttcctaaaggctcccgtcgtgctataatcaatgcatcggtcacaaactcagacttatggaaacatgtgacaatattaactatgaatataaaaatgagattacttaatacaatgctacctaaaaatgaaaaaaaggacatggatgattttagccagtgggttttggctgttggtgatggcactttaccaatgatagcaaaggaaggtgaaagctatcctacatggatcacaattcctgatgatttactcattataactgatggtgataaaataaatgccattgtcagcgaagtataccctgatttccttgcatcatacaaaaatcctgaatacctagcttcacgtgcaattgtttgccctaataatacaacagttgatgaaataaatgactatattattggtttgcttcctggagatgcaaaaatatactcaagttgtgatacaatatcaaaatgctctgaacaaataccagattttgacttgctatatccacctgagtttcttaactcaatagacgccactaacttccctacatatagacttattcttaaagaagctgctgtggtcatgctacttcgaaatctgaatcaatcaattgggctatgtaatggaacaagattattagttacaggtttgggtgaaagaattcttcaatgtatcatattaactggatcaaacatcggtgaaactgtttacatacctcggataacactgagtactaccaaaatgaaatggccttttacattacaaagaagacaattccctgttcgtgtttgttattcaatgactatcaataaaaaccaaggtcaaacacttcaacgagtaggtgtatatcttagaaaacctgttttcacacatgggcaattatacgttgctatttcaagagcaacaagccgatcaggtttaaaaatattaattgagaatgacgatggatcatgtggtacacaaacaagaaatattgtttacaccgaagtgcttagcgctacattgccagcggtgcttttcaacacactgttccatatatcatgtttatgtgttctctt

SEQ ID NO: 15967 - DNA, 3153 bp, Oryza sativa
  Clone ID: PAT_MRT4530_21760C.1
atggatcggcaatggatgtacgctgaccggcggtccaaagagtttattgacggcgtgcactattttttgagagtggccgaagctaacaggcaaaggggttttatttgttgtccatgcaataagtgtaagaatcagaaggagtattctgcatccaggactattcatttccacttgtttgagtcggggttcatgccaagctataattgttggacatcccacggagagcaaggtgttgaaatggaagaagatgaagtggaagacgacaatattccggactttgctcagtatgttggatttgaaggaaatcaaacgggggaggaggaaatagctgctgatggtaacgacgttgcggatgatcttggtcagatgttgcaggacgccagggaggactgcgaaagtgaaaaggaggcccataaattggacaagatgttggaggaccacagaacttcgttgtacccaggttgcgagcaggggcacaaaaagttggataccactctggagttgttgcaatggaaggcaaaaaatggggttagtgacaaggcatttggcgatttattgaaactcgtcaagaacattccttccggggggaaacaaattgcccgagacaacgagtatgagaacctagaagcatgccctgtttgcaaagcactacgatacaagattagacgggacgatccaggagaagttgacgggcagctaacaaagaagagaattcctgctaaggtgatgtggtatttccctataataccacggctaaggcgtttgttcaggaacaaggggaatgctagaatgttgcgatggcacgctgaagagcgtcaacaggacgggatgctgagacaccccgccgatggttcgcagtggcgaaacatcgacagaaaatttaaagaatttggaaaggatgcacgaaacatacggtttggtttgagtacggatggcatgaatccttttggagagatgagcagcggccatagcacttggcccgttacgatgtgtatctacaacctccccccctggctatgcatgaagaggaagtacataatgatgccgattattattcaaggccccaagcaacctggtaacgacatcgacgtgtacctaagaccactggtagaagatcttaaacagttgtggaagaaggaaggtgtccccgtgtgggacgaggacaaacaggaggagtttaacctacgagcgctgctgttcgtaaccatcaacgattggcctgcacttagcaacctatccggacagtacaacaaggggtacaaggcttgcactcactgtatggatgaaacagaaacaaaccacccggtacggaagaaaggcaagcacttcgaacataaggccgaccaccgtacgaagcctaaacatcgcagcgggaaaacagtgtttgctatggttaaagatcttaaagtagtgttcggaaaggggcctggaagccagcatatagagagcgaagatggtcacgcggcgatgtggaaaaagaactctatattttgggagttaccatattgggaattcttggacgtacgccacgcaatcgacgtgatgcacctcactaagaacctttgcgtaaaccttcttggcttcctaggtgtatacggaaagtcgaaagatacactggaagcacgtaatgatctgaagcatatggaacaacgcggcgaccttcacccggaaccaaaggagaaaggaagccattacttgagtccagccagctacactcttagcaaggcagagaaggaaagtatgtttgaatgcttggagagcataaaggtaccgtctggatactccacgaatatcaagcgaataataagcacgaaggagaagaagttcacaaacctaaagtctcatgactatcacgtgttgatgacacaactgctaccagttgtaataaggggtatccttccagacaatgtccgggcaacaataacaaagctatgtgcattcatgaacgcaatttcgcagaaggtcatcgatccggatagattagaagcccttcagaatgaagtggtgcaatgtctcgtcagttttgagttgatatttccaccttcatttttcaatataatgacgcatctgctttgtcaccttgtgaaagagatccgtattctcgggcctatgtacctacacaacatgtttcctttcgagaggtacatgggcgttctgaagaagtatgttcgtaaccgtgctcgtccagaggcaagcatcgccaagggttatggaacagaggaggtcatcgaattttgcgtagaatttatcgaagaccttcgcccaatcggggtacctgaatcacgccatgaagggagactatggggaaagggaactctcggaaggaaagcaataacgacggtagacaacaatttattccgtaaagcccatttcactgttctgcaacactcttcattggtagctccttacatcgaggagcacttggctctagttcgcgccaggaacatcggtaagtccgatgcatggattacacggcatcacattgatactttccccgcgtggctacgacaacatctcatgggtaacgagtcaatcaaccaacaacttgccttcctggcgaggggaccgtctgggtcgatcacgacattccagggatatgagatcaatgggtacacattctacacgagagcccaagacatgaagagcacgaaccaaaacagcgctgttcgtgtcgatgccatgggacacgatggaacaactgccacgtattacggtgccatcgaggacatatgggaacttgactatggtcctctcaaggttcctctgttccggtgccaatgggttaggttgactggtggaggcgtaatgattgatgacagtgggatgacaactgttgaccttaacaaggttggatactcagacgaaccttttgtccttgccaatgatgtaacgcaagtctttttcgtgaaggacatgtctagcaaaggaaagaagggcagagggcctgatgagcctaagcgtcaagtggttctcccaggcaaaagaaaaatcgtcggagttgaggacaagactgacgaggattacgatcagttggatgggcaaccccctttcacggtgacgattgaccctagcatcctcctatcaaatgaagacaccccttactcacgcagcgatcacaaggagggaacaatagtgaggagaaattggtgttag

SEQ ID NO: 15968 - DNA, 3036 bp, Oryza sativa
  Clone ID: PAT_MRT4530_21761C.1
atggatcggcaatggatgtacgctgaccggcggtccaaagagtttattgacggcgtgcactattttttgagagtggccgaagctaacaggcaaaggggttttatttgttgtccatgcaataagtgtaagaatcagaaggagtattctgcatccaggactattcatttccacttgtttgagtcggggttcatgccaagctataattgttggacatcccacggagagcaaggtgttgaaatggaagaagatgaagtggaagacgacaatattccggactttgctcagtatgttggatttgaaggaaatcaaacgggcgaggaggaaatagctgctgatggtaacgacgttgcggatgatcttggtcagatgttgcaggacgccagggaagactgcgaaagtgaaaaggaggcccataaattggacaagatgttggaggaccagagaacttcgttgtacccaggttgcgagcaggggcacaaaaagttggataccactctggagttgttgcaatggaaggccaaaaatggggttagtgacaaggcatttggcgatttattgaaactcgtcaagaacattcttccggggggaaacaaattgcccgagacaacgtacgaggctaagaagatagtctgcccgttaggactggaggttcataacattcacgcatgtccgaacgattgtatcctatatcgcggtgaggagtatgagaacctagaagcatgccctgtttgcaaagcactacgatacaagattagacgggacgatccaggagaagttgacgggcagctaacaaagaagagaattcctgctaaggtgatgtggtatttccctataataccacggctaaggtgtttgttcaggaacaaggggaatgctagaatgttgcgatggcacgctgaagagcgtcaacaggacgggatgctgagacaccccgccgatggttcgcagtggcgaaacatcgacagaaaatttaaagaatttggaaaggacgcacgaaacatacggtttggtttgagtacggatggcatgaatccttttggagagatgagcagcggccatagcacttggcccattacgatgtgtatctacaacctccccccctggctatgcatgaagaggaagtacataatgatgccgattattattcaaggccccaagcaacctggtaacgacatcgacgtgtacctaagaccactggaaggtgtccccgtgtgggacgaggacaaacaggaggagtttaacctacgagcgctgctgttcgtaaccatcaacgattggcctgcacttagcaacctatccggacagtccaacaaggggtacaaggcttgcactcactgtatggatgaaacagaaagtacgtatcttaagcactgtaggaaggttgtatacatgggtcatcgtcgattccttgcagcaaaccacccggtacggaagaaaggcaagcacttcgaacataaggccgaccaccgtacgaagcctaaacatcgcagcgggaaaacagtgtttgctatggttaaagatcttaaagtagtgttcggaaaggggcctggaagccagcatatagagagcgaagatgatcacgcggcgatgtggaaaaagaactctatattttgggagttaccatattgggaattcttggacgtgtatacggaagcacgtaatgatctgaagcatatggaacaacgcggcgaccttcacccggaaccaaaggagaaaggaagccattacttgagtccagccagctacactcttagcaaggcagagaaggaaagtatgtttgaatgcttggagagcataaaggtaccgtctggatactccacgaatatcaagcgaataataagcacgaaggagaagaagttcacaaacctaaagtctcatgactgtcacgtgttgatgacacaactgctaccagttgtaataaggggtatccttccagacaatgtccgggcaacaataacaaagctatgtgcattcatgaacgcaatttcgcagaaggtcatcgatccggatagattagaagcccttcagaatgaagtggtgcaatgtctcgtcagttttgagttgatatttccaccttcatttttcaatataatgacgcatctgctttgtcaccttgtgaaagagatccgtattctcgggcctatgtacctacacaacatgtttcctttcgagaggtacatgggcgttctgaagaagtatgttcgtaaccgtgctcgtccagaggcaagcatcgccaagggttatggaacagaggaggtcatcgaattttgcgtagaatttatcgaagaccttcgcccaatcggggtacctgaatcacgccatgaagggagactacggggaaagggaactctcggaaggaaagcaataatgacggtagacaacaatttattccgtaaagcccatttcactgttctgcaacactcttcattggtagctccttacatcgaggagcacttggctctagttcgcgccaggaacatcgcccaagacatgaagagcacgaaccaaaacagcgctgttcgtgtcgatgccatgggacacgatggaacaactgccacgtattacggtgccatcgaggacatatgggaacttgactatggtcctctcaaggttcctctgttccggtgccaatgggttaggttgactggtggaggcgtaatgattgatgacagtgggatgacaactgttgaccttaacaaggttggatactcggacgaaccttttgtccttgccaatgatgtaacgcaagtctttttcgtgaaggacatgtctagcaaaggaaagaagggcagagggcctgatgagcctaagcgtcaagtggttctcccaggcaaaagaaaaatcgtcggagttgaggacaagactgacgaggattacgatcagttggatgggcaaccccctttcacggtgacgattgaccctagcatcctcctatcaaatgaagacaccccttactcacgcagcgatcacaaggagggaacaatagtgaggagaaagtacgtgcggtcaaccgtcaccgccgatgtaatgccgtaa

SEQ ID NO: 15969 - DNA, 3153 bp, Oryza sativa
  Clone ID: PAT_MRT4530_21762C.1
atggcgagacgggcacggcggcgacgggtggcgggcacggtgcagccgcgcaggccgaccggccagtctggggacgcggtgaaaattgggaatcactttctaaggaagaaggggttgggaggagaaactgggaaactagaagagaaatcggagatggatcggcaatggatgtacgctgaccggcggtccaaagagtttatcgacggcgtgcagtattttttgagagtggccgaagctaacaggcaaaggggttttatttgttgtccatgcaataagtgtaagaatcagaaggagtattctgcatccaggactattcatttctacttgtttgagtcggggttcatgccaagctataattgttggacatcccacggagagcaaggtgttgaaatggaagaagatgaagtggaagacgacaatattccggactttgctcagtatgttggatttgaaggaaatcaaacgggcgaggaggaaatagctgctgatggtaacgacgttgcggatgatcttagtcagatgttgcaggatgccagggatgattgcgaaagtgaaaaggaggcccataaattggacaagatgttggaggaccacagaacttcgttgtacccaggttgcgagcaggggcacaaaaagttggataccactggggttagtgacaaggcatttggcgatttattgaaactcgtcaagaacattcttccggggggaaacaaattgcccgagacaacgtacgaggctaagaagatagtctgcccgttaggactggaagttcataagattcacgcatgtccgaacgattgtatcctataccacggtgaggagtatgagaacctagaagcatgccctgtttgcaaagcactacgatacaagattagacgggacgatccaggagaagttgacgggcagctaacaaagaagagaattcatgctaagaggaagtacataatgaagccgattattattcaaggccccaagcaacctggtaacgacatcgacgtgtacctaagaccactagtcgaagatcttaaacagttgtggaagaaggaaggtgtccccgtgtgggacgaggacaaacaggaggagtttaacctacgagcgctgctgttcgtaaccatcaacaattggcctgcacttagcaacctatccggacagtccaacaaggggtacaaggcttgcactcactgtatggatgaaacagaaagtacgtatcttaagcactgtaggaaggttgtatacatgggtcatcgtcgattccttgcagcaaaccacccggtacggaagaaaggcaagcacttcgaacataaggccgaccaccgtacgaagcctaaacatcgcagcgggaaaacagtgtttgctatggttaaagatcttaaagtagtgttcggaaaggggcctggaagccagcctatagagagcgaagatggtcacgcggcgatgtggaaaaagaactctatattttgggaattaccatattgggaattcttggacgtacgccacgcaatcgacgcgatgcacctcactaagaacctttgcgtaaatcttcttggcttcctaggtgtatacggaaagtcgaaagatacactggaagcacgtaatgatctgaagcatatggaacaacgcggcgaccttcacccggaaccaaaggagaaaggaagccattacttgagtccagccagctacactcttagcaaggcagagaaggaaagtatgtttgaatgcttggagagcataaaggtaccgtctggatactccacaaatatcaagcgaataataagcacgaaggagaagaagttcacaaacctaaagtctcatgactgtcacgtgttgatgacacaactgctaccagttgtaataaggggtatccttccagacaatgtccgggcaacaataacaaagctatgtgcattcatgaacgcaatttcgcagaaggtcatcgatccggatagattagaagcccttcagaatgaagtggtgcaatgtctcgtcagttttgagttgatatttccaccttcatttttcaatataatgacgcatctgctttgtcaccttgtgaaagagatcaatattctcgggcctatgtacctacacaacatgtttcctctcgagaggtacatgggcgttctgaagaagtatgttcgtaaccgtgctcgtccagaggcaagcatcgccaagggttatggaacagaggaggtcatcgaattttgcgtagaatttatcgaagaccttcgcccaatcggggtacctgaatcacgccatgaagggagactacggggaaagggaactctcggaaggaaagcaataatgacggtagacaacaatttattccgtaaagcccatttcactgttctgcaacactcttcattggtagctccttacatcgaggagcacttggctctagttcgcgccaggaacatcggtaagtccgatgcatggattacacggcatcacattgatactttccccgcgtggctacgacaacatctcatgggtaacgagtcgatcaaccaacaacttgccttcctggcgaggggaccgtctgggtcgatcgcgacattccagggatatgagatcaatgggtatacattctacacgagagcccaagacatgaagagcacgaaccaaaacagcgctgttcgtgtcgatgccatgggacacgatggaacaactgccacgtattacggtgccatcgaggacatatgggaacttgactatggtcctctcaaggttcctctgttccggtgccaatgggttaggttgactggtggaggcgtaatgattgatgacagtgggatgacaactgttgaccttaacaaggttggatactcggacgaaccttttgtccttgccaatgatgtaacgcaagtctttttcgtgaaggacatgtctagtaaaggaaagaagggtagagggcctgatgagcctaagcgtcaagtggttctcccaggcaaaagaaaaatcgtcggagttgaggacaagactgacgaggattacgatcagttggatgggcaaccccctttcacggtgacgattgaccctagcatcctcctatcaaatgaagacaccccttactcacgcagcgatcacaaggagggaacaatagtgaggagaaagtacgtgcggtcaaccgtcaccgtcgatgtaatgccgtaa

SEQ ID NO: 15970 - DNA, 352 bp, Oryza sativa
  Clone ID: PAT_MRT4530_21763C.1
gcacgaggcgcctctcgctctgcgccacaggcccacagcgccggccgtcgcccatcggcggcgtcgggtccctctccctcctgcagtcctgctcgagctcgacgacgacgacgagtctatgcctcaagccctcaacagctcctcataggaccacccaacgaatcgatcctacagccgccactgcatcgtctcctcgtccgccgccgccgccatgtgggcgctccgccgcgcgggcaaccccctcagggtccgtgcccaccaagctttgagtgcccgtggttgtgcaaaccttgaagtaattctaaatgcagatgcaaagaatgtggaagagcatcatgagggggactgtcag

SEQ ID NO: 15971 - DNA, 3432 bp, Oryza sativa
  Clone ID: PAT_MRT4530_21764C.1
atgtccctacccacctccgccgccgaccccgccgcctcactgttgccgccgtcaaccccgccgcctcgccgttgccgccaccgacctcgcacctcgccgccgctgacccggcgcctcgccgtcgccggtttccgccgcccccgtcgtctgtcgttgagggatctgagggataggagaacaggagagatggatcggcaatggatgtacgctgaccggcggtccaaagagtttattgacggcgtgcactattttttgagagtggccgaagctaacaggcaaaggggttttatttgttgtccatgcaataagtgtaagaatcagaaggagtattctgcatccaggactattcatttccacttgtttgagtcggggttcatgccaagctataattgttggacatcccacggagagcaaggtgttgaaatggaagaagatgaagtggaagacgacaatattccggactttgctcagtatgttggatttgaaggaaatcaaacgggcgaggaggaaatagctgctgatggtaacgacgttgcggatgatcttggtcagatgttgcaggacgccagggaggactgcgaaagtgaaaaggaggcctataaattggacaagatgttggaggaccacagaacttcgttgtacccaggttgcgagcaggggcacaaaaagttggataccactctggagttgttgcaatggaaggcaaaaaatggggttagtgacaaggcatttggcgatttattgaaactcgtcaagaacattcttccggggggaaacaaattgcccgagacaacgtacgaggctaagaagatagtctgcccgttaggactggaagttcataagattcacgcatgtccgaacgattgtatcctatatcgcggtgaggagtatgagaacctagaagcatgccctgtttgcaaagcactacgatacaagattagacgggacgatccaggagaagttgacgggcagctaacaaagaagagaattcctgctaaggtgatgtggtatttccctataataccacggctaaggcgtttgttcaggaacaagaggaatgctagaatgttgcgatggcacgctgaagagcgtcaacaggacgggatgctgagacaccccgccgatggttcgcagtggcgaaacatcgacagaaaatttaaagaatttggaaaggacgcacgaaacatacggtttggtttgagtacggatggcatgaatccttttggagagatgagcagcggccatagcacttggcccgttacgatgtgtatctacaacctccccccctggctatgcatgaagaggaagtacataatgatgccgattattattcaaggccccaagcaacctggtaacgacatcgacgtgtacctaagaccactggtcgaagatcttaaacagttgtggaagaaggaaggtgtccccgtgtgggacgaggacaaacacaacctatccggacagtccaacaaggggtacaaggcttgcactcactgtatggatgaaacagaaagtacgtatcttaagcactgtaggaaggttgtatacatgggtcatcgtcgattccttgcagcaaaccacccggtacggaagaaaggcaagcacttcgaacataaggccgaccaccgtacaaagcctaaacatcgcagcgggaaaacagtgtttgctatggttaaagatcttaaagtagtgttcggaaaggggcctggaagccagcatatagagagcgaagatggtcacgcggcgatgtggaaaaagaactctatattttgggagttaccatattgggaattcttggacgtacgccacgcaatcgacgtgatgcacctcactaagaacctttgcgtaaaccttcttggcttcctaggtgtatacggaaagtcgaaagatacactggaagcacgtaatgatctgaagcatatggaacaacgcggcgaccttcacccggaaccaaaggagaaaggaagccattacttgagtccagccagctacactcttagcaaggcagagaaggaaagtatgtttgaatgcttggagagcataaaggtaccgtctggatactccacgaatatcaagcgaataataagcacgaaggagaagaagttcacaaacctaaagtctcatgactgtcacgtgttgatgacacaactgctaccagttgtaataaggggtatccttccagacaatgtccgggcaacaataacaaagatatgtgcattcatgaacgcaatttcgcagaaggtcatcgatccggatagattagaagcccttcagaatgaagtggtgcaatgtctcgtcagttttgagttgatatttccaccttcatttttcaatataatgacgcatctgctttgtcaccttgtgaaagagatccgtattctcgggcctatgtacctacacaacatgtttcctttcgagaggtacatgggcgttctgaagaagtatgttcgtaaccgtgctcgtccagaggcaagcatcgccaagggttatggaacagaggaggtcatcgaattttgcgtagaatttatcgaagaccttcgcccaatcggggtacctgaatcacgccatgaagggagactacggggaaagggaactctcggaaggaaagcaataacgacggtagacaataatttattccgtaaagcccatttcactgttctgcaacactcttcattggtagctccttacatcgaggagcacttggctctagttcgcgccaggaacatcggtaagtccgatgcatggattacacggcatcacattgatactttccccgcgtggctacgacaacatctcatgggtaacgagtcgatcaaccaacaacttgccttcctggcgaggggaccgtctgggtcgatcgcgacattccagggatatgagatcaatgggtacacattctatacgagagctcaagacatgaagagcacgaaccaaaacagcgttgttcgtgttgatgccatgggacacgatggaacaactgccatgtattacggtgccatcgaggacatatgggaacttgactatggtcctctcaaggttcctctgttccggtgccaatgggttaggttgactggtggaggcgtaatgattgatgacagtgggatgacaactgttgaccttaacaaggttggatactcggacgaaccttttgtccttgccaatgatgtaacgcaagtctttttcgtgaaggacatgtctagcaaaggaaagaagggcagagggcctgatgagtctaagcgtcaagtggttctcccaggcaaaagaaaaatcgtcggagttgaggacaagactgacgaggattacgatcagttggatgggcaaccccctttcacggtgacgattgaccctagcatcctcctatcaaatgaagacaccccttactcacgcagcgatcacaaggagggaacaatagtgaggagaaagtacgtgccgtaa

SEQ ID NO: 15972 - DNA, 261 bp, Oryza sativa
  Clone ID: PAT_MRT4530_21765C.1
atgcaaacgctgatgagcgtcttagtcattatcattggttgctacactgctattgactggattaccgacatcgtcatcttcatcatgcaactttatcgctgggcgccttcatattcattgctggctgacctgactgctatcgactagtttattcgcctccacggctgtgcaacttcatcacttttgattggtatcattatcttcactaccaccaatattttctatgctcaaagactggttgggtgacgtgataggagccgt

SEQ ID NO: 15973 - DNA, 3066 bp, Oryza sativa
  Clone ID: PAT_MRT4530_21766C.1
atggatcggcaatggatgtacgctgaccggcggtccaaagagtttattgacggcgtgcactattttttgagagtggccgaagctaacagggaaaggggttttatttgttgtccatgcaataagtgtaagaatcagaaggagtattctgcatccaggactattcatttccacttgtttgagtcagggttcatgccaagctataattgttggacatgccacggagagaaaggtgttgaaatggaagaagatgaagtggaagacgacaatattccggactttgctcagtatgttggatttgaaggaaatcaaacgggcgaggaggaaatagctgctgatggtaacgacgttgcggatgatcttggtcagatgttgcaggacgccagggaggactgcgaaagtgaaaaggagacccataaattggacaagatgttggaggaccacagaacttcgttgtacccaggttgcgagcaggggcacaaaaagttggataccactctggagttgttgcaatggaaggcaaaaaatggggttagtgacaaggcatttggcgatttattgaaactcgtcaagaacattcttccggggggaaacaaattgcccgagacaacgtacgaggctaagaagatagtctgcccgttaggactggaagttcataagattcacgcatgtccgaacgattgtatcctatatcgcggtgaggagtatgagaacctagaagcatgccctgtttgcaaagtactacgatacaagattagatgggacgatccaggagaagttgacgggcagctaacaaagaagataattcctgctaaggtgatgtggtatttccctataataccacggctaaggcgtttgttcaggaacaaggggaatgctagaatgttgcgatggcacgctgaaaagcgtcaacaggacgggatgctgagacaccccgccgatggttcgcagtggcgaaacatcgacagaaaatttaaagaatttagaaaggacgcacgaaacatacggtttggtttgagtacggatggcatgaatccttttggagagatgagcagcggccatagcacttggcccgttacgatgtgtatctacaacctccccccctggctatgcatgaagaggaagtacataatgatgccgattattattcaaggccccaagcaacctggtaacgacatcgacgtgtacataagaccactggtcgaagatcttaaacagttgtggaagaaggaaggtgtccccgtgtgggacgaggacaaacaggaggagtttaacctacgagcgctgctgttcgtaaccatcaacgattggcctgcacttagcaacctatccggacagtccaacaaggggtacaaggcttgcactcactgtatggatgaaacagaaagtacgtatcttaagcactgtaggaaggttgtctacatgggtcatcgtcgattccttgcagcaaaccacccggtacggaagaaaggcaagcacttcgaacataaggccgaccaccgtgtatacggaaagtcgaaagatacactggaagcacgtaatgatctgaagcatatggaacaacgcggcgaccttcacccggaaccaaaggagaaaggaagccattacttgagtccagccagctacactcttagcaaggcagagaaggaaagtatgtttgaatgcttggagagcataaaggtaccgtctggatactccacgaatatcaagcgaataataagcacgaaggagaagaagttcaccaacctaaagtctcatgactgtcacgtgttgatgacacaactgctaccagttgtaataaggggtatccttccagacaatgtccgggcaacaataacaaagctatgtgcattcatgaacgcaatttcgcagaaggtcatcgatccggatagattagaagcccttcagaatgaagtggtgcaatgtctcgtcagttttgagttgatatttccaccttcatttctcaatataatgacgcatctgctttgtcaccttgtgaaagagatccgtattctcgggcctatgtacctacacaacatgtttcctttcgagaggtacatgggcgttctgaagaagtatgttcgtaaccgtgctcgtccagaggcaagcatcgccaagggttatggaacagaggaggtcatcgaattttgcgtaaaatttatcgaagaccttcgcccaatcggggtacctgaatcacgccatgaagggagactacggggaaagggaaatcttggaaggaaagcaataacgacggtagacaacaatttattccgtaaagcccatttcactgttctgcaacactcttcattggtagctccttacatcgaggagcacttggctctagttcgcgccaggaacatcggtaagtccgatgcatggattacacggcatcacattcatactttccccgcgtggctacgacaacatctcatgggtaacgagtcgatcaaccaacaacttgccttcctggcgaggggaccgtctaggtcgatcgcgacattccagggatatgagatcaatgggtacacattctacacgagagcccaagacatgaagagcacgaaccaaaacagcgctgttcgtgtcgatgccatgggacacgatggaacaactgccacgtattacggtgccatcgaggacatatgggaacttgactatggtcctctcaaggttcctctgttccggtgccaatgggttaggttgactggtggaggcgtaatgattgatgacagtgggatgacaactgttgaccttaacaaggttggatactcggacgaacattttgtccttgccaatgatgtaacgcaagtctttttcgtgaaggacatgtctagcaaaggaaagaagggcagagggcctgatgagcctaagcgtcaagtggttctcccaggcaaaagaaaaatcgtcggagttgaggacaagactgacgaggattacgatcagttggatgggcaaccccctttcacggtgacgattgaccctagcatcctcctatcaaatgaagacaccccttactcacgcagcgatcacaaggagggaacaatagtgaggagaaagtacgtgccgtaa

SEQ ID NO: 15974 - DNA, 189 bp, Oryza sativa
  unsure (1)..(189): unsure at all n locations
  Clone ID: PAT_MRT4530_21767C.1
tcttgtcccngataccagaccgattcgccttccgcgtggatttacaccggcgcttcccggcgacgaagctttctgctcctggtaccgtgacattcctcaagaccaancggcaaccgctgcagattgctcacccatgaggtttcacgcaacggtctcgctgtcagctgcgatctttgaggaggatgcact

SEQ ID NO: 15975 - DNA, 2778 bp, Oryza sativa
  Clone ID: PAT_MRT4530_21768C.1
atggcggcggcgatgcgcgtgacggcgacgcacgggcaggaaacggacggcggcggcgacgacacgacgacgtgtgtgccagaaagggcggccgctgccggcaacggcgacgcggaagcatgcagcaacacggcggaaatcgacggagctagcgctgcccagattgatcgcgtggcagagaaggagtattctgcatccaggactattcatttccacttgtttgagtcggggttcatgccaagctataattgttggacatcccacgtagagcaaggtgttgaaatggaagaagatgaagtggaagacgacaatattccggactttgctcagtatgttggatttgaaggaaatcaaacgagcgaggaggaaatagctgctgatggtaacgacgttgcggatgatcttggtcagatgttgcaggacgccagggaagactgcgaaagtgaaaaggaggcccataaattggacaagatgttggaggaccacagaacttcgttgtacccaggttgcgagcaggggcacaaaaagaacaaggggaatgctagaatgttgcgatggcacgctgaagagcttcaacaggacgggatgctgagacaccccgccgatggttcgcagtggcgaaacatcgacagaaaatttaaagaatttggaaaggacgcacgaaacatacggtttggtttgagtacggatggcatgaatccttttggagagatgagcagcggccatagcacttggcccgttacgatgtgtatctacaacctccccccctggctatgcatgaagaggaagtacataatgatgccgattattattcaaggccccaagcaacctggtaacgacatcgacgtgtacctaagaccactggtcgaagatcttaaacagttgtggaagaaggaaggtgtccccgtgtgggacgaggacaaacaggaggagtttaacctacgagcgctgctgttcgtaaccatcaacgattggcctgcacttagcaacctatccggacagtccaacaaggggtacaaggcttgcactcactgtatggatgaaacagaaagtacgtatcttaagcactgtaggaaggttgtatacatgggtcatcgtcgattccttgcagcaaaccacccggtacggaagaaaggcaagcacttcgaacataaggccgaccactgtacgaagcctaaacatcgcagcgggaaaacagtgtttgctatggttaaagatcttaaagtagtgttcggaaaggggcctggaagccagcatattgagagcgaagatggtcatgcggcgatgtggaaaaagaactctatattttgggagttaccatattgggaattcttggacgtacgccacgcaatcgacgtgatgcacctcactaagaacctttgcgtaaaccttcttggcttcctaggtgtatacggaaagtcgaaagatacactggaagcacgtaatgatctgaagcatatggaacaacgcggtgaccttcacccggaaccaaaggagaaaggaagccattacttgagtccagccagctacactcttagcaaggcagagaaggaaaacaatgtccgggcaacaataacaaagctatgtgcattcatgaacgcaatttcgcagaaggtcatcgatccggatagattagaagcccttcagaatgaagtggtgcaatgtctcgtcagttttgagttgatatttccaccttcatttttcaatataatgacgcatctgctttgtcaccttgtgaaagagatccgtattctcgggcctatgtacctacacaacatgtttcctttcgagaggtacatgggcgttctgaagaagtatgttcgtaaccgtgctcgtccagaggcaagcatcgccaagggttatggaacagaggaggtcatcgaattttgcgtagaatttatcgaagaccttcgcccaatcggggtacctgaatcacgccatgaagggagactacggggaaagggaactctcggaaggaaagcaataatgacggtagacaacaatttattccgtaaagcccatttcactgttctgcaacactcttcattggtagctccttacatcgaggagcacttggctctagttcgcgccaggaacatcggtaagtccgatgcatggattacacggcatcacattgatactttccccgcgtggctacgacaacatctcatgggtaacgagtcgatcaaccaacaacttgccttcctggcgaggggaccgtctgggtcgatcgcgacattccagggatatgagatcaatgggtacacattctacacgagagcccaagacatgaagagcacgaaccaaaacagcgctgttcgtgtcgatgccatgggacacgatggaacaactgccacgtattacggtgccatcgaggacatatgggaacttgactatggccctctcaaggttcctctgttcccgcgccaatgggttaggttgactggtggatgcgtaatgattgatgacagtgggatgacaactgttgaccttaacaaggttggatactcggacgaaccttttgtccttgccaatgatgtaaccaaaggaaagaagggcagagggcctgatgagcctaagcgtcaagtggttctcccaggcaaaagaaaaatcgtcggagttgagtacaagactgacgaggattacgatcagttggatgggcaaccccctttcacggtgacgattgaccctagcatcctcctatcaaatgaagacaccccttactcacgcagcgatcacaaggagggaacaatagtgaggagaaagtacgtgccgtaa

SEQ ID NO: 15976 - DNA, 1362 bp, Oryza sativa
  Clone ID: PAT_MRT4530_21769C.1
atggatcggcaatggatgtacgttgaccggcggtccaaagagtttatcgagggcgtgcattattttttgagagtggccgaagctaacaagcgtaacggttttatttgttgtccatgcaataagtgtaagaaccagaaggaatattctgcatccaggactattcatttccacttgtttgagttggggttcatgccaagctataattgttggacatcccacagtgagcaagaggttgaaatggaagaaggtgaagcggaggacgagaacattcccgactgggctcagtacgctggatttgaagaaaatcaaacggacgaggtggacagggatgctggcgataatgacgctgcagatgatcttggtcagatgttgcaggacgcaaaggaggactgtgaaagtgaaaaggggtcccataaattggagcggatgttagaggaccacagaacgtcgttgtacccaggttgcgagcaggggcacaaaaagttggataccactctgaatgacaaggcatttggcgatttattgaaactcgtcaagaacattcttccggaggaaaacaaattacccgggacaacgtacgaggctaagaagatagtctgccctctaggactggaagttcagaagattcacgcatgtccgaatgattgtatcctatatcgcggtgaggagtacgagagcctagaagcatgccctatttgtaaagcactacgatacaagattagacaagatgatccaggtaaggttgacgggcagctaacgaagaagagaattcctgctaaggtgatgtggtatttccctataataccacggctaaggcgtttgttcagaaacaaggggaatgctagaatgatgcgttggcacgctgaagaacgtcaacaggacgggatgctgagacaccccgccgatggccccaagcaacctggtaacgacatcgacgtatacctaagaccactggtcgaagatcttaaactgttgtggaagaaggaaggtgtccccgtgtgggacgaggacaaacaggaggagtttaacgtacgagcgctgctgttcgtaaccatcaacgattggcctgcacttagcaacctatccgggcagtccaacaaggggtacaaggcttgcacacactgtatggatgaaacaaaaagtacgtatcttaagcactgtcggaaggttgtgtacatgggtcatcatcgattccttgcagcaaaccacccagtacggaagaaaggcaagcactttgaacatacggcggaccaccgtacgaagccaaaacatcgcagcggtaaaacagtgtttgctatggtgaaagatcttaaagtggtgtttggaaaggggcctggcagccagcctatagaacctttgtaa

SEQ ID NO: 15977 - DNA, 1528 bp, Oryza sativa
  Clone ID: PAT_MRT4530_2176C.1
gctcggcctggtggtgagggtacgaggccagcccatccaagctggcacgggctgttcaggccagcccggctcggcgagctcagcgggtcgcccctcgaaacgttttttttttttttcccatggcccgacggccgcaaacgcctcggtggccttctcctgccgcgtggcgcggcggcacggggcaggaaggcgcgcgtcgcggccacccgcatgcggtaggctggccagtggccggccacaggccaccagcagcgcacgcagctttggcgccgtctgcggctggtgtgcggccccgccaccaccaacccatttatgcccatactccgtcaccgagacgattaggctgttacactctttcgagttccgtccatgaaattcccgttgcgagttgcgacccacccacccacccgaaccgattcgaatatcccgcacaccgccccagcgccgcgcgccgcccgcaatgcggcccgtctccagcgccgaggaggtcggcgcgctcctctcgcggagcgactcctccggccgccgccgccgctcgtcgccggtgcagtccgcgtccccgcgacccgccggatgcggctgcggcggcccgaggcggcagtcctcgttccgcgacgatgtcgggcacgcggcctccgagacgtacctcgtcacgcgcctcaccttcagcctcctgcagtacctcgggttaggttaccggtggatgtcacaactacttgccctgacaatctatgcaattttacttatgccaggttttttgcaagtcctttcttggttcacagttggatattactatttcttctcaagtcaggttcgtagaagtatagtctatggagaacaaccaagaaacaggctagatttgtacatacccaaagatatcaacagaccctgcccagtggtggccttcgtaactggtggggcttggattattggttacaaggcatggggttcccttcttgggaggcggttggctgagagaggaatcatagttgcttgcattgattacagaaatttccctcaaggaacaataggtgacatggttagcgatgcttcccagggtatttcttatgtgtgcaacaacattgctagttatggaggtgatcctaatcggatctacttggtgggtcagtcagcaggagcacatattgctgcatgtgccctcatcgagcaggcagtgaaagaatctagtgggcagtccatttcttggagtgttacacaaatcaaagcatattttggtttatctggaggctatattggttcttgttgccatgtacttcaaacttttgctgacgtccttcaacaagctggtgctcaagccaagttacagttgtacgaaggcaaaacacatacagatatatttatacaggatcctcttcggggtggaagagatccattggttgaagatgtattgtctattattcatgttgatgatgaaattacacaagaaaagattgctctggcaccagctccaaggcgcctggtgtttgagtggcaattacagctggcccgtcgatttagtccattctag

SEQ ID NO: 15978 - DNA, 101 bp, Oryza sativa
  Clone ID: PAT_MRT4530_21770C.1
atgcaacggagaatggtcggcggtcccgtgattggggccgaccatccaacacgggattatggaggaggttggactccccaaggcgcgaaggccggactcat

SEQ ID NO: 15979 - DNA, 426 bp, Oryza sativa
  Clone ID: PAT_MRT4530_21771C.1
atggaggttttgggttctacagcttttttttacctattttctctaattcatgtgacgcatgtactctacagcgtcgccacctcacgtgtgacgccgttcaagcggttgaaccaccccgaccgccggtctggtccggttctaataactatggctgccgcggtaccgggcgatccgccgccgccgcccacctgtcgtcgccgctacggccaccgcttccacctctcctctgggaaagggagaaggaggggagggaagaagccgctagagccgtgctcccggccggcgcgcagcatcgtcgtcgtcgtcgccgcggtcacggtcgtcgtcgtcgcggttgctctcatgccgccgaccccgttgtcagatccaccaccgcctgccttccgttaccgccgtggtcgccgccaccccctcccctccggctag

SEQ ID NO: 15980 - DNA, 3279 bp, Oryza sativa
  Clone ID: PAT_MRT4530_21772C.1
atggatcggcaatggatgtacgctgaccggcggtccaaagagtttattgacggcgtgcactattttttgagagtggccgaagctaacaagcaaaggggttttatttgttgtccatgcaataagtgtaagaatcagaaggagtattctgcatccaggactattcatttccacttgtttgagtcggggttcatgccaagctataattgttggacatcccacggagagcaaggtgttgaaatggaagaagatgaagtggaagacgacaatattccggactttgctcagtatgttggatttgaaggaaatcaaacgggtgaggaggaaatagctgctgatggtaacgacgttgcggatgatcttggtcagatgttgcaggacgccagggaagactgcgaaagtgaaaaggaggcccataaattggacaagatgttggaggaccacagaacttcgttgtacccaggttgcgagcaggggcacaaaaagttggataccactctggagttgttgcaatggaaggcaaaaaatggggttagtgacaaggcatttggcgatttattgaaactcgtcaagaacattcttccggggggaaacaaattgcccgagacaacgtacgaggctaagaagatagtctgcccgttaggactggaagttcataagattcacgcatgtccgaacgattgtatcctatatcgcggtgaggagtatgagaacctagaagcatgccctgtttgcaaagcactacgatacaagattagacgggacgatccaggagaagttgacgggcagctaacaaagaagagaattcctgctaaggtgatgtggtatttccctataataccacggctaaggcgtttgttcaggaacaaggggaatgctagaatgttgcgatggcacgctgaagagcgtcaacaggacgggatgctgagacaccccgccgatggttcgcagtggcgaaacatcgacagaaaatttaaagaatttggaaaggacgcacgaaacatacggtttggtttgagtacggatggcatgaatccttttggagagatgagcagcggccatagcacttggcccgttacgatgtgtatctacaacctccacccctggctatgcatgaagaggaagtacataatgatgccgattattattcaaggccccaagcaacctggtaacgacatcgacgtgtacctaagaccactggtcgaagatcttaaacagttgtggaagaaggaaggtgtccccgtgtgggacgaggacaaacaggaggagttcaacctacgagcgctgctgttcgtaactatcaacgattggcctgcacttagcaacctatccggacagtccaacaaggggtacaaggcttgcactcactgcatggatgaaacagaaagtacgtatcttaagcactgtaggaaggttgtatacatgggtcatcgtcgattccttgcagcaaaccacccggtacggaagaaaggcaagcacttcgaacatagggccgaccaccgtacgaagcctaaacatcgcaacgggaaaacagtgtttgatatggttaaagatcttaaagtagtgttcgaaaaggggcctggaagccagcatatagagagcgaagatggtgtatacggaaagtcgaaagatacactggaagcacgtaatgatctgaagcatatggaacaacgcggcgaccttcacccggaaccaaaggagaaaggaagccattacttgagtccagccagctacactcttagcaaggcagagaaggaaagtatgtttgaatgcttggagagcataaaggtaccgtctggatactccacgaatatcaagcgaataataagcacgaaggagaagaagttcacaaacctaaagtctcatgactgtcacgtgttgatgacacaactgctaccagttgtaataaggggtatccttccagacaatgtccgggcaacaataacaaagatatgtgcattcatgaacgcaatttcgcagaaggtcatcgatccggatagattagaagcccttcagaatgaagtggtgcaatgtctcgtcagttttgagttgatatttccaccttcatttttcaatataatgacgcatctgctttgtcatcttgtgaaagagatccatattctcgggcctatgtacctacacaacatgtttcctttcgagaggtacatgggcgttctgaagaagtatgttcgtaaccgtgctcgtccagaggcaagcatcgccaagggttatggaacagaggaggtcatcgaattttgcgtagaatttatcgaagactttcgcccaatcggggtacctgaatcacgccatgaagggagactacggggaaagggaactctcggaaggaaagcaataacgacggtagacaacaatttattccgtaaagcccatttcactgttctgcaacactcttcattggtagctccttacatcgaggagcacttggctctagttcgcgccaggaacatcggtaagtccgatgcatggattacacggcatcacattgatactttccccgcgtggctacgacaacatctcatgggtaacgagtcgatcaaccaacaacttgccttcctggcgaggggaccgtctgggtcgatcgcgacattccagggatatgagatcaatgggtacacattctacacgagagcccaagacatgaagagcacgaaccaaaacagcgctgttcgtgtcgatgccatgggacacgatggaacaactgccacgtattacggtgccatcgaggacatatgggaacttgactatggtcctctcaaggttcctctgttccggtgccaatgggttaggttgactggtggaggcgtaatgattgatgacagtgggatgacaactgttgaccttaacaaggttggatactcggacgaaccttttgtccttgccaatgatgtaacgcaagtctttttcgtgaaggacatgtctagcaaaggaaagaagggcagagggcctgatgagcctaagcgtcaagtggttctcccaggcaaaagaaaaatcgtcggagttgaggacaagactgacgaggattacgatcagttggatgggcaaccccctttcacggtgacgattgaccctagcatcctcctatcaaatgaagacaccccttactcacgcagcgatcacaaggagggaacaatagtgaggagaaagtacgtgcggtcaaccgtcaccgccgatgtggcaatttcatatgtatccgagcccaccatcatcgccaccgaggctgacctcgtcctcctccgcctcgccttagggggatcctctaga

SEQ ID NO: 15981 - DNA, 226 bp, Oryza sativa
  unsure (1)..(226): unsure at all n locations
  Clone ID: PAT_MRT4530_21773C.1
atgcatgagcaccaggaaattancgatccccggtganaagggaccttaaaaaggnntaaggtcttgaaagtgaaaagtgttaatgntccgncacatcacattanggacctccgatacgcatagcaccgcatgtgacttgggctacnanntttgtagaccctatttgttgtcactagagcttatgcttatatgtatgtgggagattgaactgtactatatagtttaa

SEQ ID NO: 15982 - DNA, 3315 bp, Oryza sativa
  unsure (1)..(3315): unsure at all n locations
  Clone ID: PAT_MRT4530_21774C.1
atgggaaaggccctttacgatcctacaaattggtaccagagcctggctagtaccgatggttttggttctactaaggaagatctgatgactgcaaagcctcggtacctcgcggcgctgtccccgctgcaaatcaagcaagaaactgatgcggtagatgcggcggcctcccaggcggttcgtggcgtcggctgcggagacctcttggatggcgggggcggtggtcaggtgacggcgtctacttcagggcaacctcagggaattgttgtggttatgcaaggaagagaggaggcggtcactgccctgccctgcatcatgatggatcggcaatggatgtacgctgaccggcggtccaaagagtttattgacggcgtgcactattttttgagagtggccgaagctaacaggaaaaggggttttatttgttgtccatgcaataagtgtaagaatcagaaggagtattctgcatccaggactattcatttccacttgtttgagtcggggttcatgccaagctataattgttggacatcccacggagagcaaggtgttgaaatggaagaagatgaagtggaagacgacaatattccggactttgctcagtttgttggatttgaaggaaatcaaacgggcgaggaggaaatagctgctgatggtaacgacgttgcagatgatcttggtcagatgttgcaggacgccagggaggactgcgaaagtgaaaaggaggcccataaattggacaagatgttggaggaccacagaacttcgttgtacccaggttgcgagcaggggcacaaaaagttggataccactctggagttgttgcaatggaaggcaaaaaatggggttagtgacaaggcatttggcgatttattgaaactcgtcaagaacattcttccggggggaaacaaattgcccgagacaacgtacgaggctaagaagatagtctgcccgttaggactggaagttcataagattcacgcatgtccgaacgattgtatcctatatcgcggtgaggagtatgaagacctagaagcatgccctgtttgcaaagcactacgatacaagattagacgggacgatccaggagaagttgacgggcagctaacaaagaagagaattcctgctaaggtgatgtggtatttccctataataccacggctaaggcgtttgttcaggaacaaggggaatgctagaatgttgcgatggcacgctgaagagcgtcaacaggacgggatgctgagacaccccgccgatggttcgcagtggcgaaacatcgacagaaaatttaaagaatttggaaaggacgcacgaaacatacggtttggccccaagcaacctggtaacgacatcgacgtgtacctaagaccactggtcgaagatcttaaacagctgtggaagaaggaaggtatccccgtgtgggacgaggacaaacaggaggagtttaacctacgagcgctgctgttcgtaaccatcaacgattggcctgcacttagcaacctatccggacagtccaacaaggggtacaaggcttgcactcactgtatggaggaaacagaaagtacgtatcttaagcactgtaggaaggttgtatacatgggtcaccgtcgattccttgcagcaaaccacccggtacggaagaaaggcaagcacttcgaacataaggccgaccaccgtacaaagcctaaacatcgcagcgggaaaacagtgtttgctatggttaaagatcttaaagtagtgtttggaaaggggcctggaagccagcatatagagagcgaagatggtcacgcggcgatgtggaaaaagaactctatattttgggagttaccatattgggaattcttggacgtacgccacgcaatcgacgtgatgcacctcactaagaacctttgcgtaaaccttcttggcttcctaggtgtatacggaaagtcgaaagatacactggaagcacgtaatgatctgaagcatatggaacaacgcggcgaccttcacccggaaccaaaggagaaaggaattgtaataaggggtatccttccagacaatgtccgggcaacaataacaaagcaatgtgcattcatgaacgcaatttcgcagaaggtcatcgatccggatagattagatgcccttcagaatgaagtggtgcaatgtctcgtcagttttgagttgatatttccaccttcatttttcaatataatgacgcatctgctttgtcaccttgtgaaagagatccgtattctcggtcctatgtacctacacaacatgtttcctttcgagaggtacatgggcgttctgaagaagtatgttcgtaaccgtgctcgtccagaggcaagcatcgccaagggttatggaacagaggaggtcatcgaattttgcgtagaatttatcgaagaccttcgcccaatcggggtacctgaatcacgccatgaagggagactacggggaaagggaactctcggaaggaaagcaattatgacggtagacaacaatttattccgtaaagcccatttcactgttctgcaacactcttcattggtagctccttacatcgaggagcacttggctctagttcgcgccaggaacatcggtaagtccgatgcatggattacacggcatcacattgatactttccccgcgtggctacgacaacatctcatgggtaacgagtcgatcaaccaacaacttgccttcctggcgaggggaccgtctgggtcgatcgcgacattccagggatatgagatcaatgggtacacattctacacgagagcccaagacatgaagagcacgaaccaaaacagcgctgttcgtgtcgatgccatgggacacgatggaacaactgccacgtattacggtgccatcgaggacatatgggaacttgactatggtcctctcaaggttcctctgttccggtgccaatgggttaggttgacttgtggaggcgtaatgattgatgacagtgggatgacaaactgtgaccttaacaaggntgggatactcgacgaaccttttgtcctttgcaatgatgtaacgcaggtctttttcgtgaaggacatgtctagcnaaagaaaagaaggccagaggcctgatgagcctaagcgtcaagtgggtcttccaagccaaaagaaaatcgtcggagttgaggacaagactggacaggatcacgatcagttggatgggcaaccccctttcacggtgacgattgaccctagcatcctcctatcaaatgaagacaccccttactcacgcagcgatcacaaggagggaacaatagtgaggagaaagtacgtgcggtcaaccgtcaccgccgatgtaatgccgtaa

SEQ ID NO: 15983 - DNA, 2964 bp, Oryza sativa
  Clone ID: PAT_MRT4530_21775C.1
atggatcggcaatggatgtacgctgaccggcggtccaaagagtttattgacggcgtgcactattttttgagagtggccgaagctaacaggcaaaggggttttatttgttgtccatgcaataagtgtaagaatcagaaggagtattctgcatccaggactattcatttccacttgtttgagtcggggttcatgccaagctataattgttggacatcccacggagagcaaggtgttgaaatggaagaagatgaagtggaagacgacaatattccggactttgctcagtatgttggatttgaaggaaatcaaacgggcgaggaggaaatagctgctgatggtaacgacgttgcggatgatcttagtcagatgttgcaggacgccagggaggactgcgaaagtgaaaaggaggcccataaattggacaagatgttggaggaccacagaacttcgttgtacccagcaaaaaatggggttagtgccaaggcatttggcgatttattgaaactcgtcaagaacattcttccggggggaaacaaattgcccgagacaacgtacgaggctaagaagatagtctgcccgttaggactggaagttcataagattcacgcatgtccgaacgattgtatcctatatcgcggtgaggagtatgagaacctagaagcatgccctgtttgcaaagcactacgatacaagattagacgggacgatccaggagaagttgacgggcagctaacaaagaagagaattcctgctaaggtgatgtggtatttccctataataccacggctaaggcgtttgttcaggaacaaggggaatgctagaatgttgcgatggcacgctgaagagcgtcaacaggacgggatgctgagacaccccgccgatggttcgcagtggcgaaacatcgacagaaaatttaaagaatttggaaaggacgcacgaaacatacggtttggtttgagtacggatggcacgaatccttttggagagatgagcagcggccatagcacttggcccgttacgatgtgtatctacaacctccccccctggctatgcatgaagaggaagtacataatgatgccgattattattcaaggccccaagcaacctggtaacgacatcgacgtgtacctaagaccactggtcgaagatcttaaacagttgtggaagaaggaaggtgtccccgtgtgggacgaggacaaacaggaggagtttaacctacgagcgctgctgttcgtaaccatcaatgattggcctgcacttagcaacctatccggacagtccaacaaggggtacaaggcttgcactcactgtatggatgaaacagaaagtacgtatcttaagcactgtaggaaggttgtatacatgggtcatcgtcgattccttgcagcaaaccacccggtacggaagaaaggcaagcacttcccacataaggccgaccaccgtacgaagcataaacatcgcagcgggaaaacagtgtttgctatggttaaagatcttaaagtagtgttcggaaaggggcctggaagccagcatataaaaagcgaagatggtgtatacggaaagtcgaaagataccctggaagcacgtaatgatctgaagcatatggaacaacgcggcgaccttcacccggaaccaaaggagaaaggaagccattacttgagtccagccagctatactcttagcaaggcagagaaggaaagtatgtttgaatgcttggagagcataaaggtaccgtctggatactccacgaatatcaagcgaataataagcacgaaggagaagaagttcataaacctaaagtctcatgactgtcacgtgttgatgacacaactgctaccagttgtaataaggggtatccttccagacaatgtccgggcaacaataacaaagctatgtgcattcatgaacgcaatttcgcagaaggtcatcgatccggatagattagaagcccttcagaatgaagtggtgcaatgtctcgtcagttttgagttgatatttccaccttcatttttcaatataatgacgcatctgctttgtcaccttgtgaaagagatccgtattctcgggcctatgtacctacacaacatgtttcctttcgagaggtacataggcgttctgaagaagtgtgttcgtaaccgtgctcgtccagaggcaagcatcgccaagggttatggaacagaggaggtcattgaattttgcgtagaatttatcgaagaccttcgcccaatcggggtacctgaatcacgccatgaagggagactacggggaaagggaactctcggaaggaaagcaataatgacggtagacaacaatttattccgtaaagcccatttcactgttctgcaacactcttcattggtagctccttacatcgaggagcacttggctctagttcgcgccaggaacatcgcccaagacatgaagagcacgaaccaaaacagcgctgttcgtgtcgatgccatgggacacgatggaacaactgccacgtattacggtgccatcgaggacatatgggaacttgactatggtcctctcaaggttcctctgttccggtgccaatgggttaggttgactggtggaggcgtaatgattgatgacagtgggatgacaactgttgaccttaacaaggttggatactcggacgaaccttttgtccttgccaatgatgtaacgcaagtctttttcgtgaaggacatgtctagcaaaggaaagaagggcagagggcctgatgagcctaagcgtcaagtggttcttccaggcaaaagaaaaatcgtcggagttgaggacaagactgacgaggattacgatcagttggatgggcaaccccctttcacggtgacgattgaccctagcatcctcctatcaaatgaagacaccccttactcacgcagcgatcacaaggagggaacaatagtgaggagaaagtacgtgcggtcaaccgtcaccgccgatgtaatgccgtaa

SEQ ID NO: 15984 - DNA, 161 bp, Oryza sativa
  Clone ID: PAT_MRT4530_21776C.1
ctcttgggtttgggttttttttggggaggggttctttttttttttccatcttttcctatagggagacttattagaccccggcataatcccggccaaacctgcccactgggcaaaattccaccatctcgcaattccacaaaacacaccagactcatgcataa

SEQ ID NO: 15985 - DNA, 494 bp, Oryza sativa
  Clone ID: PAT_MRT4530_21777C.1
cccacgcgtccggaaaattttctccactccgatctaacgccgttacttcaaaatgtgacggaagtgctacggggcgaagaaaaatcggtgacctatgctatggatcaaaagtggaaactttttgtgctattttttgatacaaaccagatgtaatcaaaggagatctggactcagttcgaccagaagtgaaggaatattattccaatatgggtactcaaatagtcgatgagtcacatgatcaggacaccaccgatttacacaaatgtgtagcttttatcactgagaattcggccatccccaacaaatctaatctgtgtatctttgctcttggggcccttgggggaaggtttgaccacgagatgggaaacatcaacgtacttcatctcttcccaaacaacaggatcatactcctatcggatgattgcttgatctttctgctgccaagaacacacactcataacatccatattcaacggtctattgaggggccccac

SEQ ID NO: 15986 - DNA, 1231 bp, Oryza sativa
  Clone ID: PAT_MRT4530_21778C.1
gtcgattattatggtgcggggtgtcgagcagggcggccccgccatggacgagtcttcgtcgtcgtcgtcgccgtcgccggtgtccgcgcctgcagggcaggcagccatgacggccggcggcatcgccaccgtggcggccgtgctcatcgtcttcgcggcgctcacgctcgccttcgtcctgctccagtgctactgcgacgagcggcgccgcgccgtgacgacgacgtcgacgagcgggcgcgggcggcggccgcggccgcggcggcgctctgggagcggcggggacggtggaacgggaggaggggtcgacccggaggtgctccggtcgctgccggtcacggtgtacagccgcagcacggcggcggcggcggcgaaggaggaggaggaggaggacgacgacggcgtcgagtgcgcggtgtgcctcgcggagctcgaggacggcgaggaggccaggttcctcccccggtgcggccacggcttccacgccgagtgcgtcgacatgtggctcggctcccactccacctgcccgctctgccgcctcaccgtcgtcgtgccgccgccgcctcttcctcccgtcccgccggagccgccggcgagctacaccgtgagcctcccggcgagcgtcctgctcggcctgtccgaccatggcgccggcgcggtgaccatgacagcggagggccgcagcacgctggtgatcgagatccccgaatccgcggcttcgacgaccccgcgcgacgcggcggcgaggtcgtcgccgagcttggcgcggctgaggtcactgagaaggctctggagcttcgggcggcaaggggcggcggggtcgacgtcgtcatgctcctgcgccaccggaggagacaacgacgacggcgacgtcgagcacggtgtcagcgtcaccgtcgccatccgcgccgtggaggcggcaacgccggcacggccaccggaggccgaggccggtgcaagaaccgccgccgcgcatgtccggaattgacggcggcgaggtcgtcaagtattataaggcgatctccctgtacatatcggtagaaccgaactggaatcgccattaattcctacgattttagaaaatatcaatttcatttttaagattagaaacatttaagtagaaattatttgttcatcagtcaagtagcaaagagaaatgtatggatggcagtgagaagcatccctctccgtatgttccaaaaaaaaaaaaaaaaaatctctccctcgtgcc

SEQ ID NO: 15987 - DNA, 474 bp, Oryza sativa
  unsure (1)..(474): unsure at all n locations
  Clone ID: PAT_MRT4530_21779C.1
aacaccgcggggatacttcgtgtgtcattgctcgacgggttcgatttcctctccggctacgccacaccgcctttgccctgtgcggcgtcgacttccccgcgccggcgaggacgaggtacttcacggagctcggcaccggtggtactccgaccttcctccaaccggcggcgaggcctccggcccggtgaaaccccttcgaatccgggaagattatttaatctggagaccgtagantagaagatgagcacttactactctctccgtccccaaaaaaaccccatcctctcctagtagaacgattctggattatactaggagggtcatatttttaaattggtttttttgacagagaaagtacattatattttttttctttttactatatacgaaagtggaaaggttttccccccaaccctccaccccatacccccaaataataaacgacatctcttctaaaaaaaaaaaaaaaaaaaa

SEQ ID NO: 15988 - DNA, 111 bp, Oryza sativa
  Clone ID: PAT_MRT4530_2177C.1
atgtatcggcccgtcacaggtgaggggatacctgtgacgggccgtggccagatgcctcaccggtatcccgtcagaggtgtgaggatctggcgtagtgagggccccccttga

SEQ ID NO: 15989 - DNA, 1832 bp, Oryza sativa
  Clone ID: PAT_MRT4530_21780C.1
atggcgacggcggaggcagcggcggcggcggcgaggcgaggcggcggcggaggcagcaatcgcggggaggcgagtgacggtgcagggcggcggcagaggcgagcggcggcgggagctcgcactgctcgcggaggaggcgaggcggcggcggcggcggcggaagaggcgagcggcggcggggtgcagcggaggaggcagcggcggcggcgaggcgaggcggtcggcgagcccggtcgagcagcgccccctccacggcgaacccaccggcggagcactggagatgacgatgtggcgataaagattctgttctgtggaatctgccactctgacctgcactgcatcaagaatgagtggaagcactccatctacccacttgttcctgggcacgagatcgccggtgtggtgacggaggtggggaagaacgtcaccaggttcaaggccggcgacagggtcggcgtggggtgcatggtgaactcgtgccggtcatgcgagagctgtaacaatggcttcgagaaccactgcccggagggcgtcttcacctacaactccgtcgacaaggacggcaccgtcacctacggcggttactcgagcatggtggtggtgcacgagcgcttcgtggtcatgttcccggaggcgatgccgctcgacgtcggcgccccgctgctgtgcgccggcatcaccgtgtacacccccatgaagtaccacggcctgaacgcgccggggaagcacgtcggcgtgctcggcctgggcggggctcggccacgtcgcggtgaagttcgccagggcgttcgggttgaaggtgacggtgatcagctcgtcgccggggaagaagcgggaggcgctggagcggctcggcgccgacgcgttcgtcgtgagcagcagcgccgaggagatggaggccgcgaggtccaccatggacggcgtcatcaacacggtctccgccaacacccccatggcgtccccccagcacccccatggcgccgtacctggcgttgctgaagcccaacgggaagatgatcctcgtcggcctcccggagaatcccctggaggtccctcccttctctctcgtccacgggaacaggactctggcagggagcaacatcggcggcatggcggacacgcaggagatgatcgagctggcggcgaagcacggcgtgacggcggacatcgaggtgatcggcgccgacgacgtgaacacggccatggagcgcctcgccaaggcggatgtcaggtatcgcttcgtcatcgacgtcgggaacaccctccacgccgccgccgccgagtgatggcatcgcctgcaaactattcgtgtggtctgtaatctgtatgaaattgttcatggtacgtacacgatatatagattgtggcgtgtcatggcgtataggaatgaacccgatcgaggaagctattgttggtagtctgatgctagtcagctcagtgtttgactgtttgcatttacggattgaaattgagctttgtgtggcctaagttttattttctaaaaatttcaagtgaatttcgttttattcgaatgaaattccagatctttatctctacttccggaaatgctaactcagcgcctaggcggtaggtcacacataggtaacgcacacgcggcgcagttaggtttcttttttcttttttttgggattcttttccgaaggcacgtacatctaaagtaactaacccggctagttttagataaggataataattaaggtaagatttggcttttttcgaagatttttttaagtaatagattaaaaagaaatttacctgtgtaaggcaattttttaaaaacttttaactgcagatgtgtaatttttttgaaa

SEQ ID NO: 15990 - DNA, 570 bp, Oryza sativa
  unsure (1)..(570): unsure at all n locations
  Clone ID: PAT_MRT4530_21781C.1
aaggcagggccagcanaagggttgttatnntggacccgccccanaataagttccggttnnatttgngggatgggggggnaacattnaacggaacggtagacctgatacnccaagttgaaattaaccntcaccaaagggacaaaagcnggagtccnccgcgntggcgccgtttagaaanagnggatcccccgggccncgggaattcggcangaggggaattcggtgcagattttttntttgggcatgtganattaangatnttngggtnttantttggcatgagtagcttaagctttggtggaganttatttttggcatgagtagcttagtntttggtgggganttatttttatgggcatggngttactgatgttttggtgttttaattttggcatganttagttgttaggngcatgnggctcagatntaatttgttnttgggngcatgtaagaaantagtagtaantaattatanatggtattntaatcatgtnttgggnttgnnanaaaaaaaaaaaaaaaaaaaaaaaaaaaaaaaaaaaaaaaaaaaaaaaaaaaaaaaaaaaaaaa

SEQ ID NO: 15991 - DNA, 532 bp, Oryza sativa
  Clone ID: PAT_MRT4530_21782C.1
ctctaggccgtcttagatgccagtcacatccaagcaacggtcaagggagaccgcagagaattcactgcgcccaactccgagagcagctcaagtctgcctgacgccactgcctgcgactcgcaagccacaccacaacgtgggaacagaagcttgcaaggaatctcgcatgatctccccccagtcggatgcattccggggtagcaagaaagtgcgcaatgatgcgacggcagtcagaggcacgcaaagtcaataagggaccgaagctcgagtgccgcaaggcagcgaggacgcaacgatccgcctgcaaggccgcagcctcaagaagcgtctaaggcagcaccagaggagtgtcaaggcacacacccagtggtatgaagtaaatcctctgctccaggcacataaccactacgaccatgtattcccttcgactttcgatcagactcagtccgctgattgatgaattgtcattgcgtatgaccatggctgttttatgggtgactgaaatgttcgtgaaaaaaaaaaaaaaaaaaaa

SEQ ID NO: 15992 - DNA, 300 bp, Oryza sativa
  Clone ID: PAT_MRT4530_21783C.1
cctgtgtacatcgccttcctgaggttcatgggtgatgacttggaagcaaagaactacagctacagcctggaggtaggaggcactggccgcaaaatgatcgggcaaggggttccccggagcatcagagacagccatcggaaggtccgggatagctatgatgggcttatcatccaacggaacatggccttgttcttctctggtggagaaaggaaggagctcaaattgcgggtcactgggtggctctggtggggactgcctggcaaacttctctttgccttgaactgcttgttgagttgccat

SEQ ID NO: 15993 - DNA, 462 bp, Oryza sativa
  unsure (1)..(462): unsure at all n locations
  Clone ID: PAT_MRT4530_21784C.1
tccggggacgaccattccagctcgcatcgcacgcgggcaaccaataccgcccttccccggaacacccggaacgcggaagcatggcgaaattggtgttccgttcggtccctggtctggaaccccgttccgcacgaacccgcctcgtcgttctcaggaataccgcccgcgtcttctacagggacacggaccacagggcaccccgattccccggagacgtccgctcaacacacccgggccacatgctggggttgttgcttacaaaatttccacggaccaagatatagccacagctctggaacatctggaattagaaaaaccatattattagaaatttaccttgattgtttgactcctcccaaaacaccaccgtcaaaatgtatggtatacttaccccacaacaacaacaaccaaaactaccttggtcctgcacgctgaaaatggcancaattcctnctaagcctc

SEQ ID NO: 15994 - DNA, 819 bp, Oryza sativa
  Clone ID: PAT_MRT4530_21785C.1
atggcggcttctccgccactgcctacttccatcgatggtggtcaagtgctagatgacatggaggtcgtggagatgaagtacctgtttggcaaggtcctgatgccaagcgacgtgtcctgggacaccgaacagctcgtgatcccggacgagcacgtcgggaaactactggacatggtggtgatgaaccggccggaagggggcttcttcgtcgtcgtcgtcgaggatggcgaggtgactgggaagctgtggcttttcaggtactggaaacgcgacgacgtccactgcctcaccaagggctggggttgctacgccagggagaagggcctcagagccggagacaccgtctccttcttccacagcaccgcgtgcggtcgcttcttcatctgctgcaggtgcacctgcatgagtttcttgtcactacccacaacatcgcatcgcattcacggctcgtctgtactgccgcaaccgcgggctgcccaggaggcgcaccatccattctcaggacacgccacattgtgtctcggcaacaaagctagtgatcacagcgcgccggcaaggcatgccactgcctccttagggtgtgcggcggcgcagcctccgcaggtgccgccgacgccgacgccgcgtcgtcgacggcgcagtatgatggttcacccagaaccaccggagcacacaacggacggcatgcctgtgattctcgagtcgatggcactcgtatccaccccgcccgtggcgaaacgcgtgcgcctttttggagtctacatcgacgttcctccactgcgcccaggcggcgaggcaacacaagatttcaacccatga

SEQ ID NO: 15995 - DNA, 441 bp, Oryza sativa
  unsure (1)..(441): unsure at all n locations
  Clone ID: PAT_MRT4530_21786C.1
atgcaagcaaacagaacatctcaattccgaaactttaggcatacggatctcaagacccactttgtgattcgcgacaatagcatacagcctggcttggatattgataaagttgcggatgggagctacgggagaggcgcttgcataggagagctaaagcaaacatagtactgggaacaatgcgtcaggggtatgcataggaaccatccgatccagacagtggctaatggtgaatcaggtcgctggttctttgtcgtactcggcctcatgggaatggcgtggaacctgatacatgatggcacgtgatatactaggtcctgtgatggtgactgtgcgatctgagggaacttgatctaggacatgcgctcaaccgcagaccagggacagaacccnttcctgctgactatgggcgacaactggtctatgacgcatcgggagctttgc

SEQ ID NO: 15996 - DNA, 3063 bp, Oryza sativa
  unsure (1)..(3063): unsure at all n locations
  Clone ID: PAT_MRT4530_21787C.1
atggaggtcaagttcatcatccaagttcttcgaaacgtaaacatactggctgctcttgttggtattgtattggctgttttcaaatccactactaaccagaggatctatcactgtctgtgcctctctctgaattcaattataacaattagagcacccgcaatgatggatcggcaatggatgtacgctgaccggcggtccaaagagtttattgacggcgtgcactattttttgagagtggccgaagctaataggcaaaggggttttatttgttgtccatgcaataagtgtaagaatcagaaggagtattctgcatccaggactattcatttccacttgtttgagtcggggtttatgccaagctataattgttggacatcccacggagagcaaggtattgaaatggaagaagatgaagtggaagacgacaatattccggactttgctcagtacgttggatttgaaggaaatcaaacgggcgaggaggaaagggatgctgatggtaacgacgttgcggatgatcttggtcagatgttgcaggatgccaaggaggactgcgaaagtgaaaagggggcccataaattggacaagatgttagaggaccacagaacttcgttatacccaggttgcgagcaggggcacaaaaagttggataccactctggagttcttgcaatggaaggcaaaaaatggggttagtgacaaggcatttggcgatttattgaaactcgtcaagaacattcttccggagggaaacaaattgccccagacaacgtacgaggctaagaagatagtctgcccgctaggactggaagttcagaagattcacgcatgtccgaatgattgtatcctatatcgcggtgaggagtatgagaacctagaagcatgccctgtttgcaaagcactacgatacaagattagacgagacgatccaggagaagttgacgggcagctaacaaagaagagaattcctgctaagaggaagtacataatgatgccgattattattcaaggccccaagcaacctggtaacgacatcgatgtgtacctaagaccactggtcgaagatcttaaactgttgtggaagaaggaaggtgtccccgtgtgggacaacgacaaacaggaggagtttaacctacgagcgctgctgttcgtaaccagcaacgattggcctgcacttagcaacctatccggacagtccaacaaggggtacaaggcttgcactcactgtatggatgaaacagaaagtacgtatcttaagcactgtaggaaggttgtttacatgggtcatcgtcgattccttgtagcaaaccatccggtacggaagaaaggcaagcacttcgaacataaggctaaccaccgtacgaagcctaaacatcgcagcgggaaaacagtgtttgctatggttaaagatcttaaagtagtgttcggaaaggggcctggaagccagcctatagagagcgaagatggtcacgcggcgatgtggaaaaagaactctatattttgggagttacccaattgggaattcttggacgtacgccacgcaatcgacgtgatgcacctcactaagaacctttgcgtaaaccttcttggcttcctaggtgtacacggaaagtcgaaagatacactggaagcacgtaatgatctgaagcatatggaagaacgcggcgaccttcagccggaaccaaaggagaaaggaagccattacttgagtccagccagctacactcttagtatggcagagaaggaaagtatgtttgaatgcttggagagcataaaggtaccgtctggataccccacgaatatcaagcgaataataagcacgaaggaaaagaagttcacaaacctaaagtctcatgactgtcacgtgttgatgacacaactgctaccagttgtaataaggggtatccttccagacaatgtccgggcaccgatancaaagatatgtgcattcatgaacgcaatttcgcagaagagatcagtattctcgggcctgtgtacctacacaacatgtcctttcgagaggtacatgggcattctgaagaagtatgttcgtaaccgtgctcgtccagaggcaagcatcgccaagggttatggaacagaggaggtcatcgaattttgcgtagaatttatcgaagatcttcgctcaatcggggtacctgaatcacgccatgaaggaagactacggggaaagggaactctcggaaggaaagcaataatgacggtagacaacgatttattccgtaaagcccatttcacggttctgcaacaatcttcattggtagctccttatgtcgaggagcacttggctctagttcgcgccaggaacatcggtaagtccgatgcatggattacatggcatcacattgatactttccccgcgtggctacgacaacatctcatgggtaacgagtcgatcaaccaacaacttgccttcctggcgaggggaccgtctgggtcgatcgcgacattccagggatatgagatcaatgggtatacattctacacgagagcccaagacatgaagagcacgaaccaaaacagcgctgttcgtgtcgatgccatgggacacgatggaacaactggcacgtattacggtgccatcgaggacatatgggaacttgactatggtcctctcaaggtccctctgttccggtaccaatgggttaggttgactggtggaggcgtaatgattgatgacagtgggatgacaacggttgaccttaacaaggttggatactcggacgaaccttttgtccttgccaatgatgtaacgcaagtctttttcgtgaaggacatgtctagcaaaggaaagaagggcagatggcctaacgagcctaagtgtcatgtggttctcccaagcaaaagaaaaatcgtcggagttgaggacaagactgacgaggattacgatcagttggatgggcaaccccctttcacggtgacgattgaccctagcatcctcctatcaaatgaagacaccccttactcacgtagcgatcacaagaagggaacaatagtgaggagaaagtacgtgcggtcaaccgtcaccgccgatgtattgccgtaa

SEQ ID NO: 15997 - DNA, 2777 bp, Oryza sativa
  Clone ID: PAT_MRT4530_21788C.1
atggatcggcaatggatgtacgctgaccggcggtccaaagagtttattgacggcgtgcactattttttgagagtggccgaagctaacaggcaaaggggttttatttgttgtccatgcaataagtgtaagaatcagaaggagtattctgcatccaggactattcatttccacttgtttgagtcggggttcatgccaagctataattgttggacatcccacggagagcaaggtattgaaatggaagaagatgaagtggaagacgacaatattccggactttgctcagtatgttggatttgaaggaaatcaaacgggcgaggaggaaatagctgctgatggtaacgacgttgcggatgatcttggtcagatgttacaggacgccagggaggactgcgaaagtgaaaaggaggcccataaattggacaagatgttggaggaccacagaacttcgttgtacccaggttgcgagcaggggcacaaaaagttggataccactttggagttgttgcaatggaaggcaaaaaatggggttagtgacaaggcatttggcgatttattgaaactcgtcaagaacattcttccggggggaaacaaattgcccgagacaacgtacgaggctaagaagatagtctgcccgttaggactggaagttcataagattcacgcatgtccgaacgattgtatcctatatcgcggtgaggagtatgagaacctagaatcatgccctgtttgcaaagcactacgatacaagattagacgggacgatccaggagaagttgacgggcagctaacaaagaagagaattcctgctaaggtgatgtggtatttccctataataccatggctaaggcgtttgttcaggaacaaggggaatgctagaatgttgcgatggcacgctgaagagcgtcaacaggacgggatgctgagacaccccgccgatggccccaagcaacctggtaacgacatcgacgtgtacctaagaccactggtcgaagatcttaaacagttgtggaagaaggaagcaaaccacccggtacggaagaaaggcaagcacttcgaacataaggccgaccaccgtacgaagcctaaacatcgcagcgggaaaacagtgtttgctatggttaaagatcttaaagtagtgttcggaaaggggcctggaagccagcatatagagagcgaagatggtcacgcggcgatgtggaaaaagaattctatattttgggagttaccatattgggaattcttggacgtacgccacgcaatcgacgtgatgcacctcactaagaacctttgcgtaaaccttcttggcttcctaggtgtatacggaaagtcgaaagatacactggaagcacgtaatgatctgaagcatatggaacaacgcggcgaccttcacccggaaccaaaggagaaaggaagccattacttgagtccagccagatacactcttagcaaggcagagaaggaaagtatgtttgaatgcttggagagcataaaggtaccgtctggatactccacgaatatcaagcgaataataagcacgaaggagaagaagttcacaaacctaaagtctcatgactgtcacgtgttgatgacacaactgctaccagttgtaataaggggtatccatccagacaatgtccgggcaacaataacaaagctatgtgcattcatgaacgcaatttcgcagaaggtcatcgatccggatagattagaagcccttcagaatgaagtggtgcaatgtctcgtcagttttgagttgatatttccaccttcatttttcaatataatgacgcatctgctttgtcaccttgtgaaagagatccgtattctcgggcccatgtacctacacaacatgtttcctttcgagtggtacatgggcgttctgaagaagtatgtttgtaaccgtgctcgtccagaggcaagcatcgccaagggttatggaacagaggaggtcatcgaattttgcgtagaatttatcgaagaccttcgcccaatcggggtacctgaatcacgccatgaagggagactacggggaaagggaactctcggaaggaaagcaataatgacggtagacaacaatttattccgtaaagcccatttcactgttctgcaacactcttcattggtagctccttacatcgaggagcacttggctctagttcgcgccaggaacatcggtacgtccgatgcatggattacacggcatcacattgatactttccccgcgtggctacgacaacatctcatgggtaacgagtcgatcaaccaacaacttgccttcctggcgaggggaccgtctgggtcgatcgcgacattccagggatatgacatcaatgagtacacattctacacgagagcccaagacatgaagagcacgaaccaaaacagcgctgttcgtgtcgatgccatgggacacgatggaacaactgccacgtattacggtgccatcgaggatatatgggaacttgactatggtcctctcaaggttcctctgttccggtgccaatgggttaagttgactggtggaggcgtaatgattgatgacagtgggatgacaactgttgaccttaacaagagcaaaagaaaaatcgtcggagttgaggacaagactgacgaggattacgatcagttggatgggcaacccccttttacggtgacgattgaccctatcatcctcctattatatgaagacaccccttactcactcaacgatcacaaggagggaacaatagtgaggagaaagtacgtgcggtcaaccgtcaccgccgatgtaatgcc

SEQ ID NO: 15998 - DNA, 681 bp, Oryza sativa
  Clone ID: PAT_MRT4530_21789C.1
atggttgcgtgggcttgctgtgggctctacaagcgaccggagctgagcagcacttgtggttgtggtcgtgggtggcggactggcggatgcggagcgatcgagggtggctggggagtcgtcacgttggcggcggtgtggagctgcgagggcgacggctacagcggcggtgttgagttgcgagggtggcggcggtatcgagctgcgagggcgacggctacaaagtcggcaactgcgtggcgttggcgtggagctgcgagggcggcggcattgacagggttgcacggacggtcgccagcggaaggtctgggcgtcgtcgccgcacgcgcctttggatgggtcttcatgggaactacttgtggagtatcagtagccggccatccagctcgagctagtgatgatcatcatcaacggtggttgttggtgtcgttgttgtgcatgaacgactgcatgcagatgcttccgccggcgaccgtccgtgcaaccctggcagctggatggccgctctcgcagcagctccccgatgccgccgccctcgcagctccacgccaacgccgcagccgccgccctcgtagctccacgccgtcgtcgccgccctctcagctctatgccgacgccccgtcgctctcgcagctccgcgccgccaccactgccaacggtcgtgagagagaggagaacgaatag

SEQ ID NO: 15999 - DNA, 926 bp, Oryza sativa
  Clone ID: PAT_MRT4530_2178C.1
gctagctatagctctagttctactctaattgcgcagtcgatcgaacgtacactgccaatcaaatcaactgcgagcttgcaatggagagaggagcgagctttgcagtggtgatggcggccatggcggtggttctggccaccacatcgacggcgcaggcccagaccacggcgaccgacatcgtcaacatccacaacgccgcccggagcgccgtcggcgtcccggcgctgtcgtgggacgacaacctggcggcgtacgcgcagggctacgcgaaccagcgcgccggcgactgcgcgctgcggcactccgatcgcaacaactatcagtacggcgagaacctgtcgtggaacccctccgtgcaggcgtggacggcggcgagctccgtcgaccagtgggtggcggagaagggctcctacgactacgccagcaacagctgcgtcggcggcgccatgtgcggccactacacgcaggtcgtgtggcgcgacaccaccgccgtcggatgcgccgccgtcgcctgcaacgccaaccgaggcgtcttcttcatctgcacctacttccccgccggcaacgtccaaaaccagaggccgtactagctaccgtatacgtatacgtatacgtacgtacgtaacgtatatgctatggaatatattttgctactactctagtatatattgtacgtataaatctttctgctctcagtagatatatatgcgcatatatgtacgaactactatgtatgttcgtatgtatatatgtacgcacatcgatctgcatgcgtatgcatgatcagtgtgttggatgcaataagtacgtcatgatgcagacgtattgagtatctacaaatacagatatatatgtatccggtgtgtatttttattacaaattactccctccgtattttaatgtatgacgccattgatttttcaacc

SEQ ID NO: 16000 - DNA, 1872 bp, Oryza sativa
  Clone ID: PAT_MRT4530_21790C.1
atggaagaatatgaagtggaagacgacaatattccggactttgctctatacgctggatttgaaggaaatcaaacgggcgaggaggaaagagatgctcatggtaacgacgttgcggatgatcttggtcagatgttgcaggacgccaaggaggaatgcgaaagtgaaaagggggcccataaattggacaagatgttagaggaccacacaacgtcgttgtacccaggttgcgatgttagtgacaaggcatttgacgatttattgaaactcgtcaagaacattcttccggagggaaacaaattgcccgagacaacgtacgaggctaagaagatagtctgccctctaggactggaagttcaaaagattcacgcatgtctgaatgattgtatcctatatcgcggtgaggagtacgagaacctagaagcatgccctgtttgcaaagcactacgatacaagattagacgagatgatccaggagaagttgacgggcagctaacgaagaagagaattcctgctatggtgatgtggtatttccctataataccacagctaaggcgtttgttcaggaacaagggaaatgctagaatgatgcggtggcacgctgaagagcgtcaacaggacgggatgctgagacaccccgccgatggttcgcagtggcgaaacatcgatagaaaatttaaagactttggaaaggacgcacgaaacacacggtttggtttaagtatggatggcatgaatccttttagagagatgagcagcggccatagcacttggcccgttacgatgtgtatctacaacctccccccttggctatgcataaagaggaagtacataatgatgccgattattattcaaggccccaagcaacctggtaacgacatcgatgtgtacctaagaccactggtcgaagatcttaaactgttgtggaagaaggaaggtgtccccgtgtgggatgaggacaaacaggaggagtttaacctacgagcgctgctgttcgtaaccatcaacaattggcctgcacttagcaacctatccgggcagtccaacaaggggtacaaggcttgcactcactgtatggatgaaggttgtttacatgggtcatcgtcgattccatgcagcaaaccacccggtgtatatgaaaagtcgaaagatacactggaagtacgtaataatctgaagcatatggaacaacgcggcgaccttgacccagaaccaaaggagaaaggaagccattacttgagtctagccaattacactcttagcaaggcagagaaggaaagtatgtttgaatgcttggagagcatcaaggtaccgtctggatactccatgaatataaagcgaataataagcacgaaggagaagaagttcacaaacctaaagtctcatgactgtcacgtgttgatgacacagctgctaccagttgtaataaggggtatcctcccagacaatgtccgggcaacaataacaaagctatgtgctttcatgaacgcaatttcgcagaaggtcatcgatccggatagattagaagccctgcagaatgatgtggtgcaatgtcttgtcagctttgagttcatatttccaccttcatttttcaatataatgacgcatctgctttgtcaccttgtcaaagagatcggtattctcggtcctgtgtacctatacaacatgtttcctttcgagaggtacatgggcgttctgaagaagtatgttcttaaccgtgctcgtccagaggcaagcatcgccaaggggtatggaacagaggaggtcattgaattctgcgtagaatttatcgaagaccttcgcccaatcggggtacctgaatcacaccatggacggagactacggggaaaggggactctcgaaggaaagcaataa

SEQ ID NO: 16001 - DNA, 3246 bp, Oryza sativa
  Clone ID: PAT_MRT4530_21791C.1
atggcgagacgggcacggcggcgacgggtggcgggcacggtgcagccgcgcaggccgaccggccagtctggggacgcgatggatcggcaatggatgtacgctgaccggcggtccaaagagtttatcgacggcgtgcagtattttttgagagtggccgaagctaacaggcaaaggggttttatttgttgtccatgcaataagtgtaagaatcagaaggagtattctgcatccaggactattcatttctacttgtttgagtcggggttcatgccaagctataattgttggacatcccacggagagcaaggtgttgaaatggaagaagatgaagtggaagacgacaatattccggactttgctcagtatgttggatttgaaggaaatcaaacgggcgaggaggaaatagctgctgatggtaacgacgttgcggatgatcttagtcagatgttgcaggatgccagggatgattgcgaaagtgaaaaggaggcccataaattggacaagatgttggaggaccacagaacttcgttgtacccaggttgcgagcaggggcacaaaaagttggataccactggggttagtgacaaggcatttggcgatttattgaaactcgtcaagaacattcttccggggggaaacaaattgcccgagacaacgtacgaggctaagaagatagtctgcccgttaggactggaagttcataagattcacgcatgtccgaacgattgtatcctataccacggtgaggagtatgagaacctagaagcatgccctgtttgcaaagcactacgatacaagattagacgggacgatccaggagaagttgacgggcagctaacaaagaagagaattcatgctaagtggcgaaacatcgacagaaaatttaaagaatttggaaaggacgcacgaaacatacggtttggtttgagtacggatggcatgaatccttttggagagatgagcagcggccatagcacttggcccgttacgatgtgtatctacaacctccccccctggctatgcatgaagaggaagtacataatgaagccgattattattcaaggccccaagcaacctggtaacgacatcgacgtgtacctaagaccactagtcgaagatcttaaacagttgtggaagaaggaaggtgtccccgtgtgggacgaggacaaacaggaggagtttaacctacgagcgctgctgttcgtaaccatcaacaattggcctgcacttagcaacctatccggacagtccaacaaggggtacaaggcttgcactcactgtatggatgaaacagaaagtacgtatcttaagcactgtaggaaggttgtatacatgggtcatcgtcgattccttgcagcaaaccacccggtacggaagaaaggcaagcacttcgaacataaggccgaccaccgtacgaagcctaaacatcgcagcgggaaaacagtgtttgctatggttaaagatcttaaagtagtgttcggaaaggggcctggaagccagcctatagagagcgaagatggtcacgcggcgatgtggaaaaagaactctatattttgggaattaccatattgggaattcttggacgtacgccacgcaatcgacgcgatgcacctcactaagaacctttgcgtaaatcttcttggcttcctaggtgtatacggaaagtcgaaagatacactggaagcacgtaatgatctgaagcatatggaacaacgcggcgaccttcacccggaaccaaaggagaaaggaagccattacttgagtccagccagctacactcttagcaaggcagagaaggaaagtatgtttgaatgcttggagagcataaaggtaccgtctggatactccacaaatatcaagcgaataataagcacgaaggagaagaagttcacaaacctaaagtctcatgactgtcacgtgttgatgacacaactgctaccagttgtaataaggggtatccttccagacaatgtccgggcaacaataacaaagctatgtgcattcatgaacgcaatttcgcagaaggtcatcgatccggatagattagaagcccttcagaatgaagtggtgcaatgtctcgtcagttttgagttgatatttccaccttcatttttcaatataatgacgcatctgctttgtcaccttgtgaaagagatcaatattctcgggcctatgtacctacacaacatgtttcctctcgagaggtacatgggcgttctgaagaagtatgttcgtaaccgtgctcgtccagaggcaagcatcgccaagggttatggaacagaggaggtcatcgaattttgcgtagaatttatcgaagaccttcgcccaatcggggtacctgaatcacgccatgaagggagactacggggaaagggaactctcggaaggaaagcaataatgacggtagacaacaatttattccgtaaagcccatttcactgttctgcaacactcttcattggtagctccttacatcgaggagcacttggctctagttcgcgccaggaacatcggtaagtccgatgcatggattacacggcatcacattgatactttccccgcgtggctacgacaacatctcatgggtaacgagtcgatcaaccaacaacttgccttcctggcgaggggaccgtctgggtcgatcgcgacattccagggatatgagatcaatgggtatacattctacacgagagcccaagacatgaagagcacgaaccaaaacagcgctgttcgtgtcgatgccatgggacacgatggaacaactgccacgtattacggtgccatcgaggacatatgggaacttgactatggtcctctcaaggttcctctgttccggtgccaatgggttaggttgactggtggaggcgtaatgattgatgacagtgggatgacaactgttgaccttaacaaggttggatactcggacgaaccttttgtccttgccaatgatgtaacgcaagtctttttcgtgaaggacatgtctagtaaaggaaagaagggtagagggcctgatgagcctaagcgtcaagtggttctcccaggcaaaagaaaaatcgtcggagttgaggacaagactgacgaggattacgatcagttggatgggcaaccccctttcacggtgacgattgaccctagcatcctcctatcaaatgaagacaccccttactcacgcagcgatcacaaggagggaacaatagtgaggagaaagtacgtgcggtcaaccgtcaccgtcgatgtaatgccgtaa

SEQ ID NO: 16002 - DNA, 1302 bp, Oryza sativa
  Clone ID: PAT_MRT4530_21792C.1
atggcgatcatcggagggccatcgctcggtgcggctacctctgctgcaccaggcgatgatatggatgccaacgctgtagtgcatgcagcaaggttcaggaaagaaagaaccatggctagtggtgccacccgagctgcagagcgcaagaagaggagagccttacatcatatggctacggcggttggtccaacaccaaatcaggttctcatgcctattccggcagtgacaagtccaccaagccttctggtaaaaaccagcacgaacgttgctcccagccgaaccactgcaccaaacttggccattatactcgttccagttaccacaagcgcacctaggaaagcctctgcatcaagccctacaaaggtaccgatcttacctgttgtacccattctgaccatcatggacacacctagtctaaacaccacatcaagcctggctaccggaccaagctcggctgcagcgttggccgctagaagcacacttagctctggtggcaagcccattgtagtccgcgctacgacgttcaagaaggatagatctagggcaggcgctgccactcgcgccgcagagtgcaagaagaaaaaagccatgttgcaaacatctgtggtatctattcaagctgttgcaccaggccctactgctaaggttatcccggccaccacaagcaaaaggaacccggtcgttgcacccagcatgcccattgctttcagtcgggtcgatgaaatgagtccaccaaacacaccaagttttgatcttgtgctcacattggctgccacggaccagcccaaaactactaatgggtccactgctcagagaaacaaggtatcaaagagcacagaaaacttaaatctcgagctaaccttagtaggtgctcgacgaggttccctagccctgccccctcctttgccgtgcgcgccgagccgtcccgagttccgcgccaccgtcgccgctgccgcgccgcacgccgtcgccgtcgcgttccgtcacgccttgcgccgcgagcccgccgcctcgcgccccgagccccgcgcgccgtgcgccgtcccgtcaccgcctgtcgccctcgcgcctgcgccccgccgcgtggccgtcccatcgccgtcgcctggccgtcccatcgccgtcgccctgcgccgttgccacgccgcccgtcccatcgcgccgagccctgtgccgccgcacgcgtcgcgtcgccccgcctgtcacgccgctcgccgctcgcccgtcgccgtcgcctcgagccccacgcgtcgcgccgtcgcatcgccattagggccggccacccctccccgcgacctataa

SEQ ID NO: 16003 - DNA, 3144 bp, Oryza sativa
  Clone ID: PAT_MRT4530_21793C.1
atggcggtggccatcttctacctcctccacaaaaagaacgagatccatggttatacggccttcaccatctacgtcgtcctcacgtactgcttcctcgacttcctcatgccgtgtgttgccgcggtgggcgccgcgcttggcatggagctggagccgcagttcgacaggccgtacctctctgcctcgctgctggacttctcgggaaggcggtggaaccttatggcgtcggcgatgctccgcccggcggtgtacgaccgtgttagggcccgcctcggtgcaccgggcggcgtgctctccacgttcctcgtgtctgggctgatgcacgaggtgatcgcgtactacatctccttccgcgcgcccaccgggcagatggatcggcaatggatgtacgctgaccggcggtccaaagagtttatcgagggcgtgcattatcttttgagagtggccgaagctaacaagcgtaacggttttatttgttgtccatgcaataagtgtaagaaccagaaggagtattctgcatccaggattattcatttccacttgtttgagtcggggttcatgccaagctataattgttggacatcccacggtgaggaaggggttgaaatggaagaagatgaagcggaggacgagaacattcccgactgggctcagtacgctggatttgaaggaaatcaaacgggcgaggtggacagggatgctggcgataacgacactgcagatgatcttggtcagatgttgcaggacgcaaaggaggactgtgaaagtgaaaaggaggcccataaattagagcggatgttagaggaccacagaacatcattgtccccaggttgcgagcgggggcacaaaaagttggataccactctggagttcttgcaatggaaggcaaaaaatggtgttagtgacaaggcatttcgcgatttattgaaactcatcaagaacattcttccggagggaaacaaattgcccgagacaacgtacgaggctaagaagatagtctgccctctaggattggaagttcagaagattcacgcatgtccgaatgattgtatcctatatcacggtgaggagtacgagaacctagaagcatgccctgtttgtaaagcactacgatacaagattagacgagaggatccaggtgaagttgacgggcagccaacaaagaagagaattcctgctaaggaaggtgtccccgagtgggacgaagataagcaggaggagtttaacctacgagcgctgctgttcgtaaccatcaacgattggcctgcatttagcaacctttccgggcagtccaacaaggggtacaaggcttgcactcactgtatggatgaaacagaaagtacgtatcttaagcactacaggaaggaattcttggacgtctgccatgcaatcgacgtgatgcacctcactaagaacctttgcgtaaaccttcttggtttcctaggtgtatatggaaagtcgaaagatacactagaagcacgtaatgatctgaagcatatggaacaacgcagcgaccttcacccggaaccaaaggagaaaggaagccattacttgagtccagccagctatactcttagcaaggcagagaaggaaagtatgtttgaatgcttggagagcatagaggtaccgtctggatactccacgaatataaagcgaataataagcacgaaggagaagaagttcacaaacctaaagtctcctgactgtcacgtgttgatgacacaactgctaccagttgtaataaggggtatccttccagacaatgtccgggcaacaataacaaagctatgtgctttcatgaaagcaaatttgcagaaggtcatcgatccggatagattagaagcccttcagaatgatgtggtgcaatgtcttgtcagttttgagttgatatttccaccttcatttttcaatataatgacgcatctgctttgtcaccttgtcaaagagatcggtattctcgggcctgtgtacctacataacatgtttcctttcgagaggtacataggcgttctgaagaaatatgttcgtaaccgtgctcgtccagaggcaagcatcgccaaggggtatggaacagaggaggtcatcgaactctgcgtagaatttattgaagaccttcgcccaatcggggtacctgaatcatgccatgaagggagactacggggaaaggtggttctcggaaggaaagcaagaatgacggtagacaacaatttattccgtaaagcccatttcacggttctgcaacaatcttcattggtggctccttacatcgaggagcacttggctctagttcgcgccagaaacatcggtaagtccgatgcatggattacacggcatcacattgatactttccccgcgtggctacgacaacatctcatgggtaacgagacgattaaccaacaactggccttcctggcgagaggaccatctggctcgatcgcgacattctagggatatgagatcaatgggtacacattctacacgagagcccaagacatgaagagcatgaaccaaaacagcgctgttcgtgtcgataccatgggacacgatggagcaactagcacgtattacggtgccatcgaggacatatgggaacttgactattgtcctctcaaggtccctctgttccggtgccatgggttaggttgactggtggaggcgtaatgattgatgacagtgggatgacaacggttgaccttaacaaggttggatactcggacgaatcttttgtccttgccaatgatgtaacgaaagtctttttcgtgaaggatatgtctagcaaaggaaagaagggcagagggcctgacgagcctaagcgtcacgtggttctcccaggcaaaagaaaaatcgtcagagttgaggacaagactgacgaggattacgatcagttggatgggcaaccccctttcacggtgacgattgaccctagcatcctcctatcaaatgaagacaccccttactcacgtagcgatcacaaggagggaaccatagtgaggagaaagtacgtgcggtcaaccgtcaccgcggatgtattgccgtaattatttgtgtacaccgatgtaaactattttggatgtattgattatccatataaatcaattgatgtatggcatatgttaattacgccaaaaaaaaaaaaaaaaaaaa

SEQ ID NO: 16004 - DNA, 245 bp, Oryza sativa
  unsure (1)..(245): unsure at all n locations
  Clone ID: PAT_MRT4530_21794C.1
tagttcataccatgagacaagaaggcaaatgaagtcaccaatgatggattcttcnnagaaattaaaatnttcaaaccagttcncaacttcacacataaaaagacagaaatatcagtgaactattgaatgnaaattttcatataagtgcagtactgaataagacaaatttnagtagccagcatactattaacataaatgatgnnagcagaatatataagntacatgtatggnaaccagccaacaag

SEQ ID NO: 16005 - DNA, 3810 bp, Oryza sativa
  Clone ID: PAT_MRT4530_21795C.1
atggcgggggaaataagacggcggggaagaggggacaacgcaatggggcgcctgaagaggacggtggcatggaagcggaggagagggcggcgcggtcgaagccgaagatgcagtggcgaagatggccatggtggggaaatacgatggtacggcccaattttcaggacaaacataattgctcaagacatgatcgtgtcccttgatccggagctgaacaacttggtgttccaacaagaggagaggctcttccagtgttggtacccgaactcattcatgagagtcttcggtgcagatagcatcatcacgacgttcgggtcctcacacaggcacgtcaggaacctggtcctccggctcttcggccctgaaaacctcaggcgagcaatgctccaggagatgcagaaaacggctcaggccagcctgctctcctggcttgatcgtccgagcatcgaagtgaaagaagaagtctcaagtggacgaaaaaatgtcatgaggatgttgagagaattgctcgacgagaggaagaagaagacagcacatcaattggaaagcatcgacttcttcgatgctttgattgatgagctgaagcaggagaagcctgcagtgagtgagaacgtcgcgttggatctgctcttcttgctgttgttcgctagcttcgagaccacctcatccgggatcaccgcgatactcaggtttctaacggacaatccaatggctttggaagaactaacagaggagcatgatcgcatcctgaaacgaaaggccgatccaaactcccaaatcacatgggaggaatacaagtctatgaaattcacatctcatgctttgaggctggctaacatcgctcctgtagtgtttaggaaagccagacaggatgttcatataaaaggctacactatcccaaaaggatcaaagatcatgcttagtccttccaatattcatctgaatcctacggtatataaggaccccaatgaattcaatccttggagatggaaggtaaaaaatggtgttagtgacaaggcatttggcgatttattgaaactcgtcaagaacattcttccggagggaaacaagttgcccgagacaacgtacgaggctaagaagatagtctaccctctaggactggaagttcagaagattcatgcatgtccgaatgattgtatcctatatcgtggtgaggagtacgagaacctagaagcatgccctgtttgcaaagcactacgatacaagattagacgagatgatccaggagaagttgacgggcagctaacgaagaagagaattcctgctaaggtgatgtggtattttcctataataccacggctaaggcgtttgttcaggaacaaggggaatgctagaatgatgcgatggcacgctgaagagcgtcaacaggacgggatgctgagacaccccgccgatgattcgcagtggcgaaacatcgacagaaaatttaaagactttggaaaggacgcacgaaacatatggtttggtttaagtacagatggcatgaatccttttggagagatgagcagcggccatagcacttggcccgttacgatatgtatctacaacctcccccgttggctatgcatgaagaggaagtacataatgatgccgattataattcaaggccccaagcaacctggtaacgacattgatgtgtaccaaagaccactggtcgaagatcttaacctgttgtggaagaaggaaggtgtccccgtgtgggatgaggacaaacagaaggagtttaacctacgaactctgctgttcgtaaccatcaacgattggcctgcacttagcaacgtatccgggcagtccaacaaggggtacaaggcttgcactcactgtatggatgaaacagaaagtatgtatcttaagcactctaggaaggttgtgtacatgggtcatcgtcgattccttgcagcaaaccacccggtacggatgaaaggcaagcactttgaatataaggcggaccaccgtacgaagcctaaacatcgcagcgggaaaacagtgtttgctatggttaaagatcttaaagtagtgtttggaaaggggcctggtagccagcctatagagagcgaagatggtcacgcggcgatgtggaaaaagaactctatattttgggagttaccctattgggaattcttggacatccgccacgcaatcgatgtgatgcacctcactaagaatctttgcgtaaaccttcttggcttcccaggtgtatatggaaagtcgaaagatacactggaagcacgtaatgatctgaagcatatggaacaacgcggtgaccttcacccggaaccaaaggagaaaggaagccattacttgagtccagctagctacactcttagcaaggcagagaaggaaagtatgtttgaatgcttggagagcatcaaggtaccatctagatactccatgaatataaagcgaataataagcacgaaggagaagaagttcacaaatctaaagtctcatgactgtcacgtgttgatgacacagctgctaccagttgtaataaggggtatcctcccaaacaatgtccgggcaacaataacaaagctatgtgctttcatgaacgcaatttcgcagaaggtcatcgatcctgatagattagaagccctgcagaatgatgtggtgcaatgtcttgtcagctttgagttgatatttccaccttcatttttcaatataatgacgcatctgctttgtcaccttgtcaaagagatcggtattttcggtcctttgtacctacacaacatgtttcctttcgagaggtacatgggcgttctgaagaggtatgttcgtaaccgtgctcgtccagaggcaagcatcaccaaggggtatggaacagaggagatcattgaattctgcgtagaatttatcgaagaccttcgcccaatcggggtacctgaatcacgccatgaagggagactacggggaaagaggactctcggaaggaaagcaataatgacagtagacaacaatttattccataaagcccatttcacggttctgcaacaatcttcattggtggctccctacatcgaggagcacttggctctagttcgcgccagaaacatcggtaagtccgatgcatggattacaaggcatcacattgatactttctccacgtggctgaaacaatatctcatgggtaatgagacgattaaccaacaactggccttcctggcgaggggaccatctggctcgatcgcgacattccaaggatatgaaatcaatgggtacacattctacacgagggtccaagacatgaagagcacgaaccagaacagtgctgttcgtatcgatgccatggaacacgatagtacaactggcacattttacggtgccatcgaggacatatgggaacttgactatggacctctcaaggtctctctgttccggtgccaatgggttaggttgactggtggaggcgtaacgattgatgacagtgggatgacaacggttgaccttaacaaggttggatactcggacgaaccttttgtccttgccaatgatgtaacccaagttttttacgtcaaggacatgtctagcaaagaaaaaaagggcaaagggcctgacgagccgaagcgccacgtggttctcccaggaaaaagaaaaatcgttggagtagaggacaagactgacgaggattacgatcagtttgatgggcaaccccctttcatagtgacaattgaccctagcatcctcctatcaaatgaagacaccccttactcacgtagcgatcacaaggaaggaacaatagtgaggagaaagtacgtgcggtcaaccgtcaccgctgatgtattgccgtaa

SEQ ID NO: 16006 - DNA, 3057 bp, Oryza sativa
  Clone ID: PAT_MRT4530_21796C.1
atggatcggcaatggatgtacgctgaccggcggtccaaagagtttattgacggcgtgcactattttttgagagtggccgaagctaacaggaaaaggggttttatttgttgtccatgcaataagtgtaagaatcagaaggagtattctgcatccaggactattcatttccacttgtttgagtcggggttcatgccaagctataattgttggacatcccacggagagcaaggtgttgaaatggaagaagatgaagtggaagacgacaatattccggactttgctcaatttgttggatttgaaggaaatcaaacgggcgaggaggaaatagctgctgatggtaacgacgttgcggatgatcttggtcaaatgttgcaggacgccagggaggactgcgaaagggcacaaaagttggataccactctggagttgttgcaatggaaggcaaaaaatggggttagtgacaaggcatttggcgatttattgaaactcgtcaagaacattcttccggggggaaacaaattgcccgagacaacgtacgaggctaagaagatagtctgcccgttaggactggaagttcataagattcacgcatgtcgggggaaaacggattgtatcctatatcgcggtgaggagtacgagaacctagaagcatgccctgtttgcaaagcactacgatacaagattagacgggacgatccaggagaagttgacgggcagctaacaaagaagagaattcctgctaaggtgatgtggtatttccctataataccacggctaaggcgtttgttcaggaacaaggggaatgctagaatgttgcgatggcacgctgaagagcgtcaacaggacgggatgctgagacaccccgccgatggttcgcagtggcgaaacatcgatagaaaatttaaagaatttggaaaggacgcacgaaacatacggtttggtttgagtacggatggcatgaatccttttggagagatgagcagcggccatagcacttggcccgttacgatgtgtatctacaacctccccccctggctatgcatgaagaggaagtacataatgatgccgattattattcaaggccccaagcaacctggtaacgacatcgacgtgtacctaagaccactggtcgaggatcttaaacagttgtggaagaaggaaggtgtccccgtgtgggacgaggacaaacaggaggagtttaacctacgagcgctgctgttcgtaaccatcaacgattggcctgcacttagcaacctatccggacagtccaacaaggggtacaaggcttgcactcactgtatggatgaaacagaaagtacgtatcttaagcactgtaggaaggttgtatacatgggtcatcgtcgattccttgcagcaaaccacccggtacggaagaaaggcaagcacttcgaacataaggccgaccaccgtacgaagcctaaacatcgcagcgggaaaacagtgtttgctatggttaaagatcttaaagtagtgttcggaaagggccctggaagccagcatatagagagcgaagatggtcacgcggcgatgtggaaaaagaactctatattttgggagttaccatattgggaattcttggacgtacgccacgcaatcgacgtgatgcacctcactaagaacctttgcgtaaaccttcttggcttcctaggtgtatacggaaagtcgaaagatacactggaagcacgtaatgatctgaagcatatggaacaacgcggcgaccttcacccggaaccaaaggagaaaggaagccattacttgagtccagccagctacactcttagcaaggcagagaaggaaagtatgtttgaatgcttggagagcataaaggtaccgtctggatactccacgaatatcaagcgaataataagcacgaaggagaagaagttcacaaacctaaagtctcatgactgtcacgtgttgatgacacaactgctaccagttgtaataaggggtatccttccagacaatgtccgggcaacaataacaaagctatgtgcattcatgaacgcaatttcgcagaaggtcatcgatccggatagattagatgcccttcagaatgaagtggtgcaatgtctcgtcagttttgagttgatatttccaccttcatttttcaatataatgacacatctgctttgtcaccttgtgaaagagatccgtattctcgggcctatgtacctacacaacatgtttcctttcgagaggtacatgggcgttctgaagaagtatgttcgtaaccgtgctcgtccagaggcaagcatcgccaagggttatggaacagaggaggtcatcgaattttgcgtagaatttatcgaagaccttcgcccaatcggggtaccggaatcacgccatgaagggagactacggggaaagggaactctcggaaggaaagcaattatgacggtagacaacaatttattccgtaaagcccatttcactgttctgcaacactcttcattggtagctccttacatcgaggagcacttggctctagttcgcgccaggaacatcgcccaagacatgaacagcacgaaccaaaacagcgctgttcgtgtcgatgccatgggacacgatggaacaactgccacgtattacggtgccatcgaggacatatgggaacttgactatggtcctctcaaggttcctctgttccggtgccaatgggttaggttgactggtggaggcgtaatgattgatgacagtgggatgacaactgttgaccttaacaaggttggatactcggacgaaccttttgtccttgccaatgatgtaacgcaagtctttttcgtgaaggacatgtctagcaaaggaaagaagggcagagggcctgatgagcctaagcgtcaagtggttctcccaggcaaaagaaaaatcgtcggagttgaggacaagactgacgaggattacgatcagttggatgggcaaccccctttcacggtgacgattgaccctagcatcctcctatcaaatgaagacaccccttactcacgcagcgatcacaaggagggaacaatagtgaggagaaagtacgtgccgtaa

SEQ ID NO: 16007 - DNA, 4887 bp, Oryza sativa
  Clone ID: PAT_MRT4530_21797C.1
atggaagaagatgaagtggaagatgacaatattccggactttgctcagtacgttggatttgaaggaaatcaaacgggcgaggaggaaagggatgctgatggtaacgacgttgcggatgatcttggtcagatgttgcaggacgccaaggaggactgcgaaagtgaaaagggggcccataaattggacaagatgttagaggaccacagaacgtcgttgtacccaggttgcgagcaggggcacaaaaagttggataccactctggagttcttgcaatggaaggcaaaaaatggggttagtgacaaggcatttggcgatttactgaaactcatcaagaacattctcccggagggaaacaaattgcccaagacaacgtacgaggctaagaagatagtctgcccgctaggactggaagttcagaagattcacgcatgtccgaatgattgtatcctatatcgcggtgaggagtatgagaacctagaagcatgccctgtttgcaaagcactacgatacaagattagacgagacgatccaggagaagttgacgggcagctaacaaagaagaaaattcctgctaaggtgatgtggtatttccctataataccacggctaaggcgtttgttcaggaacaaggggaatgctagtatgatgcgatggcacgctgaagagcgtcaacaggacgggatgctgagacaccccgccgatggccccaagcaacctggtaacgacatcgatgtgtacctaagaccactggtcgaagatcttaaactgttgtggaagaaggaaggtgtccccgtgtgggacgaggacaaacaggaggaatttaacctacgagcgctgctgtttgtaaccatcaacgattggcctgcacttagcaacctatccggacagtccaacaaggggtacaaggcttgcactcactgtatggatgaaacagaaagtacgtatcttaagcactgtaggaaggttctatacatgggtcatcgtcggttccttgcagcaaaccacccggttcggaagaaaggcaagcacttcgaacataaggctgaccaccgtacgaagcctaaacatcgcagcgggaaaacagtgtttgctatggttaaagatcttaaagtagtgttcggaaaggggcctggaagccagcctatagagagcgaagatggtcacgcggcgatgtggaaaaagaactctatattttgggagttaccctattgggaattcttggacgtccgccacgcaatcgacgtgatgtaccttactaagaacctttgcataaaccttcttgacttcctaggtgtatacggaaagtcgaaagatacactggaagcacgtaatgatctgaagcatatggaacaacgcgacgaccttcacccagaaccaaaggagaaaggaagccattacttgagtccagccagctacactcttagcaaggcagagaaggaaagtatgtttgaatgcttagagagcataaaggtaccgtctagatactccacgaatatcaagcgaataataagcacgaaggagaagaagttcacaaacctaaagtctcatgactgtcacgtgttgatgacacaactgctaccagttgtaataaggggtatccttccagacaatgtccgggcaacaataacaaagctatgtgtattcatgaacgcaatttcgcagaaggtcatcgatccggatagattagaagctcttcagaatgatgtggtgcaatgtctcgtcagttttgagttgatatttccaccttcatttttcaatataatgatgcatctgctttgtcaccttgtcaaagagatcagtattctcgggcctgtgtacctacacaacatgtttcctttcgagaggtacatgggcgttctgaagaagtatgttcgtaaccgtgctcgtccagaggcaagcatcgccaagggttatggaacagaggaggtcatcgaattttgcgtagaatttattgaagaccttcgcccaatcgggatacctgaatcacgccatgaagggagactacggggaaagggaactctcggaaggaaagcaataatgacggtagacaacaatttattccgtaaagcccatttcacggttctgcaacaatcttcattggtagctccttacatcgaggagcacttggctctagttcgcgctaggaacatcggtaagtccgatgcatggattacacggtatcacattgatactttccccgcgtggctacaacaacatctcatgggtaacgagtcgatcaaccaacaacttgccttcctggtgaggggaccgtctgggtcaatcgcgacattccagggatatgagatcaatggatacacattctacacgagagcccatgacatgaagagcacgaaccaaaacaacgctgttcgtgtcgatgccatgggacacgatggaacaactggcacgtattacggtggcatcgaggacatatgggaacttgactatggtcctctcaaggtccctctgttccggtgccaatgggttaggttgactggtggaggcgtaatgattgatgacagtgggatgacaactgttgaccttaacaaggttggatactcggacgaaccttttgtccttgccaatgatgtaacgcaagtcttttacgtgaaggacatgtctagcaaaggaaagaagggcagagggcctgatgagcctaagcgtcacgtggttctcccaggcaaaagaaaaatcgtcggagttgaggacaagactgacgaggattacgatcagttggatgggcaaccccctttcacggtgacgattgaccctagcatcctcctatcaaatgaagacaccccttactcatgtagcgatcacaaggatggaacaataatgaggagaaaaaaagacgttgtcagagttgtccctcaagccggagtgatggctgatcgcgatgaggaacagatattgtatgatacaatcgcggagggaagcagccagtactggaatgaagaagaggggaacgaggatccaaaccagtatttgaacgaggaagggaacaagggggcacgcggacaacgaggtgccgcgaagaagcttgagggtcggcacatcataacggaagtggacgaagatggccgacctagtgccccggcagaagccgccaagaactatgtacgtcacaacggttgggttgtgcgggataacgtgcctgtcagtacggtgtactggcgcagaacaagggcacgcggagatcatgagagctttgtcccagattcggagaaagagatgctgtggaccacaatgctcgagatattcacccttcctgcgggtacagaggacaaagtgaaaaggtggactctgaagaaaatggcagaacagtttcagagcttcaagggagatctgtaccagaaatatatcctgaaggggcagacaccgaacttcgacacattcccaaagctaagggatcactgggacgagttcgttgcatataagacaggtgaacaagggcaggcgatgatggaaaggaacaaagaaaatgccgccaagaagaagtaccatcaccacttggggtcaggcggctatagcgtcgcgatgccgaagtgggaggagatgaaggctagcttgcttgagaggggtatcgaaccggccaccgctaattggccggaacgattgaagttctggtactatgctcacggtggaacactcaacccagctgatggctccctgggcacgttccgaccggacagagagaaggacgagctgtcactcgccctgcagactccagagcatccaggacgaacacgagggaaaggggtgattccttggaagattgggttcaaggaggacatccacacgtacaggagtcggatgaggagcaagagagatactgaggagaagattgcagatctagagttcagggtatcgagctacgagctcagcatgcaacaggaggtggcaaggaaggttgatgaacgcatggccgcacatcggtcccatgatccccagccgaccattcttcctgcaatggtgagcccatcaggaaaccgtagcagttgcgcctcaacggggcaagtaggatcgcagagcatggacgccatgcaaacccaggacgaaaccacctgccccgttgatgacatcactcaacggacactatgtgagctgcatattcccttcaagaacctatcaataaaggtggcgtcgggcatggccatcccaacggacccttcagatacttaccactacaggctgattccagcaggatacttcaaggtcgaagttgagttggtcgaaggcgcgtacaaggacctcgagctggattaccctggaggagacggtgagacgcatctacgagacacaagccacgccattattctatggcgcaagcggtacatcatcctccctgggcaacaagcggtgtctcgtgcaccatctcctccggctctgccatctcctcctcaggctcctacaccgtctcctcttcatgctccagcaccgtctccacctcaggctcctgcactgactcctcctcaggctcctgcaccgaatcctcctcaggctcctgcaccaactcctcctcaggctcctacaccgactcctccgcaagctcctcttccagcaccttccaagtcaagggccccccaagctccaccgcctgcccccacaagggcaacgaagaaggcgaaagttgacaccgccaagaataaggacctggggtacgattgcacgcaagaggagcttgacgcttacgtggcatcagaagtcaagagacaattcaagcctcgaagtccagaaaagaagattcctatagacccgagtgtcaggaacttcttcaggggtatgtctgcacctgccaaggaggccataaagctatcggactatgagcgaacactcaagaaagcatcttctggaaagtccaaaccagtccctcagcttggagagtaa

SEQ ID NO: 16008 - DNA, 2514 bp, Oryza sativa
  Clone ID: PAT_MRT4530_21798C.1
atggaagaagatgacaatattccggactttgctcagtatgttggatttgaagaaaatcaaacgggcgaggaggaaatagctgctgatggtaacgacgttgcggatgatcttggtcagatgttgcaggacgccagggaggactgcgaaagtgaaaaggaggcccataaattggacaagatgttggaggaccacagaacttcgttgtacccaggttgcgagcaggggcacaaaaagttggataccactctggagttcttgcaatggaaggcaaaaaatggggttagtgacaaggcatttggcgatttattgaaactcgtcaagaacattcttccggggggaaacaaattgcccgagacaacgtacgaggctaagaagatagtctgcccgttaggactggaagttcataagattcacgcatgtccgaacgattgtatcctatatcgcggtgaggagtatgagaacctagaagcatgccctgtttgcaaagcactacgatacaagattagacgagacgatccaggagaagttgatgggcagctaacaaagaagagaattcctgctaaggtgatgtggtatttccctataataccacggctaaggcgtttgttcaggaacaaggggaatgctagaatgttgcgatggcacgctgaagagcgtcaacaggacgggatgctgagacaccccgcccatggttcgcagtggcgaaacatcgatagaaaatttaaagaatttggaaaggacgcacgaaacatacagtttggccccaagcaacctggtaacgacatcgatgtgtacctaagaccactggtcgaagatcttaaacagttgtggaagaaggaagcaaaccacccggtatggaagaaaggcaagcacttcgaacataaggccgaccaccgtacgaagcctaaacatcacagcgggaaaacagtgtttgctatggttaaagatcttaaagtagtgtttggaaaggggcctggaagccagcctatagagagcgaagatggtcacgcggcgatgtggaaaaagaactctatattttgggagttaccatattgggaattcttggaccatatggaacaacgcggcgaccttcacccggaaccaaaggagaaaggaagccattacttgagtccaggcagctacactcttagcaaggcagagaaggaaagtatgtttgaatgcttggagagcataaaggggtatccttccagacaatgtccgggcaacaataacaaagtatgtgcattcatgaacgcaatttcacagaaggtcatcgatccggatagattagaagcccttaagaatgaagtagtgcaatgtctcgttagttttgagttgatatttccaccttcatttttcaatataatgacgcatctactttgtcaccttgtgaaagagatccgtattctcgggcctgtgtacctacacaacatgtttcctttcgagaggtacatgggcgttctgaaaaagtatgttcgtaaccgtgctcgtccagaggcaagcatcgccaagggttatggaacagatgaggtcatcgaattttgcgtagaatttatcgaagaccttcgcccaatcggggtacctgaatcacgccatgaagggagactacggggaaagggaactctcggaaggaaagcaataatgagggtagacaacaatttattccgtaaagcccatttcactgttctgcaacactcttcattggtagctccttacatcgaggagcacttggctctagttcgcgccaggaacatcggtaagtccgatgcatggattacacggcatcacattgatactttccccacgtggctacgacaacatctcatgggtaacgagtcgatcaaccaacaacttgccttcctagcgaggggaccgtctgggtcgatcgcgacattccagggatatgagatcaatgggtacacattctacacgagagcccaagacatgaagagcacgaaccaaaacaacgttgttcgtgtcgatgccatgggacacgatggaacaactgccacgtattatggtgccattgaggatatatgggaacttgactatggtcctctcaaggttcctctgttccggtgccaatgggttaggttgtctggtggagacgtaatgattgatgacagtggtatgacaactgttgaccttaacaaggttggatactcggacgaaccttttgtccttgccaatgatgtaacgcaagtctttttcgtgaaggacatgtctagcaaaggaaagaagggcagagggcctgatgagcctaagcgtcaagtggttctcccaggcaaaagaaaaatcgtcggagttgaggacaagattgacgaggattacgatcagttggataggcaaccccctttcacggtgacgattgaccctagcatcctcctatcaaatgaagacaccccttactcacgcagcgatcacaaggagggaacaatagtgaggagaaagtacgtgcggtcaaccgtcaccgccgatgtaatgccacgatgtaaactattttggatgtattga

SEQ ID NO: 16009 - DNA, 441 bp, Oryza sativa
  Clone ID: PAT_MRT4530_21799C.1
atgagcttcctcgcttatgtgaggaaaataacaaaggagcaccagccctcaggagttaaataccaaaatgctgaggcagaggttggacgagatatagaaatacaacctcgctgccactgttgctatgtggaattcgtggacgtagtaatggtagaagataagagcagagcaaaagaacacattaagctgcaggaatcatgtgttggatacatttactccctccaatcacaagtatgtcctgttggctgtagggcatcgacacagtcccaagactgcaacttgactgataatttctattttaatatatttccaagtgcagctacagctttggagaaaccaattccgtgtgcagttggaaatacacttgcctgtgatgaatttgatgaagtgaaaaccttaagttcaggtgatgaaagatggtttgctccggtggctgcatga

SEQ ID NO: 16010 - DNA, 555 bp, Oryza sativa
  Clone ID: PAT_MRT4530_2179C.1
ccgggctgcaggcgagatcctcaaggagtgcccgggccagtactacaggtaccacggcgattggaggagcgagacgcaggcggtggtgtcgatgctcgccttcatgcactggcttgagaccggcggcctcctcatgcacgccgaggcccaggagaagctaggattgagctccggggagtttggcctggatgttgaagattaccttactggattgtgcttcatgtccaacgatttcccgagatatgtagtgaaccgtgtcactgctggagactatgactgtccaagaaaggtgttgtcatttctgacagaccttcatgcttcatttaggatgctgaacctgcgcaatgactttctacgtaagaagtttgatgggatgaagtatgatttgaggagggtagaggaggtgtattatgatgtgaagattcgaggacttgtaccaggggagtccaaacaagaggcagcttagcaaaggactggtcgttcctcacccgagttgtttggatccgtcacgcgtttagcaagatccgtcacttgtctaaactgtgctagttcctg

SEQ ID NO: 16011 - DNA, 1950 bp, Oryza sativa
  Clone ID: PAT_MRT4530_217C.1
atgcacgtcggctatggcatcgtcgccgttgtcctcgtcctcttgccgccgtcggccacgccggctgggatcgctgactgcgacgaaggagtcggcaacacgtacgtggccaacagcactttcgaggcgaacctgaacgtcctcgccgcggcgctctcccccaatgtctccgtggctccggccggcttcgctgtcgccaccgtcggcgcggatcccgacaaggtctttgcgatggcgctatgccgcggcgacgtgaacgcctccgcttgcagcgcgtgcgtcgcggcagcgttcgtcgacgggaagaaagattgtcctggaaacagcggcgtcgccatgtacgaggacgcttgcgtagctcgcttctcccgctataggttcatggatttcctcagtccggatcagtggcaggtctcacagatgatttggtatcccgagcaagcctcggcgagcgtcgatgtgccggcggttggctggttcaacgccgccgtcacgaagatcctcgccgccatggtcgaccacgccgtgacctcgacgacggggaactcgaccaccaagaagtatttcgtgacgggtgaggaggagttcgaccccaacatctacgggttcgcgcagtgcgtgccggacctgacgcccgcgcagtgcaacgattgccttaaggacctcctcttctatgcaaaacaagcgtacctcggcaaaagccttagctgggttcgtgtcaattcggtgtggtgcagactgatgtatagtgtgcagccattctaccgaggccgggcgatgctgcaggtctcggcgccaccaccaacagccgaagctcctgttctttctccagagcctgggtcagggaagaaaattagtacagcaggaatcgctgctggcgtcgcttcgtcggttgtggtattgttgatactttcagttttcgcatttgttcgcttcaggaggaggaccaaggttacagacgctgtccacccattgaagaaaataacgagagcacaatgcatgatttttgatctttctgcactgcaagaggcaaccgagaatttctcgccgaataataagcttggcgagggtggttttggtgctgtatacaagggagtgctctcagatggacaagaagtagcagtgaagaaacttttaggaactggtcatggattggaccagctatacaatgagatcaagttgttggctgagcttcagcacaagaaccttgttaggctacagggattttgcttgcatcaggagcagactctgcttgtttacgaatacctcaagaacaggagcctggacaactttctatttgatcccagtagagggaatgccctaaactgggatcaacagtacaacatcattctgggaattgccaaaggaatattgtatcttcacgaggattcaagcttgaggatcattcaccgggatctaaaatcaaacaacattctagttggagatgatatggaaccaaagattgcggactttggattagcaaggctgctaggcgaaggtcatactcattctaagacaactagagttgttggaacatttggttatatggcaccagagtacgcaatagatggaaatgtgtcaaccaagatcgacatttttagctttggtgtgctggtcctcgaaattatcacgaggagaaggaactggcattctgacgatcatgatctcgttagtgatgtttggaattgctggacaaaagggactgctacaaaaatgatttaccagtcgctcaatgggtactctgaaagccaagcattacgatgcatccacattggactactttgtgtccagccagaccccgatgacaggccacacatgtcatctattattttcatgttgaccaaggaaaatatgaagcttcaaccaccagcagaacctgcattctttttgggtagagaatcagcttcctctcctccatcctgtgggcaacacggctataactgtgattga

SEQ ID NO: 16012 - DNA, 3279 bp, Oryza sativa
  Clone ID: PAT_MRT4530_21800C.1
atggccacggcagcgcaaaacgctgagggcgctgcatttcccagttgcggttttggagggtggttttgctcacgtggtgctgacgtggcgagcgggaagaagcagccgctgcaggggctggaccaccgggtgatggtggcgctgatggatcggaaatggatgtacgctgaccggcggtccaaagagtttattgacggcgtgcactattttttgagagtggccgaagctaacaggcaaaggggttttatttgttgtccatgcaataagtgtaagaatcagaaggagtattttgcatccaggactattcatttccacttgtttgagtcggggttcatgccaagctataattgttggacatcccacggagagcaaggtgttgaaatggaagaagatgaagtggaagacgacaatattccggactttgctcagtatgttggatttgaaggaaatcaaacgggcgaggaggaaatagctgctgatggtaacgacgttgcggatgatcttggtcagatgttgcaggacgctagggaggactgcgaaagtgaaaaggaggcccataaattggacaagatgttggaggaccacagaacttcgttgtacccaggttgcgagcaggggcacaaaaagttggataccactctggagttgttgcaatggaaggcaaaaaatggggttagtgacaaggcatttggcgatttattgaaactcattaagaacattcttccggtgggaaacaaattgcccgagacaacgtacgaggctaagaagatagtctgcccgttaggactggaagttcataagattcacgcatgtccgaacgattgtatcctatatcgcggtgaggagtatgagaacctagaagcatgccctgtttgcaaagcactacgatacaagattagacgggacgatccaggagaagttgaccggcagcttacaaagaagagaattcctgctaaggtgatgtggtatttccatataataccacggctaaggcgtttgttcaggaacaaggggaatgctagaatgttgcgatggcacgctgaagagcgtcaacaggacgggatgctgagacaccccgcagatggttcgcagtggcgaaacatcgacagaaaatttaaagaatttggaaaggacgcacgaaacatacggtttggtttgagtacggatggcatgaatccttttggagagatgagcagcggccatagcacttggcccgttacgatgtgtatctacaacctccccccctggctatgcatgaagaggaagtacataatgatgccgattattattcaaggccccaagcaacctggtaacgacatcgacgtgtacctaagaccactggaaggtgtccccgtgtgggacgaggacaaacaggaggagtttaacctacgagcgctgctgttcgtaaccatcaacgattggcctgcacttagcaacctatccggacagtccaacaaggggtacaaggcttgcactcactgtatggatgaaacagaaagtacgtatcttaagcactgtaggaaggttgtatacatgggtcatcgtcgattccttgcagcaaaccacccggtacggaagaaaggcaagcacttcgaacataaggccgaccaccgtacgaagcctaaacatcgcagcgggaaaacagtgtttgctatggttaaagatcttaaagtagtgttcggaaaggggcctggaagccagcatatagagagcgaagatggtcacgcggcgatgtggaaaaagaactctatattttgggagttaccatattgggaattcttggacgtacgccacgcaatcgacgtgatgcacctcactaagaacctttgcgtaaaccttcttggcttcctaggtgtatacggaaagtcgaaagatacactggaagcacgtaatgatctgaagcatatggaacaacgcggcgaccttcacccggaaccaaaggagaaaggaagccattacttgagtccagccagctacactcttagcaaggcagagaaggaaattgtaataaggggtatccttccagacaatgtccgggcaacaataacaaagatatgtgcattcatgaacgcaatttcgcagaaggtcatcgatccggatagattagaagcccttcagaatgaagtggtgcaatgtctcgtcagttttgagttgatatttccaccttcatttttcaatataatgacgcatctgctttgtcaccttgtgaaagagatccgtattctcgggcctatgtacctacacaacatgtttcctttcgagaggtacatgggcgttctgaagaagtatgttcgtaaccgtgctcgtccagaggcaagcatcgccaagggttatggaacagaggaggtcatcgaattttgcgtagaatttatcgaagaccttcgcccaatcggggtacctgaatcacgccatgaagggagactacggggaaagggaactctcggaaggaaagcaataaagacggtagacaacaatttattccgtaaagctcatttcactgttctgcaacactcttcattggtagctccttacatcgaggagcgcttggctctagttcgcgcaaggaacatcggtaagtccgatgcatggattacacggcatcacattgatactttccccgcgtggctacgacaacatctcatgggtaacgagtcgatcaaccaacaacttgccttcctggcgaggggaccgtctgggtcgatcgcgacattccagggatatgagatcaatgggtacacattctacacgagagcccaagacatgaagagcacgaaccagaacagcgctgttcgtgtcgatgccatgggacacgatggaacaactgccacgtattacggttccatcaaggacatatgggaacttgactatggtcctctcaaggttcctctgttccggtgccaatgggttaggttgactggtggaggcgtaatgattgatgacagtgggatgacaactgttgaccttaacaaggttggatacttggacgaaccttttgtccttgccaatgatgtaacgcaagtctttttcgtgaaggacatgtctagtaaaggaaagaagggcagagggcctgatgagcctaagcgtcaagtggttctcccaggcaaaagaaaaatcgtcggagttgaggacaagactgatgaggattacgatcagttggatgggcaacccccttttacggtgacgattgaccctagcatcctcctatcaaatgaagacaccccttactcacgcagcgatcacaaggagggaacaatagtgaggagaaagtacgtgccgtaa

SEQ ID NO: 16013 - DNA, 371 bp, Oryza sativa
  Clone ID: PAT_MRT4530_21801C.1
accctgaaaattcattgatcattattcactcatggaccaaaaacattttttacaccacaagggaacatgagagagcttttgaacccccgggatcaataaatgaatgaatttagggacaaacaaatcacattacaggggggaacagggggagtattaatttattatcaaccccccgcacaaataaatacattttccaaatccaacacttaaaacccgttaaaactgggggggaaaaaaaaaaatactcgggataatagcgggctgtaattcacaacaagggcattttaaaattttaaacgggaaacacaatcattaacatattcttcctagggtacaacacctttacacaggggggtttttcttttttttcc

SEQ ID NO: 16014 - DNA, 182 bp, Oryza sativa
  Clone ID: PAT_MRT4530_21802C.1
agaggaactgctactgatggcatgatcaaggagcttttcatttctttcaagaggactactggacataaacctcaaaggatcatatttgacagcgatggtgccatctatggtcatttttatcaagtgttggtgcatgaacttgatgccattagaaaggcttgagcattcctggaacctaacta

SEQ ID NO: 16015 - DNA, 159 bp, Oryza sativa
  unsure (1)..(159): unsure at all n locations
  Clone ID: PAT_MRT4530_21803C.1
agatgtgtgtcgctgcggtacgaaaaaggatgggtgtgagaggagagagaaagctttgtggatgtctcgcacgaaataccccnacagctctaggccaatcctgacttgatcatcaccaacttcagagacggaatactggcttcttgcttgcttgcacac

SEQ ID NO: 16016 - DNA, 135 bp, Oryza sativa
  Clone ID: PAT_MRT4530_21804C.1
atggatgatcgtaggtacggctactcgtatccaccaccccaagggtactacaatgggccgccggtgatggcgccgccgcagtacgcggctccgccgccgaggcggccggagccgagcttcctcgaaggatggtaa

SEQ ID NO: 16017 - DNA, 476 bp, Oryza sativa
  Clone ID: PAT_MRT4530_21805C.1
gcacgagggtcaagtcgctgctcgacgacgaggccgtcaccgtcggcgggaccaaccacagctggcgttctgccccgggatcatcgtgccggggatctactactccgacgacaagctgctgcagacgaggatcttctcctactccgacacgcagcgccaccgcctcggcccaaactacctgctgctcccgcccaacgcgcccaagtgcgcccaccacaacaaccactacgacggcttcatgaacttcatgcaccgcgacgaggaggtcgactacttcccatcccgctacgatcctgccaagcacgccccccgctaccccatcccctccgccaccctcaccggccgccgcgagaaggtggtgattgccaaggagaacaacttcaagcagccaggggagaggtaccgttcatgggatccggcaaggcaagaccggttcatcaagagatggatcgacgcactctctgaccctcgcctca

SEQ ID NO: 16018 - DNA, 160 bp, Oryza sativa
  Clone ID: PAT_MRT4530_21806C.1
ttttggttttttaaatgatcagggtttttaatttcaattttatgggaggggtgaaccaagactgaaatgattactatattaaaaagatgcagatggaggctgttttgatcgtggtacaaaaggccacagcggggacctacaccaatggatgaaggatcag

SEQ ID NO: 16019 - DNA, 1999 bp, Oryza sativa
  Clone ID: PAT_MRT4530_21807C.1
tcggcacgaggcgtagccccacgtactccacatcatttgagcccggaaagatccgggacgcgacaaagaaactcacaacccagagggttcttctttctcttgtggcctgctagtaagtagggcggtgtgtggcgaccctcgcgagacgttcgtgcgtaacgtgaccgagcgcgccggacgccgtcgtcgttaattaatcagccatggatccctacaagcaccgcccgtcgagctcgttcaacggcccgctgtggagcaccaactccggcgcccccgtatggaacaacaacaactcgctcaccgtcggctcccgaggcccgatccttctggaggactaccacctggttgagaagctggccaacttcgacagggagcgtatcccggagcgcgtggtgcacgcccgcggcgccagcgccaagggcttcttcgaggtcacccacgacatcacccacctcacctgcgccgacttcctccgcgccccgggcgtccagaccccggtcatcgtccgcttctccaccgtcatccacgagcgcggcagcccggagaccctccgcgacccgcgtggcttcgccatcaagttctacacccgggagggcaactgggacctcgtcggcaacaacttccccgtcttcttcatccgcgacggcatgaagttcccggacatggtgcactcgctcaagcccaaccccaagtcgcacgtccaggagaactggcgcatcctcgacttcttctcccaccacccggagagcctccacatgttcaccttcctcttcgatgacatcggcatccccgccgactaccgccacatggacggctccggcgtcaacacctacacgctcgtcaaccgcgccggcaagtcgcactacgtcaagttccactggaagcccacctgcggcgtcaagtcgctgctcgacgacgaggccgtcaccgtcggcgggaccaaccacagccacgccacgcaggacctctacgactccatcgccgccggcaacttcccggagtggaagctgttcatccagaccatcgaccccgaccacgaggaccgcttcgacttcgacccgctcgacgtcaccaagacgtggcccgaggacatcgtcccgctgcagcccgtggggaggatggtgctcaaccgcaacatcgacaacttcttctcggagaacgagcagctggcgttctgccccgggatcatcgtgccggggatctactactccgacgacaagctgctgcagacgaggatcttctcctactccgacacgcagcgccaccgcctcggaccaaactacctgctgctcccgcccaacgcgcccaagtgcgcccaccacaacaaccactacgacggcttcatgaacttcatgcaccgcgacgaggaggtcgactacttcccatcccgctacgatcctgccaagcacgccccccgctaccccatcccctccgccaccctcaccggccgccgcgagaaggtggtgattgccaaggagaacaacttcaagcagccaggggagaggtaccgttcatgggatccggcaaggcaagaccggttcatcaagagatggatcgacgcactctctgaccctcgcctcacccacgagatcaggagcatctggctctcctactggtctcaggctgacaggtctctgggtcagaaactggcgagccgtctcagcgcgaagccgagcatgtaaggagatcgatcagcgttgcaatctgcttcagtcacggaaggcctcagcctcactctatcggataataattgctactcatactctagcaataccgatcgatcgagtctattttggaaagaggacatatatgatttctatcaccgcacaattcgtgtaccaccatcatgtaataatctgtaacctgaagacacgtttctcctgatacttcatcattattgtaagcactcattattgtaagcacaccttttatcaataatttatatacagtaaattaattatttaattataaaaaaaaaaaaaactcgagggggggcccg

SEQ ID NO: 16020 - DNA, 726 bp, Oryza sativa
  Clone ID: PAT_MRT4530_21808C.1
agaactagtggatcccccgggctccttacaataatcactttttttagccatcattaaagctttttttttagttgtcaatacttaacagtaagcattcatgccgagagcataattatggtgccacatgcaaggcgaactccagtccaacaaaacaaaaacaccaccacctaataagtgctagcgcagggccgcatgcatacagaatttcaccttctatcataaattatacatggactacgacttcttgacacactcgattaaacaggggctagagtagcagcagggcacattataatcgcgcgatttcatactagctacttcatgtattttttttttcagtcaggctttcggctgttgacgatcgtcctgttgacctgaagaagacgatgatccaaccttcttgaaaactctaccaccgaagagatctttcccaaacctccccttgaaggagaactgcttcttaaaacggtttcggaacatcgtgccactgcgtcttgccacaagggcagactgatttctcttcaagccatgatcactacgagaaggatttgcgctggtacttccaccagaaccaccaagagagaaactattaccttgattcctacgagcagatctgagggcaacatgtaatggttccgagaatgagacacacccttcatcatcagtgcctcgtgtgcatagagggcaaggtggttcatggacttgactctttggagtactttcctc

SEQ ID NO: 16021 - DNA, 2142 bp, Oryza sativa
  Clone ID: PAT_MRT4530_21809C.1
ccgctgcgtccccgagcggggcggtggctgtgcttatgcggcgcctcctcctcgccggcatcctccgccgcgcctcctcctccccttcctcccaccaccacctccacctcgtcagggcgctctccgcctcgtccccgctcccggcctccgacgccgacctccgcaagtacgccggctacgcgctcctcctcctcggctgcggcgccgccacctactactccttcccgcttccccccgacgcgctccacaagaaggccgtccccttcaagtacgcgccgctccccgacgacctccacgccgtctccaactggagcgccacccacgaggtccacacccgcgtcctcctccagcccgactccctccccgccctccacgacgcgctcgccgccgcccacggcgagcgccgcaagctcaggcccctcggctcgggcctgtcccccaatggcctcgcgctctcccgcgccggcatggtcaacctcgcgctcatggacaaggtgctcggcgtcgacgccaagaagaagaccgtcaccgtgcaggccgggatacgcgtcgccgagcttgtcgacgcgctccgggagcatggcctcacgctgcagaacttcgcgtccattcgggagcagcaggtcggcggcatcattcaggttggtgcccatggcactggtgcaagattgccaccaattgatgaacaagttattagcatgaaattggttacccctgccaaggggacaatagagttgtcaagggagaaggatcctgatttattctatcttgctcgctgtggacttggtggccttggagttgtagcagaagttactcttcaatgtgtggaaagacaccaacttattgaacacactttcgtttccaatgcagacgaagtcaagaaaaatcacaagaaatggctctctgaaaataaacatattaagtacttatggattccatacaccgatacagttgttgttgtccaatgcaatcctccttcaaggtggagaactccaaagtttacctcaaaatatggaaaggatgaggctatacaacatgttcgtgatctttatcatgagtcattgaagaaatatagaactaaagcagaaagtaatgacccagaagtagatcagctttcattcactgaattgagggatcggttgcttaccctggatcctctagacaaagatcatgtgatcagaattaacaaagcagaagctgaatattggaagaagtcagagggttatcgcatgggctggagtgacgaaatattaggctttgattgtggtgggcagcagtgggtttctgaaacttgcttccctgcagggaccctagcaaagcctaatatgaaggatctggattatatagaggagctgctgcagttgattgagaaggaagatatacccgcaccggcacctattgagcagcgttggactgcctgcagcaggagtcccatgagcccagcatcaagctctcaagaagatgacatattttcatgggttgggataataatgtacctcccaacgtcggatgctcgccaaaggaaggaaattacagaggaattttttaattacagaagtaagacgcaaacaaatctatgggatggttattctgcatatgaacactgggccaaaattgaggttcctaaggataaggatgaactcgctgaactccaggctaggttgaggaaacgtttcccagtagatgcatataacaaagcacgcatggagcttgaccctaacaaggttctttccaatgcaaagttagagaagctcttcccagtaacagaggtccaacatgtaaagtaaggttgtgctgattgttgacatgtttgaagacatgtcggggatacttaaatcaatagccaaaactacaattctggtggtttctcgttacataaccggatatgaagagttaaattctttgtagaacgtggtctgttgctggagaagggttttagtgctcctcctcttggatcagtgcttagtactgaactgacgcgtttgttgctggaggcttttatacttgggaacatccatgcctgttatgagactaaatggtctgttttatcaagagaaacggcatgtaaccttttgcagcagaaataaagtgcgtgaaataacaatttgatgcgcttcaagaaattaaagatttggccagtct

SEQ ID NO: 16022 - DNA, 287 bp, Oryza sativa
  unsure (1)..(287): unsure at all n locations
  Clone ID: PAT_MRT4530_2180C.1
caaaggagnacacatgtccggctgctggcgatgccagatacaatgccagcccaaatggatggccctcggtgtnccgttgacaccaatttggatctcgattttgccacgagattggtgccaccctgtgtgctgcttggggacgccanccgacctgggcctgcttgatgctttttaagagggatgtgagtgcngtgatgggtgatagctgggtgtngttgtgctggatagacatgccttgattgattggaaaagcgccatgtgcagctgaaaaaaaaaaaaaaaaaaaa

SEQ ID NO: 16023 - DNA, 279 bp, Oryza sativa
  Clone ID: PAT_MRT4530_21810C.1
atggcattggctgcgggcacggtggcgacgggcgactgcgggtgcggcattggcaggtgggaggcgcgatggctcgacctctaccgcctagcggcggcgggtgcgacgtcggcggatccggctcggcacggttgtgggcgcggcaacgacaagcgaatgcgggctggaggcatggcagctccacctccatcgctgattggcggcgggcacgacgtcggcggatccggcacggcacggctgcgggcgccacggcgacgggcgactacggataggaggtga

SEQ ID NO: 16024 - DNA, 1610 bp, Oryza sativa
  Clone ID: PAT_MRT4530_21811C.1
caacgcctcgtgttactgaactattgttccacaaattcatagctgaagcagtttgcaggggcagcaacccaacacaccactaattccacaaaattgagaccacgcacaagcatagccaaaatcctatcaacccaaacacaccattaattcccccaaaacatcctcagattgccaaaatttacgcacagtaaattcatttccctgtctatgcattgtagttgtccacgcccagatccctcaaggcagatgtggcagcatctttgcagctcccgtgcatcatcttggttttcctaataagcttctccacaccatcattaagcaagatcgtccggttttcagggtttctgacgacaagattacggatcataaggcaggcttgcttctgagtttgagcagaagaagggaacttttgcattgcctgtatagccaaagtgccataccctgctcccattgcacgagctgcattttctggtgaccgcagtgtaaggatagtcaccatagacattacctcttgtattattggtgggtcttcagaaaatctcgatgtcaacttcaagaacttatcaaaaccacctcgttcaatgatagtagtcttgtttgcatcacttccagccagcttggacagcagagagcagcaagattttgctataactttgttcttttgttcactagcctcatcaatacagcgaagaagcacatcaatcccaccattttcagatatggatctgcatatttcatcattgacagcaattgccttcagagccgcacaagctgatggtaagctggaaggggcaactttctcacgtagtgcattgacaagaactgctgcaatcccagtttctgcgaacctccgagaatatccatatacttgagaagccaccacacgattgtcatcaggtgtcaatagaacacgtatggcatcatacaagctttgcacattgctatttgatttctcccccataacttgaaaaatgagttcatcaaccttcaggaccataaagcactctttaacaacttcattgcctgcagatgctgaagccacaaccctaaagccaccttccagtatatctgaactttctgaacctcctttcaaaatacccatgacaacttggggcccttcgctttgcctgaacttttcagtgcttccaacatcgcggagcaaggagcttagcgccttcaagcccgaggcaagtagtctctcctgcttaaccccagccgacgcgcacagggcgacgagcgcctccacgccgccattccgagcagcgaccgccgcattctccaacccatcgccggagcacagctcgcgcaactcgtcgagcaaagaggccaacctctcagcatcctcctcggacctgccgccactgtcactgtcactggcagaagaggccttcacctcgtccagcacccgcatcaccgggctcacctccgccgcggcggcctctccaggcacgcgcttgatgatcccggagaggtcggcaccttggagggtgagggcgtcgacggcgtcggcgagggcctcgtcggcgtccatgccgaggtcctccatgttctcccgcaccatggcgtcgaacgcctcctgagagatcgcgatcgccatttttgctcaacac

SEQ ID NO: 16025 - DNA, 2529 bp, Oryza sativa
  Clone ID: PAT_MRT4530_21812C.1
ttttcatctccttttctcatcttttctcatgctttgacgccaccattaagctttggcttttctctgcctcccatctcctcctctgccactagttaaagcagagagagggggagaagaaaggggaggagaaagaagcacgggagagaggaggaggagaaggagaaggacaagggaacgaagatgttcgacagcctgctcaactccaagttctacaacaaatgcaagcacgcaatcaagtgcacccggaccaggctggatctggtgcggcggaagaagcaagcgatggtcaagttcatgaagaaggacgtcgccgacctcatcggcaatcgccttgaatcgcacgcctttggacggatggaggcactgattgttgagatgaaccaagcatcctgctatgatatgatcgagcagtactgcgagtacatagtgaagcagctcaacaacctgcagaaacagaatgaatgtcctcaggaagccttggaagctgtgtcaactctaatttttgccactgctagatttcctgagttgcctgaactgtgcgacctcagacatatgttcacggagagatacgggagttttgtcgagccttttgttagctctgagtttgttcagaagcttcagaacaagtcatttactaatgaagagaagttgcaagtgatgcaaagcatagctgaagaattctcggtcccatttaattccaaggcactggagcgaaagatatctggtgtacctcaaaataaacatgatcttcaaaacaagagttcttttaagcgtgtggaagttgaagcatcagcatgcaatgaacttaaggtggataggcatgctgtgcatgaaagaaaatctaaagtgacacctgaagtccatgagaggaagcaggagatgccggtaaagcctaaagatattcatgtcatccctgatgccattggtaaggttggggagaaaagcaggaagaaccgctcagatataccttatgatgtgcctccttcggacttgaagcaaattaatgatcaggagttaaagaaagaccacaaaaaacatagtcaccaccagagggaactgaggaatgcagacaagtcagctcctccatacgcagaacccaaggaagatgttgctgaaaagtctgatgggaaaggctaccatgtccatcgatcgcgcatggctggtggccttgatcacaattggggacatgccgacttggggcttaaaactctgggcctagaaaagcaaggaattgagccagctagttctttggatggtaaaacactgaacaaagctcctccttattctaagccctacaaagcaagtgatgagtatgggcagtctgtgcaagacaggcagaaaatgccagagaaggcagttaacatgcgtccaccttatgtcaaaccaaactctacaaatcaagctgttgatgattacaagcatgccggcactggggaaattggtcaccagagagatggactggctgatgataatacccttcagcccgtttctgtcagaaggaaaagtgcaaagccacctacacatggtgatcgctatgatgatgaggcaaagatgacaagccaaactcctggtggccgacgaaggcattcaagcagaagaaatggttcagatgatgattatgaccagagagttggctatatgctgcccccagatgatgatgctgtcaataatgcgagacactttaagagaatgagtgaacgaagaaaacatggaagcaggcagggtggatcagcaagtggcaatgactacgagtctgatgaggatgagactaacagtgtgattgattttggcaatcttttgccccgagcacctagttctcatcggaaacacaggagtaggagtgctcacccacgcagcggaggccgtgatgatgaggaaagggtgatggataagcttctgatgcactacagcaagaaaggcattgatagggaagagcataaaacaagaacaaaatcaaggacccctcgacctcgagctgatcagcctgctgatggagtcggagaacggtctaacagagaagtggcaccccaacatcctccagaaagaactgtatctctcccttcagactctggcaacctgggtgtgaagcctaaggctcctgctcggtccatttcaatgcagccagacaagtccagggggattgtacaccctagcatgccggatttcgacgaactagctgctcggatcagtgctctgaggaaggaatgactatgagctgccacaaaactgtattcaggcttcagcaggttgtgttctttcatgaacttctctcaaagcaactttcaatgtcagtggtggtcacaggaatcaggggatctctcctggtggtggtaatcttgcttgcagtgctatatgcctagatagaatagtaccaaattaaatggcaatatttaggaataccatacaatattggtttgggtgtggtcctttgttgtgctcatatttgaaagtgaaacaatcttgtatagatgccattgatgaggctataatgataagtgatgattctttctgctaaaaaaaaaaaaaaaa

SEQ ID NO: 16026 - DNA, 863 bp, Oryza sativa
  Clone ID: PAT_MRT4530_21813C.1
ttaattgtgcggcgccgcgggcagggtcaagctggcgaacaggtcgtggtggtcgggccccatgggcttgccggagcagccgtccggctcgtcgggccccaaggcggagctcccggtggccaaggagccggaggcgagcccgacggggggcgcggcggcggaccacgccgacgagaacaacgaatccggcggcggcgagccgcgggagggcgccttggtggcggcgcccaaccggggcccccgcgagcgcccgcgcggctgcaataacaatgccgaagcggccatcttcgggacgcgctgacagccccaacgcgctgcgcagccacgtcatggaggtggccggcggcgccgacgtcgccgacgccatcgcgcagttctcgcgccgccgccagcgcggcgtctgcgtgctcagcggcgccgggacggtcgccaacgtcgcgctgcgccagccgtcggcgcccggcgccgtcgtcgccctgcacggccgcttcgagatcctctccctcaccggcaccttcctccccggcccggcgcctccgggctccacggggctcaccgtctacctcgccggcggccagggccaggttgtcggcggcagcgtcgtggggtcgctcatcgccgcgggcccggtcatggtgatcgcgtccacgttcgccaacgccacctacgagcgcctgccattggaggaagaagaggagggctcaggcccgcccatgcccggcggcgccgagcccctcatggccggcggccacggcatcgccgacccttcggcgctgccaatgttcaacctgccgccgagcaacgggctcggcggcggcggcgacggtttcccatgggcggcgcacccccgcccaccgtactga

SEQ ID NO: 16027 - DNA, 768 bp, Oryza sativa
  Clone ID: PAT_MRT4530_21814C.1
atggtggctgacggtggcggctggcgacggtggtggctgtggcagtggcggtggcggctgtcgacgatggtacctatggcggcgatggttaaaggccatcatccggctgacggtgcatcgtcgtcggcggcgggaatcgtgggcgaaagccttgctgagccatttggccggctgacaacgacgacgctgtttggcgtcgttcccctccttggaggcgttgttttagcatacccatttcctttccctaccatattctccggttatataatggatcctaaaatgaagcaacttcaagaagcactggttgacattgaaactgatgcagagcagcttcttctggcaaggcatcagttagtggaaaacgataggataaggaatggtaatagggaagcactgacagccctccggaaaagagccaagacaaccaaaactagtgttccgaccccctttgaaatcataatgaaagggttggaaggaacctctggcaagcagctggtaaaggagatatgcccaacatgtggagatcatgaccccaaggaagatacatggttaatgtttccaggatcagatatctttgctcgtgttccatttcatgtggcccacactgttctagacaaagatcaagaacgactagactatgacaccaagaagctacagagctttgtgaaggagaaatcgtttgtgatatcagagaaaggtgcccttgcagacagaatcagccccggcatcgtgaaatccctcgtcagccttacagataaacccaagtag

SEQ ID NO: 16028 - DNA, 268 bp, Oryza sativa
  Clone ID: PAT_MRT4530_21815C.1
atggagatccaatatgagcttaattcggatagggatccgaataggagtcctacgggcctgcaaggcccgagtgatggatcctatatattcgtgaggggtgtgaccggcggaggtattgcatcaccgtgggaatacggcgaggagaacgcacgaggaggagaagatcgagccggtgcgatcgactacttcctctacatcgacgcgcgctatttcgctagaattccttcgacctcttagcaccttcttccactgcgtagcgcgtcgagtg

SEQ ID NO: 16029 - DNA, 356 bp, Oryza sativa
  unsure (1)..(356): unsure at all n locations
  Clone ID: PAT_MRT4530_21816C.1
gcccttccccagacgatcctaancgaacaatctatcacatcctcgacaccactcagcggggagaggaatcaaaccaacgtaatcaccaaataataatataaccatatatgcttgcgcacataaactacgaactaacctactcaaccttaaactaagcaaacatgcaatcgaaagagcatagttcaaacaataaatacagaaatgaaaattaatctnntgaagctcgtaaataggatatgtaataataaaatgcttaactatttccatcataacaaccaattgagctacagcagtacacnagtataaacttaattaactactaagaaacatacaaattaaattacttccaaaaataa

SEQ ID NO: 16030 - DNA, 537 bp, Oryza sativa
  Clone ID: PAT_MRT4530_21817C.1
atgcgggaatgggggagagaaatcctgcgagacttgactgatggagccttggcaaaggaagctctcaagcatgcaccagcagaatcgccgccacctcgccaacgggctgtcaagcaccacgagcagcaagctccgggcgacagcagatccgggcgaagcaggcctcaagaagctgttgccgccgtcgctaggaatggggcggcaacctcccagacgacgacaacaaagccattgacgccgccgcaaggagccagctttttccgtcgtttcgtcgggacggcgacatcccggacgctgacgacgaagcaactggcgccgctgcaaggagccggcttctcccggtcgccgaccgatgtagccgccgccgccgcaaggaaccagccttttccgtcgattcgtccactggtcttcggatctcgcacctccgccgccaccaaccgccgccgcctccgaccacactggcacccatggagctcgccggcaaaagaccaactagggacaaaccctaagagcatcaccaacagtctacctatatga

SEQ ID NO: 16031 - DNA, 1561 bp, Oryza sativa
  Clone ID: PAT_MRT4530_21818C.1
cttcctggccgtcgtcaccggcatggccgcgctcgtcttcatccggttcatcgtccacgaccacgacaacctcttcgtcgccgcggaggccgcgcacgcgctcggcatcgccgtgctcatctacaagctcaccaaggagaagacctgcgccggactatccctcaagtctcaggatttaactgcgttgtttctagctgttagactatactgcagcttcgttatggagtatgacatccatactgtgctagatactgctacacttgcagctacactttttgtaatctacatgatccggttcaaattgagaccaacttatatggtggacaaggacaattttgcattgtactatgtggtggtaccttgtgctgtgctagcactgcttattcatccttcaacatctcataacattgtgaaccgtatcagctgggcattttgtgtttacttggaagctgtctcagttctaccacagctgcgtttgatgcaaaacacaaagattgttgagccgttcacagcacactatgtgtttgcattgggagttgcaaggtttcttagctgtgcacactgggttcttcaggtattggatactcgtggtcgattgttgactgctctgggctatggcttgtggccatctatggtgcttctgtcggaaatcgtgcagacattcatccttgctgatttctgctactactatgtgaagagtttggtcggtgggcagctggtgctacggcttccatctggggtggttcaaaatggagagagaaagagttatgacgtgctccagcgattcgggtttcataccatctgtatggtggcgttcgggcacgacctgccctgcctcgccgacggcggggtcatggaggatgccaggtcggatttcatgcactccttcggcgaggcgcagaaccttgtcgtcggacgcttctttgatctcatcgaggtctcctggaagatcaagaagtggctcaacgtcggcaccatacgccgtctgaggaaggccatcgccgacgtccacaccttcgccatggacatcgtccgcgcccggcgccagagcgcgtccgtgcaagacagagacgacgtcctgtcgaggtttgtggcgagtgacgagcacagtgacgaggtcctccgcgacatcgtcctcagcttcctcatcgtcggccgtgacacgacggcgtcggggctgagctggttcttctgtctcttgtcgtcccggccggacgtcgtggcgcgcatcgccgacgaggtccgcgcggtgaggaagccgaccgacacacgcctcggcgagccgtttcggttcgatgcgctctgggagatgcactacctccatgccgcactcacggagtcgatgcggttgtacccgccggcgtcagtcgtgcgcggcggacgacacactccccgacggcacgctcgtccgcgccggttggtccgtgacgtacagcgcatacgccatcgagcgaggactgcttggagtacaggccggagcggtggctcggcgaggacggcgtgttccagccggcgagccagagaaagagagatgccggcgagccagagaaagagagattga

SEQ ID NO: 16032 - DNA, 502 bp, Oryza sativa
  Clone ID: PAT_MRT4530_21819C.1
ctaaaacaacagtaaatgcataggatagggattgggccttgaccgcgccctgatcgggggcgcccagcccaatggctggtgggcccccgtcacactgcgccataataaaagaggggtggaggccggcacggcacaaggttcgagattcaccgccgccgccaactccaccctacaaaccctaatccgatcaagagggggcgcagccagtgacgggaagcgccaccgccgcgccacacctcatcgccgggacatctacaaccgtcactcccgcagccgtcatcgtcgtcgacctcaccggcgccgcatccacgacaaccgagcgccaacggagacgatggccggcacttcttcatcctccaacacctcaactcgtcgccggccgtcgtcgacgccggcaacggagggggggaggggcaaagaggcgccgcctaggagccactcgacggccgcgcgcgcacctgcacgcgcgcgccggcgagggggcccgcggcggcgccgccat

SEQ ID NO: 16033 - DNA, 232 bp, Oryza sativa
  Clone ID: PAT_MRT4530_2181C.1
cgcacccgaattgcgaaatcgtcacacgcttgcgaccacacgtccgaagaaatgctgagagaatactcaggcgaggtctgacctgaccttgctagatgacacacgccatgtggtccatcgacccgactggcgcaaggcgtgcagctcacgtccgcgcccagacgcgccagggggaggtccaggatcgccatactgagggccgacgccggctccgacgacgtgcaaaccggtc

SEQ ID NO: 16034 - DNA, 694 bp, Oryza sativa
  Clone ID: PAT_MRT4530_21820C.1
agtaatgatggcgcagtgtttttatttcccatagagaacttcgcattgcaccagactttgcagggtcagtctgttcattgtctgaaaggatcagcgccaaccttcttacgttgactagcttcgttaaagatttcagaatcattcgcatcaatttcccaatggacccaaaaatttattgacgggtgtctccgcagtagattgtgaattaaagcaataataataagagcgccagcaggtggaactgaaagggttagtctactcaatctttttgcaaacgcggcagcaagatatgcaggaagatatgaagatttcagacatgcatccagaagttgcaagaaaactgcccgatgttttcgccatgaaaacagcaggagtcagtaatgcatagagtttgtcatagaattttggatattccaggccatgttgtgtcataagaatgaaaagaccacttagggccatcacactgataacaccaccaatgtcatatgatctagtcaagaaatcacacaagatggccgggttcgacattgaaggaattacattcttatgaattgttgcaaggacctccttgtacacatcaagcggaagtggcagctggagaaaggatatccaggctttgctgaactttgatttgagttttttgttaatgtaagtagcagagcagtcctcagatgagttcttttctcccggccgg

SEQ ID NO: 16035 - DNA, 475 bp, Oryza sativa
  Clone ID: PAT_MRT4530_21821C.1
caacggctcaagggggccttgaccgcgccctgatcgggggcgcccagcccaatggctggtgggcccccgtcacactgcgccatataaaagaggggtggaggccggcacggcacatggtacgagattcaccgccgccgccaactccaccccacaaaaccctaatccgatcgagagggggcgcagccagtgacgggaaacgccaccgccgcatccacgtcaagccgcgacgacaacgacgatgtcctagtgtttagatcgtttcggggaaagaaatccaaagaaagaaaagcacaagatccgcacggatcaaaagaaccaaaaaccctaaccctaattcttacctcgtcgccggccgtcgttgacgccggcaacggagggggggaggggcaaagaggcgccgcctaggagccactcgacggccgcgcgcgcacctgcacgcgcgtgccggcgagggggcccgcggcggcgccgccat

SEQ ID NO: 16036 - DNA, 2712 bp, Oryza sativa
  Clone ID: PAT_MRT4530_21822C.1
atggaagaagatgaagtggaagacgacaatattccggactttgctcagtatgttggatttgaaggaaatcaaacgggcgaggaggaaatagctgctgatggtaacgacgttgcggatgatcttggtcagatgttgcaggacgccagggaggactgcgaaagtgaaaaggaggcccataaattggacaagatgttggaggaccacagaacttcgttgtacccaggttgcgagcaggggaacaaaacgttggataccactctggagttgttgcaatggaaggcaaaaaatggggttagtgacaaggcatttggcgatttattgaaactcgtcaagaacattctttcgggggggaaacaaattgcccgagacaacgagtatgagaacctagaagcatgccctgtttgcaaagcactacgatacaagattagacgggacgatccaggagaagttgacgggcagctaacaaagaagagaattcctgctaagtggcgaaacatcgacagaaaatttaaagaatttggaaaggacgcacgaaacatacggtttggtttgagtacggatggcatgaatccttttggagagatgagcagcggccatagcacttggcccgttacgatgtgtatctacaacctccccccctggctatgcatgaagaggaagtacataatgatgccgattattattcaaggccccaagcaacctggtaacgacatcgacgtgtacctaagaccactggtcgaagatcttaaacagttgtggaagaaggaaggtgtccccgtgtgggacgaggacaaacaggaggagtttaacctacgagcgctgctgttcgtaaccatcaacgattggcctgcacttagcaacctatccggacagtccaacaaggggtacaaggcttgcactcactgtatggatgaaacagaaagtacgtatcttaagcactgtaggaaggttgtatacatgggtcatcgtcgattccttgcagcaaaccacccggtacggaagaaaggcaagcacttcgaacataaggccgaccaccgtacgaagcctaaacatcgcagcgggaaaacagtgtttgctatggttaaagatcttaaagtagtgttcggaaaggggcctggaagccagcatatagagagcgaagatggtcacgcggcgatgtggaaaaagaactctatattttgggagttaccatattgggaattcttggaccatatggaacaacgcggcgaccttcacccggaaccaatggagaaaggaagccattacttgagtccagccagctacactcttagcaaggcagagaaggaaagtatgtttgaatgcttggagagcataaaggtaccgtctggatactccacgaatatcaagcgaataataagcacgaaggagaagaagttcacaaacctaaagtctcatgactgtcacgtgttgatgacacaactgctaccagttgtaataaggggtatccttccagacaatgtctgggcaacaataacaaagatatgtgcattcatgaacgcaatttcgcagaaggtcatcgatccggatagattagaagcccttcagaatgaagtggtgcaatgtctcgtcagttttgagttgatatttccaccttcatttttcaatataatgacgcatctgctttgtcaccttgtgaaagagatccgtattctcgggcctatgtacctacacaacatgtttcctttcgagaggtacatgggcattctgaagaagtatgttcgtaaccgtgctcgtccagaggcaagcatcgccaagggttatggaacagaggaggtcatcgaattttgcgtagaatttattgaagaccttcgcccaatcggggtacctgaatcacgccatgaagggagactacggggaaagggaactctcggaaggaaagcaataacgacggtagacaacaatttattccgtaaagcccatttcactgttctgcaacactcttcattggtagctccttacatcgaggagcacttggctctagttcgcgcaaggaacatcggtaagtccgatgcatggattacacgacatcacattgatactttccccgcgtggctacgacaacatctcatgggtaacgagtcaatcaaccaacaacttgccttcctggcgaggggaccgtctgggtcgatcgcgacattccagggatatgagatcaatgggtacacattctacacgagagcccaagacatgaagagcacgaaccaaaacagcgctgttcgtgtcgatgccatgggacacgatggaacaactgccacgtattacggtgccatcgaggacatatgggaacttgactatggtcctctcaaggttcctctgttccggtgccaatgggttaggttgactggtggaggcgtaatgattgatgacagtgggatgacaactgttgaccttaacaaggttggatactcggacgaaccttttgtccttgccaatgatgtaacgcaagtctttttcgtgaaggacatgtctagcaaaggaaagaagggtagagggcctgataagcctaagcgtcaagtggttctcccaggcaaaagaaaaatcgtcggagttgaggacaagactgacgaggattacgatcagttggatgggcaacccactttcacggtgacgattgaccctagcatccttctatcaaatgaagacaccccttactcacgcagcgatcacaaggagggaacaatagtgccgtaa

SEQ ID NO: 16037 - DNA, 513 bp, Oryza sativa
  Clone ID: PAT_MRT4530_21823C.1
aataaaaaaatttgtcatgggattgagcccaacggctcaagggggccttgaccgcgccttgatcgggggcgcccagcccaatggctggtgggcccccgtcacactgcgccatataaaagaggggtggaggccggcacggcagagagtacgagattcaccgccgccgccaactccaccctacaaaccctaatccgatcgagagggggcgcagccagtgacgggaagcgccaccgccgcgccacacctcatcgccgggacatctacgaccgtcactcccgcagccgtcatcgccgtcgacctcaccggcgccgcatccacgacaaccgagcgccaacgacgacgatggccggcacttcttcatcctccaacacaaccctaaccctaccttgtcgccggccgtcgccggcaaaagggggagggcaaagggcaccaccgaggagccactcgacggccgtgagcgcacccgccggtgcacgcgcgcaccggcgagggagcccgcggcggcgccgccat

SEQ ID NO: 16038 - DNA, 2136 bp, Oryza sativa
  Clone ID: PAT_MRT4530_21824C.1
atggatcggcaatggatgtacactgaccggcggtccaaagagtttattaacggcgtgcattattttttgagagtggccgaagctaacaagcagaagggttttatttgttgtccatgcaataagtgtaagaatcagaaggagtattctgcatccaggactattcatttccacttgtttgagtcggggttcatgccaagctataattgttggacatcccacggagagcaaggggttgaaatgaaagaagatgaagtggaagacgacaatattccagactttgctcagtacgctgaatttgaaggaaatcaaacgggcgaggaggacatagatgctgattataacgacgttgcggatgatcttagtcagatgttgcaggatgccaaggaggactgcgaaagtgaaaagggggcccataaattggacaagatgttagaggaccacagaacgtcgttgtacccaggttgcgagcagaggcacaaaaagttggataccactctggagttcttgcaatggaaggcaaaaaatggtgttagtgacaaggcatttggcgatttattgaaactcgtcaagaacattcttccggagggaaacaaattgcccgagacaacgtacgaggctaagaagatagtctgccctctaggactggaagttcagaagattcacgcatgtccgaatgattgtatcctatatcacggtgaggagtacgagaacctagaagcatgccctgtttgtaaagcactacgatacaagattagacgagatgatctaggtgaggttgatgggcagctaacgaagaagagaattcctgctaaagtgatgtggtatttccctataataccacggctaaggcgtttgctcaggaacaaggggaatgctagaatgatgtgttggcacgctgaagaaagtcaacaggacgggatgctgagacaccccgcagatggttcgcagtggcgaaacattgatagaaaatttaaagactttggaaaggacgcacgaaacatacggtttggtttaagtacggatggcatgaatccttttggagagatgagcagcggccatagcacttggcccgttacgatgtgtatctacaacctcctcccttggctatgcatgaagaggaagtacataatgatgccgattattattcaaggccccaagcaacctggtaacgacatcgatgtgttcctaagaccactggttgaagatcttaaactgttgtggaagaaggaaggtgtccccgtgtgggacgaggacaaacaggagaagtttaacctacaagcgctactgttcgtaaccatcaacgattggcctgcacttagcaacctatccggacagtccaacaaggggtacaaggcttgcactcactgtatggatgaaacagaaagtacgtatcttaaccactgtaggaaggttgtgtacatgggtcatcgtcgattccttgcagcaaaccacccggtacggaagaaaggcaagcactttgaacatacggcggaccaccgtgtatatggaaagttgaaagatacactggaagcacgtaatgatctgaagcatatgaaacaacgcggcgaccttcacccggaaccacaggagaaaggcagccattacttgagtccagccagctacactcttagcaaggcagagaaggaaagtatgtttcaatgcttggagagcatcaaggtaccgtctggatactccacgaatataaagcgaataataagcacgaaggagaagaagttcacaaacctaaagtctcatgactatcacgtgttgatgacacagctgctaccagttataataaggagtatcctcccagacaatgtccgggtaacaataacaaagctatgttctttcatgaacgcaatttcgcagaaggtcatcgatccggataggttagaagcccttcagaatgatgtggtgcaatgtcttgtcagctttgagttgatatttccaccttcatttttcaatataatgacgcatctgatttgtcacctagtgaaagagatcggtattctcgggcctgtgttcctacacaacatgtttcctttcgagaggtacatgggcgttctgaagaagtatattcgtaaccgtgctcttccagaggcaagcatcgccaaggggtatggaacatgggcgtag

SEQ ID NO: 16039 - DNA, 1449 bp, Oryza sativa
  Clone ID: PAT_MRT4530_21825C.1
tcagcgagacagcgacacctccaaggctccaatgcccagcagcccctctctcatccatggtagtgctctgtcatggtgtacgggaatgacagggttggcgagacgtggttttactgctcgccgagccatccgcgttgcccccttccacttctcggcatccgctcgtcgtcgtcctctccgcatccgcatctcttcccaatttgtttgttcccctttatgttcttcactgtggcaatgcctgttagatagatctctctccccttgagcccaacggctcaagggggccttgaccgcgccctgatcgggggcgcccagcccaatggctggtgggcccccgtcacactgcgccatataaaagaggggtggaggccggcacggcacatcgtacgagattcaccgccgccgccaactccaccccacaaaaccctaatccgatcgagagggggcgcagccagtgacgggaaacgccaccgccgcgccacgcctcatcgccgggacgtctacgaccaccactgccgcagccgtcatcaccgtcgacctcaccggcgccgcatccacgtcaagccgcgacgacaacgacgatgtccggcgcctcttcctccacgaactcctcaaccggtcggtatctaaaccctctccctttcatctacaatgtcgttcatcaaacccaaatagaaccacccgactagatctaacctatgtgatcctagtgcaaagttcaacacggcgcccatgaggctgagcgtgccgcggcgcgccgtggagttgaacacgacggagaaggcgagccacgcgttcagcgtcgacgccgccttgccgtcgtagaggtagagcccctgcgccctcaccgccgtctcctcctccatcgccggcgacggcggcagcgcgctcgtcccctccgtcatcgggtcgttgaacaccaccgtcgtgccgaagaaggtgccgccggtcgacggcacggcgttggccagcgccgtcggcttggtggccgccgccgccgtggagttggaggtgctgttgctgtagtcgtagaggatgtcgtggaggtacagcctcatctccatgcacggctcgtcgtagctcctgacgaacctcctcctgctgctccggcggccatggacggcgacgctcgccgagctgaggaggaggccggcgacgaggaagatggcggcgacgacgatcgtcagagacgccatggaccaagctgtcatcgatcagagacaccagtgtaatgcagctagcaaagtagcgtgcacagggccgtggcaccttgttgccgcaggtttcatgagtgattttcccggtcagagacgtgttccccaccggattgagatcctcccgtcccgtcggattgatgagagcctccaggcacatgtccctagccggagacggcgtgccagctcctgaagatggcacgtcggtcccggtcagatacatgccaggcttcat

SEQ ID NO: 16040 - DNA, 2823 bp, Oryza sativa
  Clone ID: PAT_MRT4530_21826C.1
atggaagaagatgaagtggaagacgacaatattccggactttgctcagtatgttggatttgaaggaaatcaaacgggcgaggaggaaatagctgctgatggtaacgacgttgcggatgatcttggtcagatgttgcaggacgccagggaggactgcgaaagtgaaaaagaggcccataaattggacaagatgttggagcaccacagaacttcgttgtacccaggttgcgagcaggggcacaaaaagttggataccactctggagttgttgcaatggaaggcaaaaaatggggttagtgacaaggcatttggcgatttattgaaactcgtcaagaacattcttccggggggaaacaaattgcccgagacaacgtacgaggctaagaagatagtctgcccgttaggactggaagttcataagattcacgcatgtccgaacgattgtatcctatatcgcggtgaggagtatgagaacctagaagcatgccctgtttgcaaagcactacgatacaagattagacgggacgatccaggagaagttgacgggcagctaacaaagaagagaattcctgctaaggtgatgtggtatttccctataataccacggctaaggcgtttgttcaggaacaaggggaatgctagaatgttgcgatggcacgctgaagagcgtcaacaggacgggatgctgagacaccccgccgatggttcgcaatggcgaaacatcgacagaaaatttaaagaatttggaaaggacgcacgaaacatacggtttggccccaagcaacctggtaacgacatcgacgtgtacctaagaccactggtagaagatcttaaacagttgtggaagaaggaaggtgtccccgtgtgggacgaggacaaacaggaggagtttaacctacgagcgctgctgttcgtaaccatcaacgattggcctgcacttagcaacctatccggacagtccaacaaggggtacaaggcttgcactcactgtatggatgaaacagaaagtacgtatcttaagcactgtaggaaggttgtatacatgggtcatcgtcgattccttacagcaaaccacccggtacggaagaaaggcaagcacttcgaacataaggccgaccaccgtacgaagcttaaacatcgcagcgggaaaacagtgtttgctatggttaaagatcttaaagtagtgttcggaaaggggcctggaagccagcatatagagagcgaagatggtgtatacggaaagtcgaaagatacactggaagcacgtaatgatctgaagcatatggaacaacgcggcgaccttcacccggaaccaaaggagaaaggaagccattacttgagtccagccagctacactcttagcaaggcagagaaggaaagtatgtttgaatgcttggagagcataaaggtaccgtctggatactccacgaatatcaagcgaataataagcacgaaggagaagaagttcacaaacctaaagtctcatgactgttacgtgttgatgacacaactgctaccagttgtaataaggggtatccttccagacaatgtccgggcaacaataacaaagctatgtgcattcatgaacgcaatttcgcagaaggtcatcgatccagatagattagaagcccttcagaatgaagtggtgcaatgtctcgtcagttttgagttgatatttctaccttcatttttcaatataatgacgcatctgctttgtcaccttgtgaaagagatccgtattctcgggcctatgtacctacacaacatgtttcctttcgagaggtacatgggcgttctgaagaagtatgttcgtaaccgtgctcgtccagaggcaagcatcgccaagggttatggaacagaggaggtcatcgaattttgcgtagaatttatcgaagaccttcgcccaatcggggtacctgaatcacgccatgaagggagactacggggaaagggaactctcggaaggaaagcaataatgacggtagacaacaatttattccgtaaagcccatttcactgttctgcaacactcttcattggtagctccttacatcgaggagcacttggctctagttcgcgccaggaacatcggtaagtccgatgcatggattacacggcatcacattgatactttccccgcgtggctacgacaacatctcatgggtaacgagtcgatcaaccaacaacttgccttcctggcgaggggaccgtctgggtcgatcacgacattccagggatatgagatcaatgggtacacattctacacgagagcccaagacatgaagagcacgaaccaaaacagcgttgttcgtgtcgatgccatgggacacgatggaacaactgccacgtattacggtgccatcgaggacatatgggaacttgactatggtcctctcaaggttcctctgttccggtgccaatgggttaggttgactggtggaggcgtaatgattgatgacagtgggatgacaactgttgaccttaacaaggttggatactcggacgaaccttttgtccttgccaatgatgtaacgcaagtctttttcgtgaaggacatgtctagcaaaggaaagaagggcagagggcctgatgagcctaagcgtcaagtggttctcccaggcaaaagaaaaatcgtcggagttgaggacaagactgacgaggattacgatcagttggatgggcaaccccctttcacggtgacgattgaccctagcatcctcctatcaaatgaagacaccccttactcacgcagcgatcacaaggagggaacaatagtgaggagaaagtacgtgcggtcaaccgtcaccgccgatgtaatgccgtaa

SEQ ID NO: 16041 - DNA, 1075 bp, Oryza sativa
  Clone ID: PAT_MRT4530_21827C.1
gtggcattcgcacgccattgacacatatctcatcataccatcaccataccacatctcatctcacgcgtcccaaagaaagtgatagtgtacgtacctctgcttgctccttggctttctgagctgagctgctctgcagttggatgtgcgtgagctggtgatctgggaggagtcggagtcggaggaggagatgcctccggcgagggtgctcggcggcggtggtggaggaggggggttgggggacgaggcgccggagctggagaggcagatggggtgcatggccggcatcttccagatcttcgaccgccgccagcgcctgctcaccgcgcgccgccgccgcccgccgcccaagatgctgcccccgggcccaggccatactcttccaagaagcagcagcaatgttgcagcgcagagctcaagtacctccaagatcgttctggagaaaacattcagcaagagcatgaccgagaacagtagcctttcaatagagtcatcaagggcttcctgttcttcctcctcatgctcatccttttcatcacttgatggcaacaaatcgatccaacaagagctgccatacatcaacgagcagctctttgtacagaggccactgaagagctcaccaagtctgaaggacccagtcatggacaccaggtctggacagtcaaacattggcttcagagacattgtgaaggactccattaaccgggacaccggaggccttactgtcaagacctcggtgaaggatgcaaggaggaatgggcagtacaaagactcaccaaggcccttgctgctctccaaatcaatggatgggacctacgtcatcgggatcgataggagcaccaaggtccctgctaatgctgttgaatccagcaggcgattcccagagcagtcgcgcttctcatgcgatgatcggcggctcctgaggccagttgaagctcaagagaacaagaagccttccacaaggctcaaagagcttcccagactgtccttggacagtaggaaagaaaccctgagctcgagttctcgccagaagaccttcagttacaggagaaccgacgacagtctcatggacgctctt

SEQ ID NO: 16042 - DNA, 3219 bp, Oryza sativa
  Clone ID: PAT_MRT4530_21828C.1
atgtcgacaatatgtcatgggcaaatttcatcatctacttgccctagaagcaatgaaggtggaaaggagttggtaagacacctttcagttactagcaagatggatcggcaatggatgtacgctgaccggcggtccaaagagtttattgacggcgtgcactattttttgagaatggccgaagctaacaggcaaaggggttttatttgttgtccatgcaataagtgtaagaatcagaaggagtattctgcatccaggactattcatttccacttgtttgagtcggggttcatgccaagctataattgttggacatcccacggagagcaaggtgttgaaatggaagaagatgaagtggaagacgacaatattccggactttgctcagtatgttggatttgaaggaaatcaaacgggcgaggaggaaatagctgctgatggtaacgacattgcggatgatcttggtcagatgttgcaggacgccagggaagactgcgaaagtgaaaaggaggcccataaattggacaagatgttggaggaccacagaacttcgttgtacccaggttgcgagcaggggcacaaaaagttggataccactctggagttgttgcaatggaaggcaaaaaatggggttagtgacaaggcatttggcgatttattgaaactcgtcaagaacattcttccggggggaaacaaattgcccgagacaacgtacgaggctaagaagatagtctgcccgttaggactggaagttcataagattcacgcatgtccgaacgattgtatcctatatcgcggtgaggagtatgagaacctagaagcatgccctgtttgcaaagcactacgatacaagattagacgggacgatccaggagaagttgacgggcagctaacaaagaagagaattcctgctaaggtgatgtggtatttccctataataccacggctaaggcgtttgttcaggaacaaggggaatgctagaatgttgcgatggcacgctgaagagcgtcaacaggacgggatgctgagacaccccgccgatggttcgcagtggcgaaacatcgacagaaaatttaaagaatttggaaaggacgcacgaaacatacggtttggtttgagtacggatggcatgaatccttttggagagatgagcaacggccatagcacttggcccgttacgatgtgtatctacaacctcccctcctggctatgcatgaagaggaagtacataatgatgccgattattattcaaggccccaagcaacctggtaacgacatcgacgtgtacctaagaccactggtcgaagatcttaaacagttgtggaagaaggaagcaaaccacccggtacggaagaaaggcaagcacttcgaacataaggccgaccaccgtacgaagcctaaacatcgcagcgggaaaacagtgtttgctatggttaaagatcttaaagtagtgttcggaaaggggcctggaagccagcatatagagagcgaagatggtcacgcggcgatgtggaaaaagaactctatattttgggagttaccatattgggaattcttggacgtacgccacgcaatcgacgtgatgcacctcactaagaacctttgcgtaaaccttcttggcttcctaggtgtatacggaaagtcgaaagatacactggaagcacgtaatgatctgaagcatatggaacaacgcggcgaccttcacccggaaccaaaggagaaaggaagccattacttgagtccagccagctacactcttagcaaggcagagaaggaaagtatgtttgaatgcttggagagcataaaggtaccgtctggatactccacgaatatcaagcgaataataaacacgaaggagaagaagttcacaaacctaaagtctcatgactgtcacgtgttgatgacacaactgctaccagttgtaataaggggtatccttccagacaatgtccgggcaacaataacaaagctatgtgcattcatgaacgcaatttcgcagaaggtcatcgatccggatagattagaagcccttcagaatgaagtggtgcaatgtctcgtcagttttgagttgatatttccaccttcatttttcaatataatgacgcatctgctttgtcaccttgtgaaagagatccgtattctcgggcctatgtacctacacaacatgtttcctttcgagaggtacatgggcgttctgaagaagtatgttcgtaaccgtgcttgtccagaggcaagcatcgccaagggttatggaacagaggaggtcatcgaattttgcgtagaatttctcgaagaccttcgcccaatcggggtacctgaatcacgccatgaagggagactacggggaaagggaactctcggaaggaaagcaataatgacggtagacaacaatttattccgtaaagcccatttcactgttctgcaacactcttcattggtagctccttacatcgaggagcacttggctctagttcgcgccaggaacatcggtaagtccgatgcatggattacacggcatcacattgatactttccccgcgtggctacgacaacatctcatgggtaacgagtcgatcaaccaacaacttgccttcctggcgaggggaccgtctgggtcgatcgcgacattccagggatatgagatcaatgggtacacattctacacgagagcccaagacatgaagagcacgaaccaaaacagcgctgttcgtgtcgatgccatgggacacgatggaacaactgccacgtattacggtgccatcgaggacatatgggaacttgactatggtcctctcaaggttcctctgttccggtgccaatgggttaggttgactggtggaggcgtaatgattgatgacagtgggatgacaactgttgaccttaacaaggttggatactcggacgaaccttttgtccttgccaatgatgtaacgcaagtctttttcatgaaggacatgtctagcaaaggaaagaagggcagagggcctgatgagcctaagcgtcaagtggttctcccaggcaaaagaaaaatcgtcggagttgaggacaagactgacgaggattacgatcagttggatgggcaaccccctttcacggtgacgattgaccctagcatcctcctatcaaatgaagacaccccttactcacgcagcgatcacaaggagggaacaatagtgaggagaaagtacgtgcggtcaaccgtcaccgccgatgtaatgccgtaa

SEQ ID NO: 16043 - DNA, 2286 bp, Oryza sativa
  Clone ID: PAT_MRT4530_21829C.1
atggttcttggagatccatggagtagggttaataggggagacgtgagttccataggtgcccagggggaggtgtggcggcgtcggctgggaaggtgggagtcgcctctccctagggtattaggtgggggagggtattacaatattggtcagatattgcaggatgcaaaggagaacgatgaaagtgaaaaggaggcccataaattggagcggatgttagaggaccacagaacgtcgttgtatccaggttgtgagcaggggcacaaaaagttggatactactctggagttcttgcaatggaaggcaaaaaatggtgttagtgacaaggaatttggtgatttattgaaactcgtcaagaacattcttccggagggaaacaaattgcccgagacaacgtacgaggctaagaagatagtctaccctctaggactggaagttcagaagattcacgcttgtccgaatgattgtattctatatcgtggtgaggagaacaaggggaatgctagaatgatgcgatggcacgctgaagaacgtcaacaggacgggatactgagacaccccgctgatggttcgcagtggcgaaacatcgacagaaaatttaaagactttggaaaggacgcacgaaacatacagtttggtttaagtacggatggcatgaatacttttggagagatgagcagcagccatagcacttggaagtttgtgtacatgggtcatcgtcgattccttgttgcaaaccacctggtacggaagaaaggcaagcactttgaacataaggcggaccaccgtacgaagcctaaacatcgcagcgggaaaacagtgtttgctatggttaaagatcttaaagtagtgtttggaaaggggcctggaagccagcctatagagagcgaagatggtcacgcggcgatgtggaaaaagaactttatattttgggagttacccaattgggaattcttggatgtccgccatgcaatcgacgtgatgcacctcactaagaacctttgcgtaaaccttcttggcttcctaggtgtatatggaaagtcgaaagatacactggaagcacgtaatgatctgaagcatatggaacaacttggcgactttcacccggaaccaaaggagaaaggaagctattacttgagtccagccagctacactcttagcaaggcagagaaggaaagtatgtttgaatgcttggagagcataaaggtaccgtctggatactccacgaatataaagcgaatagtaagcacgaaggagaataagttcacaaacctaaagtgtcatgactgtcacgtgttgatgacacaactgctactagttgtaagaaggggtatccttccagacaatgtccgggcaataataacaaagttatgtgctttcatgaacgcaatttcgcagaaggtcatcgatccgaatagattagaagcccttcagaatgatgtgaggtacatgggcgttctgaagaagtatgttcgtaaccgtgctcgtccagaggcaagcatcgccaaggggtatggaacagaggaggtcatcgaattctgcgtagaatttattgaagaccttcgcccaatcggggtacctgaatcacgccatgaagggagactatggggaaaggggactctcggaaggaaagcaataatgacggtagacaataatttattccgtaaagcccatttcacggttatgcaacaatcttcattggtggctccttacatcgaggagcacttggctctagttcacgccagaaacatcgtgaggggaccatctggctcgatcgcgacattccaaggaaatgagatcaatgggtacacattctacacgagagcccaagacatgaagagcacgaaccaaaacagcgctgtttgtatcgatgccatgggacacgatggaacaactggcacgtattacggtgccatcgaggacatatgggaacttgactatggtcctctcaaggttggatactcggacgaaccttttgtccttgccaatgatgtaacgcaagtcttttacatgaaggacatgtctagcaaaggaaagaagggcaaagggcttgatgagcctaagcgccacgtggttatcctaggcaaaagaaaaatcgtcggatttgaggacaagactgacgaggattacgatcagttggatgggcaaccccctttcacggtgacgattgaccctagcatcctcctatcaaatgaagacaccccttactcacgcagcgatcacaaggagggaacaatagtgaggagaaagtatgtgcggtcaaccgtcaccgccgatgtaatgccgtaa

SEQ ID NO: 16044 - DNA, 6278 bp, Oryza sativa
  Clone ID: PAT_MRT4530_2182C.1
tacatagaatttacgcaattggtcaatgatccaagaatttgctaactcgcgaccatcaccgtctgcaatcttgaacgcgcctggccgcaagacctgtgtgatcgtgtatggtccttcccatttgggcgagagtttgtttcgccctgcttggctttgaactcgtcagaggacgtagtcaccgatcgaaagtatgcatgctcggatgcgcttctcgtggtatcggcgaagggcctgttggtagctagctgctctgacggcaacccgttctcgatgttcctctagtaggttcacgtcgtcgtttcgctgttcgtcctgatcctcgtcggagtacttctgtactcgtgtactctgatgtcgtaactcggtaggtagcatggcctctgagccgtacacgaggaagaaaggtgtctccttgttggacgttgtcggtgtagtgcgcacggcccattgtagggtcttgatcccttgtagtactatactgtttgccctctcgacctgtccgttactctgagggtgagaaaccaaggcaaagcatatcttgactcccagtccgatgcagtaatcttggaaatcagcgctgatgaattgggagccgttatccgttatgatgcggtgaggcaatccatatcggcaaaatatccccctaatgaatttgatggcgttatcggccttgatttcccccgtgggtgttgcctcgatccatttggtgaatttgtcgatcaccacgaacaagaatttgtagccgccctgtcgtcgtgggaatggaccgagtatgtcgagcccccagcacaagaacggccaagtgagagggatggtttgtagtgcttgcgctagtagctttgtatgtttgcatgtcgcaagcgtctttgagggcggttggccagaaaaatccttgtcgaaaggcttttccgaccaatgtacgaccggcggcatgtgacccgcagaccgcttcgtgtatgtcgtggagaaggtgtttgccatcgtcggacgagacgcattttagaagtaccccgtttggcgctttcttgtatagatcgttgccgatcatacggtagatttttgcttgacgggttattttctcggcttctgcgtcatcctcgagcaactcgtcgctgcttatgaatttaatgagtagggtccgccagtcgtccgtggtcttgatgtcggcaacggcgcgctctacctctgtagcccccgagctgatgtcgggggtgactgagctatcttcgtcatttgcctctttcactgatggttttgtcaggatgtccagaaaggtgccgggttcgagtggctctcgtctggacgcacgccgtgctagatcgtccggctcgatgttgtccttacgtatacgtgtcggacctcgatcctatcaaatctttttccagcttcctgacttctgtgaggtacttcgacaactcagggctagagcatttgtaatctttgtgcacctggtttatgactagttcagaatccccttcatactccaagtgcagctgcagctcttatcccagcgagtagtccttcatactcggctgtgttgttggtcgccctgaagttaaggtgaattgcatgcttgaactgatctcccgaaggtgatgtcaagatgaaccccgcacctgctccttggctgttgagcgcgccatcgaaagccattgtccatgtttcgttgtctgtcttgctgtctaacccgttttcaggcatagtccaatcggctacaaaatcggcgagaacttgggacttgatggctgttggtggtacaaagtggacgtcaaactggcttagctcgactacccatttcgcaatgcggtcgacaacgtctttgtttctcacgactttgccaagagggaaggcggagacaattgtgaccctttgggcttggaagtagtggcgtagctttcttgacgtcatgattacggcgtagagcagtttttggatctgttggtatcttgtctatgcgtcgtgtagagcttcgctgacgtaatagactggtctctgcaccttttctctttcgaaaataatgacagtactcacagagtagggcatggcggcgatatagaggaacaacacttcattaagttggggagcaacaagtacagggggatttgacaagtagcgcttgagtgcgatgaacgcctcttcggcttcctgtgtccatacaaatttgtcttgcttttttagcagtgcaaagaagggctgtcctcattctcccatcctagtgacgaacccacttagcgccaccatgcatccggttagcctctgtacttccttgagtcttgtgggtgacttcatattctcgattgccttgatcttctcgggatttgcttctattcctctgccagagacgaggaacccaagcagtttgcccgacggtaccccgaacgtgcacttctcaaggttgagcatgaggcgatatcgtctgaggttgtcgaaggtttcccatagatcgtcaatcaatgagtcacttgtcttggtcttgacaatgatgtcatcgacgtaggtctcaacattgttacccagctgatcgctaagtgccccttggaccgtacgctgaaaagtatttcctgcggttatgagtccaaacggcattttaacatagcagaatacaccaaacggtgtgatgaatgctgtcttctcctcgtcctcttttgccatgctgatttggtggtagccggagtaagcgtcaaggaagctgaacagctcgcaaccagctgttgagtccactagttggtctattcaagggagagggaagtgatccttggggcacgccttgttgaggtcggtgaagtcgacacacatcctccacttctcattggccttccgcaccatgactaggttggctagccactctggatggagtacctctctgatgaaaccagctttgacaagtttatcgagctcttctcgtatggcctgtttccgatctggtgcaaatctctacagtttttgctttactggcttggcatcgggtcacaccatgagtttgtgctcaatcacctccctggggacccccggcatgtcggacggctgccaagcgaatacgtccgcattgtcgcggaggaaggtgatgagcgcgagttctgtcttgtcggggttggcactggagagtggaacgattttgattgcgccgtctggtttcggcgtcttagtcgttttgatcactttcttgggtggctcggttgtggcgggtgggctgggcatgtgctcgaccatgtcgaggctctgcttgtcgcattggaccgccagctttgcgttcccttgaatagtgattgttccctttggcccgggcatcttgagtacctcatacgcgtagtgagatgcggccatgaacttcacgagtgcagttcttccgatgatggcgttgtatgctgtgtcaaactcagcaacatgaaaagttatctgctttgttcggaagttgcttgcttggccgaaggtcacaggaagcgtgatcttgcccaatggcttggacgaggactgaggagtgattccgtggaagggttgatcggtaggtgtcaactcgcttcgcggaattcccattgcgtccaaggtgctggcgaagaggagattgatggagctgccgccatcgacgaggactagtgctaccttgatattccgaatagtgggttcgaccacgatcggatatcgtcctgatataatagcagcgatgtgcgagacatgaagatcggaatctgggtatgtgaagtccgaatcctgagtggttgcctcagtggccttctcgactacacgtacttgcttgcccttctccaaagccagctacttttccaacgacttgttgaagatgaggcactcctctagagaatgtctgtccgacttgtgtatggggcaacatattctcttcgtatcactaccttgtgggtctgggtgtttgggcgggcgcttgtattcagatgcgaggacttctgcttgagctttcctcttcccactcttgccgcttttcttctttcttgattcgggtgcgtccttggctggcttcttctctcctcccgcctttggtttgtcgttcttgcgtctcagcgcgtcgtctgcatgggcgcatcgatcgacaaccttgaacaaccttcgagtagttgtgattcgccttgttgccaactcctgggtagtatagcgatctctgacaccggttttgaaagcgcaaatcatagaggcatcggtgatatcggggatcgtatttctgcagtcattaaagcgccgaacatagtccctcaaagattcacccggattctatgttaacgcgtgtaaatcgtcttcgatcgcgtggcgcttgtaagttccctagaagttagcgacgaattgttgccacaaatctgcccatgaagagatcgagtaaggtgggaggtgcattagccatgaacgcgcagaacctttcaacaccgttggcaaatagtttgctaacatgttgtcgtctaccccagcagcgtatagtaccgtggagtagacctggaggaattcttcagggtcaatactcccatcgtacttctctattgctccgggtcggaatctctcgggccatcggacatcacgtagagaacggttgaaagctctacacccagcgctagggcggtgggttgtcggcgatcgtgtgtcctccgtgggtgtctatcggatgacgaagatgaagatgatgacgatgatgacgatggttcactcggctccggtgtgcgattccgcgggcgacgttcaggttctcgagagttctgttgtcgtccaccattgttgtcctggcgctgacccccgttatcgtcaccgtcatgctgacgccctcgaccagcatcgtctggtgttcgctgatcatcgcggtcgcggcagttgtgacgatcatggcggtgttggtcctcgttcgagcggcctcctcgctcttcgttctcgtgacgtcatgaagaaacacgatgtcgggaacgattctcgttgtctcggcgcgtcctgcttctcggcggccattcagatggtcatggagatcgccggtgccgcgaggttgaggggtagctcatctcggcgacgtccgctgcttcggtggttcgccgtcggcaccttcagctgttggtcgttctggttgtgctctggtagcagcttcctcgaacgcattactgagattggctaccgattcccgtagtcgttctgtccaacgtgcgagatcattgttaagcacggggtcgtagggagcttctctcagtattgcgttgacggtgccgagatgttgggtcggcgtgaccgtctggttctccgcctctgcgttagcctgtgcagatgtgttagtcccaccgatggcaaacacgtcgcgcggtgtactggaagatgacgagccatagtcttcgagtaggtgaaggaccgatggctcatggggatcgatgtcgattactccaacgaatcgatctgaggtcaacgtcgcttcttgttccttgtctgtgtccttgagggaggttcctgactgttggaccttaggaagcgtcgttttcatggtgcggagaaagaccttgcagcttgagaagtcgtgattcttcgtcttgtgaataggacaatagatatcacgagttggagaagtacgctggattccacgctatttgcaagcaggaatttcagcttgtacattgagaaaaacccagcaagcttgcaagttgtgcttcctggatttgtgaataggacaccaggactttgtcacttcggaagatgtccttgtcggctcgcagttcttgtcggaaggacaagatttggccgaactaggaaccttctcgggctcatatggcatcgatgttccgttctccgccacggcgggaggatcctttgacacaggatcgtccgggtttatagccacgacgttctcgtttctggtcattgatgaatctgtcgagattggtaccgtggtgtaaaccggaaagacgatttcgccgacttgagtccacaccagcattgttgaagtagggactcctaggatggggccggtgttgacgccgttgtcgacgaagcttgatgtaatagtagtagaaccttaagcaccaaggccccctacctagcgcgccactgtcgacggtgggtacccgtagaccagatataaagggtattggggtacgctggtacgaggattttgtaggctgtggtcgttgtgtaggctctgaaattcgatgccttaggtcccttggggggtcccttttatatcgcaggtcaggcggtctccaagtaggactcggagacatcgcaccctacacgatatagtaacgacccagtcctatatgggtcggaacctttccattggtagacttcgtgat

SEQ ID NO: 16045 - DNA, 2491 bp, Oryza sativa
  Clone ID: PAT_MRT4530_21830C.1
gttggataccactctggagttgttgcaatggaaggcaaggaatggggttagtgacaaggcatttggcgatttattgaaactcgtcaagaacattcttccggggggaaacaaattgcccgagacaacgtacgaggctaagaagatagtctgcccgttaggactggaagttcataagattcacgcatgtccgaacgattgtatcctatatcgcggtgaggagtatgagaacctagaagcatgccctgtttgcaaagcactacgatacaagattagacgggacgatccaggagaagttgacgggcagctaacaaagaagagaattcctgctaaggtgatgtggtatttccctataataccacggctaaggcgtttgttcaggaacaaggggaatgctagaatgttgcgatggcacgctgaagagcgtcaacaggacgggatgctgagacaccccgccgatggttcgcagtggcgaaacatcgacagaaaatttaaagaattggaaaggacgcacgaaacatacggccccaagcaacctggtaacgacatcgacgtgtacctaagaccactggtcgaagatcttaaacagttgtggaagaaggaagcaaaccacccggtacggaagaaaggcaagcacttcgaacataaggccgaccaccgtacgaagcctaaacatcgcagcgggaaaacagtgtttgctatggttaaagatcttaaagtagtgttcggaaaggggcctggaagccagcatatagagagcgaagatggtcacgcggcgatgtggaaaaagaactctatattttgggagttaccatattgggaattcttggacgtacgccacgcaatcgacgtgatgcacctcactaagaacctttgcgtaaaccttcttggcttcctaggtgtatacggaaagtcgaaagatacactggaagcacgtaatgatctgaagcatatggaacaacgcggcgaccttcacccggaaccaaaggagaaaggaagccattacttgagtccagccagctacactcttagcaaggcagagaaggaaagtatgtttgaatgcttggagagcataaaggtaccgtctggatactccacgaatatcaagcgaataataaacacgaaggagaagaagttcacaaacctaaagtctcatgactgtcacgtgttgatgacacaactgctaccagttgtaataaggggtatccttccagacaatgtccgggcaacaataacaaagctatgtgcattcatgaacgcaatttcgcagaaggtcatcgatccggatagattagaagcccttcagaatgaagtggtgcaatgtctcgtcagttttgagttgatatttccaccttcatttttcaatataatgacgcatctgctttgtcaccttgtgaaagagatccgtattctcgggcctatgtacctacacaacatgtttcctttcgagaggtacatgggcgttctgaagaagtatgttcgtaaccgtgcttgtccagaggcaagcatcgccaagggttatggaacagaggaggtcatcgaattttgcgtagaatttctcgaagaccttcgcccaatcggggtacctgaatcacgccatgaagggagactacggggaaagggaactctcggaaggaaagcaataatgacggtagacaacaatttattccgtaaagcccatttcactgttctgcaacactcttcattggtagctccttacatcgaggagcacttggctctagttcgcgccaggaacatcggtaagtccgatgcatggattacacggcatcacattgatactttccccgcgtggctacgacaacatctcatgggtaacgagtcgatcaaccaacaacttgccttcctggcgaggggaccgtctgggtcgatcgcgacattccagggatatgagatcaatgggtacacattctacacgagagcccaagacatgaagagcacgaaccaaaacagcgctgttcgtgtcgatgccatgggacacgatggaacaactgccacgtattacggtgccatcgaggacatatgggaacttgactatggtcctctcaaggttcctctgttccggtgccaatgggttaggttgactggtggaggcgtaatgattgatgacagtgggatgacaactgttgaccttaacaaggttggatactcggacgaaccttttgtccttgccaatgatgtaacgcaagtctttttcatgaaggacatgtctagcaaaggaaagaagggcagagggcctgatgagcctaagcgtcaagtggttctcccaggcaaaagaaaaatcgtcggagttgaggacaagactgacgaggattacgatcagttggatgggcaaccccctttcacggtgacgattgaccctagcatcctcctatcaaatgaagacaccccttactcacgcagcgatcacaaggagggaacaatagtgaggagaaagtacgtgcggtcaaccgtcaccgccgatgtaatgccgtaa

SEQ ID NO: 16046 - DNA, 832 bp, Oryza sativa
  unsure (1)..(832): unsure at all n locations
  Clone ID: PAT_MRT4530_21831C.1
aggcgggtggcgggtggcaacgctccccaggcgncggcggagctcnaggccgccgggcggnaggccggcaaggcggcggatgaacggcacctgatctctgcgatgtggtttttttctgatctgtgcgatgtgtgcggtcgatctatgcgatgtggatttctttttctgatatgtgcggccgatctgagcgatgtggatttcttattctgatatgtgtgatgtgtgatgtgtgaatgattttgtggatatgattttgtgattttgtgaatgatttgtgatgtatttggagatagaaaatgcagcttgatgtatttggggattttgtgaatgatatgtggtgttggaatgatttgtggataatatgaatgatttgtggggctcgaaatcatgcatgcaggttgcataaccgggactatagtggggttgtgaaccgggactaaaaaggtttgtccaccagtatgtagtgcccatcacctgaagcttcgattcgttaaacctgtagcgttcccaaaaataacatgttccaagtatacctgtcatccacaaactctatattgagagaactgtaccatccaggggttgattgatcggcctagatcgtcacacctcttgcatgtgcaactatagtacttgatttagggtcggggccatcatatatgggccaatcgtggacgacgatcagtccgaatgaagctggatgggttgatggtaccatattttcttggttgtggttctgtccagagtacacttggtccaagtacaactgcatggtaatctcgttttcacggagcacatgctttactaggttaacactgaaagaaaagctggccat

SEQ ID NO: 16047 - DNA, 2673 bp, Oryza sativa
  Clone ID: PAT_MRT4530_21832C.1
atggtgaagaaaggtggtagagccagggaggggaacaagaaaccggacgacgacgatctcgtcaacaccatcttctcctggaccctggaagatgtcatgaaccagaacctcttcgccgacaaggttccatccatttcgttcgtcttttcaattcgtttggtgaacgccatacctgacaggttctccggtctgaagagctacctggattcgttcagggccctgttgctggaagagatacgagcggagatgagctctaacctggagacgttgccgaacaacagctcgtcgaccaaacacatacaatccctagttcgtgtacctacgggcttgcgacaatgcccgctgtatcgcgtcaccatttccgaccaacgtggagcttgcgctccatgcatcggtgacatcgtcgtgctcacggataccgtgccgcgacggccgtccgacctcgcgagcaacggccgctcctgctgcctcgcacacgtcaaggatgtcgtcaacagacgtaccttccttatcagagcggccaagaaaataggagatgcagactcgtatgctttcgccgctagtttgctcgcctttataccctacgcccgcatctggcgatgtcttgactacgattacgcgctcaagataaatcctccccttgtcatggccgtcgccggcgtcgcactacagaccacttcgttggcgggatcgtcgtcttttcaccgggcgaatggtggcaccgacgagataaccagtaggctgcctgcgttcgggctgaacgactcgcaggccggtgcgatacagagctgcgtctcggcggtgcagggcaacggcgcgagcaccaccagcggccggttcagcctcatctgggggcctcccggcacgggcaaaaccaagaccatcagcgtgctgctgctgatgctgatgacgacggcgacgagccagagcagataccgtgtcctgacgtgcgcgccgaccaacaccgcgatcagccaggtcgcgtcacggctccttgctctgagcaagcagcattccgccgctgccgccggcggactgtgccacggcgaccttctgctgtttggcaacaaggacaggatgggcattgacggtgatctgaaggaggtcttcctggacaatcgtgttaagattctccagaagtgtttctcgccggagtcgggttggaggcatggcctgagttcattacaagtttttctgagctttccgttagctctcagatgtcagtacatccaagcctgcattgcattaaaagatgggacagcattaccggagtcgtcatttgtcaggtcaaggtttcatgacatttgccagaagcttagcagatgttttcagacaatcttgtctcacgtccccaagtctgtgattcttgagaaaaattacaacaacattattttgctcacaacgatgctggagaacttcagaaagttgcttagtaagaatagtgcagcaggggatgaagtgctcgttggcatctttatgaaagaaaagaagcctgatggttcagatggtggagtggtacattcagatttggttcgaaatcttcggcagagcatgacacaaattcttggcgtcatcagtactcttctgcgagggttgcagcttcctgcaacaacctctcctttcaagatcaagaaattctgcctacgaagcgcctctcttattttctgcaccgtatcgggctctgcaaagctgtacgagcagaaaatggatttgcttctcatcgacgaggcagcacagttgaaggaatgcgaatccctcatcccgttgcaagtctctggcttgaagcatgctgttcttattggcgatgagtgccaactgcctgctactgtgaaaagcaaggctgcagatggtgccttactgggaaggagcctgtttgaaaggttaactctactgggacaccagaagcaccttctgaacatgcagtacaggatgcacccttccattagcatcttcccaaacttcagtttctacgacaagaaaatcctggatgggccgaatgtcacacacgtgaggcacgagcgtagcttccttcaaggggccatgtttgggccgtattcctttatcaacattgagaatggtagagaggatcctggccgcaacaagagaaacatggcagaggtggctgccatcaagaaaatactgcataatctatgcaaagcttgcgtcggtacaggggaaggggttagcgtaggcatcatatgcccgtatgccgcccaggtggaggcgatccagagcgggatagatgcgaacgctgttcgcccgctagacgtgcgcgtcaactccgtcgacggtttccaaggcagcgaggaggacatcatcatcctgtccaccgtcaggtccaacagtacaggatccatcggtttcctctccaaccgtcgccgcgccaacgtcgccctgacaagggcaaggcattgcctctggatcctgggcgacgcggcgacgttgctcggcagcggctccgtctggggggagctggtccgggacgccgtggatcgccggtgcttctacgactgggacgacggcggcgctggtttgctcggcgttgctcggcgcggacacgaggacgagctggacgatgcggtcgagttcgctacggcgtttgacacgttcgcagacgaagcggggtgcagagacgatatctgcgacgcgctaggctccctgaaactagcttag

SEQ ID NO: 16048 - DNA, 3134 bp, Oryza sativa
  Clone ID: PAT_MRT4530_21833C.1
atggatcggcaatggatgtacgctgaccggcggtccaaagagtttattgacggcgtgcactattttttgagagtggccgaagctaacaggcaaaggggttttatttgttgtccatgcaataagtgtaagaatcagaaggagtattctgcatccaggactattcatttccacttgtttgagtcggggttcatgccaagctataattgttggacatcccacggagagcaaggtgttgaaatggaagaagatgaagtggaagacgacaatattccggactttgctcagtatgttggatttgaaggaaatcaaacgggcgaggaggaaatagctgctgatggtaacgacgttgcggatgatcttggtcagatgttgcaggacgccagggaggactgcgaaagtgaaaaggaggcccataaattggacaagatgttggaggaccacagaacttcgttgtacccaggttgcgagcaggggcacaaaaagttggataccactctggagttgttgcaatggaaggcaaaaaatggggttagtgacaaggcatttggcgatttattgaaactcgtcaagaacattcttccggggggaaacaaattgcccgagacaacgtacgaggctaagaagatagtctgcccgttaggactggaagttcataagattcacgcatgtccgaacgattgtatcctatatcgcggtgaggagtatgagaacctagaagcatgccctgtttgcaaagcactacgatacaagattagacgggacgatccaggagaagttgacgggcagctaacaaagaagagaattcctgctaaggtgatgtggtatttccctataataccacggctaaggcgtttgttcaggaacaaggggaatgctagaatgttgcgatggcacgctgaagagcgtcaacaggacgggatgctgagacaccccgccgatggttcgcagtggcgaaacatcgacagaaaatttaaagaatttggaaaggacgcacgaaacatacggtttggtttgagtacggatggcatgaatccttttggagagatgagcagcggccatagcacttggcccttgtggaagaaggaagatgtccccgtgtgggacgaggacaaacaggaggagtttaacctacgagcgctgctgttcgtaaccatcaacgattggcctgcacttagcaacctatccggacagtccaacaaggggtacaaggcttgcactcactgtatggatgaaacagaaagtacgtatcttaagcactgtaggaaggttgtatacatgggtcatcgtcgattccttgcagcaaaccacccggtacggaagaaaggcaagcacttcgaacataaggccgaccaccgtacgaagcctaaacatcgcagcgggaaaacagtgtttgctatggttaaagatcttaaagtagtgttcggaaaggggcctggaagccagcatatagagagcgaagatggtcacgcggcgatgtggaaaaagaactctatattttgggagttaccatattgggaattcttggacgtacgccacgcaatcgacgtgatgcacctcactaagaacctttgcgtaaaccttcttggcttcctaggtgtatacggaaagtcgaaagatacactggaagcacgtaatgatctgaagcatatggaacaacgcggcgaccttcacccggaaccgaaggagaaaggaagccattacttgagtctagccagctacactcttagcaaggcagagaaggaaagtatgtttgaatgcttggagagcataaaggtaccgtctggatactccacgaatatcaagcgaataataagcacgaaggagaagaagttcacaaacctaaagtctcatgactgtcacgtgttgatgacacaactgctaccagttgtaataaggggtatccttccagacaatgtccgggcaacaataacaaagatatgtgcattcatgaacgcaatttcgcagaaggtcatcgatccggatagattagaagcccttcagaatgaagtggtgcaatgtctcgtcagttttgagttgatatttccaccttcatttttcaatataataacgcatctgctttgtcaccttgtgaaagagatccgtattctcgggcctatgtacctacacaacatgtttcctttcgagaggtacatgggcgttctgaagaagtatgttcgtaaccgtgctcgtccagaggcaagcatcgccaagggttatggaacagaggaggtcatcgaattttgcgtagaatttatcgaagaccttcgcccaatcggggtacctgaatcacgccatgaagggagactacggggaaagggaactctcggaaggaaagcaataacgacggtagacaacaatttattccgtaaagcccatttcactgttctgcaacactcttcattggtagctccttacatcgaggagcacttggctctagttcgcgccaggaacatcggggaccgtctgggtcgatcacgacattccagggatatgagatcaatgggtacacattctacacgagagcccaagacgaagagcacgaaccaaaacagcgctgttcgtgtcgatgccatgggacacgatggaacaactgccacgtattacggtgccatcgaggacatatgggaacttgactatggtcctctcaagattcctctgttccggtgccaatgggttaggttgactggtggaggcgtaatgattgatgacagtgggatgacaactgttgaccttaacaaggttggatactcggacgaaccttttgtccttggcaatgatgtaacgcaagtctttttcgtgaaggacatgtctagcaaaggaaagaagggcagagggcctgatgagcctaagcgtcaagtggttctcccaggcaaaagaaaaatcgtcggagttgaggacaagactgacgaggattacgatcagttggatgggcaaccccctttcacggtgacgattgaccctagcatcctcctatcaaatgaagacaccccttactcacgcagcgatcacaaggagggaacaatagtgaggagaaaggcaaatccccgcgccgacgccgccgtatctcgccgtcgtcttgagctcgtcgtcctcgccgccgcctccgcctcctccgctgccgccgcatctctggg

SEQ ID NO: 16049 - DNA, 682 bp, Oryza sativa
  Clone ID: PAT_MRT4530_21834C.1
atggagggcgacgaggaatggcgtggggtcctgggcgacagtggatctagagcagttgatggtgcggcccaccagatcgacgacgagagacgcctccgctactcgccgccctcagccgcctccgccgcttgccacccttaccccgctgctgtgtaacgctgcctccatgggagatgcggtcgactggcatcgttctcgcgtccgccgcccagcttttctcccggtgcctcccgccatagtgccctgttggcgatgcgccctcccgggcgtcgtcgtgctcaatgccgcccgcctcaccccttaaggcgccggcgaggaagtcgcggaggctggggttggagaggcgggtgacctcgaaggtaagcaactcatggtgcttggacgccactggcggcacctccaccttcggcagacggtggaacgtcatggccgggttggccgcggtgacgccggtgaggaaagcccccgttgcaccggtgttgctgtatggtgggtcgacgacgacgacggtgacggcgaggccgcgggcggcgaacaccttgccgaactcgatcatggagaccaggtggcccatgcacgccgctgcttcatgctcagccgcgtcgccgcgtcgggctccaccatgccgccgaatcatgctctgccgcttcgccttgttcacctctctgccgcgccgccacat

SEQ ID NO: 16050 - DNA, 1314 bp, Oryza sativa
  Clone ID: PAT_MRT4530_21835C.1
atgggtcatcgccgattccttgttgcaaaccacccggtacggaagaaaggcaagcactttgaacataaggtggaccaccatacgaagcctaaacatcacagcgggaaaacaatgtttgctatgattaaagatcttaaagtagtgtttggaaaggggcctggaagccagcctatagagagcgaagatggtcacgcggtgatctggaaaaagaacactatattttgggagttaccctattgggaattcctggacgtccgccacgcaatcgacatgatgcacctcactaagaacctttgcgtaaaccttcttggctacctaggtgtatatggaaagttaaaagatacacttgaagcacgtaatgatttgaagcatatggaacaacgcgacgaccttaacccggaaccaacggagaaaggaagccattacttgagtccagctagctacactcttaacaaggcagagaagaaaattgtaataaggggtatccttccagacaatgttcgggaaataataacaaagctatgtgctttcatgaacgcaatttcgcagaaggtcatcgatccggatagattagaagcccttcagaatgatgtggtgcaatgtcttgtcagttttgagttgatatttccaccttcatttttcaatataatgacggatctgctttgtcaccctatcaaagagatcagtattctcgggcctgtgtacctacacaacatgtttccgttcgagagggagactacgggacaggggactctcggaaggaaagcaataatgacggtagacaacaatttattccgtaaagcccatttcacggttttgcaacaatcttcattggtggctccttacatcgaggagtacttggctctaggtctcgccagaaacatcgcccaagacatgaaaagcacgaaccaaaacagcgatgttcgtatcaatgccatgagacatgatggaacaactggcacgtattacggtgccatcgaggacatatgggaacttgactatggtcctctcaaggtccctctgttccggtgtcaatgggttaggttgactggtgaaggcataacgattgatgacagtgggatgacaacggtagaccttaacaaggttggatactcggacgttccttttgtccttgccaatgatgtaacacaagtcttttacgtgaaggacatgtctagcaaaggaaagaagggcaaagggcctgacgggccaaagcgccacgtggttctcccaggcaaaagaaaaatcatcggagtagaggacaagactgacgaggattacaatcagttggatgggcatcctcctatcaaatga

SEQ ID NO: 16051 - DNA, 3219 bp, Oryza sativa
  Clone ID: PAT_MRT4530_21836C.1
atggatcggcaatggatgtacgctgaccggcggtccaaagagtttattgacggtgtgcactattttttgagagtggccgaagctaacaggcaaaggggttttatttgttgtccatgcaataagtgtaagaatcagaaggagtattctgcatccaggactattcatttccacttgtttgagtcggggttcatgccaagctataattgttggacatcccacggagagcaaggtgttgaaatggaagaagatgaagtggaagacgacaatattccggactttgctcagtatgttggatttgaaggaaatcaaacgggcgaggaggaaatagctgctgatggtaacgacgttgcggatgatcttggtcagatgttgcaggacgccagggaagactgcgaaagtgaaaaggaggcccataaattggacaagatgttggaggaccacagaactttgttgtacccaggttgcgagcaggggcacaaaaagttggataccactctggagttgttgcaatggaaggcaaaaaatggggttagtgacaaggcatttggcgatttattgaaactcgtcaagaacattcttccggggggaaacaaattgcccgagacaacgtacgaggctaagaagatagtctgcccgttaggactggaagttcataagattcacgcatgtccgaacgattatatcctatatcgcggtgaggagtatgagaacctagaagcatgccctgtttgcaaagcactacgatacaagaatagacgggacgatccaggagaagttgatgggcagctaacaaagaagagaattcctgctaaggtgatgtggtatttccctataataccacggctaaggcgtttgttcaggaacaaggggaatgctagaatgttgcgatggcacgttgaagagcgtcaacaggacgggatgctaagacaccccgccgatggttcgcagtggcgaaacatcgacagaaaatttaaagaatttggaaaggacgcacgaaacatacggtttggtttgagtacggatggcatgaatccttttggagagatgagcagcggccatagcacttggcccgttacgatgtgtatctacgacctccccccctggctatgcatgaagaggaagtacataatgatgccgattattattcaaggccccaagcaacctggtaacgacatcgacgtgtacctaagaccactggtcgaagatcctaaacagttgtggaagaaggaaggtgtccccgtgtgggacgaggacaaacaggaggagtttaacctacgagcgctgctgttcgtaaccatcaacgattggcctgcacttagcaacctatccggacagtccaacaaggggtacaaggcttgcactcactgtatggatgaaacagaaagtacgtatcttaagcactgtaggaaggttgtatacatgggtcatcgtcgattccttgcagcaaaccacccggtacggaagaaaggcaagcacttcgaacataaggctgaccaccgtacgaagcctaaacatcgcagcgggaaaacagtgtttgatatggttaaagatcttaaagtagtgttcggaaaggggcctggaagccagcatatagagagcgaagatggtcacgtggcgatgtggaaaaagaactctatattttgggagttaccatattgggaattcttggacgtactccacgcaatcgacgtgatgcacctcactaagaacctttgcgtaaaccttcttggcttcctaggtgtatacggaaagtcgaaagatacactggaagcacgtaatgatctgaagcatatggaacaacgcggcgaccttcacccggaaccaaaggagaaaggaagccattacttgagtccagccagctacactcttagcaaggcagagaaggaaagtatgtttgaatgcttggagagcataaaggtaccgtctggatactccatgaatatcaagcgaataataagcacgaaggagaaggagttcacaaacctaaagtctcatgactgtcacgtgttgatgacacaactgctaccagttgtaataaggggtatccttccagacaatgtccgggcaacaataacaaagatatatgcattcatgaacgcaatttcgcagaaggtcatcgatccggatagattagaagcccttcagaatgaagtgatccgtattctcgggcctatgtacctacacaacatgtttcctttcgagaggtacatgggcgttctgaagaagtatgttcataaccgtgctcgtccagaggcaagcatcgccaagggttatggaacagaggaggtcatcgaattttgcgtagaatttgtcgaagaccttcgcccaatcggggtacctgaatcacgccatgaagggagactacagggaaagggaactctcggaaggaaagcaataacgacggtagacaacaatttattccgtaaagcccatttcactgttctgcaacactcttcattggtagctccttacatcgaggagcacttggctctagttcgcgctaggaacatcggtaagtccgatgcatggattacacggcatcacattgatactttccccgtgtggctacgacaacatctcatgggtaacgagtcgatcaaccaacaacttgccttcctggcgaggggaccgtctgggtcgatcgcgacattccagggatatgagatcaatgggtacacattctacacgagagcccaagacatgaagagcacgaaccaaaacagcgctgttcgtgtcgatgccatgggacacgatggaacaattgccacgtattacggtgccatcgaggacatatgggaacttgactatggtcctctcaaggttcctctgttccggtgccaatgggttaggttgactggtggaggcgtaatgattgatgacagtgggatgacaactgttgaccttaacaaggttagatactcggacgaaccttttgtccttgccaatgatgtaacgcaagtctttttcgtgaaggacatgtctagcaaaggaaagaagggcagagggcctgatgagcctaagcgtcaagtggttctcccaggcaaaagaaaaatcgtcggagttgaggacaagactgacgaggattacgatcagttggatgggcaaccccctttcacggtgacgattgaccctagcatcctcctatcaaatgaagacaccccttactcacgcagcgatcacaaggagggaacaatagtgaggagaaagtacgtgccgtaa

SEQ ID NO: 16052 - DNA, 222 bp, Oryza sativa
  unsure (1)..(222): unsure at all n locations
  Clone ID: PAT_MRT4530_21837C.1
aaccccagcaactgagcttagatggccatggctgcnctgctgctgctggcctggttggacttggtcatancgtttgcatgtgagggantgtgtnttaanaaaanggtntngggttccnaggcnanccannttgnaatgattttgttgttcccagcttaaattatcatcaccgttactgttgttaatcaaaccggtgggatttgttgtaaaaaaaaaaaaaaa

SEQ ID NO: 16053 - DNA, 2772 bp, Oryza sativa
  Clone ID: PAT_MRT4530_21838C.1
atgacaatattccggactttgctcagtacgttggattggaagcaaatcaagcgggcgaggaggaaagggatgctgatggtaacgatgttgcaggatgccaaggaggactgcgaaagtgaaaagggggcccataaattggacaagatgttagaggaccacataacttcgttgtacccaggttgcgagcaggggcacaaaaagttggataccactctggagttcttgcaatggaaggcacaaaatggggttagtgacaaggcatttggcgatttattgaaactcatcaagaacattcttccggagggaaacaaattgcccaagacaacgtacgaggctaagaagatagtctgcccgctaggactggaagttcagaagattcacgcatgtccgaataattgtatcctatatcgcggtgaggagtatgagaacctagaagcatgccgtgtttgcaaagcactaccatacaagattagacaagacgatccaggagaagttgacgggcagctaataaagaagagaattcctgctaaggtgatgtggtatttccctataataccacggctaaggcgtttgttcaggaacaaggggaatgctagaatgatgcgatggctcgctgaagagcgtcaacaggacgggatgctaagacaccccgccgatggttcgcagtggcgaaacatcgacaggaaatttaaagaatttggaaaggacgcacgaaacatacggtttggtttgagtacggatggcatgaatccttttggagagatgagcagcggccatagcacttggcccgttacgatgtgtatctacaacctccccccctggctatgcatgaagaggaagtacataatgatgccgattattattcaaggccccaagcaacctgcaaaccacccggtacggaagaaaggcaagtacttcgaacatcaggctgaccaccgtacgaagcctaaacatcgcagcgggaaaacagtgtttgctatggttaaagatcttaaagtagtgttcggaaaggggcctggaagccaacctatagagagcgaagatggtcacgcggcgatgtggaaaaagaactctatattttgggagttaccctattgggaattcttggacatacaccacgcaatcgacgtgatgcatctcactaagaacctttgtgtaaaccttcttggcttcctaggtgtatgcggaaagtcgaaagatacactggaagcacgtaacgatctgaagcatatggaacaacgcgacgaccttcacccggaaccaaaggagaaaggaagccattacttgagtccagccagctacactcttagcaaggcagagaaggaaagtatatttgaatgcttggagagtataaaggtaccgtttggatactccacgaatatcaagcgaataataagcacgaaggagaagaagttcacaaacctaaagtctcatgactgtcacgtgttgatgacaaaactgctaccagttgtaataaggggtatctttccagacaatgtccggacaacaataacaaagctatgtgcattcatgaacgcaatttcgcagaaggtcatcgatccggatagattagaagcccttcagaatgatgtggtgcaatgtctcatcagttttgagttgatatttccaccttcatttttcaatataatgacgcatctgctttgtcaccttgtgaaagagatcggtattctcgggcctgtgtacctacacaacatgtttcctttcgagaggtacatgggcgttctgaagaagtatgttcataaccatgctcgtccagaggcaagcatcaccaagggttatggaacagaggaggtcatcaaattttgcgtagaatttaccgaagatcttcgcccaatcgaggtacctgaatcacgccatgaagggagactacggggaaagggaactctcgaaaggaaagcaataatgacggttgacaacaatttattccataaagcccatttcatggttctgcaacaatcttcattggtagctccttacatcgaggagcacttggctctagttcgcgccaggaacatcggtaagtccgatgcatggattacacggcatcacattgatactttccccgcgtggctacgacaacatctcatgggtaacaagttgatcaaccaacaacttgccttcctggcgaggggaccgtctaggtcgatcgcgacattccagggatatgagatcaatgggtacacattctacacgagagcccaagacatgaagagcacgaaccaaaacagcgttgttcgtgtcgatgccataggatacgatggaacaactggcacgtattatggtgccatcgaggacatatgggaacttgactatggtcctctcaaggtccctctgttccggtgccaatgggttaggttgactggtaggggcataatgattgatgacagtgggatgacaacggttgaccttaacaaggttggatactcggacgaaccttttgtccttgccaatgatgtaacgcaagtctttttcgtgaaggacatgtctagcaaaggaaagaagggcagagggcctgacgagcctaagcgtcacgtggttctcccaggcaaaagaaaaatcgtcggagttgaggacaagactgacgaggattacgatcagttggatgggcaaccccctttcacgttgacgattgaccctagcatcttcctatcaaatgaagacaccccttattcacgtagcgatcacaaggagggaacaatagtgaggagaaagtacgtgcggtcaaccgtcaccgccgatgtattgccgtaa

SEQ ID NO: 16054 - DNA, 558 bp, Oryza sativa
  Clone ID: PAT_MRT4530_21839C.1
atggcctatgggctcgtgcggtcgctgctggtggcggcagccgacggcaactcggcaaggcggcaggcgcgcggatgcgccgatgcgataccggaattaggaacgttgactgttaggcatagaaatcgctacgacgctactactgtggctctgctgcctcctgtttggccatcgcaggggccatgtggtgcgggtggggggccctacgatcgggggcggcccagagcggttgcactgctcgccacccgtcagggccggccctggacgatgcgcgagccggcttggacgtggaggaacgtcgcccactggccgattgcatggtgctgctcggctgaccgtgacgcgcaccggacgtacgacggcgggagggaggcccgcaagctctttccctgtcctcttctccctgcagccgggacccgggagcgtatgaacggcgagggggaagctctcggtgcggcacgagagctcggtcggggacgtcgacgcgagaggcgcgcgggtgggtttgccctggcaggaaccgacaagcccggcctcggagctcactcgcgtagatag

SEQ ID NO: 16055 - DNA, 2451 bp, Oryza sativa
  Clone ID: PAT_MRT4530_2183C.1
atgcggacctattcgcttggcagccgtccaacatgccgggggtcccagggaggtgattgtgcacaaacttatgaccaactggtggactcaacagctggttgtgagctgttaaacttccttgatgcttactccggctaccaccaaatcagcatggcagaagaggacgaggagaagacagcattcatcacaccgttcggtgtattctgctacgtcaaaatgccgtttggactcataaccgcagggaacactttccagcgcacggtccaaggggcacttagcgatcagctgggtaacaatgttgaggcctatgtcgatgacatcgttgtcaaaaccaagacatgcgactcattgattgacgatctacgggaaaccttcgacaaccttagacgatattgcctcatgctcaatcctgagaagtgcatgttcggggtaccgtcaggcaaactgctcggattcctcgtctctggcagaggaatagaagcaaatcccgagaagatcaaggaaatcgagaacatgaagtcgcccactagactcaaggaagtacagaagctaaccggatgcatggtggcgctaagtagcaaagctctacacgacgcaaagacaaggtacccacagatccaaaaactgctctacgcagtaatcatgacgtcgagaaagctacgccactacttccaagcccacagggtcatagttgtctccgccttccctcttggtgaagtcgtgagaaacaaagacgttgtcggccgcattgcaaaatgggtagtcgagctaagtcagtttgacgtccactttgtaccacgaacagccatcaagtcccaggttctcgccgatttcgtagccgattggactatgcctgaaaacaggttagacagccagactgacaacgaaacatggacaatggcgttcgatggtgcacttaacagccaaggagcaggtgcggggttcatcttgacatcaccttcaggagatcagttcaagcatgcaattcaccttaacttcagggcgaccaacaacatagctgaatatgaaggactactcgcggggataagagctgcagctgcacttggagtcaagcgacaaatcgtgaaaggggattccgaactagtcgcaaaccaggtgcacaaagattacaaatgctctagctctgagctgtccaagtatctcgcagaggtcaggaagctggaaaaaaatttgatgggatcgagcccgggggctacagaggcagaacgcgccgttgccgacatcgagaccacggacgactggcggaccccactcattaaattcataaatagcgacgagttgcctgaggacgacgcagaagccaagaaaataacccgtcaaggaaaaatctattgtatgatcggcaacgatttatacaagaaggcaccaaacggggtacttctaaaatgcgtcttgtccggcgacggtaagcacctcctcctcgacatacatgaaggggtctgcgggtcacatgccgccggtcgtacattggtcggaaaagcctttcgacaaggatttttctggccaaccgccctcaaagacgcttgcgacatggggctcgacatactcggtccattctcacgaggacagggcggctacagattcctgttcgtggcgatcgacaaattcaccaaatggatcgaggcaacacccacaggagaaatcaaggccgacaacgccatcaagttcattaaggggatattttgccgatatggattgcctcaccgtatcataacggataacggctcccaattcatcagcgccgattttcaagattattgcatcggactaggagtcaagaaatgcttcgcctcggtttctcaccctcagagtaacggacaggtcgaatgggcaaacagcatagtactacaagggatcaagacccgtgtctatgacaggctcatgtcacatgataagaagtgggtcgaagaactcccctcgaagtactccgacgagaatcaggaggaacagcgaaacgacgacgtgaacctactcgaggaatatcgagaacgggtcaccgtcagagcagattcctccgagaacaggaaaaacccttgtgaaggaactcgagatgcaactgcggacgatgatctcgtacacacgccagcacacaacgaccatggttgtgcaacaactcctgaggtacgagttgaaccatacctcgcgacctcggagcgcctccacggcccggtccctcttctcttccaatatagtcctctcaagttcggcgacctcgaacttcgtcctccagtactagatgcgacggtcgcgatcagcaagcatgctctcaagatcctggtccatgccgtcccgcggcacatacggctcgagctcaagtgccggaacgactacaggcaattcgggatacccgtgctgttggacatcctcgacatcggcatctctacaaacaacaggcaaagtacccggaatcaaaacgccaaagaaaactaa

SEQ ID NO: 16056 - DNA, 263 bp, Oryza sativa
  Clone ID: PAT_MRT4530_21840C.1
gccacgcgtacagtgtcaaagagagggtatctgcaccttgctctgatataccttcagagataccggaagcaacggcgcctactactgtcctcgagtcatatttgcttgccaagaaggccacacggcatgccacccgccaggatgccgtcaccaagtcgatgactgtcttcatgggtgcccacgccgatgacttcgacaataagcttgtcacgaccgcgtaaaccattggatcaccaggaacgatgattcttgccatcgatgac

SEQ ID NO: 16057 - DNA, 1017 bp, Oryza sativa
  Clone ID: PAT_MRT4530_21841C.1
atggctcgagagccaccgccgtcgctcgtcgacatcctctcatcctcggcgggtgggctcgggagctactatcgtcgtcgccatcgtcttcgactttctcccatccgcggtggtagagctcgggagccgtcgacctcccatcagcggcaatccgccatcatcagcctccttcgctcatcctcctcccttgccaacgccctcctcgttgaagagccaggcggcggcggcggcggccgacggcgacgctggttcgccgtactgctgtgcttcggaggagacggtaacgacaaggatgaggcggcggggaggccgccgcggaggaggaagcgcaccgtgccggtggacggcgccggagacgacgacggggcggtttcctcggcgggatcggctgagcgggagatgaggcgcggcgaacggcggcctcgccgccggcgaggcggctgcggcttcttgctgccgctgtcgtcgtgcgtgcctggactactcaagcgtaatgtcaggagaaacagcaacagcagcaacgacgtccatggcgggcagcggcagcagcacgagcccaccgcgccgccactgccgcgaccggccgagctgccgccgccaccgccaccgcctcgacgacgccacgacgtcgtcgctccggccacgacgcgcggcgccggcgccggcgccggcgccatcgccgacgccgagacggccgaatcaaaaggcgacgtcgtcgtcgtggcgagctcgcgcgaacgcgcgagcagctgcggccacggcgagttcgggccggcgatgggggtgtgcgtggtggcggcggtgtcgatggcggggctgctcggcggccggctctgggccgtcgtctgcgtgtgcgcgtggctcgccgcggtgtacgggctccagctcaatcggcgccgggcgaagccgccgccggcggctgacggcggaggcgaggaggtcgtcggcgacgtgaactcgaaggattacaagaagctggttgtgctcaaggggcttctccagcgtgatcgcagatag

SEQ ID NO: 16058 - DNA, 588 bp, Oryza sativa
  Clone ID: PAT_MRT4530_21842C.1
atgccgcgcagccacagcgtgagcgccaccatcgtccgggggagcctcgccaccgtgacgaccctcgccacccccatgggcctctcccccgccgccaccatcgccaccgcgtctttgccatttgcgcccatgctaccgaggggaagccgggacgaacgaacagtcggcggcaggcgggcgttccctgaaaagaagattgtgcaacagtccaggaactcgaagatgaacaagggtaaaatttttaagttagcaaaaggattcaggggaagggcaaaaaactgcataaggattgctagggagagggtggagaaagcattgcaatactcatacagggatcggcgcaacaagaagagggacatgcggtctctttggattgagcgcatcaatgctggtacacgaatccatggggtgaactatggcaatttcatgcatggattgatgaaggagaatatccaactcaacaggaaggtactttcagagctgtcgatgcatgagccatacagcttcaaagctcttgtcgacgtctctcgcactgcattccctggaaataggcctgttaagaaggaggggctagcgagtattctttaa

SEQ ID NO: 16059 - DNA, 2447 bp, Oryza sativa
  Clone ID: PAT_MRT4530_21843C.1
ctctctccagctcccctccctcccttctctccctcgcgtctctcctccgtctcttctccaccggcgccggcgccatccatcctcactaactagctcctcccaccccatagttggcggcggcggtttcggcgtggcgacgacgacgcgatgcgggtgcgcggcagcggcggtaggcgggtgggtgacggcagcgggaggcggcgcgggcgtgggcgtgggcgcggcggcgctcgggagcgggcggcggcccgcggggaggccggatccgccgccaccgggccgcggggaggcgggatccgccactgtcgaccttgctgccacaggtacctcacaaacaattgagattgatgctgatgttaatagggttgatgacaatgatgagcgtcctgtgaaaaggaaaaaattgacatcagaagtctggcagtacttcaacaaggaaaaagtgagtatagatgagaatggtaagatctataaacaggagtgggcacattgcaaattcaagaattgcacttacaaaggtagatgtgagagtgccactggaacaagcggattttggagccatctgaaattacatcacagtgttgtcaaagggcagcaacaactcaaagctcagaaggaccaagagaagggcatcaacgttgttgaaccttacaagtatgatgaggaagctagcttgaggaagttatatgtggcaataatcatgcatgagtaccctttcaatatggttgggcatgaatattttcgtgatttcattacatcgttgcgccctaactttccattgaaatcccgtgtaacagttagaaaagaaatattgagcatctatatgcaggaaagggataagttgtatgaatatctcaaaactgtgaaatgccgcattagtgcgaccatggatatgtggacatccaatcaaaacaaaggatatatgtgcatcacactgcattgggttgatgatgattggtgtattcagaaaagaattgtcaccttttcccatgtggaaggacgtcatactggtgttagactatctgagggttttactacaagtatgctgagatggtttgttgagaagaaaatgttttctttgactttggacaatgcatctgcaaatgatgttgctgttaaggatataatttgttgctgttaaggatataatttctgaacttaagaagcacagtcccttagtatgtattggcctgttttttcattttagatgtgcctgccacatactgaatttggttgctaaagatggtttgcaagaaattgaatcaacaattgagaaaattaaatcctttgtcaatgctgtaaagggctctccgttgcagtgggaggagttaatgaagtgtgcttctgaaagtgggttggacacaaccaaaggactattaaatgatgtttctacaaggtggaactcaacctatctcatgttggcagatgctatctattatagggctgcttttgacaggcttacatcctatgatcggcgcaggtatgagaaaatgtgcccttcagctgcagagtgggagaaagcaatgaaaattcgcgcattcttgaaaagattctttgatcttactgagcttttctctggtactttatatcctacagcaaacttgttttacaaaggattctgtgacattaagattatacttactgattggagtaagggcaaggattctgatattactattagaaggatggcaactgctatgcttgctaagtttgacaaatattggaataagtctaacactgctcttgctgtggcaagctttcttgatcctagattcaagatgagaatagtacaattttgcatggagttcatacactaggatatgcatccaattaaggttactgaatttctcaatatcatccggaacatgtatgactgctatgcttctgctgcacctcctagaaatcataatgcatttgaacctattgatacaccagatgcaaatcaagatccaactgagtttgttagtgcacttgataagtatctatatcgtgctgaaacacataacacttcttcaaaagtaaatgatttggagaagtacctgtcagaagaaactttgaaggttactaaagcaaatgaaagtacatttgatattttagcttggtggaagaaccagaaagatacttatcatgttctctccttacttgctcgtgatgtgctggctatgcaagcctcaacagttgcttctgaatcggcctttagcgctggtggccgtgtcgttgatccatattgcagtcgtcttgattctgaaatggcacaagcattgatttgtactaaagattggatagctggagtaagaagaggtaagaattacaacagtttagacattttatttatatcacacacgattacattttgataaaagatatatgttcaaaacagtgttgtaccacttacagaaaattatttcatcacttgatcaaaatatttcagtccactttgtgaaatg

SEQ ID NO: 16060 - DNA, 472 bp, Oryza sativa
  Clone ID: PAT_MRT4530_21844C.1
ctcgctcgattccgagagatcaatggggggatctaatcaaactggggggcgtttgagagagaggaataggaagaggaaccgaggagcctaagagcacggtagctagggcagcttgggcatggccagccgtcggtttctggcgacaacgagactggtggcaagaaccggcggctgtggtcgctccactagagctggaggatatcaacgtgactacggtggcgttctaggaggggtacacgccgctattcggcttagacaacatacttcgtttcggccacgaccgcaccgtcaaccttctcctagagcgctgcaccgattctggggtcatgtagtcgtccatgtaccaacacgggttttttagtgcctgcatcaaactccccttttactacaccgccggcgtcgtcctcgccttctacacatctaacggcgacatgatctataagctgatcgacgagctggacttccatttcct

SEQ ID NO: 16061 - DNA, 238 bp, Oryza sativa
  Clone ID: PAT_MRT4530_21845C.1
gcactctgtttacaagtttccattattcaattccaggccgaagtgcaaagtgcccacgtatcctcctaactatacacaaaaaaccatctctgacgaaagggcggctgactacagagaacaggccagcaaatttcaccaagataatatgctgccatagggcgaacaggaaactccaaaattttgaagggctctgatccgggccaccacggtactgaccgtgacgagcactaaaacccag

SEQ ID NO: 16062 - DNA, 308 bp, Oryza sativa
  unsure (1)..(308): unsure at all n locations
  Clone ID: PAT_MRT4530_21846C.1
cctccgccctgccantggcttgcatgggcgntccacatcgctgcatgggcttgggcatcccctatcttgttcattaatattggtcaaacaatcatctcccataaccattccatcttctctttaatttgcttaatatattaaaattgcacaccagtgtagttgcgggtggcacgtgtgcgtttgcatgcactgtgtaggtggtcttttgcatcaagcggtctgtgtcttgcgtgtcgtccttgtatgcgtaacagtgtaataacgtgctgcttgtatgaatattgtaatttgtggtaaaaaaaaaaaaa

SEQ ID NO: 16063 - DNA, 419 bp, Oryza sativa
  Clone ID: PAT_MRT4530_21847C.1
tttcactattttttttgacagcactggagcacttcctcagctgtaaataagcttgccagataaaaagtacagaagttttcagttcaagaaaaaaacaagcacgagccaagggataatcccgccatgacaacatggcgcaccattgcttaaccgtgagcttcatggtgaagaatccatagaggaggcagaggacgctggaggggctgcggcagttgccagtcatccatggctcaacgtggtcagcctagttgtagatctcgtcgatgacctcgtggtacgtcatgagcctgtacagctcttgaagtagtccgaggagaggatgttcactgacaggaccttctccatgagcacttcaatggaccccccccagatgactgtacctccattttccctcctctgaaattaacatcacacgagat

SEQ ID NO: 16064 - DNA, 1083 bp, Oryza sativa
  Clone ID: PAT_MRT4530_21848C.1
atggctcgcaagaacagagatgggagagtagcagtgtggttgatgatggtgttcttgctactgtccggatcatatcagtgtgaggcgagagctctgatgaggcgaagcaggaggaacacgctgctgaacgcgctgtacaagctcaacttcatcaggacggtggagccgatgcagctgccttcttcgtctccttctccggcgaagccggacggcgacgcggcgagcctcgccgacgccaccggcgacggctcgagctcgccgtactgcgtcaaccctccgaacgcgcccccgtcgtcctccaccccgacaacgacaccgacgccgacacctcccttcgcctcgacgccgttcgccccggacgaccagcccccgccgctgccccccatcggcggcttcacgccaccgtcgttcgagccgagcccgcctgcgtcgtccacgcctggcttcaccccgagcacgcctgggtctgccccaccgagcccgatcttcgtcgtgcccagccctcccgagaccggacccggcggcggcggtttaggtggcggcagcggcggcgagggcggcggcggtgtaggtggcggcagtggaggcgagggcggtggcggtggtggtgtaggtggtgggcctggcggcggcggcagtggcggcgagggtggtggcggtggcggcagtagcggtggaggcgggagcaatggtggaggcgggagcagcggaggaggcgggaacagcggcggcgggggaggagggggagggttcttgccgccgatagtgtacccgccgccgctggcgccgccggcggcgccgggggcgggggaggcgctgtggtgcgtggcgaagccgacggtgccggacccgataatgcaggaggcgatggactacgcgtgcgggtcgggggcggagtgcgggtcgatccagccgagcggggcgtgctacacgcccgacaccgtgctcgcccacgcctcctacgccttcaacagctactggcagatgaccaaggccgccggtggcacctgcgacttcggcggcaccgccaccatcgtcacccgtgacccaagctatgaaaagtgccaattcgacctactatga

SEQ ID NO: 16065 - DNA, 1592 bp, Oryza sativa
  Clone ID: PAT_MRT4530_21849C.1
ctgcaggaattcggcacgaggccttcactagccttctctgccaccctcactcgcgagctcggctcagctcagctcacctcgcacccagatcccaatgcaccaaccagccataatgcagcgggctctcgccgtcgtcgccctcctcgccgccgcagccgccatcgccgccgcccagggggagtcgccggagttgctgccgttcgcggtgggggcggcgccggaggggtgcgacgtcggggaaggggagtgggtgttcgacgaggcggcgcggccgtggtacgccgaggaggagtgcccctacatccagcccgacctcacctgccaggctcacggccgccccgacgccgcctaccagcgctggcgctggcagccgcgcgactgctccctcccaagcttcaacgcgacggggatgctggagatgctgcgggggaagcggatgctgttcgtcggggactcgctgctccgggggcagtacacgtcgctgctctgcctcctccaccgcggcgctcccggcggcggcggcgggtccagatccttcgagacggtggattcgctcagtatcttcagggccaaggactacgacgccaccatcgagttctactgggcgcccatgctcgccgagtccaactccgacggcgccgccgtccccgacgaccgcctcatccgcggcgcccccatgaacaagcactcctccttctggaagggcgccgacgtcctcgtcttcaactcctacctctggtggatgaccggcgacaagatccagatcctgagaggcgcggacgaggacatgagcaaggacatcgtggagatggaggcggcggaggcgtacaggctggtgctgcaccaggtgacgcggtggctggagggcaacgtggaccccaagagcgcgcgggtgttcttcgtcacggcgtcgccgtcgcacgccggcgccggcggcgagtgctacgaccagacgacgccggtgggcgcggccgacgcggcgtcgtactgcgggagcacgagccggcggatggtgcaggtcgccggcgaggtgctgggggcatcgcgggtgcccgtcggggtggtgaacgtcacccggatgtcggagctccgccgcgacgcgcacacgcaggtgtacagggagcagcggtgggcgaagccgacggcggagcagctcgccgccgacccgaggagctacgccgactgcacccactggtgcctccccggcgtccccgacgcgtggaacgagctgctctactggaagctcttcttccccgcgcgcgacgaggcgatctgacctcatgacgtcacgccgccgccatcgtcgtcgtcgtcgtcgtcactaatcggtgtaatctgctccgttcccgccatttcttttcttggcgatcgatgtaatcaaatctctctatacttgctcctcttctctcctcttctctttttgaacgaagtgaaaatacagaagctagcattatttgcttgcatgtgtacaaaaaaaaaaaaaaagcatcaagattaactaatgtgatccccaattcaggatcactctgttgagcaaaaaaaaaaaaaaaaaaaaaaaaaaaaaaaaaaaaaaaaaaaaaaaaaaaaaaaaa

SEQ ID NO: 16066 - DNA, 2220 bp, Oryza sativa
  Clone ID: PAT_MRT4530_2184C.1
atgtggctggtcgcagaggatagggtggagtccgccgatcctcgtaccagcgtaccccaataccctctatatccggtctacgggtacccaccgtcgacagtggcgcgccaggtagggggccttggtgctcaaggttctactactatgacatcaagcttcgtcgacaacggcgtcaacaccggccccattcaaggagtccctacttcaacaatgctggtgtggactcaagtcggcgaaatcgtcttcccggtttacaccacggtaccaatctcggctggtccatcaatgaccggaaacgagaacgccgtggctataaccccagacgatcccttgtcgaaggttcctagtgcggccaaaccttgtccttctgacaagaactgcgagctgacaaggataacttccgagacgaagaatcacgacttctcaagctgcaaggtctttctccgcgccatgaaaacgacgcttcctaaagtccagcagtcaggaacctcccttaaggatacaaacaaggaacaaggagcgatgttgacctcggatcgattcgttggagtaatcgacattgatccccatgagccatcagtcctacacttgctcgaaaactatggcttgtcatcttccagtacaccacgcgacgtgtttgccatcggtaggactagcacgtttgcacacgctaacgcagaggcggagaaccagacggtcacgccggcccaactactcggcaccgtcaacgcaatattgagagaagctccctatgacccccaattcatcgctaacttccaaggaacttacaagcgccacgcgatcgaagacgatttacacgcgttaacacagaatccgggcgaatctttgagggactatgttcggcgctttaatgagtgcagaaatacgatccccgatatcaccaatgtttctgtgattcatgctttcaaaaccggtgtcagagattgctatactacccaggagttggcaacaaggcgaatcacaactactcgaaggttgttcgaggttgtcgatcgatgcgcccatgcagacgacgcactgagacgcaagaacgacaagccaaaggcgggaggagataagaagccagccaaggacacacccaaaccaagcaagaagaaaagcggcaagagtgggaagaggaaagctcaagcggaagtcctcgcgtctgaatacgagcgcccacccaaacacccagacccacaaggcagtgatacaaagagaatatggtgccccatacacaagtcggacatacattctctagaggagtgcctcatcttcaagaagtcgctggaaaagcaactggctttggagaagggcaagcgagtacgtgtagtcgagaaggccactgaggaaaccactcaggactcggacttggcgtacctagattcctatcttcatggggttgcacccaagatgaagtggtctgaacagaagatcgagttcttagacgaggaccaccccaaggctgctgttatcccaggacgatatccgattgtggttgaacctactattcggaatatcaaggtagtccgcccctaccgcagcgtcagcacgctggctggccatgccgtcgcctcccccagcgtcgcagtcgcctccccttccccggcctgccctccgtttcccgtggagacctccggaagtgcatccccgccggcaacagtggcgttgccgccactgttccgcctccggccgcctctgtcgcgtctcctgtgcaccggccgacgtcgccaccacctctcccggcaccggaacgccgtcctcttccccggccaggccacagcgttgcccgaatttcaccggaacaccgccgtgccgcgccggcctctccatccgcctcgccggaatttccccggtcgacccttcctccacccgtgcgccgtcggccgcgccaacaccacctccggcatcgcagcggcgagccggcgacgtcgtcctcggcatcgcctcccctccatccaaacccctccgctatctgtcgtcatcgtctcctcgtcgtttcctcgtcatcgttcgtcctcgtcggcccccgtgtgctgctgctgccccgtcatcgtcttcgtcctcggctccgcgtcgtcaagccttgtgtcggccgcgtctcgccttcatccaaggatcgctgccgaggtcgtcccctcgccgttcgtctccgtcgttcccgttcgtctccgcacccgttcgccgtcatcgttcccacgccttgtcgcgtggtgctaa

SEQ ID NO: 16067 - DNA, 291 bp, Oryza sativa
  Clone ID: PAT_MRT4530_21850C.1
atgaccttcctgggacctgagtacagaatcaaccagagcgccaccatcgtcttccccaacactcaccgtgggtccgtggcaggcccgtcggccatcggaacgacgccgccgccgctgacgctgacctcctccgtcgccgggaacggaggcgacactgtcgatctggtccacgagcggctgccggggagtatcgggtgggggcacgaggtcaccggcggcggcggcgggagagaacgccgtcgcgacccacccaacaccggcgacggcgagtcggagatgcgagattgctaa

SEQ ID NO: 16068 - DNA, 8214 bp, Oryza sativa
  Clone ID: PAT_MRT4530_21851C.1
atggctggttttgccgatgcactgaggccggataaatttaccggtgtgcactttaagagatggcagatcaagatcactctgtggctgatagctatgaaatgcttctgggtgagtactggcaagcctatgggcgttcttaatgctgatcagcagaaagaattcgatgaggccactactctctttgtgggatgcattcttagcgtgcttggcgatcgtctggtcgaggtgtatatgcatatcaccgatgctaaggagttgtgggatgcactgaatactaaattcggtgctactgatgctagcaatgatctgtatatcatggagcagtttcatgactacaagatggctgacaaccgttctgtagtcgaacatgctcatgagatacaaaccatggctaaggaactcgaactccttaagtttcggtactgcactcaaacacaagagacaggaatacgatccgttgaggggttgatagcgtctcttgatgttgaggagaaagctcgggaaaaagatgtcgcgtctaagggcgatggtgggcagtccactgccaatgttgtgcacaaggcccagaacaagagcaaggggaaatacaaagctcagcagaccaccaacttcaagaagaaaaacaacaacaacaattctaatcaggatgagaggacttgttttgtgtgtggtcaacctggccatctggccaggaagtgtccacaacgcaaggggatgaaggcacctgcagggcagacctctaagtctgctaatgtgaccattggcaacactggagatggaagcgggtatggtaatttacctactgttttttcagttaatcagtctactaattggtgggttaatacaggggccaatgtcgcacggggttccaccgtactaatggggaatgggtcacatgcttctgttcatggtgttggcacggtagatctgaagtttacttcgggaaagatcgtgcagctgaagaacgtgcaacatgtcccttctatcgacaggaatcttgttagtggctcccgtctgactagagacggatttaagttggtttttgagtctaataaagtagtcgtgtctaaacatggatattttatttgtcaaggtcatgagtacagaggcctgttccgcttttccctttctgatttctgcaataagtctgtgaaccatatttttggcagtgtggatgatgaggctaatgcagaagttgaaaatcaacttcacagaaagataaaaagacttaggtctaatcgtggtggagagtttttctcaaacgagtttgacttattctgtgaggaacatggcattatacatgagaggacgcctccctattctcccgagtctaatgggattgctgaaaggaagaaccgtacactgatcgacttggtgaatgccatgttggacaccgcgggattacctaaggcatggtggggggaggcattgttgacctcgaatcatgtgttaaacagagttcctaacagaaataaggacaaaacaccatatgagatatggattgggagaaaaccatcactttcttacttgcgcacatgggggtgcttggcgaaagtcaatgtaccaataacgaagaagtgcaaacttggacctaagactgtggactgtgtctttctgggatatgctcaccacagcattgcctatagatttttaatagttaatctgagttcaatcacaccaccagaacaaactgaacatacacatgaacatgttacagaggaggatgacagtgaagctcctcgaaggagcaaaagacaaaggacggctaagtcttttggtgatgatttcactgtgtaccttgtggatgacactcctaagtcaatttcagaagcatacgcatctcctgatgcagactactggaaggaggctgtccgtagtgaaatggattccattatcgctaacgggacttgggaggtgaaaacctgtggggtgcaagtggcctcacatggtcttctcgtttatcaaatggacgttaagatagcttttcttaatggagagctggatgaggagatctatatggatcaacctgattggtttgtagttgaaggtcaagaaggcaaagtgtgcaaattgttgaagtctttgtatggtctgaaacaagctcctaagcaatggcatgagaaatttgacaaaacattgacatttgcaggctttgcagtcaatgagacaaataaatgtgtatactatcgccatggtgggggtgagggagttattctgtgcttatatgttgatgacatactgatatttgggacaaaccttgaggtgataaatgaggttaaatcattattgtctcaaaattttgatatgaaggatttgggagtagctaatgttatcttaaacattaagctaattagaggtgagaatgggattacactcttgcagtcccattatgtggagaagatcttgaatcgctttggctacattgatagtaagccttctccaacaccttatgatcctaacttgttgcttcgcaagaataagagaattactaggaatcaactagaatactcccaaatcattggctcgctgatatatctggctagtgcaactaggcctgatatctcctttgctggatatagtgattctaactggatctctgatgtggatgagatcaaagccactagtggatatgtctttacactgggtggtggtgctgtttcgtggaggtcttgcaaacagactattttgacgaggtcaaccatggaagcagaactgacggcactggatactgctactgttgaggcagaatggctgcgtgatctattaatggatctgcctattgttgaaaaaccggtgccggctatccttatgaactgtgacaatcaaacggaaaattcggatttgtttagttttggaaacattccgaaaaatccgatggatcggcaatggatgtacgctgaccggcggtccaaagagtttattgacggcgtgcactattttttgagagtggccgaagctaacaggcaaaggggttttatttgttgtccatgcaataagtgtaagaatcagaaggagtattctgcatccaggactatttatttccacttgtttgagtcggggttcatgccaagctataattgttggacatcccacggagagcaaggtgttgaaatggaagaagatgaagtggaagacgacaatattccggactttgctcagtatgatggatttgaagaaaatcaaacgggcgaggaggaaatagctgctgatggtaacgacattgcggatgatcttggtcagatgttgcaggacgccagggaggactgcgaaagtgaaaaggaggcccataaattggacaagatgttggaggaccacagaacttcgttgtacccaggttgcgagcaggggcacaaaaagttggataccactctggagttcttgcaatggaaggcaaaaaatggggttagtgccaaggcatttggcgatttattgaaactcgtcaagaacattcttccggggggaaacaaattgcccgagacaacgtacgaggctaagatagtctgcccgttaggactggaagttcataagattcacgcatgtccgaacgattgtatcctatatcgcggtgaggagtatgagaacctagaagcatgccctgtttgcaaagcactacgatacaagattagacgagacgatccaggagaagttgacgggcagctaacaaagaagagaattcctgctaagtggcgaaacatcgacagaaaatttaaagaatttggaaaggatgcacgaaacatacggtttggtttgagtacggatggcatgaatccttttggagagatgagcagcggccatagcacttggcccgttacgatgtgtatctacaacctctccccctggctatgcatgaagaggaagtacataatgatgccgattattattcaaggccccaagcaacctggtaacgacatcgatgtgtacctaagaccactggtcgaagatcttaaacagttgtggaagaaggaaggtgtccccgtgtgggacgaggacaaacaggaggagtttaacctacgagcgctgctgttcgtaaccatcaacgattggcctgcacttagcaacctatccggacagtccaacaaggggtacaaggcttgcactcactgtatggatgaaacagaaagtacgtatcttaagcactgtaggaaggttgtatacatgggtcatcgtcgattccttgcagcaaaccacccggtacggaagaaaggcaagcacttcaaacataaggccgaccaccgtatgaagcctaaacatcacagcgggaaaacagtgtttgctatgattaaagatcttaaagtagtgttcggaaaggggcctggaagccagcctatagagagcgaagatagtcacgcggcgatgtggaaaaagaactctatattttgggagttaccatatcgggaattcttggacgtacgccacgcaatcgacgtgatgcacctcactaagaacctttgcgtaaaccttcttggcttcctaggtgtatacggaaagtcaaaagatacactggaagcacgtaatgatctgaagcatatggaacaacgcggcgaccttcacccggaaccaaaggagaaaggaagccattacttgagtccagccagctacactctaagcaaggcagagaaggaaagtatatttgaatacttggagagcataaaggtaccgtctggatactccacgaatatcaagcgaataataagcatgaaggagaagaagttcacaaacctaaaatctcatgactgtcacgtgttgatgacacaactgctaccagttgtaataaggggtatccttccagaaaatgtccgggcaacaataacaaagctatgtgcattcatgaacgcaatttcgcagaaggtcatcgatccggatagattagaagcccttcagaatgaagtggtgcaatgtctcgtcagttttgagttgatatttctaccttcatttttcaatataatgacgcatctgctttgtcaccttgtgaaagagatccgtattctcaggcctgtgtacctacacaacatgtttcctttcgagaggtacatgggcgttctgaagaagtatgttcgtaaccgtgctcgtccagaggcaagcatcgccaagggttatggaacagaggaggtcatcgaattttgcgcagaatttatcgaagaccttcgcccaatcggggtacctgaatcacgccatgaagggagactacggggaaagggaactctcggaaggaaaagcaataatgacgctccttacatcgaggagcacttggctctagttcgcgccaggaacatcggtaagtccgatgcatggattacatggcatcacattgatactttccccacgtggctacgacaacatctcatgggtaacgagtcaatcaaccaacaacttgccttcctggcgaggggaccgtctgggtcgatcgcgacattccagggatatgagatcaatgggtacacattctacacgagagcccaagacatgaagagcacgaaccaaaacagcgctgttcgtgtcgatgccatgggacacgatgcaacaactgccacgtattacggtgccatcgaggatatatgggaacttgactatggtcctctcaaggttcctttgttctggtgccaacgggttaggttgactggtggaggcataatgattgatgacagtggtatgacaactgttgaccttaacaaggttggatactcggacgaaccttttgtccttgccaatgatgtaacgcaagtctttttcgtgaaggacatgtctagcaaaggaaagaagggcagagggcctaatgagcctaagcgtcaagtggttctcccaggcaaaagaaaaatcgtcggagctgaggacaagactgacgaggattacgatcagttggataggcaaccccctttcacggtgacgattgaccctagcatcctcctatcaaatgaagacaccccttactcacgcagcgatcacaaggagggaacaataatggctgaccgcgatgaggaacagatattgtacgatacaatcgcggagggaagcagccagtactggaatgaagaagaggggaacgaggatccaaatcagtacttgaacgagaaagggaacgtggagagggatgcggaggggaaccagcaggggcacgtggaaagggatgtggaggggaaccaggaggaggaggctagtggtagtcaaccctccgttggacagaagagggcacgcgggcaacgaggtgcagcgaagaagcttgagggtcggcacatcataatggaagtggaagaagatggacgtcctagtgccccggccgtagccgccaagaactatgtacgtcacagcggttgggttgtgcgggataacgtgcctgtcagtacggtgtactggcgaagaacaaggacacgcggagatcatgagagctttgtcctagattcggagaaagagatgctgtggaccataatgctcgagacattcacccttcccgcgggtacagaggacaaagtgaaaaggtggactctgaagaaaatggcagaacagtttcagagcttcaagggagagctgtacaagaaatatatcctgaaggggcagacaccgaacttcgacacattcccaaagctaagggatcactgggacgagttcgttgcatataagacaggtgaacaagggcaggcgatgatggaaagaaacaaagaaaatgccgccaagaagaagtaccatcactacttggggtcaggaggctatagcgtcacgatgccgaagtgggaggagatggaggctatcttgattgagaggggtatcgaaccggcaaccgccaattggccggaacgatcgaagttctggtactatgctcatggtggaacgctcaacccagctgatggctcactggtcttcggcgatcagatacgagaggctgcgcgacgactaacagatgcagtggaagcctcctctcagggcacgttccgatcggacagatatagggacgagctgacactcgccctgagtcggatgaggagtaagagagataccgaggcgaagattgcagatctagagttccgggtatcgagctacgaactcagcatgcaagaggaggtgacaaggaaggttgatgaacgcatagccgcacatcggtcccatgatccccagccgaccattcctcctgcaatgatgagcccgtcaggaaaccgtagcagctgtgccttaacggggcaggtaggattacagagcatggacgccattcaaacacaggacgaatcgacctgtcccgttgatgacatcactcagcagacaccatctgagctgcatattccttacaagaacttatcaataaaggtggcgtcgggcatggccatcccaacggacccttcaggtacttaccactgcaggccgattccagcaggatactcgaaggtcgaagttgagttggtcgaaggcgcatacgaggacctcgagctggattaccctggaggagacggctccagcaccgactcctcctcaggatcctgcaccgactcctcctcgggctcctacacctactcctccgcaagctcctcttccggcaccttcaaagtcaagggcccccccccagctccaccgcctgcccacacaagggcaacgaagaaggcgaaagttgacgccgccaagaacaaggacccggggtacgattgcacgcaagaggagcttgacgcttacgttgcatcagaagtcaagagacaattcaagcctcgaagtccagaaaagaagattcctatagaccctagtgtcaggaacttcttcaggggtatgtctgcatctgtcaaggaggccatcaagctatcggactatgagcgaacgctgaagaaagcatcttctggaaagtccaaaccagtccctcagcttggagagcgaccaaaccaggagatcgagccgttggtgaccggtaaagaaatgatgatagaacaatttattactgacaccggtctaactacggatcaattgctaggagtcgcaccaatcgaaaagacggaagtgaaatacatgtacgaactcggtaaaccgcttgtcaagcctgagctgctgcagtccctacccacacaaatgtacaagttccatcagctgtacatggagatgagcgccaccggtagagagatgatcggagcgaggatcagggacacggacttcttgcaaggagatgacattctctggatcaatttcaggggaatcaacgaactataccagctggacgccctcgacatctctattatgagttgctaa

SEQ ID NO: 16069 - DNA, 2496 bp, Oryza sativa
  Clone ID: PAT_MRT4530_21852C.1
atgtggtatttccctataataccacggataaggcgtttgttcaggaacaagcggaatgctagaatgatgcgatggcacgctgaagagcgtcaacaggacgggatgctgagacaccccgccgatggttcgcagtggcaaaacatagacaaaaaatttaaagaatttggaaaggactcacgaaacatacggtttggtttgagtacggatggcatgaatccttttggagagatgagcagcggccatagcacttggcccgttacgatgtgtatctacaacctccccccctggctatgcatgaagaggaagtacataatgatgccgattattattcaaggccccaagcaacctggtaacgacatcgatgtgtacctaagaccactggtcgaagatcttaagctgttatggaagaaggaaggtgtccccgtgtgggacgaggacaaacaggaggagtttaacatacgagcgctgctgttcgtaaccatcaacgattggcctgcacttagcaacctatccggacagtccaacaaggggtacaaggcttgcactcactgtatggatgaaacagaaagtacatatcttaagcactgtaggaaggttgtatacatgggtcatcgtcgattcattgcagcaaaccacccggtacggaagaaaggcaagcacttcgaacataagcctaaacatcgcaacgggaaaacagtgtttgctatggttaaagatcttaaagtagtgttcggaaaggggcctggaagccagcctatagagagcgaagatggtcacgcggcgatgtggaaaaagaactctatattttgggagttaccctattgggaattcttggacgtacgccacgcaatcgacgtgatgcacctcactaagaacctttgcgtaaaccttcttggcttcctaggtgtatacagaaaatcgaaagataaactggaagcacgtaatgatctgaagcatatggaacaacgcggtgaccttcacccggaaccaaaggagaaaggaagccattacttgagtccagccagctacactcttagcaaggcagaaaaggaaagtatgtttgaatacttggagagtataaaggtaccgtctggatactccacgaatatcaagcgaataataagcacgaaggagaagaagttcacaaacctaaagtctcatgactgtcacgtgttgatgacacaactgctaccagttgtaataaggggtatccttcaagacaatgtccgggcaacaataacaaagctatgtgcattcatgaacgcaatttcgcagaaggtcgtcgatcgggatagattagaagcccttcagaatgatgtggtgcaatgtctcgtcagttttgagttgatatttccaccttcatttttcaatataatgacacatctgctttgtcaccttgtgaaagagatcagtattctcgggcctgtgtacctacacaacatgtttcttttcgagaggtacataggcgttctcaagaagtatgttcgtaaccgtgctcgtccagaggcaagcatcgccaagggttatggaacagaggaggtcatcgaattttgtgtagaatttatcaaagatcttcgcccaatcggggtacctgaatcacgccatgaagggagactacggggaaagggaactctcggaaggaaagcaataatgacggtagacaacaatttattccgtaaagcccattccacggttctgcaacaatcttcattggtagctccttacatcgaggagcacttggctctagttcgcgccaggaacatcggtaagtctgatgcatggattacacggcatcacattgatactttccccgcgtggatacgacaacatctcatgggtaacgagtcgatcaaccaacaacttgccttcctggcgaggggaccgtctgggtcgatcgcgacattccaaggatatgagatcaatgggtacacattctacacgagagcccaagacatgaagagcacgaaccaaaaccgcgctattcgtgtcgatgccatgggacacgatggaacaactagcacgtattacggtgccatcgaggacatatgggaacttgactatggtcctctcaaggtccctctgttccggtgccaatgggttaggttgactggtggaggcgtaatgattgatgacagtgggatgacaacggttgaccttaacaaggttggatactcggacgaaccttttgtccttgccaatgatataacgcaagtctttttcgtgaaggacatgtctagcaaaggaaagaagggcagagggcctgacgagcctaagcgtcacgtggttctcctaggcaaaagaaaaatcatcgaagttgaggacaagactgacgaggattacgatcagttggatgggcaaccccctttcacggtgacgattgaccctagcatcctcctatcaaatgaagacaccccttactcacgtagcgatcacaaggagggaacaatagtgaggagaaagtacgtgcggtcaactgtcaccgccgatgtattaccg

SEQ ID NO: 16070 - DNA, 272 bp, Oryza sativa
  unsure (1)..(272): unsure at all n locations
  Clone ID: PAT_MRT4530_21853C.1
aggggtttgggttttctctctcgnggngccgtcgangacctcatcgccggcgccgccgcgcacgtnctccggttgtcccatccctgagcggagggagattcaagccgaggcggcgtacggtggcggcgccgacggnacctcggtnatccgacgcccgcaatggtcgcttgccctanccgccgggctgccgccgccgccgncgccgccgcctgatacccccatnagcttacccganaagacagtcctnccccgcatcgnccgcgggccatcgc

SEQ ID NO: 16071 - DNA, 6424 bp, Oryza sativa
  unsure (1)..(6424): unsure at all n locations
  Clone ID: PAT_MRT4530_21854C.1
atggatcggcaatggatgtacgctgaccggcggtccaaagagtttattgacggcatgcactattttttgagagtggccgaagctaacaggtaaaggggttttatttgttgtccatgcaataagtgtaagaatcagaaggagtattctgcatccaggactattcatttccacttgtttgagtcggggttcatgccaagctataattgttggacatcccacgaagagcaaggtgttgaaatggaagaagatgaagtggaagacgacaatattctggactttgctcagtacgttggatttgaaggaaatcaaacgggcgaggaggaaagggatgctgatggtaacgacgttgcggatgatcttggtcagatgttgcaggacgccaaggaggactgcaaaagtgaaaaggaggcccataaattggacaagatgttagaggaccacagaacttcgttgtacctaggttgcgagcaggggcacaaaaagttggataccactctggagttcttgcaatggaaggcaaaaaatggggttagtgacaaggcatttggcgatttattgaaactctcccaaaaactttcttccgaagggaaacaaattgcccgagacaacgtacgaggctaagaagatagtctgcccgctaggactggaagttcagaagattcacgcatgtccgaatgattgtatcctatatcgcggtgaggagtatgagaacntagaagcatgccctgtttgcaaagcactacgatacaagattagacgagacgatccaggagaagttggcaggcagcttacaaagaagagaattcctgctaaggtgatgtggtatttccctataataccacggctaaagcgtttgttcaggaacaaggggaatgctagaatgatgcgatggcacgctgaagagcgtcaacaggacgggatgctgagacaccccgccgatggttcgcagtggtgaaacatcgacagaaaatttaaagaatttggaaaggatgcacgaaacatacggtttggtttgagtacggatggcatgaatccttttggagagatgagcagcggccatagcacttggcccgttacgacgtgtatctacaacctctcccctggctatgcatgaagaggaagtacataatgatgccgattattattcaaggccccaggcaacctggtaacgacatcgatgtgtacctaagaccactggtcgaagatcttaaactgttgtggaagaaggaagatgtccccatgtgggacgaggacaaacaggagaagtttaacctacgagcgctgctgttcgtaaccatcaacgattggcctgcacttagcaacctatccggacagtccaacaaggggtacaaggcttgcactcactgtatggatgaaacagaaaatacgtatcttaagcactgtaggaaggttatatacatgggtcatcgtcgattccttgcagcaaaccacccggtacggaagaaaggcaagcacttcgaacataaggctgaccaccgtacgaagcctaaacatcgcagcgggaaaacagtgtttgctatggttaaagatcttaaagtagtgttcggaaaggggcctggaagccagcctatagagagcgaagatggtcacgcggcgatgtggaaaaagaactctatattttgggagttaccctattgggaattcttggacgtccgccacgcaatcgacgtgatgcacctcactaagaacctttgcgtaaaccttcttggcttcctaggtgtatacggaaagtcgaaagatacactggaagcacgtaatgatctgaagcatatggaacaacgcgacgaccttcacccggaaccaaaggagaaaggaagccattacttgaatccagccagctacactcttagcaaggcagagaaggaaagtatgtttgaatgcttggagagcataaaggtaccgtctggatactccacgaatatcaagcgaataataagcacgaaggagaagaagttcacaaacctaaagtctcatgactgtcacgtgttgatgacacaactgctactagttgtaataaggggtatccttccagacaatgtccgggcaataataacaaagctatgtgtattcatgaatgcaatttcgcagaaggtcatcgatccggatagattagaagcccttcagaatgatgtggtgcaatgtctcgtcagttttgagttgatatttccaccttcatttttcaatataatgacgcatctgctttgtcaccttgtcaaagagatcagtattctcggacttgtatatctttactcccgactaaaaatatctttactcccggctgttctcatcaaccgggactaaagatctaggggtatatatattcccgatgcgcgccctcgtcttctccaccaacactaagaagtttttgcctgatcgatctctctcggcttctccttcgccgccactgcctatggcatccccacgccgacaccgccgccgtatctcgccgtcgtctcgcgctcgtcgttgtcgccgccgcctccgcctcctccgccgccgccgcatctctggggtgagagccgccgccgcctccctcgatctctctctctctcatctcgatctctctctctccctctcggttgccgccacgccgccgccgctccgctgctgccacaccgccgtcccgctgccgccacaccgccgtgaacgaacgtgaacgagaacgtgaccgagaacgagcgaacgaccgtgaacgagcgaacgaacgtgaatgagaacgagcgaacgtgaacgagtgaacgaacgtgaatgagaacaagcgaacgtgaacgagcgagcgaacgtgaacgagaacgagcgaacgtgaacgagcgaacgaacatgaacgagaacgagcgaatgacgtgancgagaacgagaacgagcgaatgaacgtgaacgagaccgagaacgagcgaacgaacgtgaacgagaacgagtgaacgaacgtgaatgagaacgagcgaacgaacgtgaacgagcgaaagaacgtgaacgagaattgaacgcatgtgaatgaacgtgaacgaacaaatgtaggtgaatgaaacgtgaccttaacgagaacgcaaacgtgaacgatatcgtgaacgaaacgtgaacgtcaaatgcaatatatgttacttcgcgtttatcctaatacatctttttgtatcttgcagaaaagacgttgtcggagtcgtccctcaagccggagtggtagctagccctcgaaggaattcgcgcagtcaagtgacttttagtataagattattagatttgtaattagacttagcatataagattgtgtagggttctaatatacgaccactcttgtatgaacagatggctgatcgcgatgaggaacagatattgtacgatacaatcgcggagggaagcagccagtactggaacgaagaagaggggaacgaggatccaaaccagtatttgaacgagaaagggaacgtggagaggaatgcggaggggaaccaggaggggcacgcggaaagggatgtggaggggaaccaggaggaggaggctagtggaagtcaaccctccattggacagaagagggcacgcgggcaacgaggtgccgcgaagaagcttgagggtcagcacatcataacggaagtggacgaagacggacgacctagtgccccggcagaagccgccaagaactatgtacgtcacagcggttgggttgtgcgggataacgtgcctgtcagtacggtgtactggcgcagaacaagggcacgcggagatcatgagagctttgtcccagattcggagaaagagatgctatggacacaatgctcgagacattcacccttcccgcgggtacagaggacaaagtgaaaaggtggactctgaagaaaatggcagaacaatttcagagcttcaagggagatctgtactagaaatatatcctcaaggggcagacaccgaacttcgacacattcccaaagctaagggatcactgggacgagttcgttgcatataagacaggtgaacaagggcaggcgatgatggaaagaaacaaagaaaataccgccaagaagaagtaccatcaccacttggggtcaggcggctaaagcatcgcgatgccgaagtgggaggagatggaggttagcttgcttgagaggggtatcgaaccggccaccgctaattggccggaacaatcgaagttctggtactatgctgacggtggaacgctcaacccagctgatggctcactggtcttcggcgatcagatacgcgaggctgcgcgtcgactaacagacgcagtggaagcctcttctcagggtacgttccgaccggacagagagagggacgagctgtcactcgccctgcagactccaaagcatccaggacaaacacgagggaaaggggtgattccttggaagattgggttcatggaggacatccacacgtacaggagtcggatgaggagcaagagaggtactgaggcgaagattgcagatctagagttcagggtatcgagctacgagctcagcatgcaagaggaggtggcaaggaagatcgatgaacgcatggccgcacatcggtcccatgatccccagccgaccattcctcctgtaatggtgagcccgtcaggaaaccgtagcagctgcgcctcaacggggcaggtaggatcacagagcatggacgccatgcaaacccaggacgaatccacctgccccgttgatgacatcactcagcaggcaccatgtgagctgcatattcctttcaagaacttatcaataaaggtaagctcgtaaaataacctcccaacggacccttcaggtacttaccactacaggccgattccagcaggatactccaaggtcgaagttgagttgatcgaaggcgcgtacaaggacctcgagctggattaccctggaggagacggtgagacgcatctacgagacacaagccatgccattattctatggcgcaagcggtacatcatcatccctgggcgacaagcggcgtctcgtgcaccatctcctccggctccaccatctcctccggctccgccgtctcctcctcatgctccagcaccgtctccacctcaggctcctgcaccgactcctcctccggctcctgtaccgactcctcctcaggctcctgcaccgactccttctcaggctcctacaccgactcctccgcaagctcctcttccggcaccttgaaagtcaagggccccccaagctccaccgcctgcccacacaagggtaacgaagaaggcgaaagttgacgccgccaagaacaaggacacgtggtacgattgcacgcaagaggagcttgacgcttacgtggcatcagaagtcaagagacaattcaagcctcaaagtccaaaaaagaagattcctatagacccgagtgttaggaacttcttcaggggtatgtctgcacctgccaaggaggccataaagctatcggactatgagcgaacgctgaagaaagcatcttctggaaagtccaaaccagtccctcagcttggagagcaaccaaaccaggagatcgagccgttggtgaccggtgaagatattggaatagaagaatttattaatgacaccggtctaactacggatcaattgctaggagtcgcactaatcgaaaaggcggaagtgaaatacatgtacgaactcggtaaaccacttgtcaagcttgagctgctgcagtccctacccacacaaatgtacaagttccatcagctgtacatggagatgagcgccaccggtagagagatgatcggagcgaggatcaaggacacggacttcttgcaaggagatggcattctctggatcaatttcaagggaatctacgaactacaccagctggatgccctcgacgtctctattatgagttgctgggttttaatggagattcaaaggccccgacggcggggggttttcgatactagattcatcgaccctcggaaagtaaacgtcgcaatgctcgaccaatatccgcaagccacagaggacaatctcgtctatctcctgaaggcgcagcattacaagacgttcatactgttgccgtacaacacagaattccactgggtgcttttactcttcaacatgtcggcatgcaccatcaacgtatatgactcaatggataaaaaagagtctacgtttgacaaggttttcgaacttatagacagggcttggtatcggttccgtcatttggtccgcggcaactggagagaaagacttaggcggaagttcaaatttccttttattcgcatgagggataacctgaccacacacaaggaatttatcgcggcggttcaagaacaactcatgggattcatcaacgaacaaatccttgatcccaagggtgaattctactacgacggaaacacaattcataggtccttagcttctgagctagcgactactactacgtcgaaatcgtagctagctagaacatataatggatt

SEQ ID NO: 16072 - DNA, 614 bp, Oryza sativa
  Clone ID: PAT_MRT4530_21855C.1
atggctgccttcaacgcctcccattcctcgctcattcgcctcttccggacgctctgcacctccacacgaggaggaggaggaggaggaggagcagccggcgaacaccactgcagaggcagcaactcagcatttctgcatcgggagagaaatccgagagaaactttcacctaccactggccgccggcgaggagcgtcgacgcggcggggaagcgagcacggcgagaaagaagaaaccccgaggcccatgtcgctgctcccggatcgcgaggcgagaacggcggcggcgccatctccactccgggaggaggagcagggacggagccatcggtggggctcccgccgctggaaacccgcccctcccccactacccggaaggcgaagcgccctcgccacggctggtctagtcgcgtcgccgccggtcatcgggaccgacgagcgccgcgggtaaccagggttgcaggggcgagcatgcgacgtcttcccggcggcgccgccggcgccggctcgccgtgcagaaagcatcggaagaggctcgagaacgacgagctccgcgggaaacttcgacgggggcggtgcagctcgccggcgcggtcgcggttgcggcgaggcgatgg

SEQ ID NO: 16073 - DNA, 3330 bp, Oryza sativa
  Clone ID: PAT_MRT4530_21856C.1
atggatcgtcaatggatgtacgatggccggcggtccaaagagtttattgacggcgtgcattatttttttgagagtggccgaagctaacaggcaaaagggttttatttgttgtccatgcaataagtgtaaaaatcagaaggagtattctgcatccaggactattaatttccacttgtttgagttggggttcatgccaagctataactgttggacatcccacggagagcaaggggttgaaatggaagaagatgaagtggaagacgacaatattccagactttgatcagtacagtggatttgaaggaaatcaaacgggcgagaagaaaatggatgctgatggtaacgacgttgcagatgatcttggtcagatgttgcaggacgccaaggaggactgcgaaagtgaaaagggggcccataaattggacaagatgttagaggaccacagaacgtcgttgtacccaggttgcgagcaggggcacaaaaagttggataccactctggagttcttgcaatggaaggcaaaaaatagtgttagtgacaaggcatttggcgatttattgactcgtcaagaacattcttccggagggaaacaaattgcccgagacaacgtacgaggctaagaagatagtctgccctttaggactggaagttcagaagattcacgcatgtccgaatgattgtatcctatatcgtggtgaggagtacaagaacctagaagcatgccctgtttgcaaagcactatggtacaagattagacgagatgatccaggagaagttgacgggcaattaacaaagaagagaattcctgctaaggtgatgtggtatttccctataataccacggctaaggcgtttgtttaggaacaaggggaatgctagaatgatgcgatggcacgctgaagagcgtcaacaggatgggatgctgagacaccccgccgatggttcgcggtggcgaaacatcgacagaaaatttaaagactttggaaaggacgcacgaaacatacagtttggttttagtacggatggcatgaatccttttggagagatgagcagcggccatagcacttggcccgttacgatgtgtatctacaacctcaccccgtggctatgcatgaagaggaagtacataataatgccgattataattcaaggccccaagcaacctggtaacgacatcgatatgtacctaagaccactggtcaaagatcttaaactgttgtggaagaaggaaggtgtccccgtgtgggatgaggacaaacaggaggagtttaacctacgagcgctgttgttcgtaaccatcaacgattggcctgcacttagcaacctatccgggcagtccaacaaggggtacaaggcttgcactcactgtatggatgaaacagaaagtacgtatcttaagcactgtaggaaggttgtatacatgggtcatcgtcgattccttgcagcaaaccacccggtacggaagaaaggcaagcacttcgaacataaggctgaacaccgtacgaagcctaaacatcgcaacgggaaaacagtgtttgctatggttaaagatcttaaagtagtgtttggaaagggtcctggaagccagccgatagagagcggagatggtcacgcggcgatgtggaaaaagaactctatattttgggagttaccctattggaaattcttggacgtccgccacgcaatcgacgtgatgcacctcactaagaacctttgcgtaaaccttcttggcttcctaggtgtatacggaaagtcgaaagatacactggaagcacgtaatgatctgaagcatatggaacaacgcagcgaccttcacccggaacctaaaggagaaaggaagccattacttgagtccagccagctacactcttagcaaggcagagaaggaaagtatgtttgattgcttggagagcataaaggtaccgtctggatactccacgaatatcaagcgaataataagcatgaaggagaagaagttcacaaacctaaagtctcatgactgtcacgtgttgatgacacaactgctactagttgtaataaggggtatccttccagacaatgtccgggcaacaataacgaagctatgtgcattcatgaacgcaatttcgcagaaggtcatcgatccggatagattagaagcccttcagaatgatgtggtgcaatgtcttgtcagttttgagttgatatttccaccttcatttttcaatataatgacgcatctgctttgtcaccttgtcaaagagatcagtattatcaggcctgtgtacctacacaacatgtttcctttcgagaggtacatgggcgttttgaagaagtatgttcgtaaccgtgctcgtccagaggcaagcatcgccaagggttatggaacagaggaggtcatcgaattttgcgtagaatttattgaagaccttcacccaatcggggtacctgaatcacgccatgaagggagactacggggaaagggaactctcggaaggaaagcaataatgacgatagacaacaatttattccgtaaagcccatttcacggttctgcaacaatcttcattggtagctccttacatcgaggagcacttggctctagttcgcgccaggaacatcgataagtccgatgcatggattacacggcatcacattgatactttccccgcgtggctacgacaacatctcatgggtaacgagtcgatcaaccaacaacttgccttcctggcgaggggaccgtctgggtcgatcgcaacattccagggatatgagatcaatgggtacacattctacacgagagcccaagacatgaagagcacgaaccaaaacagcgctgttcgtgtcgatgccatgggacacgatggaacaactagcacgtattacggtgccatcgaggccatatgggaacttgactatggtcctccgaaggtccctctgttccggtgccaatggattaggttgactggtggaggcgtaatgattgatgacagtgggatgacaacggttgaccttaagaaggttggatactcggacgaaccttttgtccttgccaatgatgtaacgcaaatcttttacgtgaaggacacgtctagcaaaggaaagaagggcagagggcctgacgagcctaagcgtcacgtggttctcccaggcaaaagaaaaatcgtcggagttgaggacaagactaacgaggattacgatcagttggatgggcaaccccctttcacggtgacgattgaccctagcatccttctatcaactgaagacaccccttactcacgtagcgatcacaaggagggaacaatagtgaggagaaagtacgtgcggtcaaccgtcagcgccgatgtattgccg

SEQ ID NO: 16074 - DNA, 274 bp, Oryza sativa
  Clone ID: PAT_MRT4530_21857C.1
tgattcggcgcgttgccagctcctggctggtgtaccgatctcggacgcctgatttgaatgctcgattcgtagccttccatgaggtgtaacacggatggcttgtttgtgcctgttggtatttctttacgacataactagaaatataattcccagcaatggcgttgaaatactcctggtatattatggttacaaagttcatccgcaagcgcacggatataccattgtagcatttcacccgagagtattccaagggtataatatttattttatcctg

SEQ ID NO: 16075 - DNA, 7056 bp, Oryza sativa
  Clone ID: PAT_MRT4530_21858C.1
atgtcatggcacagggccggtgtcctgctgctgggggctcagtcctgcctacctgtcccgggggttccggccgtaggtggggttgggtcggtactcttgtttatggctaggatgggttgggaactatgtcacgtcttccgtccgtataccgtggtgatgtttaacagagaaaaaggaaagaatgtcagcgggtatgcctcaagtaactcaagttttcaactcaatccaccactggcctcaagagagttaacaagggcacacccttggtccattccgagtatgctgcttagttcacagctaccattggttcgaagtcaagaccagaatcagtgtgtgtttgatcgagcatttgccacccaggtcaatgagcctccaatgccaaaagagcatgtccccttttgtcatgattgtagagagcaaggacactatgccctgaattgtccatgggtatatgccaaagaagccccttcctttggtttaacagggcagacatcgctaaaccagcctcctcgcaccaagtcaagcttgcagcctagtgtgcaaagtagagagcccaatggagagaatccattgaatcccgggaaatgctttcctcctagcctttcgtaccacgtggggtcacgtactaagcaagccaaaggcaagaagagtaagaatcagaagagaaaagcgtcgatgcgaactgaagaagaagtacgtaagatggctattagcagcaccgaatggcctcccgcagggataactattcctagacgtcaaagaggaaataccttccgaggtgcacgacagttgacccagcacctcctaagccatggtggcagagtatctgatagtgaagggtcagatcaagtctcctcggatgatgaagatgagtctccccgacatctcggtgaggaagagatggaatcaaaggcatgcacccgttgtggagaaattggacacattgctagcaggtgtctcacactctgccctcgttgtgaagaagaccatccaccaggggagtgtcccacccgcaaggtttctctgaaaggcagcaggctcaagtaccacatcgtcaccagaagcatccacaactctcggagtgaaaagtacttagttgacaaaggtcgaaaggtgatcaagatgtttaacagagaaaaaggaaagaatgtcagcgggtatgcctcaagtaactcaagttttcaactcaatccaccactggcctcaagagagttaacaagggcacacccttggtccattccgagtatgctgcttagttcacagctaccattggttcgaagtcaagaccagaatcagtgtgtgtttgatcgagcatttgccacccagatggatcgacaatggatgtacgctgaccggcggtccaaagagtttattgacggcgtgcactattttttgagagtggccgaagctaacaggcaaaggggttttatttgttgtccatgcaataagtgtaagaatcagaaggagtattctgcatacaggactattcatttccacttgtttgagtcggggttcatgccaagctataattgttggacatcccacggagagcaaggtgttgaaatggaagaagatgaagtggaagacgacaatattccggactttgctcagtatgttggatttgaaggaaatcaaacgggcgaggaggaaatagctgctgatggtaacgacgttgcggatgatcttggtcagatgttgcaggacgccaaggaggtctgcgaaagtgaaaaggaggcccataaattggacaagatgttggaggaccacagaacttcgttgtacccaggttgcgagcaggggcacaaaaagttggataccactctggagttcttgcaatggaaggcaaaaaatggggttagtgacaaggcatttggcgatttattgaaactcgtcaagaacattcttccggagggaaacaaattgcccgagacaacgtacgaggctaagaagatagtctgcctgctaggactggaagttcagaagattcacgcatgtccgaatgattgtatcctatatcgcggtgaggagtatgagaacctagaagcatgccatgtttgcaaagcactacgatacaagattagacgagacgatccaggaaaagttgacgggaacaaggggaatgctagaatgatgcggtggcacactgaagagcgtcaacaggacgggatgctgagacaccccgccgatggttcgcagtggcgaaacatcgacagaaaatttaaagaatttggaaaggacgcacgaaacatacggtttggtttgagtacggatggcatgaatccttttggagagatgagcagcggccatagcacttggcccgttacgatgtgtatctacaacctccccccctggttatgcatgaagaggaagtacataatgatgtcgattattattcaaggccccaagcaacctggtaacgacatcgatgtgtacctaagaccactggtcgaagatcttaaactgttgtggaagaaggaagaaagtacgtatcttaagcactgtaggaaggttgtatacatgggtcatcgtcgattccttgcagcaaaccacccagtacggaagaaaggcaagcacttcgaacataaggccgaccaccgtacgaagcctaaacatcgcagcgggaaaacagtgttcggaaaggggcctggaagccagcctatagagagcgaagatggtcacgcggcgatgtggaaaaagaactctatattttgggagttaccatattgggaattcttggacgtacgccacgcaatcgacgtgatgcacctcactaagaacctttgcgtaaaccttcttggcttcctaggtgtatacggaaagtcaaaagatacactggaagcacgtaatgatctaaagcatatggaacaacgaggcgaccttcacccggaaccaaaggagaaaggaagtcattacttgagtgcagccagctacactcttagcaaggcagagaaggaaagtatgtttggatgcttggagagcataaaggtaccatctggatactccacgaatatcaagcgaataataagcacgaaggagaagaagttcacaaacctaaagtctcatgactatcacgtgttgatgacacaactgctaccagttgtaataaggggtatacttccagacaatgtccgggcaacaataacaaagctatgtgcattcatgaacgcaatttcacagaaggtcatcgatccggatagattagaagcccttcaaaatgaagtggtgcaatgtctcgtcagttttgagttgatatttccaccttcatttttcaatatagtgacgcatctgctttgtcaccttgtgaaagagatcagtattctcgggcctgtgtatctacacaacatgtttcctttcgagaggtacatgggcgttctgaagaagtatgttcgtaaccatgctcgtccagaggcaagcatcgccaagggttatggaacagaggaggccatcgaattttgcatagaatttatcgaagaccttcgcccaatcggggtacctgaatcacgccatgaggggagactacggggaaagggaactctcggaaggaaagcaataatgacggtagacaacaatttattccgcaaagcccatttcactattctgcaacactcttcattggtagctccttacaacgaggagcacttggctctagttcgcgccaggaacatcgcccaagacatgaagagcacgaaccaaaacagcgctgttcgtgtcgatgccatgggacacgatggaacaactgccacgtattacggtgctatcgaggacatatgggaatttgactatggtcctctcaaggttcctctgttccggtgccaatgggttaggttgactggtggaggcgtaatgattgatgacagtgggatggcaactgttgaccttaacaaggttggatactcggacgaaccttttgtccttgccaatgatgtaacgcaagtctttttcgtgaaggacatgtctagcaaaggaaagaagggcagagggcctgacgagcctaagcgtcaagtggttctcccaggcaaaagaaaaatcgtcggagttgaggacaacactgacgaggattacgatcagttggatgggcaaccccctttcacggtgacgattgaccctagcatcctcctatcaattgaagacaccccttactcatatagcgatcacaaggagggaacaatagtgaggagaaaatggctgaccgcgatgagtaacagatattatacgtacttgaatgaggaagggaacgtggagagggatgcggaggggaaccagcaggggcacgtggaaagggatgtggaggggaaccaggaggaggaggctagtggaagtcaaccctccgttggacagaagagggcacgcgggcaacgaggtgcagcgaagaagcttgagggtcggcacatcataacggaagtggaagaagatggacgtcctagtgccccggccgaagctgccaagaactatgtacgtcacagcggttgggttgtgcgggataacgtgcctatcagtacggtgtactggcgaagaacaagggcacgcggagatcatgagagctttgtcctagattcggagaaagagatgctgtggaccacaatgctcgagacattcacccttcctgcgggtacagaggacaaagtgaaaaggtggactctgaagaaaatggcagaacagtttcagagcttcaagggagatctgtaccagaagtatatcctgaaggggcagacaccgaacttcgacacattcccaaagctaagggatcactgggacgagttcgttgtatataagacaggtgaacaagggcaggtgatgatggaaagaaacaaagaaaatgccgccaagaagaagtaccatcaccacttggggtcaggaggctatagcgtcgcgatgccgaagtgggaggagatggaggctagcttgcttgagaggggtatcgaaccggcaactgctaattggccgaaacgatcgaagttctggtactatgctcacggtggaacgctcaacccagctgatggctcactggtcttcggcgatcagatacgagaggctgcgcgacgactaacagatgtagtggaagcctcctcacagggcacattccaaccggacagagatagggacgagctgacactcgccctacagactccagagcatctaggacgaacacgagggaaaggggtgattccttggaagattggtttcaaggaggacatccagacgtacaggagtcggatgaggagcaagagagataccgaggcgaagattgcagatttagagtcctgggtatcgagctatgagctcaacatgcaagaggaggtggcaaggaaggttgatgaacgcatggccgcacatcggtcccatgatccccagccgaccattcctcctgcaatgttgagcccgtcaggaaaccatagcagctacgcctcaacggggcaagtaggatcacagagcatggacgccatgcaaacccaggatgaatcgacctgtcctgttgatgacatcactcagcggacaccatgtgagctgtatattcctttcaagaacttatcaataaaggtggcgtcgggcatggccatcccaacggacccttcaggtacttaccactgcaggccgattccagcaggatactcgaaggtcgaagttgagttggtcgaaggagcgtacgaggacctcgagctagattaccctggaggagacggcggtacatcatcctccctgggcgacaagcggcgtctcatggaccatctcctccggctccgccatctcctcctcaggatcctgcaccgtctcctcctcatgctccgccagcaccgtctccacttcaggctccagcaccgactgctcctcaggctcctgcaccgactcctcctcgggctcctacacctactcctccgcaagctcctcttccggcaccttcaaagtcaagggccccctccagctccaccgcctgcccacacaagggcaacaaagaaggcgaaagttgacgccgccaagaacaaggacccggggtacgattgcacgcaagaggagcttgacgtttacgtggcatcagaagtcaagagacaattcaagcctcgaagtccagaaaagaagattcctatagacccgagtgtcaggaacttcttcaggggtatgtctgcacctgtcaaggaggccatcaagctatcggactatgagcgaacgctgaagaaagcatcttctggaaagtccaaaccagtccctcagcttggagagcaaccaaaccatgatatcgagccgttggtgaccggggaagacatgacgatagaagaatttattactgacaccggtctaactacggatcaattgctaggagtcgaaccaatagaaaaggcggaagtgaaatacatgtacaaactcggcaaaccgcttgtcaagcccgagctggtgcagtccctacccacacaaatgtacaagttccatcagctgtacatggagatgagcgccaccggtagagagatgatcggagcgaggatcagggacccggacttcttgcaaggagatgacattctctggatcaatttcaagggaatctacgaactataccagctggacgccctcgacgtctctattatgagttgctggattttattccactgggtgcttttactcttcgacctgtcggcctgcaccgtcaacgtatatgactcaatggataaaaaagagtctacgtttgacaaggttttcgaacttatagacagggcttggtatcagttccgtcatttggtccgcggcaactggagagaaagacttaagcggaagttcaaatttccttgcgcaaagcaaaagcagggaactaacttgtgcggctactacgtgtgcgagtattgccactgccttgtagaccaaatcatcaccacaagagagctcgattttattcgcatgagggataacctgaccacacacaaggaatttatcgcggcggttcaagaacaactcatgggattcatcaacgaagaaatccttgatcccaagggtgaattttactacgacggaaacacaattcataggtccttagcttctgagctagtgactactactacgtcgaaatcgtag

SEQ ID NO: 16076 - DNA, 1753 bp, Oryza sativa
  Clone ID: PAT_MRT4530_21859C.1
gcccgcgcgccccccggctcccgcccccccctccgccgccaccgccgccccctcgccggcgagatgctgacctgcggccgcttcctctcctcctccgccgccgcctccaccccctccctctcccccttccggaacctaaccctctccctcctccgccgtccccatttccgcctcctctcctcctccgccaccgcctccgccgccgccgccgccgtcgagcccgacaccaagggtggcgcgggtggcggcgccgcgaagccgcagtggaaggcggcgatagacttcaagtggatccgggagaacacggacgccgtcgccgccaacatccgcgaccgcaactccgccgccaacctcgacctcgtcctccagctctacgacgagtacctcgccttgcagaaggaagttgaacggctccgagctgaaagaaatgcagttgctaataagatgaaagggaaattagaaccatctgtgcgtcaagcccttgttgaagaaggcaagaacctgaaagaagggcttattgccctagaagaggaccttgttcagctgactgataagcttcaactagaagcacaaagcattcctaacaccacacatccagatgctcctgtagggggtgaggaaagttctgtcgtcagaaaagaggttggtagtcagagaaacttcaatttcaccattagagatcaccttcagctgggaaaagaacttgatttgtttgattttgatgcagctgctgagctcctatatgagcagttgtacttcttttcacttgttcattttaccaaggttgtatactgtcattttcaggttagtggctcgaagttctactacttaaagaatgaagctgttctgttggagatggcccttgttaattgggccatcactgaggtctcaaagaaaggtttcacaccactaataactccggagattgtaaggtcatctgttgttgagaaatgtggcttccagccaagggcccaaaatactcagcttttagagctggttgtgttaggaggatcttatgcccataatttcaagaaaaaggtttattcgatcgataacagtgatcagtgcctcataggaactgcagagattcctgttggcggcatccatatggactctatactccctgattctgatttgcctcgaaaatatgtagcctattcacattgttttcgcacagaagctggtgccgcaggtgctgccactaggggcctctaccgtgtacatcagtttagcaaggttgagatgtttgtattttgccggccagaggagagcgacaagtgccatgaagaacttatcactattgaagaggaactttatgcatcacttggacttcatttcaaaactttggatatggcgactggggatctgggagcaccggcctacagaaagtttgacattgaggcatggatgccaggcctagataggtacggtgagatctcgagcgcgtcaaactgcacagactatcagagcaggcggctgggcatccggtttcgcccatcacctgcagatcctccaccggcgaacgccaagaaaggaaagggcagctcaggcccaacacagtttgtccacacgctcaacgcgacagcggttgctgttcctcgcttgatcatatgcatcctggagaactttcagcaagaagatggaacggttgtgatcccagagccactgaggcccttcatgggcggacttgaagtgctctccccgaaaaccaaatgatcagcttgaaggtcaccacgtttacttcgaatcttgt

SEQ ID NO: 16077 - DNA, 477 bp, Oryza sativa
  Clone ID: PAT_MRT4530_2185C.1
acgctcgtctagttgagcagtcgtgacgagcacggcggcgacgacgacctgcgtcgcgacgatggccgctcgcctgctgctcctagtactttcatgcggggcagcagcgcgcggaagctcagcggaggcctataagacgggatcgtgctgaggggcgcacgatggaggtgcgcatcaagatcgatgatgcgtgcgcgatggcgatggaccgtgatcttacaggccagacaaggaacacaacagtgatactgaacgcgggtcacatggttacagttgtccagtcgtatcagtagttgtgatacgacaatgcgccatgtggttctcatgtaattgaggtgatgtgaatgagctacttagagagacaagcgatggacgacaagaaaggctggaattctgcgcacattgaagcatcattgagtgaggacagaacagttgtacatgagctcgtcggggaagctttcagagaagaggaatact

SEQ ID NO: 16078 - DNA, 800 bp, Oryza sativa
  Clone ID: PAT_MRT4530_21860C.1
aggattgtgcaactcccgtctcccccgtcccctgcgtcaggggaaaaagagaacaaaaaaaaaaacaacacaaaacaaaaactcccgtctcgtctccgctccttgcgcctgcgccgatctccgtctcgcgagcagaatccagagcaaggggaagccgccgtcgtccgtcctgctgcatcctggtttttgagtcaagcacatgtccaaggcacggaacgttttagttgccactggtttgttggcctttgctggtgctggcttagcatttccattctattttgtgaaatcaaagaacaaacccatcattgattcatcaaagcctctacctccacaggctacatttcgaggaccatatgtgaatactggatcgcgggacattggacctgattataccgactaccccaagaagtgatctatctatccaaaaatcagagggactcttcttggacagatgatattgttagattattgggacctataactttgaagttgtactgacattgttatgtgtactgtagtcaaggattgggcttccagacttttgaatgttcatgcacccacccaagcagcgcaaaaccagcagtgaataattatttccagttgggactgtcttgtcctgtgcaagtgctcttatggagtttcaagaataattttagcacataggtttactatatattatcttttgttagttcatggaatttattttagtgatgtctagtgtaggtgatgctacgtttgcgacaccattacagtttcaaacaaagtgctggttttcattttcttttaaaaaaaaaaaaaaa

SEQ ID NO: 16079 - DNA, 5709 bp, Oryza sativa
  Clone ID: PAT_MRT4530_21861C.1
atggatcggcaatggatgtacgctgaccggcggtccaaagagtttattgacggcgtgcattattttttgagagtggccgaagctaacaggcataagggttttatttgttgtccatgcaataagtgtaagaatcagaaggagtattctgcatccaggactatttatttccagttgtttgagtcggggttcatgccaagctataactgttggacatcccacggagagcaaggggttgaaatggaagaatatgaagtggaagacgacaatattctggactttggtcagtacgctagatttgaaggaaatcaaacgggcgaggacgaaagggatgctgatggtaacatcattgcggatgatcttagtcagatgttgcaggaagccaacgaggactgcgaaagtgaaaagggggaccataaattggactagatgttagaggaccacagaacgtcgttgtacccaggttgcgagcaagggcacaaaaagttggataccattctgaagttcttgcaatggaaggcaaaaaatggtgttagtgacaaggcatttggtgatttattgaaactcgtcaagaacatttttccggagggaaacaaattgcccgagacaacgtacgaggctaagaagatagtctgccctctaggactggaagttcagaagattcacgcatgtccaaatgattgtatcctatatcgcggtgaggagtacgagaacctagaagcatgccctgtttgcaaagcactacgatacaaaattagacgagacgatccacgagaagttgacgggcagctaacaaagaagagaattcctactaaggtgatgtggtatttccctataataccacggctaaggcgtttgttcaggaacaaagggaatgctagaatgatgcgatggcacgctgaagagtatcaacaggacgggacgctgagacaccctgccgatggttcgcagtggcgaaacatcgacagaaaattaaaagactttcgaaaggacgcacgaaacatacagtttggtttaagtacggatggcataagtccttttggagagatgagcagcggccatagcacttggcccgttacgatgtgtatctacaacctcccccctggctatgcatgaagaggaagtacataatgatgccaattataattcaaggccccaagcaacctggtaacgacatcaatgtgtaccaaagaccactggtcgaagatcttaaactattgtggaaaaaggaaggtgtccccgtgtgggacgaggacaaacaggaggagtttaacctacgagcgctgctgttcataaccatcaatgattggcctgcacttagcaacctttccggtcagtctaacaaggggtacaaggcttgcactcactgtatggatgaaacagaaagtacgtatcttaagcactgtaggaaggttgtgtacatgggtcatcgtcgattccttgctgcaaaccacccggtacggaagaaaggcaagcactttgaacataaggcggaccaccgtacgaagcctaaacatcgcaatgggaaaacagtgtttgctatggttaaagatcttaaagtagtgttcggaaaggggcctggaagccagcctatagagagagaagatggtcacgcggcgatgtggaaaaagaactctatattttgggagttaccctattggaaattcttggacgtccgccacgcaatcgacgtgattgacctcactaagaacctttgcgtaaaccttcttggcttcctaggtgtatatggatagtcgaaagatacactagaagcacgtaatgatctgaagcatatggaacaacgcggcgaccttcaccccgaaccaaaggagaaaggaatagttgactattagagttagcatagttgactattagagttttaatacaatattatttgagttttaatataagattattagagttttaatataacattattagatttgtaattagacttaatatataattattgtctagggtcctaatatacgacacttagacttagcatcgttgactattagagttttaatacaatattatttgacttttaatataagattattatagttttaatataacattattagatttgtgtaataaaacttagtatataattattgtctagggtcctaatatacgacacttagacttaccatagttgactattagagttttaatacaatattatttgagttttaatataagattattagagttttaatataagattattagatttgtaattagacttaatatataattattgtctagggtcctaatatacgacacttagacttagcatcgttgactattagagttttaatacaatattatttgacttttaatataagattattatagttttaatataacattattagatttgtgtaataaaacttagtatataattattgtctagggtcctaatatacgacacttagacttaccatagttgactattagagttttaatacaatattatttgagttttaatataagattattagagttttaatataagattattagatttgtaataagacttagcatataagattgtgtagggttctaatatacgacagttagacttagcatatttaacttagcatatatgattgttagcatataagattgttaaagcaaaaatgacctatagacttagcaactatttcttgtatgaacagatggctgatcgcgatgagaaacagatactgtacgatacaatcgtggagggaagtagccagtactggaatgaagaagaggggaacgaggatccaaaccagtacttgaacgaggaagggaacgtggagagggatgcagaggggaacctggaggggaacgtggagagggatgtggaggggaaccaggaggaggaggctagtagaagtcaaccctccgctggacagaagagggcacgcgggcaacaaggtgccgcgaagaagctagagggtcagcacatcataacggaagtagacgaagacggccgacctagtgccccggcggaagcagcaaagaactacgtacgacacagcggttgggttgtgcaggataacgtgcctgtcagtacggtgtactggcgtagaacaagggcacgcggagatcatgagagctttctcctagattcggagaaagagatgttgtggaccacaatgctcgagacattcacccttcccgcgggtaaagaggacaaagtgaaaaggtggactctaaagaaaatggcagaacagtttcagagcttcaagggagatctgtaccagaaatatatcctgaaggggcagacaccgaaattcgacacattcccaaagctaagggatcactgggacgagttcgttacatataagacaggtcaacaagagcaggcgatgatggaaagaaacaaagaaaatgccgccaggaagaagtaccatcatcacttgaggtcaggcggctgtagcgtcgcgatgccgaagagggaggagatggaggcaagcttgcttgagaggggtatcggaccggccacctctaaatggccggatcgatcgaagttctggtactatgctcacggtggaacgctcaacccagttgatggttccctggtcttcagcgatcagatacgcgaggctgcgagtcgactaacggacgcagtagaagcctcttctcagggcacgttccgacccgacagagagaaagacgagctatcactcgccctgcagactccagagcatccaggacgaacatgagggaaaggggtgattccttggaagattggattcaaggaggacatccacacgtataggagtcggatgaggagcaagagagataccgaggcgaagattgcagatcttgagtacagggtatcgagctacgagctcagcatgcaagaggaggtggcaaggaaggttgatgaacgcatggccgcatatcggtcccatgatccccaaccgaccattcctcctgcaatggtgagcccttcaggcaatcgtagcagctgcgcctcaacggggcaggtaggatcacagagcttggacgccatgcaaacccaggacgaaaccacctaccccgttgatgacatcacttagcggacaccatgtgagctgcatattcccttcaagaacttatcaataaaggtggcgtcgggcatggccataccaacggacccttcaggtacttaccactgcaggccgattccaacaggatactccaaggtcgaagttgagttggtggaaggcgcgtacgaggacctcgagttggattaccctggaggagacggtgagacgcatctacgagacacaagccacgccattatactatggcgcaagcggtacatcatcctccctaggtgacaagcggcgtctcgtgcaccatctcctccggctccgccatctcctactcaggctcctgcaccgtctcctccttatgctccagcaccgtctccacctcaggctcctgcaccgactcctccttaggctcctacaccgactcctccgcaagctcctcgtccggcaccttccaagtcaagggccccccaagctccaccgcctgcccccacaagggcaacgaagaaggcgaaagttgacgccgcaaaaaacaaggacccggggtacgattgcacgcaagaggagcttgtcgcttatgtgacatcagaagtcaggagacaattgaagcctcgagattcttatagacccaagtgccaggaacttcttcaggggtatgtctgcacgtgccaaggaggccataaagctatcggactatgagcgaatacttaagaaagcatcttttggaaagtctaaaccagtccctcagcttggagagcaaccaaacccagagatcgagccgttggtgaccggtgaagattttggaatacaagaatttattaattacaccgggctaactacggatcaattgctatgaggcgcaccaatcgaaaaggcggaagtgaaatacatgtacgaactcggtaaaccgcttgtcaagcctgagcagctgcaatccctacccacacaaatgtacaagttccatcaactgtacatggagatgagcgccaccggtagagagatgatcggagcgaggatcagggacacggacttcttgcaaggagatgacattctctggatcaatttcaagggtatctacgaactataccaactggacaccctcgacgtctgtattatgagttgctggattttaatggagattcaaagggcccgacggcagggggttttcgatactggattcatcgaccctcggaaagtaaacgtcgcaatgctcgaccagtatccgcaagccacagaggacaatctcgtccatctcctgaaggcgctgcattataagacgttcatactattgccgtacaacacagaattccactgggtccttttactcttcgaccttgaggcctgtaccgtcaacgtatatgactcaatggataaaaaagagtctacgtttgacaaggttttcgaacttatagacagggcttggtatcggttccgtcatttggtccggggcaaatggagagaaagacttaggcggaagttcaattttccttttattcgcatgagggataacctgatcacacataaggaatttattgcggcggtttaaaaacaactcatgggattcatcaacgaacaaatccttgatcccaagggtgaattctactacgatggaaatacaattcataggtccttagcttctgagataacgactagtacagtacagaaaccctataatcac

SEQ ID NO: 16080 - DNA, 2787 bp, Oryza sativa
  Clone ID: PAT_MRT4530_21862C.1
atgatttatcgattgtcgttggtctatctctttgagcgtgtgttggatgcattatatatggatcggcaatggatgtacgctgaccagcggtccaaagagtttattgacggcgtgcactattttttgagagtggccgaagctaacaggcaaaggggttttatttgttgtccatgcaataagcgtaagaatcagaaggagtattctgcatccaggactattcatttccacttgtttgagtcggggttcatgccaagctataattgttggacatcccatggagagcaaggtgttgaaatggaagaagatgaagtggaagacgacaatattccgaactttgctcagtacgttggatttgaaggaaatcaaacgggcaaggaggaaagggatgctgatggtaatgacgttgcggatgatcttggtcagatgttgcagaacgccaaggaggactgcgaaagtgaaaagggagcccataaattggacaagatgttagaggaccacagaacttcgttgtacccaggttgcgagcaagggcacaaaaagttggataccactctggagttcttgcaatggaaggcaaaaaatggggttagtgacaaggcatttggcgatttattgaaactcgtcaagaacattcttccggagggaaacaaattgcccgagacaacgtacgaggctaagaagatagtctgcccgctaggactggaagttcagaagattcacacatgtccgaatgattgtatcctatatcgcggtgaggagtatgagaacctagaagcatgccctgtttgcaaagcactacgatacaagattagacgagacgatccaggagaagttgacgggcagctaacaaagaagagaattcctgctaaggtgatgtggtattttcctataataccacggataaggcgtttgttcaggaacaaggggaatgctagaatgatgcgatggcacgctgaagagcatcaacaggacgggatgctgagacaccccgccgatggccccaagcaacctggtaacgacatcgatgtgtacctaagatcactggtcgaagatcttaagctgttgtggaagaaggaagcaaaccacccggtacggaagaaaggcaagcacttcaaacataaggccgaccaccgtacgaagtctaaacatcgcagcgggaaaacagtgtttgctatggttaaagatcttaaagtagtgttcggaaaggggcctggaagccagcctatagagagcgaagatggtcacgcggcgatgtggaaaaagaactctatattttgggagttaccctattgggaattcttggacgtacgccacgcaatcgacgtgatgcacctcactaagaacctttgcgtaaaccttcttggcttcctaggtgtatacagaaaatcgaaagataaactggaagcacgtaatgatctgaagcatatggaacaacgcggtgaccttcacccggaaccaaaggagaaaggaagccattacttgagtccagccagctacactcttagcaaggcagaaaaggaaagtatgtttgaatacttggagagtataaaggtaccgtctggatactccacgaatatcaagcgaataataagcacgaaggagaagaagttcacaaacctaaagtctcatgactgtcacgtgttgatgacacaactgctaccagttgtaataaggggtatccttcaagacaatgtccgggcaacaataacaaagctatgtgcattcatgaacgcaatttcgcagaaggtcgtcgatcgggatagattagaagcccttcagaatgatgtggtgcaatgtctcgtcagttttgagttgatatttccaccttcatttttcaatataatgacacatctgctttgtcaccttgtgaaagagatcagtattctcgggcctgtgtacctacacaacatgtttcttttcgagaggtacataggcgttctcaagaagtatgttcgtaaccgtgctcgtccagaggcaagcatcgccaagggttatggaacagaggaggtcatcgaattttgtgtagaatttatcaaagatcttcgcccaatcggggtacctgaatcacgccatgaagggagactacggggaaagggaactctcggaaggaaagcaataatgacggtagacaacaatttattccgtaaagcccattccacggttctgcaacaatcttcattggtagctccttacatcgaggagcacttggctctagttcgcgctaggaacatcgcccaagacatgatgagcacgaaccaaaacagcgttgttcgtgtcgatgccatgggacacgatggaacaactggtacgtattacggtgccatcgaggacatatgggaacttgactatagtcctctcaaggtccctctgttccggtgccaatgggttaggttgactggtggaggcgtaatgattgatgacagtgggatgacaacggttgaccttaacaaggttggatactcggatgaaccttttgtccttgccaatgatgtaacacaagtctttttcatgaaggacatgtctagcaaaggaaagaagggcagagggcctgacgagcctaagcgtcacgtggttctcctaggcaaaagaaaaatcgacggagttgaggacaagactgacgaggattacgatcagttggatgggcaaccccctttcacggtgacgattgtccctagcatccttctatcaaatgaagacaccccttactcacgtagcgatcacaaggagggaacaatagtgaggagaaagtacgtgcggtcaaccgtcaccgccgatgtattgtcgtaa

SEQ ID NO: 16081 - DNA, 3871 bp, Oryza sativa
  Clone ID: PAT_MRT4530_21863C.1
atggaagaagatgaagtggaagacgacaatattccggactttgctcagtacgctggatttgaaggaaatcaaacgggcgaggcggaaagggatgctgatggtaacgacgttgcggatgatcttggtcagatgttgcaggacgccaaggaggactgcgaaagtgaaaagggggcccataaattagacaagatgttagaagaccacagaacatcgttgtacccaggttgcgagcaggggcacaaaaagttggataccactctggagttcttgcaatggaaggcaaaaaatggtgttagtgacaaggcatttggcgatttattgaaactcgtcaagaacattcttccggagggaaacaaattgcccgagacaacgtatgaggctaagaagatagtctgccctctaggactggaagacgggatgctgagacaccccgccgatggttcgcagtggcgaaacatcgacagaaaatttaaagactttggaaaggatgcacgaaacatacggtttggtttaagtacggatggcatgaatccttttggagagatgagcagtggccatagcacttggcccgttacgatgtgtatctacaacctccccccgtggttatgcatgaagaggaagtacataatgataccgattataattcaaggccccaagcaacctgttaacgacatcgatgtgtacctaagaccactggtcgaagatcttaaactgttgtggaagaaggaaggtgtccccgtgtgggacgaggacaaacaagaggagtttaacctacgagcgctgctgttcgtaaccatcaacgattggcctgcacttagcaacctatccgggcagtccaacaaggggtacaaggcttgcactcactgtatggatgaaacagaaagtacatatcttaagcactgtaggaaggttgtgtacatgggtcatcgtcgattccttacagcaaaccacccggtacggaagaaaggcaagcactttgaacataaggcggaccaccgtacgaagcctaaacatcgcagcgggaaaacagtgtttgctatggttaaagatcttaaagaattcttggacgtccgccacgcaatggacgtgatgcacctcactaagaacctttgcgtaaaccttcttggcttcctaggtgtatatggaaagtcgaaagatacactggaagcatgtaatgatctgaagcatatggaacaatgcggtgaccttcatccggaaccaaaggagaaaggaagccattacttgagtctagccagctacactcttagcaaggcagagaaggaaagtatgtttgcatgcttggagagcttcaaggtaccgtctggatactccatgaatataaaacgaataataagcatgaaggagaagaagttcacaaatctaaagtctcttgactgtcacgtgttgatgacacaactgctaccagttctaataaggggtatcctcccagacaatgtccgggcaacaataacaaagctatgtgctttcatgaacgcaatttcacagaaggtcatcgatcctgatagattagaagccctgcagaatgatgtagtgcaatgtcttgtcagctttgagttgatatttccaccttcatttttcaatataatgacgcatctgctttgtcaccttgtcaaagagatcggtattctcggtcctgtgtacctacacaacatgtttcctttcgagaggtacataggcattctgaagaagtatattcgtaactgttctcgtccaaaggcaagcatcgccaaggggtatggaacagaggaggtcattgaattctgcgtagaatttatcgaagaccttcgcctaatcggggtacctgaatcacgccatgaagggagactacggagaaaggggactctcggaaggaaagcaataatgatggtagacaacaatttattccgtaaagcccatttcacggttctgcaacaatcttcattggtggctccctacatcgaggagcacttggctctagttcgcgccagaaacatcggtaagtccgatgcatggattacacggcatcacattgatactttctccgcgtggctgcgacaacatctcatgggtaacgagacgattaaccaacaactggccttcctggcgaggggaccatctggctcgatcgcgacattccagggatatgaaatcaatgggtacacattctacacgagggcccaagacatgaagagcacgaaccagaacagtgatgttcgtatcgatgccataggacacgatggtacaactagcacgtattacggtgccatcgaggacatatgggaacttgactatggatctctcaaggttggatacttggacgaaccttttgtccttgccaatgatgtaacggaagttttttacgtcaaggacatgtccagcaaaggaaaaaaggccaaagggcctgacgagccaaagcgccatgtggttctcctaggaaaaagaaaaatcatcggagtagaggacaagactgacgaggattacgattagtttgatgggcaaccccctttcacggtgacgattgaccctagcatcctcctatcaaatgaagacaccccttactcacgtagcgatcacaaggaaggaacaattgtgaggagaaagtacgtgcggtcaatcgtcaccgccgatgtattgttagcaaatatgacctatagacctaacaaatattttttgtatgcacagatggctgatcgcgatgaggaacagatactgtatgatacaatcgcagagggaagcagccagtactggaacgaagaagaggggaacgaggatccaaaccagtacttgaacgaggaggggaacgtggagagggatgcggaggggaacgaggaggggaacgatgaggaggaagctagtggaagtcatccctccgctggacagaagagggcacacggacaacgaggtgccgcgaagaagatagaggaagtagccaagaattttgtacgccactgcggttgtgttgtgagggacaacgtgcctgtcagcacggtgtactggcgcagaacaagggcacgcggggataatgacagctttgtcccggactcagagaaagagatgctgtggaccataatgctcgagacgttcacgctactcgcgggtacggagaacatagtgaaacagtggactctgaagaaaatggcagaacagttccagagcttcaagggggatctctacaagaaatacatcctgaagggtctaacaccgaacttcgacacattcccaaagctaagggatcattgggacaagttcgtggcttataagacagggcaacaagggcaagcgatgatggaaagaaataaagaaaatgccgccaagaagaagtaccatcaccacttggggtcaggcggctatagcgtcacgatgccgaagtgggaggagatagaggctagcttgcttgagaggggtatcgaaccggccaccgctaaatggccagaataatcgaagttctggtactatgctcacggtggaacgctcaacccagctgatggctccctgatgttcggcgatcagatacgcgaggctgcgcgttgactaacagacgtagtggaagcctcttctcagggcacgttccgaccggacagagagaaggacgagctgttactcgccctgcagactccagagcatccaggacgaacacgagggaaaggagtgattccttggaagattgggttcaaggaggacatccacacgtataggagttggatgaggagcaagagagataccgaggcgaagattgcagattttgagtacagggtatcgagctacgagctcagcatgcaagaggaggtggcaaggaaggtgattgaacgtatggccgcacatcggtcccaggatccccagccgtacattcctcctgcaatggtcagcccat

SEQ ID NO: 16082 - DNA, 375 bp, Oryza sativa
  Clone ID: PAT_MRT4530_21864C.1
ggcgaacaaggaatagtcatgcgaagcgcttcccaaaaaccatattgccgccttctcccgatgcagggcgttgaaggcgaaggttccagagacctgctctagtacagaagaggaggaaaaccctagattgattttacgtgtgttgcgtggagacggcggctcaactaatgtagagatattaggacgcacgtatgatcactactccgcataatcgaaccagacatgttgcgcataacttatctggactccacgccgtttcatgcactggattattcgccaggtgaggcaagcgagcgagcatgcacgtgtgttccccctcttctctccacctcacatgcctcaagtggcaaggagagcatcctcccttatatagag

SEQ ID NO: 16083 - DNA, 1032 bp, Oryza sativa
  Clone ID: PAT_MRT4530_21865C.1
atggacaagctcaagatgatggccaagacgatggcggagtgcgcgcggaaggtgatccaggcgtgggaggcgcgtgccgcggcagcggccgacggcgagcggatggtgcaggtggaggtcggggagcagttccacgagctgaccgccgacgtgatctcgcacacggcgttcggcagcagctacagacaagggaaggaggtgttcgtcgcgcagcgggagctccagtacatcgccatgtccgccctcaacagcgtccgcatcccgggcagccaatacatcccgacgaaggcgaacattcgccggcgacagctcgccaagaaggtgagaggcacgctcatggcgatcatacgcgaacgccaggccaccgccgccgccgccaaggaggacaggggatacggcaacgacctcctcggcctgatgctcgaggccaacgcggcggccggcggcggcgagaagagcatgaccatggacgagatcgtcgacgagtgcaagaccttttcttcgccggccacgacaccacctcgcacctcctcacctgggccatgttcctcctcggaacgcaccccgagtggcagcagcgcctccgcgaggaggtcctccatgacgatggtgctgtacgagacgctgcggctgtacgggccggtgagcatgctggtgaggacggcgacggcggacgcggagctcggcggcgtgcgggtgccgaagggcacgatgacgatgatgccggtggcgatcctgcaccgcgacgcggacgtgtggggcgcggacgccggcgagttcgacccgctccggttccgcggcggcgtgaacaaggcggcggcgcacgccggcgcgctgctggccttctcgctggggcagaggtcgtgcatcgggcaggacttcgcgatgatggaggcgaagacgacgctggccatgatcctccggcgcttcgccttcgaggtctcaccggagtacgtgcacgcgccgctcgacttgctgacgcttcagcccaagtgcgggctcccaatggtgctcaagctcttggatcaatag

SEQ ID NO: 16084 - DNA, 3304 bp, Oryza sativa
  Clone ID: PAT_MRT4530_21866C.1
atggatcggcaatggatgtacgctgactagcggtccaaagagcttattgacgacgtgcattattttttgagagtggccgaagctaacaggcaaatgggttttatttgttgtccatgcaataagtgtaagaatcagaaggagtattctgtatccaggactattcatttccacttgtttgatgcggggttcatgccaagctattattgttgaaatggaagaagatgaagtggaagacgacaatatttcagactttgctcactacgctggatttgaaggaaatcaaacgggcggggaggaaagggatgctgttggtaacgacgttgcggatgatcttggtcagatgttgcaggacgccaagtaggattgcgaaagtgaaaagggggctcataaattggacaagatgttagaggaccacagaacgtcgttgtaccaaggttgcgagcaggggcacaaaaagttggataccactctggagttcttgcaatggaaggcaaaaaatggtgttagtgacaaggcatttggcgatttattaaaactcgtcaagaacattcttccggagggaaacaaattgcccgagacaacgtacgaggctaagaagatagtctgccctcttggactggaagttcagaagattcacgcatgtccgaatgattgtatcctatatcgtggtaaggagtacgagaacctagaagcatgccctgtttgcaaagcactacgatacaagattagacgagatgatccaggagaagttgacgggcagctaacgaagaagagaattcctgctaaggtgatgtggtatttccctataataccacggttaaggcgtttgttcaggaacaaggggaatgctagaatgattcaatggcacgctggagagcgtcaacaggacatgatgctgagacaccccgccgatggttcacagtggcgaaacatcgatagaaaatttaaagactttggaaaggacgcacgaaacatacggtttggtttaagtacggatggcatgaatccttttggagagatgagcagcggccatagcacttggcccgttacgatgtgtatctacaacctccccccttggctatgcatgaagaggaagtacataatgatgccgattattattcaaggccccaagcatactggtaacaatatcgatgtgtacctaagaccactagtcgaagatcttaaactgttgtggacgaaggaaagtgtccccgtgtgggacgaggacaaacaggaggagtttaacctacgagcgctgctgttcgtaaccatcaacagttggcatgcacttagcaacctatccggacagtccaacaaggggttcaaggcttacactcactgtatggatgaaacataaagtacatatcataagcactgtaggaaggttgtgtacatgggtcatcgtcgattccttgcagcaaaccacctggtacggaagaaaggcaatcacttttaacataaggcggaccaccgtacgaagcctaaacatcgcaatgggaaaacaatgtttgctatagttaaagatcttaaagtagtgtttggaaaggggcctggcaaccagcctatagagagtgaagatggtcacgcggcgatgtggaaaaagaactctatattttgggagttaccctattgggaattcttggacgtccgccacgcaatcgacgtgatgcacctcactaagaacctttgtgtaaaccttcttggcttcctaggtgtatatggaaagtcgaaagatacactggaagcacttaatgatctgaagcatatggaacaacgcggtgaccttcacccggaaccaaaggagaaaggaagccattacttgagtccagccagctacactcttagcaaggcaaagaaggaaagtatgtttgaatgtttggagagcatcaaggtaccgtctggatactccacgaatataaagcgaataacaagcacgaaggagaagaagttcacaaatctaaagtctcatgactatcacgtgttgatgacacacctgttactagttgtaataaggggtatcctcccagacaatgtccgggcaacaataacaaagctatgtgctttcatgaacgcaatttcgcagaaggtcatcgatccgtatagattacaagccatgtagaatgatgtggtgcaatgtcttgtcagctttgagttgatatttccaccttcatttttcaatataatgacgcatctactttgtcaccttgtcaaagagatcggtattctcggtcctgtgtacctacacaacatgtttcctttcgagaggtacatgggcgttctgaagaagtatgttcataaccgtgctcgtccagaggcaagcatcgctaaggggtatggaacagaggaggtcattgaattctgcatagaatttatcgaagaccttcgcccaatcggggtacctgaatcacgccatgaagggagactacggggaaaggggactctcggaaggaaagcaataatgacggtagacaacaatttatttcgtaaagcccatttcacggttctgcaacaatcttcattggtggctccctacatcgaggagcacttggctctagttcgcaccagaaacatcggtaagtccgatgcatggattacacggcatcacattgatactttctccacgtggctgcgtcaacatctcatgggtaacgagacgattaaccaacaactagccttcctggcgaggggaccatctggctcgatcgcgacattccagagatatgaaatcaatgggtacgcattctacacgagggcccaagacatgaagagcacaaaccagaatagtgttgttcgtatcgatgccatgggacacgatggtacaactggcacatattacggtgccattgaggacatatgggaacttgactatggacatctcaaggtccctctgtttcggtgccaatgggttaggttgactggtggaggcgtaactattgatgacagtgggatgacaacggttgaccttaacaaggttggatactcggacgaaccttttgtccttgccaatgatgtaacgcaagttttttacgtcaaggacatgtctagcaaaggaaaaaagggcaaagggcctaacgagccgaagcgccacgtggttctcctaggaaaaagaaaaatcgtcggagtagaggaaaagactgacgaggattacgatcagtttgatgcgcaaccccctttcacggtgacgattgaccctagaatcctcctatcaaatgaagacactccttactcacgtagcaatcacaaggaaggaacaatagtgaggagaaagtacatgcagtcaaccgtcaccgccgatgtattgtcg

SEQ ID NO: 16085 - DNA, 905 bp, Oryza sativa
  unsure (1)..(905): unsure at all n locations
  Clone ID: PAT_MRT4530_21867C.1
gctnctccncctcctcgtcgtcntcgtcgtcgtcgccatcntcgtcgcgatcnccatagctagctctagcgatgggttgcgcgttctcgtcggcgggggcgctgaggccgttcgagggggtgagggtgatccacatcaacggctacgtggaggacttcgacgcgccggtgacggtggggcaggtcaccggcaagccggcggcgggggaggggcaggggcaggggaggtacgtgctgtgctcgtcggcgcacctgctgcagccggggcgggggccgttcagggcggacgacccactggaggccggcacggtgtacttcctcctcccgcagtccatcttccagtccgagtcctccgccgtcgacctcgcctgcctcatgaaccgcctcacctccctcgcccgcaagggcgccgccgccgcctccagccccgtcgaggccctcttcaccgccggaattcaccacccgccgcagccctcctcctcctgcagcagctccaagccggcggcggcggcggcgagctcggggtcgccggaacggtgctacctcgcggcggcggcgcggccggcggcgtggaagccgcggctggatcgcatcgacgagtccttcggccgcgcatccatgcggagctcctccgctcgcagcaccgaggcctgaacattttttttcttcctcttttttaatcttttttctctttattattttattttcttgttacttttcttagtagtagtagtagtagtagtagtagaagatgataatttctggatttttttttctttacaaagttagttttctgttgtttgtatatccaaaaggtgtaaatataatctaatttgtaatgttggtttggattggattcggatcatctggtctatcttatctagcaacttaaaaaaaaaaaaaaaa

SEQ ID NO: 16086 - DNA, 1008 bp, Oryza sativa
  Clone ID: PAT_MRT4530_21868C.1
atggtggtgcttgccaagggcgagctcgagcagatagccctgccggcggcgcacccgccgccagccgacgtgcgcgcgatcgacctgtccgccacgggtcccgcccgcgcggcggaggcgcgcgcgctggtggcggcgtgcgaggagcaggggttcttccgggtgacgggccacggcgtgccgccggggctggtgcgcgccgcggaggccgccgcggcgcggttcttcgcgctgccgcagcccgacaaggaggccgccgcaggggcgccgctcgggtacgccagcaagcggatcggcagcgccggcgacctcggctggatcgagtacctgctactctgcctcgcccccgccgccgccgccgcggcattgccgtgcgccgcgacgtcgcccacgcctccttgccccttacgggagcttctacgcgagtacagcgcggcggtgcggcgggtggcgtgcggcgtgctggagctgatggcggaggggctcggcgtcgggccggcggacgcgctggcgcggctggtggcgcgcgaggacagcgactccatcctcagggtgaaccactacccgccgcgccccgatcagctgggcggcggcggcgggccgaacctgacggggttcggcgagcacaccgacccgcagatcatctccgtgctccgctccaacggcgcccccgggctggagatctccctccgtgacggcgcctgggcgtccgtgccgcacgacggcgacggcgactcctttttcgtcaacgtcggcgacaccctccaggtgctaacgaacgggaggttcaggagcgtgaagcacagggtggtggtgaacagcgagaagtcgagggtgtccatggtcttcttcggcggcccgccgcccggcgagaggctggcgccgctgccggcgttattaggggacggcggccggagccggtacagggagttcacctggaaggagtacaagggcagcggctgcaagggccggctcgccgacgacaggctctgcagatttgagaactag

SEQ ID NO: 16087 - DNA, 216 bp, Oryza sativa
  Clone ID: PAT_MRT4530_21869C.1
atgggtcccagcgccgtcctccgcccatgggagacatccctcgtcccatcctccgcccactcgaccgccacgtggcagccgagtgagggcctcggcgcggcgcgctccaagggcccgaggggtgcgacggggcaccccgaggccccttggccacttgatgactacccgacctcccccgaggggagggggaagcaggccgcacggccacgtggctag

SEQ ID NO: 16088 - DNA, 2799 bp, Oryza sativa
  Clone ID: PAT_MRT4530_2186C.1
atggccgccaagaagcacgacacgcgcaagacaacaagaatcgttcccgacatcgtgtttctttacgacgtcgcgagaacgaagagcgaggaggccgctcgaacgaagaccaacaccaccataatcgtcacagccaccgcgaccgcgacaatcacgaacagcggacaccagacgatgctggtcgagggcgtcaacatgacggtggtgataatggggatcggcgccatgacaacaatggtggacgacgacagaattctcgagaacctagctttcaaccgttctctacgtgatgtccgatggcccaagagattccgacccggagcaatagagaagtacgatgggagtactgaccctgaagaattcttccaggtctactccatgcaattcgtcgctaacttccaaggaacttacaagcgccacgagatcgaagacgatttacacacattaacacagaattcgggtgaatctttaagggactatgttcggcgctttagtgagtgcagaaatacgatccccgatatcaccgacgcttctgtgattcgtgctttcaaaactggtgtcagagatcgctatactacccaggagttggcaacaaggcaaatcacaactactcgaaggttgttcgaggttgtcgatcgatgcgcccatgcagacaatgcactgagacgcaagagtgacaagacaaaggcaggaggagagaagaagccagccaaggacgcactcgaaccaagcaagaagaaaagcggaagagtgggaagaggaaagctcaagcggaaacattctctagaggagtgcctcatcttcaaaaagtcgctggaaaagcaactagctttggagaagggcaagcgagtacgtgtagtcgagaaggccactgaggcaaccactcaggagtcggactcggcttcggagaagatcgagttctcagatgaggaccaccccaaggctgttgttatcccaggacgatatccgatcgtggttgaacccactattcggaatatcaaggtagcgcgagtcctcgtcgatggcggcagctccatcaaccttctcttcgccagcaccttggacgcaatggaaattccacgaagcgagttgacactcgggacttggcacctgacgtggggctgcatcggtgttcaatctctggtgaaggggatcaaactgactggcacgcccgcatctcatcatatttggacctacacaggagctaagcagatctcccaggccgagcagataacatttgatgttgctgagtttgacacagcatataacaccatcatcggaagaactgcactcgtgaagttcatggccgcatctcactacgcgtatcaggtactcaagatgcccgggccgaagagaacaatcactattcaagggaacgcaaagctggcgatccaatgcgacaagcggagcctcgacatggtcgaacacacgcccagcccacccgccacagccgagccacccaagaaagaactcgcgctcatcaccatcctccacgacaatgcggacgtattcgcttggcagccgtccgacatgccgggggtccccagggaggtgattgagcacaaactcatggtgcgacccgatgccaagccagtaaagcaaaaactgcggagatttgcaccagatcggaaacatgccatacgagaagagctcgataaacttctcaaagctggcttcatcagagaggtactccatccagagtggctagccaacccagtcatggtgcggaaggcccacgggaagtggaggatgtgtgtcgacttcaccgacctcaacaaggcgtgccccaaggatcacttccctctccctcgaatcgaccaactagtggactcaacagctggttgcgagctcttgagcttccttgacgcttactctagctaccaccaaatcagcatggcaaaagaggacgaggagaaaacaacattcatcacgccgttcggtgtattctgctacgttaaaatgccacttggactgataaccgcaggaaataccttccagcgtacggtccaaggggcacttagcgatcagctgggtaacaatgttgaggcctacgtcgatgacattgttgtcacgaccaagacaggcgactcgttgattgatgatctacgggaaaccttcgacaacctcagacgatatcgcctcatgctcaatcctgagaagtgcacgttcggggtaccgtcgggcaaactgctcgggttcctcgtctctggcagaggaatagaagcaaaccccaagaagatcaaggcaatcgagaacattaagtcgcgcataagactcaaggaggaagccaaagaggcgttcatcgcactcaagcgctacctgtcaaatccccctatacttgttgctccccaacctaatgaagagttattcctctatattgccgccacgccctactctgtgagtactgtcattgttgtcgaaagagaaaaggtgcagagaccagtctattacatcagcgaagctctccacgacgcgaagacaagggtcacagttgtctccgccttccctcttggcgaagtcgtgagaaacaaagacgttgtcagccgcattgcgaaatggaccgacaacgaaacatggataatggtgttcgatggcgcgttcaacagccaaggagcaggtgcggggttcatcttgacatcaccttcgggagatcagttcaagcatgcaattcaccttaacttcagggcgaccaacaacacagccgagtacgaagggctacttgctgggataagagctgcagctgcacttggagtcaagcgactgatcgtaaaaggggattccgaactagtcgcaaactag

SEQ ID NO: 16089 - DNA, 1623 bp, Oryza sativa
  Clone ID: PAT_MRT4530_21870C.1
atggcgatcgtggacgcgtctaccgggccagccgtcatcgtcgccgtcgcggtggtggtggtcgtcgtctcgacgttgctgtggacggcgatggcgcagctggtgtggaggccgtacgcggtggggagggcgctcggccagcagggtgtccgcgggccggcgtaccggctcctggtcggcaacatcggcgaggcgaacgagatgcgcgcggcggcgagcggcggcgtgctcgaccggcgctgccacgacgtcgtcccgcgcgtgctgccgcactaccgcgcctggatgtcgcgctacggcaaggtgttcgtctcgtggaccggccccttcccggcgctctgcgtcggcgactacgccatggcgaaggagatcctcgccgaccggacggggctgtacgccaagccggaccccggggcgagcatcctggcgctgttcggcaacggcctcgccttcgtcaacggcgacgactgggcgcgccaccgccgcgtcgtgcacccggcgttcgccatggacaagctcaagatgatggccaagacgatggcggagtgcgcgcggaaggtgatccaggcgtgggaggcgcgtgccgcggcagcggccgacggcgagcggatggtgcaggtggaggtcggggagcagttccacgagctgaccgccgacgtgatctcgcacacggcgttcggcagcagctacagacaagggaaggaggtgttcgtcgcgcagcgggagctccagtacatcgccatgtccgccctcaacagcgtccgcatcccgggcagccaatacatcccgacgaaggcgaacattcgccggcgacagctcgccaagaaggtgagaggcacgctcatggcgatcatacgcgaacgccaggccaccgccgccgccgccaaggaggacagcggacacggcaacgacctcctcggcctgatgctcgaggccaacgcgacggacgcctgcggtagcggcggcgagaagagcatgaccatggacgagatcgtcgacgagtgcaagaccttcttcttcgccggccacgacaccacctcgcacctcctcacctgggccatgttcctcctcggaacgcaccccgagtggcagcagcgcctccgcgaggaggtcctccgtgaatgctgcggcggcggaggcggcgacacggaggcgctccccaacggcgacgctctcaacaagctcaagctgatgacgatggtgctgtacgagacgctgcggctgtacgggccggtgagcatgctggtgaggacggcgacggcggacgcggagctcggcggcgtgcgggtgccgaagggcacgatgacgatgatgccggtggcgatcctgcaccgcgacgcggacgtgtggggcgcggacgccggcgagttcgacccgctccggttccgcggcggcgtgaacaaggcggcggcgcacgccggcgcgctgctggccttctcgctggggcagaggtcgtgcatcgggcaggacttcgcgatgatggaggcgaagacgacgctggccatgatcctccggcgcttcgccttcgaggtctcaccggagtacgtgcacgcgccgctcgacttgctgacgcttcagcccaagtgcgggctcccaatggtgctcaagctcttggatcaatag

SEQ ID NO: 16090 - DNA, 3327 bp, Oryza sativa
  Clone ID: PAT_MRT4530_21871C.1
atggatcggcaatggatgtacactgaccggcggtccaaagagtttattgacggcgtgcattattttttgagagtggccgaagctaacaggcaaaagggttttatttgttgtccatgcaataagtgtaagaatcagaaggagtattctgcatccaggactattcatttccacttgtttgagtcggggttcatgccaagctataaatgttggacatcccacggagagcaaggtgttgaaatggaagaagatgaagtggaagacgacaatattccggactttgctcagtacgctggatttgaaggaaatcaaacgggcgaggaggaaagggatgctgatggtaacgacgttgcggatgatcttggtcagatgttgcaggacgccaaggaggactgcgaaagtgaaaaggggcccataaattggacaagatgttagaggaccatagaacatcgttgtacccaggttgtgagcagaggcacaaaaagttggataccactctagagttcttgcaatggaaggcaaaaaatggggttagtgacaaggcatttggcgatttattgaaactcgtcaagaacattcttccggagggaaacaaattgcccgagacaacgtacgaggctaagaagatagtttgccctctaggactggaagttcagaagattcacgcatgtccgaatgattgtatcctatatcgcggtgaggagtatgagaacctagaagcatgccctgtttgcaaagcactatgatacaagattagacgagacgatccaggagaagttgacgggcagctaacaaagaagagaattcctgctaaggtgatgtggtatttccctataataccatggctaaggcgtttgttcaggaacaaggggaatgctagaatgatgcgatggcacactgaagagcgtcaacaggacgggatgctgagacaccccgccgatggttcgcagtggcgaaacatcgacagaaaatttgaagactttggaaaggacgcacgaaacatacggtttggtttaagtacggatggcatgaatccttttggagagatgagcaggggccatagcacttggcccgttacgatgtgtatctacaacctccccccgtggctatgcatgaagaggaagtacataatgatgccgattataattcaaggccccaagcaacctggtaacgacatcgatgtgtacctaagaccactggtcgaagatcttaaactgttgtggaagaaggaaggtgtccccgtgtgggatgaggacaaataggaggagtttaacctacgagcgctgctgttcgtaaccatcaacgattggcctgcacttagcaacctatccaggcagtccaacaaggggtacaaggcttgcactcactgtatggatgatacagaaagtacgtatcttaagcactgtaggaaggttgtgtacatgggtcatcgtcgattccttgcagcaaaccacccggtacggaagaaaggcaagcactttgaacataaggcggaccaccgtacgaagcctaaacatcgcggcgggaaaacagtgtttgctatggttaaagatcttaaagtagtgtttggaaaggggcctggcagccagcctatagagagcgaagatagtcacgtggcgatgtggaaaaagaactctatattttgggagttaccctattgggaattcttggacgtcctccacgcaatcgacgtgatgcacctcactaagaatctttgcgtaaaccttcttggcttcctaggtgtatatggaaagtcgaaagatacacgggaagcacgtaatgatctgaagcatatggaacaacgcggtgaccttcacccggaaccaaaggagaaaggaagccattacttgagtccagccagctacactcttagcaaggcagagaaggaaagtatgtttgaatgcttggagagcatcaaggtaccgtctggatactccacgaatataaagcgaataataagcacgaaggagaagaagttcacaaatctaaagtctcatgactatcacgtgctgatgacacaactgctaccagttgtaataaggggtatcctcccagataatgtccgggcaacaataacaaagctatgtgctttcatgaacgcaatttcgcagaaggtcatcgatcctgatagattagaagccctgcagaatgatgtggtgcaatgtcttgtcaactttgagttgatatttccaccttcatttttcaatataatgacacatctgctttgtcaccttgtcaaagagatcggtattctcggtcctgtgtacctacataacatgtttcctttcgagaggtacatgggcgttctgagggaaaagtatgttcataaccgtgctcgtccagaggcaagcatcgccaaggggtatggaacaaaggaggtcattgaattctgcgtagaatttatcgaagaccttcacccaatcggggtacctgaatcacgccatgaagggagactacggggaaaggggactctcagaaggaaagcaataatgacggtagacaacaatttattccgtaaagcccatttcacggttttgcaacaatcttcattggtggctccctacatcgaggagcacttggctctagttcgcgccagaaacatcggtaagtccgatgcatggattacaaggcatcacattgatattttctccacgtggctgcgacaacatctcatgggtaacgagacgattaaccaacaactggccttcctggcgaggggaccatctggctcgatcgcgacattccaaggatatgaaatcaatgggtacacattctacacgagggcccaagacatgaagagcacgaaccagaacagtgctgttcgtatcgatgccatgggacacgatagtacaactggcacgtattacggtgccatcgaggacatatgggaacttgactatggacctctcaaggtcgctctgttccggtgccaatgggttaggttgactggtggaggcgtaacgattgatgatagtgggatgacaacggttcaacaaggttggatactcggacgaaccttttgtccttgccaatgatgtaacccaagttttttacgtcaaggacatgtctagcaaaggaaaaaaggccaaagggcttgacgagccgaagcgccacgtggttctcccaggaaaaagaaaaatcgtcggagtagaggacaagactgacgaggattatgatcagtttgatgggcaaccccctttcacagtgacgattgaccctagcatcctcctatcaaatgaagacaccccttactcacgtagcgatcacaaggaaggaacaatagtgaggagaaagtacgtgcggtcaaccgtcaccgccgatgtattgccg

SEQ ID NO: 16091 - DNA, 419 bp, Oryza sativa
  unsure (1)..(419): unsure at all n locations
  Clone ID: PAT_MRT4530_21872C.1
acataattgcagccatgaaaaactggcatggcggatatgaatccttgttatcgttatgtacatgttagctgatttgaggccacagtaatccttcagccgcattgctaaaggaacctgtgccagtcttacatcttttgttaggtgcactactatacatgagcctaggaccactgctcttcggcttgtgggttagtttacatgatttacatacatatctctttggaaccctatcaaaatcactgattccagcacacctagtgtgcatccacatatggcaagtgtcacaggatagcattctctcaccgtcatcgtccgttgctccacaggagcatttaactgtccatttgtccacacccatctccatgcggtcaattgcaaaccgtgtnnnnccaccaatgcacctgcctttgatgtggaca

SEQ ID NO: 16092 - DNA, 159 bp, Oryza sativa
  Clone ID: PAT_MRT4530_21873C.1
atgatgaatgcaggcagtgtggaggtgtcaggagggggaatcagatggcaggataatgagctggtggtgcaggtgcagaggatgggtcacttcggccagtgttcagggggagggccagctgaagtgctgatcgacgtgacgggcgagccagtggattag

SEQ ID NO: 16093 - DNA, 1518 bp, Oryza sativa
  unsure (1)..(1518): unsure at all n locations
  Clone ID: PAT_MRT4530_21874C.1
aaactagtggatcccccgggctgcaggataatacgcgcgcagatcctccatgacacgacgcaccacctcagctcgccagcagcaaccacggcggcgcttcggatgcacggcggcggagcctccacgacgaccaccgccatcgccgccgcgcgggtagcacatgttgcatgagcagcacgcgccgccgccgcagccggagccggaggtttcgctacagctgtcggcgcccgccaccgccgccgacgatgtcgctgcaggcgacgacgaggaggtcaccgtcgtcaccacgtaccgcgacatccaccctctgacgccgccgtcgccgacgacgacgacgacgccacccacgcggctcgggtccgccgcgtactcgtgggacacggccagcagccaccggtccgtgtcgtccgaggagcagttcatgacgatgagccgggagttcacggccatggtcgccgccgggacgaccatgcagactggccccaacgacggcaacaacggcggtgaccagctcaccagcatcggcgaggacgagctggaggagaccaacccgctggcaattgtgccggacagccacccgatcgccacgccggccaggagcagggcgtcccagctggaggttgtccccgcggcagggccatcgccggcgccgccggtggaggcgaggcaggtgaagaaggaggaggtggagacgaaggtgtcggcgtggcagacggcggaggtggccaagatcaacaaccggttcaagagggaggaggttgtcatcaacgggtgggagaccgagcaggtcgagaaagcatccgcatggctcaagaagatcgagatagccttggcaaggcaccaaaagatcgagagaaagctggacgagcagcgcgccaaggcgctggagaggacgcagaacgacatcgcgaaggcgcggcgcaaggcggaggagaagagggcgtcggcggaggcgaagagaggcctcaagctcgccaaggtgctcgagctcgccaacttcatgaaggctgttgggagggtgcctaccaagcgatccttcttctagcttcctgcagccagcctctgcaaaccttcgatcttgatcgatctgctgctgctctgtttctttcagtgccttttgtgtgctggattaatctagctgccgttcttcgtgtgatgtttgcttagctgtgcgcatccgagaacctaattgtaaaaaagattttaaaacaagttgtatatttgctgttgctgctgttgccctctgctgcttgtgatcacagagtggcccttgtttttcccctggcttgtattatccatacggcataaatggtttgtttgctcaaatcttgcaaacattcagttcgacactagtactagcacttcatttttcttcagctctccatggatcaatctagctcaatttctcaaannaaaaaaaaaaagatatacttatttactaaagcttggattgaattaaaagtatattgtttacattagaacagaggaacgcattgattgtcctaagattaatcacat

SEQ ID NO: 16094 - DNA, 1697 bp, Oryza sativa
  Clone ID: PAT_MRT4530_21875C.1
tcatggcagcgtcggcgtgcggggcgtcgcctctgaatgcattagggcgtcgtggacgttcatggcggcgtcggcgtgcggggcgtcgcctctgaagtagtgcaccatgaccagcccgagccggccgtcctcatggccatccacgccatggctcagccaccgggaacggaacgcccacagatcgatcatggcttcgttggccatggcggcgttcttgtccttgacgtcaaggtggttttctttaaggaattcggaccattccaggatgagccggtaggcgtcgttgcagttgaggaacttgcacttgaggtcgtagtcccggccggtgcggtcgtaggcctgcactcgcaggccctcgtcgccgtcggcggcggccttctccgccggcgtcaggagctcctcgaacgggaacggctcgtcgccgccgcggtgcgtgttgtgccagcccttgcacgacatgagcagccggtgctgggcgacgctccggtccgtgaacgtcatcttcttgccgtagacgcgcgccggcggccgccacggcgaggcgacgaggtaccaaaggttcgcgcggaggttgtcgtcgacgacggcgatgttgtcgagcgtcgcgcccgtgtcggaccccgccgaggtcgtcgacgccatgtcgtgccctagtgcggtccagaagaacgcgcggtggtcaggcttgggcttcttggctcccggcggcggcgtcgcctcatccgcggcgacgtgcggtggtcggccggctcccaggatggcggcgccgccgatgagcttcttctcgacgggacggggacgccggcgcgcggccggagcggcggccctcaggccggccagcttgcacttccggacattctctttcatgctcggcgtcatcattgcaatggcgtcttcttgccgtcgaacacccaggaggagggtgtcagtgtcaccgccgggaggcaggtcagccggtgcgccgccgctgacgctcggcgggctctggtcctcggcgaccatcttccccttccgcagccggccctcgcccaccaacgtctcgccgccggtggcgcacggcgcgctctggtccgcggccgccgccggagctccaccatctggattgccgaccatggacggcgtcgacggcggcggcgcctgagtcacagtcgccatctcctcctccaacgccgccgccggcgatgtctcccgccgggagaccgcgtcgaacgacatcggaaagacgaaaacctctggcagccgctccagccgccgtgcgccgtcgacccggccgtcgccggtcagtgccgccacttccctcggtttcgcagtgaagagctctaccccggccacccgttcttttgcgccgaaccccgccagaagtcgccgtccccgtgaaggccgaaccgttgccatgttttgatctccggcgaggccctgctgctcatcccgtcgtcgccttcggtcgccgtcgcctcctttgggttcgcagctgcgaggtgatggccgtccacccctccgttgtcgccgcacatcgccggaaagtcgtcgccttcgaggacagtacctcgccacccttcgaagctcgtcgccggccatctttcgttgccattcgtcgtcgcgtaagtggtggtaagggtcactttgatcccctcttcctcccagtgccctccgtttgcattattgtaccgttgttcgccggcaaccgccgctcccat

SEQ ID NO: 16095 - DNA, 2942 bp, Oryza sativa
  Clone ID: PAT_MRT4530_21876C.1
atggcccctcgcaagccaaacccagcctccgcgataggccctgatcccagcaagatagatgacgacaccaccgcctatcttgggacttcgctcgtggacgaggatgagttggcgaagatggttacctccggcttgttggcggaaaatcaggccttcgccccgggaaaggctgtggtgccgaagcccagcgacaaccggacggtggtattcgccgtgttcttcgaggcgggacttcgttttccgtgcaacgtgctgtggctagagatcctttgcctttttcaggtggagctcccccaactgagcccatcggctctcgtccggatcgccatctttcactgggcgtgtcggaccgctaggttcgaaccgagagcggggctgttcgacgctattttttatgccaccgtaaattcgaaaacggccgggtccgagtcagcgaaagctctccgatggcatcgcagggcgatcgcaccgaaccaaaagcccaaggtcaccgtcgacggcgccatagaagctcggtttgccttgcttcgcaaggtctgctcccgtcttagctgctgtgacctggtgaaagagttttgcatgcttcggatcttccctctctcctagacgtggcaagtcgaggtgagcccagacgaagaggtcgatggcttgacgagactcatcatgccagaaggggcgaacacgttaactcttgcccaggccgacactgaagctcggaagatgattggcgatgtgtcggtcgccgaatacagccagctgcttatgcggcaggcggccggccgggcgaaccggttgtacgacggcgaacttcctccccgggcgaagcccttcaaggccgatggggatgaagggacttctagaaaatggatgcgcgggcaagtcaaacttgctcctcggaagcaaaaggcccctgccgccaccgactctgacgccgatgactaagacactgccgacgacaatgatggcgaaggggaaggggaggatgaggaggaggtagaggttgcggtctaaacggccgtggacgtgcccaccgacaactgcactgagacgcacggctacaccccaactccaagccccgaccatgccgaaatcggggtggagtcgaacagctcccccctccgcctcaaggatttggagggggcgaagacgctggtctcgattgcagcggccagggtggcgaaggggggttcagttaagaagacctccaaaaagaaagggctcgtcgatgtcgctcgcatctttagcgatgatgagtcctcggatgggacccctacttcgcccgctagtcggagtctgggtctttcgaccgctcctggtgctgcggcagacgcgggcgaaacgggcggtagcactgcagccgggacttcagcttctgctgaccgggttgtgaagtccgcggccaggcttttcggaagccctgtgcgcaaaccggtggcttcgccgctcgccatccaaaaggggaagaaaacggtcgccgaaacatcggtttcagactattctcttgcggcgccccgcttcgcccctgctgatttcgagacttgagcggatctcatccccttcatcgagggggtaagcaatcttgtttctccggctggcagcccaagcctgttcaccgagttgaacgagttcgacgaaggctgttccgccatcaagagcttggcagtccggattcttgtggcccattgttctactgagtgaaccatacgggctcgccttgacggcttcaaataccgtcttcgagctaaagacgacgaattaggccgcaagaacctggagatggagggcctcgccaacacgctcaaggagacgaaggctgggaacaaacggctccaagttgaggtcgagaaggggagcgaggcaaaggccgagatcaagcgtctcaaggccgaactcaaaaaggagaaagaacattccgccgctcttaccgactactataatctcaccgagccgaagatcgaggctcttcgtgaagaggtcagcaagttagaggcgaccgctgagagagacgcacagcggttcgcgcaggaaatggcgaaagccactgaatccgccaagaccgcttgctgtacacttcgccttgccctcactgacatggggggcaaaggtgcgaggagtccctagcgaagatgcctccgcttttgacttctcggagtggactcaacaggccggccttgcggtctctgattgcgtcaccgcgtacggcgattgttgtgcacgtgtgtcggcggctttcaccatgggactgctgcaacagttcgggagcgagcacatcgccgagtttccaaattttgcgaagggggactgggaggtcagttctcaggatgtttcgcctgcactccatgcctggcgtaagtagttctggcaaaaggatggccgatctactgccaaggcgcgtctgcttgagcacttggcgaaggcagaggcagcggatcaggccgaagagcctgcggccaaagagtgtggaggagatgcaggagccagggtggacatcggccaagatcacccagagggtcttcgccgaaaattgtgttcggccctcctttgggaattggcgaagtaaaaatgaaaagtttgtggcggtgaagggtttgccgaaggtccggtgtccatttcggcctgtttaccgcgagatggtcataaacggcaatagttacaaggttttaaaagttgccggctggatgcggacgcaccccgggtggaccctggacgactacgactgtgtccatgtggaacgtcgagaggatatgattcgcttttggcgaaaccattagaggaccgatcgtcaggaagcgattgcccagcgtcgttatagtatagtttgtgtttcgcccccttctcctcttagggtagtgtataatgttagtagtgatgacgagccaagtttgccaaatcacaccttagggagtggtgggtgttttgggggcgaagatgtatttttttgt

SEQ ID NO: 16096 - DNA, 1185 bp, Oryza sativa
  Clone ID: PAT_MRT4530_21877C.1
gctccttcaagagcaccgtgctcaaggagattctccaggagccactgtggtccaaggacgaggcgaatgcggtggtggttgaggcggatgcgttcaaggagacggacgtgatctaccgtgccattagctccatgggccaccacaacgacatgctccagactgctgagctggtgcaccagtcgtcgacggacgcggcgtcgtcgctgctggtgacggcgctgaacgagggtcgtgacgtcatcctcgacggtaccctctcctgggagccgttcgtccagcagaccatcgccatggcgcgcgacgtccaccgccgccgctaccgcatgggccccggctacaaggtcgaccccgacaccggcgacatcaccgagaactactgggagcccgccgacgccgacgccgcctcgccgccgccgaccaggaagccttaccggatcgaggtcgccggcgtggtctgcgacgcgtacctcgccgtggcgagggggatccggcgcgccatcgtgacggggcgggcggtgcgggtgcggtcgcagctggtgtcgcacaggcggttcgccgccgcgttccggcggtacgccggcgccgtggacggcgcgcggctgtacagcaccaacaccatgggcgcggcgcggctgatcgcgcgcaaggacggcgtcgccggcagcctgctggtggagccggcggagttcgcgtgcctcgacgcggtgggcggcctcaacgagaacgccaccggggtgcacgacctctaccgcggcggcgccaccgcctgcggcgcccgctccatctgggacgacatgatcgcctcgccggcgcgcgccgacatccagagggagctccgggaggccttccgctccgtggagcacgcgccgccgaacaccaatggcgcctagatatggtgtgtgtgtgttcaatatgtttccccagaaattaatcatgtggggaactaaatttgttgttgatgtgtaaagggagtgtattaatttgtggtaaatggatgtgcttattatatgaactagtagggtggcccgcgcaattgcgcggctagcatccataaaaaaatatttaattttctctaaaaaattatttaaatttttacacacgatttttataaaatttgttatatcatccaaaaaaaaaaaaaaaaaaaaaaaaaaaaaaaaaaaaaaaaaaagttctagatcgcga

SEQ ID NO: 16097 - DNA, 177 bp, Oryza sativa
  Clone ID: PAT_MRT4530_21878C.1
atggctgccctcgtgctcagcttccatgtggtgacagttatcactatcccgaagggagttctggaggagtgccggagtcctgaagatgccgtcccatcgggaacctatgccttcctgaagctacggcaaaattccgcccaagtgacatatgtcacagctgagcgggtgaccatgtag

SEQ ID NO: 16098 - DNA, 440 bp, Oryza sativa
  unsure (1)..(440): unsure at all n locations
  Clone ID: PAT_MRT4530_21879C.1
aattcggcacgagagaaaaagraaccatggtggggaagttgacagcgacaaaaccgagccggagcgacgagattttggatggtgatgagcaagtgaggattgctaatcagatcagatctcaattcgatgacttagcacccaagcgacctatcaaacccaacagaagcgaacctgacgccgttaaccccgttgactacaccaactctgtccaaaacataccagaacttgataagtttgaagcccttcgatctcgatctcatattgtactttcctcggagaagttggtggatgcacaggaagagtttgttgagactcggtattacaaggagtnggctccatcgacaaacagcatcacgcgacagggagtgggtttataatggctgttagagaaggagatgatgatggatatgagattcagttacctgcaagtaatgttgayg

SEQ ID NO: 16099 - DNA, 5189 bp, Oryza sativa
  Clone ID: PAT_MRT4530_2187C.1
atgacatcgagcttcgtcgacaacagagtcgacaccggccccatccaaggaatccctgcttcaacaatgctggtgtggactcaagtcggcgaaatcgtcttcctggtttacaccacggtgccaatctcggctagtccatcaataaccggaaacgagaacgccgtggttataaacccggacggtcccatgtcgaaggatcctcccaccgtggcggagaacggaacatcgacgtcatacgagctcgagaagattcctagtgcggccgagccttgtccttttgacaaggactgcgagccgaggaggacaacttccgaggtcaccaagtcctggtgtcatatccacaagtccaggaagcacaacttgcaagcttgctgggtttttctcaatgtacaagctgaaatccgtgcttgcaaagagcgtggaatccagcgtacttctccaactcgtgatgtctattgtcctattcacaagacgaagaatcacgacttctcaagctgcaaggtctttttccgcgccatgaagacgacacctcctaaggtccagcagtcaggaacctctctcgaggatacaaacaaggaacaaggagcgacgataacctcagatcgattcattggagtaatcgacatcaatccccgtgaaccatcagtcctacacttgctcgaagactatggctcgtcatcttccagtacaccacgtgacatgtttgccattggtgggactagcacgtctgcacaggctaacgcagaggcggagaatcagacggccacgccagcccaacatctcggcaccgtcaacgcaatactgagagaagctccctatgacctacgtccatggaggacacatgatcgccgacaacccactgcccccagcgctgggtgtagagctttcaaccgttctctacgtgatgtccgatggcccgagagattccgacccgaagcaatagagaagtacgatggaagtactgaccctgaaaaattcctccaggtctactccacggtactatacgctgctggggcagacgacaacgcattagcgcactatttgccaacaacgttgaaaggttctgcgcgttcatggctgatgcacctcccaccttactcgatctcttcatgggcagatttatggcaacaattcatcgcgaacttccagggaacttacaagcgccacgcgatcgaaaacgatttacacgcgttaacacagaatcagggtgaatctttgagggactatgtccggcgctttaatgagtgcagaaatacgatccccaatatcactgatgcctctgtgatccgcgctttcaaaaccggtgtcagagattgctatactacccaggatttggcaacaaggcgaatcactactactcgaaggttgttcgaggttgtcgatcgatgtgcccatgcagacgacgcgctgagacgcaaaaacgacaaaccaaaggtgggaggagagaagaagccagccaaggacgcacccgaatcaagcaagaagaaaagcgacaagagtgggaataggaaagctcaagcagaagtccttgcatctgaatacgagcgcccgcccaaacacccagacccacaaggcagtgatacaaagagaatatggtgccccatacacaagtcggacagacattctctggaggagtgcctcatcttcaaaaaatcgttggaaaggcagctggcattggagaaaggcaagcgagtacgtgtagtcgagaaggcaactgaggcaaccactcaggactcagactccgcgtacccagattccgatcttcatgtctcgcacatcttcggaggtcccacagcgtactcttcaaagcgagaatacaaaaaagtggagcgtgaggtttgttcgacatggcagggggctgcacccaaaatgaagtggtctgaacagaagatcgagttcttagatgaagactaccccaaggctgctgttataccaggacgatatccgatcgtggtcgaacccactattcggaatatcaaggtagcgcgagtcctcgtcgatggcggcagctccatcaatcttctcttcgctagcactttggacgcaatgggaatcccacgaagcgagttgacacctaccgatcaacacttccatggaatcacccctcaatcttcgtccaagccattgggcaagatcacacttccggtgactttcggccaagcgagcaacttccgaacggagcagataatatttgatgttgctgagatcgacacagcatacaacaccatcatcggaagaacggcactcgcgaagttcatggccgcatctcactacgcgtatcaggtgctcaagatgcccggcccgaagggaacaatcactatccaagggaacgcaaagctggcggtccaatgcaacaagcggagccttgacatggtcgagcacactcccagcccacccgccacagccgagccacccaagaaagtgatcaaaacgactaagacgccgaaaccagacggcgcaatcaaaatcgtcccactctgcagtgccaaccccgacaagacggaactcgcgctcatcaccttcctccgcgacaatgcggacgtattcgcttggtatccgtccgacatgccgggggtccccagggaggtgattgagcacaaactcatggtgcgacccgatgccaagccagtaaagcaaaaactgcggagatttgcaccagatcggaaacaggccatacgagaagagctcgatagacttcttaaggctggtttcatcagagaggtactccatccagagtggctagccaacccaatcatggtgcggaagtctaacgggaacatggcaaaagaggacgaggagaagacatcattcatcacaccattcggtgtattctgttacgttaaaatgccgtttggactcataaccgcagggaacactttccagcatacggtccaaggggcacttagcgatcagctgggtaacaatgttgaggcctacgtcgacgacatcgttgtcaaaaccaagacaggcgacttgttgattgacgatctacgggaaactttcgacaacctcagacgatatcgcctcatgctcaaccctgagaagtgcacgttcggggtaccgtcgggcaaactgctcggattcctcgtttctggcagaggaatagaagcaaatcccgagaagatcaaggcaatcgagaacatgaagtcgcccacaagactcaaggaagtacagaagctaaccggatgcatggcggcgctaagtaggttcgtcgctaggatgggagaacgaggacaacccttcttcgcactgctaaaaaagcaagacaaatttgtatggacacaggaagccgaagaggcgttcatcgcactcaaacgctacttgtcaaatccccctgtacttgttgctccccaacctaatgaagagttgttcctctatattgccgccacgccctactctgtgagtactgtcattgttgtcgaaagggaaaaggtgcagagaccagtctattatgtcagtgaggccctacacgacgcaaagacaaggtacccacagatccaaaaactgctctacgcagtaatcatgatgtcaagaaagctacgccactacttacaagcccacagggtcacagttgtctccgccttcccccttggtgaagtcgtgagaaacaaagacgttgtcggccgcattgcgaaatgggtagtcgagctaagccagtttgacgtccactttgtaccacgaacaaccatcaagtcccaggttctcgccgatttcgtagccgattggactatgcctgaaaacaggttagacagccagaccgacaacgaaacatggacaatggcgttcgatggcgcgctcaacagccaaggagcaggtgcagggttcatcttgacatcaccttcgggagatcatttcaagcatgcaattcaccttaacttcagggtgaccaacaacacagccaagtacgaaggactactcgctgggatgagagctgcagctgcacttggagtcaagcgactgatcgtgaaaggggattccgaactagtcgcaaaccaggtgcacaaagattacaaatgctctagccctgagctgtccaagtatctcgcagaagtcaggaagctggaaaaaagatttgatgggatcgaggtccgacacgtatatcgcaaggacaacatcgaatcagacgatgtagcacggcgtgcgtccagacgagagccactcgaacccggcacctttctggacatcctgacaaaaccatcagtgaaagaggcaaacgacgaagatagcccagtcacccccgacataagctcgggggctacagaggcagagcgcgccgttgccgacatcgagaccatggatgactggcggaccccactcatcaaattcataagcagtgacgagttgcccgaggacgacgcagaagccgagaaaataactcgtcaagcaaaaatctactatatgatcggcaacgatctatacaagaaggcgccaaacgaggtacttcttaaatgtgtctcgtccgacgacgacaaacacctcctcctcgacatacacgaaggggtctgcgggtctgtcggtgacatgggatcaggagtatcatgactagaggtttgaggcagacacaatcgcacacgtggcctggcacctccgagggacgtcgggcccgagggtgatgtgttcgccctcctcttagtccccccgagggggggggtgtgtgtacgctggcggccgccgtgggagagaggggggcagttggcagggagcggccccgttgtgattgcaaggcggtcgggggggggagtggttgcgcgtgtgagttttggtcctgggtgtgagatcgaggaggcttgttgcccccctgggtgaagagatttcactagccgtttcgtgcgaaagtacttgagtagcgtgcggggccgtccggggagtagggcgaggtatatcctaggggggaggatagtggagagcgtgcggcgcggcggggagttggagagaggggcaccacggcagtggtggagaggcggggggcctgtagggtaccttagagccggacagcgagtgagtcgtgtgggctttgaggaggttaggaagtccgccggcaggcatacgaatgtttcgggcgagattgaccgcagcgcgcgggttggggctggcaatgcgcaagcatggccgaggcggggcagctcggcagtctttgggagagaggcgcatttgcaggagcagagaggggcagctaggcgtgcggggcg

SEQ ID NO: 16100 - DNA, 237 bp, Oryza sativa
  Clone ID: PAT_MRT4530_21880C.1
atgcatcgcctcctctcctcctcacgcacctcccatgagctgtctgacgtcgccgacatgaagctccggagtggcttcgtgtacgaccggacatggccatgggctattgtcctagtggtgcgggtcaatttgttgctgtttggaggcagagagccggcggagagctcggactcgttggtggagatgtggaccgaagatggcgacggcgtccagcgcgcccgcgaccacgtctcctag

SEQ ID NO: 16101 - DNA, 404 bp, Oryza sativa
  unsure (1)..(404): unsure at all n locations
  Clone ID: PAT_MRT4530_21881C.1
cgtcggggaatgctcgnttgaggggatgtctgaccanganaangaggatttcatcccccnanctgaagnaaaagaactggaccagagtgaaaaatgtgtagaccatgggccaccntggtggagttttgccactgcatatatacagcttttgttgccagancagtaccaccactatgtttngatccangaatggcattttactcttggtagcctgattagcacaggttctgtattgtnggaaggaacaaagtctgaaacactcaaagacaattccactctttcttttttnttntnattcagtacagaaatccgacgatgcattagatgtnatcagacaaagacaattccactctttcttttttcttcagattcagtacagaaatccgacgatgcattagatgtta

SEQ ID NO: 16102 - DNA, 855 bp, Oryza sativa
  Clone ID: PAT_MRT4530_21882C.1
gcagaaacagccagagtcatcatcatgtattggagtatgcagaaacagccacagcctctgaatcatcagaatcatcaactatggcttcacatgttgcctctgaaatcgcttcagaggatcatggttcaacagcagaaaattcagagggggaacaaggctgcctgatggcgtgtcctcccgatgaccacagatgatttacttaggattcttcatttgtgaattctttggctgacagtatgtccaacttaaacacaaatgatgctacatcaggcacacagtggtgatattatggcttcagtgaagacttcaaaaacagagctacacgagaaggtacagtgcaaattctcagtggagtcaaacattgccatcattggcttcttgttctgctacaagcataagcatttccaatcggttgtcaaacagctttgcactctcatctctctcgtctagctcagcagcctctgcttctaaccatttctcacgcaaatcatcaagaaggttgccttggtcagtgttgcctgcagtaccaggttcactgggacgagttgttcgcagtgagtcatctccagatggtggtggaagtgtcaaaagcaatgccctgaactctcttgtgtccgcaaacatctcaaaattgcaagcgatgatatccaagcaatactcccttattttcacaacatcataaatgtctgataacattagccagtggcatagttctgcaggtgaaacatgctccagataaggcaaaagtatatctgccacaactcgtttaagggggaatagcaggtatctcgaagcaatatcaaatagttcttcagcctgattaggatccatatgctctaagttatcagtatacat

SEQ ID NO: 16103 - DNA, 3801 bp, Oryza sativa
  Clone ID: PAT_MRT4530_21883C.1
atggatgagcctctttatcccatcgctatactgatagatgagctcaaaaacgaagatattcaattgcgtctgaactccattaggaggctctccacaattgcacgagcacttggagaagaaagaacccggaaggagttaattccttttctcagtgaaaataatgacgatgaagatgaggtgcttcttgctatggctgaagaattgggcgtgttcattccttacgttgggggtgtagaacatgctcatgttttgctaccaccattggagacattgtgtacagtggaggaaacctgtgtccgagacaaggcagttgaatctctgtgccgtattggagcacagatgaaggaaagtgacattgtagactggttcgttccagtagtaaaggcagaattgaggaccatttatggtcagctatgccaagatgacatgcctatggtccgaagggcagctgcatcaaatcttggaaagtttgcagccacagttgaacagaactatctaaagacagaagtcatgtcgatatttgatgatctaacccaagatgatcaagattccgtacgcttgttggcagttgaaggctgtgctgctcttgggaaattgttggaaccacaagattgtgtagcacatatccttccagttattgtcaatttctcccaggacaaatcatggcgagttcgttatatggttgccaatcaattgtatgagctctgcgaggcagttggtcctgaacattctagggagcagttggtgccggcatatgttcgtctccttcgtgacaatgaggcggaagtgcggatagcggctgcagggaaagttactaagttctgtaggattttaagtcctcagcttgcaattcagcatattcttccttgtgtcaaggaattgtcatcagattcatctcagcatgttcgttcagctttggcttcagttattatgggaatggccccggtcttgggaaaggaggctacaatcgaacaacttcttcctattttcctttctttgctcaaggatgaatttcctgatgttcggctcaatataatcagcaagctcgatcaagttaatcaggttattggaattgatttgctgtcacaatcactgttaccggcgatcgtagaacttgcagaggataggcactggagggttcggcttgcaataattgagtacattcctttattggctagtcaattaggcgttggatttttcgatgacaagctgggggcactttgcatgcaatggttggaagataaggtcttctcaatcagagatgctgctgcaaacaacttgaagcgcctagctgaggagtttggtccagaatgggcgatgcagcatataatccctcaggtgctggagaagataaacaacccgcattatctctaccgcatgaccatcctgcaagctatttcattgctggcccctgtcatgggtgccgaaatcacttgtcaacagctgctccctgttgtgattaattcctcaaaggacagagtgccaaacatcaaattcaatgttgcgaaggttctgcaggcacttataccgatccttgatcaatctgttgtggagaagaacgtgaaaccatgcctcgttgaactcagtgaggaccctgatgtggatggcactgtaaaaaggtgggactccgtggagcgccgggactcggccgaccgagaggcaccgccgccttcttcgcggaagcggaagggccacgagggtggtggcaacgagtccgacccggaaggggggaagcgggcgagggcttccgtggagccgcctccgccgaaggaggagaggccgaggcgggagcgacggaggtttgaggacgccgatgcgaatgggaagcatggcgatgagaggggtaagggtgataaggataactcaaaccatggcgctgtaaatggagattcccggagtggtctggtgcccaatgctggtgctcagcaaccgctcaatgctgcacctgttgtggtgccatcatctgttcctatgccttcaaaggtatcttcgattactaccaccaatgaaaatgagggagttagtattagatctgatgaggttactggaaaatctagtacagatggaagtacaagttcagccgctggcaaaagtagtaatctatctcttgatgctttagccaaagctaaaaaagcattgcaactgaagaaggaactatcagaaaaactcaagaagctacctgtgcttaataataaacttggtgttactagtactgatacacaaattcctaagaaagaaacacagcctgtttctagctctggtgcatctgaaatggctgtgggtgcagctcttactgagaagatggcagctacagcaggtgcagttggtattccaggccttgctaacattcccaatttggatgctgtgaagcgagcacaggaacttgctgctaagatgggattcagacaggatccacaatttgcgcctctcatcaatttgtttcctggtacatcctctgaactaactgtgcctcaaaaacctgcgaaggcacctgttctccgtcttgatgctcagggtagggaaattgatgaacatgggaatgttatcaacatgaccaagccaaccaatttgagcactctaaaagttaacataaataagcaaaagaaggaagctttccaaataatcaaaccagacttggattcccttgcaaaatcaagtgcacactttgatgaaaggatgggcatcaaccaaaacaagctcctccgccctagaaggcctggatttcagtttattgaggagggaaaactttcaaggcaagctgagctgcagagaattaagaatcaatttggtgaagcacaagctaaagaacttaaagtaaaacaagctcaacttgcaaaggcaaaggcagaagtagtcatgaacccgaacttgattgaagttgctcctgggaggcctccaaagcaaaagcagaaggaagagattcctgaaattgagccatgggatgcaaaaattttaccttctacaacatacgacgatttctccatggagaaggttaatatggaaaaaatcactatatatgtagagcatccagagccactggagccaccagctgagcctgcaccaccaccgcctcagccacttaagctgactaagaaggagcagaagaaactcagaacacaaaggcgccttgctaaagagaaagacaggcaagaaatgatcaggcaaggcctcttggagccaccaaagcccaaggtcaagatgagcaatcttatgaaagtactaggagctgaagctacacaggatccaacacgtatggagttggaaatacggactgctgctgcagagcgtgagcaggctcatgtagatcgcaacattgctcgcaagctcactccatcagagcgccgtgaaaagaaagagaggaagctttttgaagatcctaacacattggagactatagtttgtgtgtacagaatcagagacctgtcacatccgcagacacgttttaaggtggatgtaaatgcacaagagaaccgtcttactggtgctgcagtcattgcggatgggatcagtgttgttgtcgttgaaggagggaagaagtcaatcaaaaggtacaataagctgatgctgaaccgtattgactgggctgctgcggttgatgatgatgatgatgctgatgaggaatcagacaagcctgtgaatagctgtgcattggtctggcaggggagtgtggcaaaaccctgctttaccaggttcagtgtacacaattgccgtagtgaggctgctgccaagaaggtgtttgcagatgcttcagttccacactactgggacctggctgtcaatttctcagaagattcatcttga

SEQ ID NO: 16104 - DNA, 606 bp, Oryza sativa
  Clone ID: PAT_MRT4530_21884C.1
atggccttgcatgcactgtttgaggagaaaccaactggacttttgctgctgctttcggaattttgcggccgcgcggagctcatcgtcatacagatgcggagcagcttgcagcagcaaatccaccaccggctcagctcctcgccacctctgccgctggccacgacaaacggcgccgacgcttgtggatctgccgccggctcgcccgccttctcccggcgaggtagcgcggctggcgcgggcacggccggcggcaccgcgccgctcggcgatggccccggcggcatgcgcgcaacggcgaccgggagcggcaggctcggcggctcgtgcgcgcggcggcgggcgaccgggagagacggcggcagtcgaccggacaagtacctcaggaactgcatcggcacgtgcttcgcgtcggcgcccagaacggacattgccgcagccggcgcggatggcctattatcgccgccgccgtcgacgaaggaacgcgatgtgatcaaggctactgggacagcggcggtggtgcggaggcgcagcgacaaggtggtgcggcggcgctgggtggcagcggtggtgcggaggcaaagcggcgaggtggtgcggcggcgctag

SEQ ID NO: 16105 - DNA, 230 bp, Oryza sativa
  Clone ID: PAT_MRT4530_21885C.1
aatccaatctttaataatacaaaaatatacactttactattttctttgatagtgatacttaaatcttgtgggacctctcaaaaacctcctttatttaaatcttcccaaatatcctaaaataaattaaaaaatacttttcactaccctaaactaatctcctgaaataaaacttctatcattctctctaaatttaccattctcaaatcaactatttcttctctttattttat

SEQ ID NO: 16106 - DNA, 2305 bp, Oryza sativa
  Clone ID: PAT_MRT4530_21886C.1
ggctgcaggaatcggcacgaggctacatcacccatccccatccatctctcccccctccctttcctcctaaacttcagcggcgacacccctcgcgagccgctcctcctcatcctcctccgccgccgccgccgcgtcccctcggtgcccccctctccgccggccgccgatccggccccgcgagttgtaggaatccttgataaggctgatggcttcgatggatgagcctctttatcccatcgctatactgatagatgagctcaaaaacgaagatattcaattgcgtctgaactccattaggaggctctccacaattgcacgagcacttggagaagaaagaacccggaaggagttaattccttttctcagtgaaaataatgacgatgaagatgaggtgcttcttgctatggctgaagaattgggcgtgttcattccttacgttgggggtgtagaacatgctcatgttttgctaccaccattggagacattgtgtacagtggaggaaacctgtgtccgagacaaggcagttgaatctctgtgccgtattggagcacagatgaaggaaagtgacattgtagactggttcgttccagtagtaaagaggctagcagctggtgagtggtttacagctcgagtatcgtcttgtggacttttccatatagcatatccaagtgctcctgatcaattgaaggcagaattgaggaccatttatggtcagctatgccaagatgacatgcctatggtccgaagggcagctgcatcaaatcttggaaagtttgcagccacagttgaacagaactatctaaagacagaagtcatgtcgatatttgatgatctaacccaagatgatcaagattccgtacgcttgttggcagttgaaggctgtgctgctcttgggaaattgttggaaccacaagattgtgtagcacatatccttccagttattgtcaatttctcccaggacaaatcatggcgagttcgttatatggttgccaatcaattgtatgagctctgcgaggcagttggtcctgaacattctagggagcagttggtgccggcatatgttcgtctccttcgtgacaatgaggcggaagtgcggatagcggctgcagggaaagttactaagttctgtaggattttaagtcctcagcttgcaattcagcatattcttccttgtgtcaaggaattgtcatcagattcatctcagcatgttcgttcagctttggcttcagttattatgggaatggccccggtcttgggaaaggaggctacaatcgaacaacttcttcctattttcctttctttgctcaaggatgaatttcctgatgttcggctcaatataatcagcaagctcgatcaagttaatcaggttattggaattgatttgctgtcacaatcactgttaccggcgatcgtagaacttgcagaggataggcactggagggttcggcttgcaataattgagtacattcctttattggctagtcaattaggcgttggatttttcgatgacaagctgggggcactttgcatgcaatggttggaagataaggtcttctcaatcagagatgctgctgcaaacaacttgaagcgcctagctgaggagtttggtccagaatgggcgatgcagcatataatccctcaggtgctggagaagataaacaacccgcattatctctaccgcatgaccatcctgcaagctatttcattgctggcccctgtcatgggtgccgaaatcacttgtcaacagctgctccctgttgtgattaattcctcaaaggacagagtgccaaacatcaaattcaatgttgcgaaggttctgcaggcacttataccgatccttgatcaatctgttgtggagaagaacgtgaaaccatgcctcgttgaactcagtgaggaccctgatgtggatgtaagatactatgcaaaccaggcccttcaggcatgcgatcaaatcatgatgtcaagctaactgtcttcctgtccagtatttagaacttgattctcttagtccaaattttggaatatttgtaatttgcactttagtttgaagagttcctttctagccccagtaacagaccaaacacttcccaagatgataatgtatggctccgacccctcgttctctgtgtttgatgttgatgatgttgtaattgagcaagatcggacacattattatgtttgtttacatggtagttttgggccttggtttctgtaattaaaaaaaaaaaaaaaaaaaaaaaaaaaataaaaactgtagctaaagttaaacggtgttcttcctgcatcgtaaaaaaaaaaaaaaaaa

SEQ ID NO: 16107 - DNA, 2829 bp, Oryza sativa
  Clone ID: PAT_MRT4530_21887C.1
atggatcgcgaccgctcctcccgccgcccccgcgacgacgacgaccgccaccaccgctcccgcgacgaccaccaccgccgccgccacgacgccgacgacgaccaccgccgccacaagcgcggcggcggcggcgacgacgacgacgactgcgaccgctgccgccaccaccgtgacgacgaggaggagagccgctcccgccgccacggccaccatcgcgacggcgggcggcggtccctcgccccgtcggggtcccccccgccgcccgccgcgaagcgggagcggtcgtcgagccgcgctcccagggactccgtggagcgccgggactcggccgaccgagaggcaccgccgccttcttcgcggaagcggaagggccacgagggtggtggcaacgagtccgacccggaaggggggaagcgggcgagggcttccgtggagccgcctccgccgaaggaggagaggccgaggcgggagcgacggaggtttgaggacgccgatgcgaatgggaagcatggcgatgagaggggtaagggtgataaggataactcaaaccatggcgctgtaaatggagattcccggagtggtctggtgcccaatgctggtgctcagcaaccgctcaatgctgcacctgttgtggtgccatcatctgttcctatgccttcaaaggtatcttcgattactaccaccaatgaaaatgagggagttagtattagatctgatgaggttactggaaaatctagtacagatggaagtacaagttcagccgctggcaaaagtagtaatctatctcttgatgctttagccaaagctaaaaaagcattgcaactgaagaaggaactatcagaaaaactcaagaagctacctgtgcttaataataaacttggtgttactagtactgatacacaaattcctaagaaagaaacacagcctgtttctagctctggtgcatctgaaatggctgtgggtgcagctcttactgagaagatggcagctacagcaggtgcagttggtattccaggccttgctaacattcccaatttggatgctgtgaagcgagcacaggaacttgctgctaagatgggattcagacaggatccacaatttgcgcctctcatcaatttgtttcctggtacatcctctgaactaactgtgcctcaaaaacctgcgaaggcacctgttctccgtcttgatgctcagggtagggaaattgatgaacatgggaatgttatcaacatgaccaagccaaccaatttgagcactctaaaagttaacataaataagcaaaagaaggaagctttccaaataatcaaaccagacttggattcccttgcaaaatcaagtgcacactttgatgaaaggatgggcatcaaccaaaacaagctcctccgccctagaaggcctggatttcagtttattgaggagggaaaactttcaaggcaagctgagctgcagagaattaagaatcaatttggtgaagcacaagctaaagaacttaaagtaaaacaagctcaacttgcaaaggcaaaggcagaagtagtcatgaacccgaacttgattgaagttgctcctgggaggcctccaaagcaaaagcagaaggaagagattcctgaaattgagccatgggatgcaaaaattttaccttctacaacatacgacgatttctccatggagaaggttaatatggaaaaaatcactatatatgtagagcatccagagccactggagccaccagctgagcctgcaccaccaccgcctcagccacttaagctgactaagaaggagcagaagaaactcagaacacaaaggcgccttgctaaagagaaagacaggcaagaaatgatcaggcaaggcctcttggagccaccaaagcccaaggtcaagatgagcaatcttatgaaagtactaggagctgaagctacacaggatccaacacgtatggagttggaaatacggactgctgctgcagagcgtgagcaggctcatgtagatcgcaacattgctcgcaagctcactccatcagagcgccgtgaaaagaaagagaggaagctttttgaagatcctaacacattggagactatagtttgtgtgtacagaatcagagacctgtcacatccgcagacacgttttaaggtggatgtaaatgcacaagagaaccgtcttactggtgctgcagtcattgcggatgggatcagtgttgttgtcgttgaaggagggaagaagtcaatcaaaaggtacaataagctgatgctgaaccgtattgactgggctgctgcggttgatgatgatgatgatgctgatgaggaatcagacaagcctgtgaatagctgtgcattggtctggcaggggagtgtggcaaaaccctgctttaccaggttcagtgtacacaattgccgtagtgaggctgctgccaagaaggtgtttgcagatgcttcagttccacactactgggacctggctgtcaatttctcagaagattcatcttgagctgagcttctgttcagaacatggaggcgcctgctgttgaaacccctgcctagggattacgatgttcaattctcatgcagtaagtgatgagtagtagctaatttctcaccgtgggtaagtgtcctcttcaagttacgtacaagccttattacttgctctggaagcatttgtggactgagtaatacttcgtactgtcatgaacatacccttgtaagggactgctgatcttttcgttgcgggatttactcatgtgagctagaaactgaatgcatggaggaactgttgaaatttttgcagtataagcttcaactatatctggactgctcaagccttgaatatgttatggga

SEQ ID NO: 16108 - DNA, 375 bp, Oryza sativa
  Clone ID: PAT_MRT4530_21888C.1
atgcggcgcggcggtgtggacgaggggagcgagaggaaggaggtaggcgtggcgatcaacgcggcagcggccggccaggtggtgaggtggcggtggcggtggcggtggcggtggatgcttgatggcctacctccccctgtggggcctccgatgccgccatcgatgctggaaggaagccacgtggaaggaagtggcatggaggtggagttccaggctcaaggtgagaggacaacagccaccgctaccatgagcaccactatgcgcgtgctccttgaacggacgatgacagtaactcaatctgcccccgacgatgttggccacctcggtgtcgccaagctcctaccaccgcatggggtctctacatgctccacctag

SEQ ID NO: 16109 - DNA, 149 bp, Oryza sativa
  Clone ID: PAT_MRT4530_21889C.1
actgagaagtcgctgttggccgaggccaggaggaggaggcggaagaaggagtttgcgagttggcgttatgaggcgttggattagatcacaggaatgccctcttgtgggagcgcacgacaggggcacgctgtgacacctgctgaacacca

SEQ ID NO: 16110 - DNA, 4128 bp, Oryza sativa
  Clone ID: PAT_MRT4530_2188C.1
atgtcgaaggatcctcccgccgtggcggagaacggaacatcgacgtcatgcgagcccgagaagattcctagcgcggccgagccttgtccttccgacaaggactgcgagccgacgaggacagcttccgaggtcgccaagtcctggtgtcctatccacaagtccaggaagcacaacttgcaagcttgctgggtttttctcaacgtacaaactgaaatccgtgcttgcaaagagcgtggaatccagcgtacttctccaactcatgatgtctattgtcctattcacaagacgaagaatcatgacttctcaagctgcaaggtctttctccgcgccatgaagacgacgcctcctaaggacaacaatggtggacgacgacagaactctcgagaacctgaacgtcgcccttggaatcgcacaccggagcctagtgagccatcgtcgtcatcgtcatcatcatctccgtcttcatcatccgatagacgtccacggaggacacacgatcgccgacaacccactgcccccagcgctgggtgtagggctttcaaccgttctctacgtgatgtccgatggcccgagagattccgacccggagcaatagagaagtacgatggaagttctgaccctgaagaattcctccaggtctactccacggtactatacgccgttgggacagacgacaacgcgttagtaaattatctgccgacggcgttgaaaggttctgcgcattcgtggctgatgcacctcccaccttactcgatctcttcatgggcagatttatggcaacaattcgtcgcgaacttccagggaacttacaagcgtcacgcgatcgaagacgatttacacgtgttaacacagaatcagggtgaatctttgagggactatgttcggcactttaatgagtggagaaatacgatccccgatatcaccgatgcttctgtgatccgcgctttcaaaaccggtgtcagagatcgctatactacccaggagttggcaacaaggaagctggctttagagaagggtaagcgagtacgtgtagtcgagaaggcaactgaggcaaccactcaggactcggactccgcgtacccagattctgatcttcatgtctcacacatcttcggaggttccacaacatactcttcaaagcgagaatacaaaaaagtagagcgtgagccattgggcaagatcatgcttccggtgactttcggccaagcgagcaacttccgaacggagcagataacatatgatgttactgagttcgacacagcatacaacgccgtcatcgaaagaacggcactcacgaagttcatggccgcatctcactacgcgtatcaggtactcaagatgccctggccaaagggaacaatcactatccaagggaatgcgaagctggcggtccaatgcgacaagcgaagcctcgacatggtcgagtacactcccagcccacccgccacagccgagccacccaagaaagtgatcaaaacgactaagacgccgaaaccagacggcgcaatcaaaatcgtcccactctccagtgtcaaccccgacaagacgctgtccgacatgccgggggtccccagggaggtcattgagcacaaacgtatggtgcgacccgatgccaagccagtaaagcaaaaactgcggagatttacatcagatcggaaacaggccatacgagaagagctcgataaacttcttaaggctggtttcatcagagaggtactccatccagagtggctagccaacccagtcatggtgcgaaaggccaacgagaagtggaggatgtgcgtcgacttcaccaacctcaacaaggcgtgccccaaggatcactttcctcttcctcgaatagaccaactggtggactcaacaactggttgcaagctgttaagcttccttgatgcttactccggctaccaccaaatcagcatggcaaaagaggacgagaagacaacattcatcacaccgttcggtgtattctgttacgtcaaaataccatttggactccagcatacggtccaaggggcacttagcgatcagctgggtaacaatgttgaggcctacgtcgatgacattgttgtcaaaaccaagacaggcgactcattggttgacgatctacgggaaaccttcgacaacctcagacgatatcgcctcatgctcaatcctgagaagtgcacgttcggggtaccgtcgggcaatttgctcggattcctcgtctctggcagaggaatagaagcaaatcccgagaagatcaaggcaatcgagaacatgaagtcgcccacaaggctcaaggacgtacagaagctaaccggatgcatggcggcgctaagtaggttcgtcgctaggatgggagaacgaggacagcccttcttcgcactactaaaaaagcaagacaaatttgtatggacacaggaagctgaagaggcgttcatcgcactcaagcgctacttgtcaaatccccttgtacttgttgctccccaacctaatgaagaattgttcctctatattgccactacgccctactctgtgagtactgtcattgttgtcgaaagagaaaaggtgcagagaccaatctattacgtcaacgaagctctacacgacgcaaagacaaggtacccacagatccaaaaactgctctccgcagtaatcatgacgtcaagaaagctacgccactacttccaagcccacagagtcacatttgtctccgccttccctcttggcgaggtcgtgagaaacaaagacgttgtcggccgcattacgaaatgggtagtcgagctaagccagtttgacatccactttatacacgaacagccatcaagtcccaggttagatagccagaccgacaacgaaacatggacaatggcattcgatggcgcgctcaacagccaaggagcaggtgcggggttcatcttgacatcaccttcgggagatcagttcaagcatgcaattcacctcaacttcagggcgaccaacaacacagccgagtacgaaggactactcgctgggatgagagctgcagctgcacttggagtcaagcgattgatcgtgaaaggggactccgaactagtcgcaaaccaggtgcacaaagattacaaatgctctagccctgagctatccaaatatcttgcagaagtcaagaagctggaaaaaagatttgatgggatcgaggtcccatcaaatctagcacggcgtgcgtccagacgagagctactcgaacccggcacctttctagatatcctgacaaaaccatcagtgaaagaggcaaatgacgaagatagcccagtcacccccgacatcggctcgggggctacagaggcagattgtgccgttgccgacatcgagaccagggatgactggtggaccccactcattaaattcataagcagcaatgagttgcccgaggacgacgcagaagtcgagaaaataacccgtcaagcaaaaatctactgtatgatcgggaacgatctatacaagaaggcgccaaacggagtacttctaaaatatgtttcgtctgacgacggcaaacacttcctcgtcgacatccacgaaggggtctgcagagtaacggacaggtcgagagggctagagagggctaacggtatagtactacaagggatcaagacccgtgtctacgataggctcatgtcacatgacaagaagtgggtcgaagagctcccctcggtactatgggtcgtgcgcaccacaccgacaacgtccaacaaagagaaacccttcttcctcgtgtacggctcgaaggccatgctccctaccaagttatgtcatcagagtacacgactacagaagtactccgacgaggatcaggaggaacagcgaaacgacgacatgaacctactcgaagaacatcaagaacgggtcgccgtcagagcagctagctaccaacaggccctacgccgatgtcacgagaagcgcatccgagcacgcatactttcgatcggcgattacgtcctccgacgagttcaaagccaggcagggcgaaacaaactctcacccaaatgggaaggaccgtacacgatcacacaagtcttgcggccaggctcattcaagattgcggacggcgatggtcgtgagctagcaaattcatggaacattgaccaattgcataaattttatgtataa

SEQ ID NO: 16111 - DNA, 3177 bp, Oryza sativa
  Clone ID: PAT_MRT4530_21890C.1
atggatcggcaatggatgtacgctgaccggcggtccaaagagtttattgacggcgtgcactattttttgagagtggccgaagctaataggcaaaggggttttatttgttgtccatgcaataagtgtaagaatcagaaggagtattctgcatccaggactattcatttccacttgtttgagtcggggttcatgccaagctataattgttggacatcccacggagagcaaggtgttgaaatggaagaagatgaagtggaagacgacaatattccggactttgctcagtatgttggatttgaaggaaatcaaacgggcgaggaggaaatagctgctgatggtaacgacgttgcggatgatcttggtcagatgttgcaggacgctagggaggactgcgaaagtgaaaaggaggcccataaattggacaagatgttggaggaccacagaacttcgttgtacccaggttgcgagcaggggcacaaaaagttggataccactctggagttgttgcaatggaaggcaaaaaatggggttagtgacaaggcatttggcgatttattgaaactcgtcaagaacattcttccggggggaaacaaattgcccgagacaacgtacgaggctaagaagatagtctgcccgttaggactggaagttcataagattcacgcatgtccgaacgattgtatcctatatcgcggtgaggagtatgagaacctagaagcatgccctgtttgcaaagcactacgatacaagattagacgggacgatccaggagaagttgacgggcagctaacaaagaagagaattcctgctaaggtgatgtggtatttccctataataccacggctaaggcgtttgttcaggaacaaggggaatgctagaatgttgcgatggcacgctgaagagcgtcaacaggacaggatgctgagacaccccgccgatggttcgcagtggcgaaacatcgagagaaaatttaaagaatttggaaaggacgcacgaaacatacggtttggtttgagtacggatggcatgaatccttttggagagatgagcagcggccatagcacttggcccgttacgatgtgtatctacaacctccccccctggctatgcatgaagaggaagtacataatgatgccgattattattcaaggccccaagcaacctggtaacgacatcgacgtgtacctaagaccactggtcgaagatcttaaacagttgtggaagaaggaaggtgtccccgtgtgggacgaggacaaacaggaggagtttaacctacgagcgctgctgttcgtaaccatcaacgattggcctgcacttagcaacctatccggacagtccaacaaggggtacaaggcttgcactcactgtatggatgaaacagaaagtacgtatcttaagcactgtaggaaggttgtatacatgggtcatcgtcgattccttgcagcaaaccacccggtacggaagaaaggcaagcacttcgaacataaggccgaccaccgtacgaagcctaaacatcgcagcgggaaaacagtgtttgctatggttaaagatcttaaagtagtgttcggaaaggggcctggaagccagcatatagagagcgaagatggtcacgcggcgatgtggaaaaagaactctatattttgggagttaccatattgggaattcttggacgtaccccacgcaatcgacgtgatgcacctcactaagaacctttgcgtaaaccttcttggcttcctaggtatatatggaaagtcgaaagatacactggaagcacgtaatgatctgaagcatatggaacagcgcagcgaccttcacccggaaccaaaggagaaaggcagccattacttaagtccagccagctacactcttagcaaggcagagaagggtatcctcccagtcaatgtccgggcaacaataacaaagctatgttctttcatgaacgcaatttcgcagaaggtcatcgatccggataggttagaagcccttcagaatgatgtggtgcaatgtcttgtcagctatgagttgatatttccaccttcatttttcaatataataatgcatctgctttgtcacctagtgaaagagatcggtattctcgggcctgtgttcctacacaacatgtttcctttcgagaggtacatgggcgttctgaagaagtatgttcgtaaccgtactcgtccagaggcaagcatcgccaaggggtatggaacagaggaggtcattgaattctgcgtagaatttattgaagaccttcgcccaatcagggtacctgaatcacaccatgaagggagactatggagaaaggggactctcggaaggaaagcaataatgacggtagacaacaatttattccgtaaagcccatttcactgttttacaacaatcttcattggtggctccttacatcgaggagcacttggctctagttcgcgccagaaacatcggtaagtccgatgcatggattacacgacatcacattgatactttccccgcatggctgcgacaacatctcatgggtaacgagacgattaaccagcaactggccttcctggcgaggggtccatctggctcgatcgcgacattccagggatatgagatcaatgggtacacattctacacacgagcccaagacataaagagcacgaaccagaacagtgatgttcgtatcgatgccatgggacacgatggtacaactggcacatattacggtgccatcgaggagatatgggaacttgactatggacctctcaaggtccctctgttccggtgccaatgggttaggttgactggtggaggcgtaacgattgatgacagtgggatgacaacggttgaccttaacaaggttggatactcggacgaaccttttgtccttgccaatgatgtaacgcaagttttttacgtgaaggacatgtctagcaaaggaaagaagggcaaagggcctgacgagccgaagcgccacgtggttctcccaggcaaaagaaaaattgtcggagtagaggacaagactgacgaggattacgatcagtttgatgggcaaccccctttcacggtgacgattgaccctagcatcctcctatcaaatgaagacaccccttactcacgtagcgatcacaaggaaggaacaatagtgaggagaaagtacgtgcggacaatcgtcaccgccgatgtattgccgtaa

SEQ ID NO: 16112 - DNA, 2431 bp, Oryza sativa
  Clone ID: PAT_MRT4530_21891C.1
aggggaggtcatgccaaaatttctagtgaatttattttggtgaatacatacaaatctgaggtgcctaaaaggtttatggatcagcaatggatgtacgctgaccggtggtccaaagagtttattgacggcgtgcactattttttgagagtggccgaagctaacaggcaaaggggttttatttgttgtccatgtaataagtgtaagaatcagaaggagtattttgcatccagaactattcatttccacttgtttgagtcggggttcatgccaagctataattgttggatatcccacggagagcaaggtgttgaaatggaagaaaatgaagtggaagacgacaatattccggactttgctcagtatgttggatttgaagaaaatcaaacgggcgaggaggaaatagctgctgatggtaacgacgttgcggatgatcttggtcagatgttgcaggacgccagggaggactgcgaaagtgaaaaggaggcccataaattggacaagatgttggaggaccacagaacttcgttgtacccaggttgcgagcaggggcacaaaaagttggataccactctggagttcttgcaatggaaggcaaaaaatggggactggaagttcataagattcacgcatgtccgtacgattgtatcctatatcgcggtgaggagaacaaggggaatgctagaatgttgcgatggcacgctgaagagcgtcaacaggacgggatgctgtgacaccccgccgatgaggaagtacataatgatgtcgattattattcaaggccccaagcaacctggtaacgacatcgatgtgtacctaagaccactggtcgaagatcttaaacagttgtggaagaaggaaggtgttcccgtgtgggacgaggacaaacaggagtttaacctacgagcgctgctgttcgtaaccatcaacgattggcctgcacttagcaacctatccggacagtccaacaaggggtacaaggcttgcactcactgtatggatgaaacagaaagtacgtatcttaagcactgtaggaatgttgtatacatgggtcatcgtcgattccttgcagcaaaccacccggtacggaagaaaggcaagcacttcgaacataagggcgaccaccgtacgaagcctaaacatcgcagcgggaaaacaatgtttgctatggttaaagatcttaaagtagtgttcggaaaggggcctggaagccagcctatagagagcaaagatggtcacgcggcgatgtggaaaaagaactctatattttgggagttaccatattgggaattcttggacgtacgccacgtaatcgacgtgatgcacctcactaagaacctttgcgtaaaccttcttggcttcctaggtgtatacggaaagtcgaaagatacactggaagcacgtaatgatctgaagcatatggaacaacgcggcgaccttcacccgaaaccaaaggagaaaggaagccattacttgagtccagccagctacactcttagcaaggcagagaaggaaaacaatgtccgggcaacaataacaaagctatgtgcattcatgaacacaatttcgcagaaggtcatcgatccggatagattagaagcccttcagaatgaagtggtgcaatgtctcgtcagttttgagttgatatttccaccttcatttttcaatataatgacgcatctgctttgtcaccttgtgaaagagatccgtattctcgggcctgtgtacctacacaacatgtttcctttcgagaggtacatgggcattctgaagaagtatgttcgtaaccgtgctcgtccagaggcaagcatcgccaagggttatggaacagaggaggtcatcgaattttgcgtagaatttatcaaagaccttcgtccaatcggggtacctgaattacgccatgaagggagactacggggaaagggaactctcggaaggaaagaaataatgacggtagacaacaatttattccgtaaagcccatttcactgttctgcaacactcttcattggtagctccttacatcgaggagcacttggctctagtttgtgccaggaacatcggtaagtccgatgcatggattacacggcatcacattgatactttccccacgtggctacgacaacatctcatgggtaacgagtcgatcaaccaacaacttgccttcctggcgaggggaccgtctgggtcaatcgcgacattccagggatatgagatcaatgggtacacattttacacgagagcccaagacatgaagagcacgaaccaaaacagcgttgttcgtgtcgatgccatgggacacgatggaacaactgccacgtattatggtgccatcgaggatatatgggaacttgactatggtcctctcaaggttcctctgttccggtgccaatgggttaggttgactggtggaggcgtaatgattgatggcagtg

SEQ ID NO: 16113 - DNA, 402 bp, Oryza sativa
  unsure (1)..(402): unsure at all n locations
  Clone ID: PAT_MRT4530_21892C.1
gggattggggatttataaatatggttcattatacaatcacatnttttagggagagaataaaacagaaaccaggggcagccctatccgggtttacagtgccgatcccacacaagaactcaatccttatttattgaattgagtaattagaaacgcagggcaatatactacacttttccattgttaactatttccataacacttacacaaaacataaaattggttaaaaatctcagtttaacacacggggcttcataaaagtggtaaaaaaaaaagtttacatcagtttgtggcacctcactttttctgataaaaaaactggccttccccatctaataaataacctcaacaccccccgggtgggctgtgaacttttttttcctccaccccatttttttttttatt

SEQ ID NO: 16114 - DNA, 381 bp, Oryza sativa
  Clone ID: PAT_MRT4530_21893C.1
gcacgaggcccgccactcctcctccctctcgtcccgcgccttcctcctccctctctcgccatggggcgtccccgtcgcttcgcttcgcgcctccacctccacctccgccgccgcggcgtcgccgtctccgagcgtctccgcctccgtctccccctcgcgccatgaccatctccgcctccgccaccgccgtcgggctaggctgccgcggggtgccagccgcaacagcctgagggggagacgacggaaggagtgggggccgacacgggcttggatgtggaggcgggcgcggtcttcgtgctcccatccggccatcctgcggtggtgacgtagacgggtctcgccggagccccaccaacgattggcgcggaaccgtggcgtggt

SEQ ID NO: 16115 - DNA, 3267 bp, Oryza sativa
  Clone ID: PAT_MRT4530_21894C.1
atgtcctgtttgattgtatcctatatcgcggtgaggggtacgagaacctagaagcatgccctgtttgcaaagcactacgatacaagattagacgagacgatccatgtgaagttgacgggcagctaacaaagaagataattcctgctaagatgatgtggtatttccctataataccacggctaagacgtttgttcaggaacaaggggaatgctagaatgttgcgatggcacgctgaagagcgtcaacaggacgggatgctgagacaccccgccgatggttcgcagtggcaaaacatcgacagaaaatttaaagaatttggaatggacgcacgaaatatacggtttggtttgagtacggatggcatgaatccttttggagagatgagcagcggccatagcacttggcccgttacgatgtgtatctacaacctccccctggctatgcatgaagaggaagtacataatgatgccgattattattcaaggcccaagcaacctggtaacgacatcgatgtgtacctaagacactggttgaagatcttaaacagttgtggaagaaggaaggtgtccccgtgtgggacgaggacaaacaggaggaggtttaagctacgagcgctgctgttcgtaaccatcaacgattggcctgcacttaacaacatatccggacagtccaacaaggggtacaagacttgcactcactatatggatgaaacagaaagtacgtatcttaagcactgtaggaaggttgtaaaaatgggtcatcgtcgattccttgcagcaaaccacccggtacggaagaaaggcaagcacttcgaacataaggccgaccaccgtacggagcctaaacatcgcagcgggaaaacagtgtttgctatggttaaagatcttaaagtagtgttcggaaaggggcctggaagccagcctatagagagtgaagatggtcaccggcgatgtggaaaaagaaatcctatattttgggagttaccatattgggaattcttggacgtacgccacgcaatcgacgtgatgcacctcactaagaacctttgcgtaaaccttcttggcttcctaagtgtatacggaaagtcgaaagatacactggaagcacgtaatgatttgaagcatatggaacaatgcagcgacctacacccggaaccaaaggagaaaggaagccattacttgagtccagccagctacactcttagcaaagcagagaaggaaagtatgtttgaatgcttggagagcataaaggtaccgtctggatacttcacgaatatcaagcgaataataagcacgaaggagaagaagttcacaaacctaaagtctcatgactgtcacgtgttgatgacacaactgctaccagttgtaataagggatatctttccagacaatgtccgggcaacaataacaaagctatgtgtattcatgaacgtaatttcgcagaaggtcatcgatccggatagattagaagcccttcagaatgatgtggtgcaatgtcttgtcagttttgagttgatatttccaccttcatttttcaatataatgacgcatctactttgtcaccttatgaaagtgatcagtattctcgggcctgtgtacctacacaacacgtttcctttcgagaggtacatgggcgttcagaagaagtatgttcgtaaccatgctcgtccagaggcaagcatcgccaagggttatggaacagaggaggtcatcgaattttgcgtagaatttatcgaagatcttcgcccaatcggggtacctgaatcacgccatgaagggagactacgggaaaagggaactctcggaaggaaagcaataatgacggtagacaacgatttattccgtaaagcccatttcactattttgcaacacacttcattggtagctccttacatcgaggagcacttggctctaggtcgcgccaggaacatcggtaagtccgatgcatggattgcacggcatcacattgatactttccccacatggctacgacaacatctcatgggcacgccggagatcaaccaacaacttgccttcctggcgaggggaccgtctgggtcgatcgcgacattccagggatatgaagatcaatgggtacacattctacactagagcccaggacatgaagagcacgaaccagaacagcgctgttcgtgtcgatgccttgggacacgatggaacaactgccacgtattacagtgccatcgagggatatatgggaaccttgactatggtcctctcaacgttcctctgttccgggtgccaatgggttaaggttgaccgggtgggaggcgtaatgattgatgacagtggtatgacaactgttgaccttaacaaggttggatactcggacgaaccttttgtccttgccaatgatgtaacgcaagtctttttcgtgaaggacatgtctagcaaaggaaagaagggcagagggcctgacgagcctaagcgtcaagtggttctcccaggcaaaagaaaaatcgtcggagttgaggacaagactgacgaggattacgatcagttggataggcaaccccctttcacggtgacgattgaccctagcatcctcctatcaaatgaagacaccccttactcacgcagcgatcataaggagggaacaatagtgaggagaaagtacgtgcggtcaaccgtcaccgccgatggaatgccgtaattattgtttacacgatgtaaactatttgggatgtattgattatccatacaaatcaattgatgtatggcataatttactatcattcatatgctacatttaattgactatcattcatatgctaattatatatgactagagaatttttaaaagtattaaatcattcatgtggcatttacagatgttaattagagtttttcacaatttaatttactatctttcatatgctacttatatatgactattcgaatttttaaaaggtttaaatcatgcatgtggcatttacatatgttaattagagtttttaacatttaatttaatataattcctacgctaagtatatatgatgattacaatttttattaattttaaatcatgcagtatgtacatacatatcttaattagagtttttaccaatttaataatatcattcatatgctaagtatatatgattattggaatttttattaattttaagtcatatatttgcttattacgatttatccacttaatttattacagacaaaaataatttttcgaagtaattgtcattaatctttgtactttaaataatgttaatgcattaacttctatttt

SEQ ID NO: 16116 - DNA, 5790 bp, Oryza sativa
  Clone ID: PAT_MRT4530_21895C.1
atggatcggcaatggatgtacgctgaccggcggtccaaagtgtttattgacggcgtgcattattttttgagagtggccgaagctaacaggcattataagggttttatttattgtccatgcaataagtgtaagaatcagaaggagtattctgcatccaggactattcattttcacttatttgagtcggggttcatgccaaactataattgttggacatcccacgaagagcaaggggttgaaatggaagaagatgaagtggaagacgacaatattccggactttgctcagtacgctggatttgaaggaaatcaaacgggcgaggaggaaagggatgctgatggtaacgacgttgcggatgatcttggtcagatgttgcaggacgccaaggaggattgagaaagtgaaaagggggcccataaattggacaagatgttagaggaccacagaacatcgttgtacccaggttgcgagcaggggcacaaaaagttggataccactctagagttcttgcaatggaaggcaaaaaatggtgttagtgacaaggcatttggcgatttattgaaactcatcaagaacattcttccggaggggaacaaattgcccgagacaacgtacgaggctaagaagatagtctgccctctaggactggaagttcagaagattcacgcatgtccgaatgattgtatcctatatcgcggtgaggagtacgagaacctagaagaatgccctgtttgtaaagcactacgatacaagtttagacgagatgatccaggagaagttgacgggcaactaacgaagaagagaatttctactaaggtgatgtggtatttccctataataccacagctaaggcgtttgttcaggaacaaggggaatgctagaatgatgcgttggcatgctgaagagcgtcaataggacgggatgctgagacaccccgtgatggttcgcagtggcgaaacatcgacagaaaatttaaagactttggaaaggacgcacgaaacatacggtttggtttaagtacggatggcatgaatccttttggagagatgagcagcggccatagcacttggctcgttacgatgtgtatttacaacctccccccttggctatgcatgaataggaagtacataatgatgccgattattattcaaggccccaagcaacatggtaacggcatcgatttgtacctgagaccactggtcgaagatcttaaactgttgtggaagaaggaagctaggtgtccccgtgtgggacgaggacaaacatgaggagtttaacctacgagcgctgctgttcgtaaccatcaacgattggcctgcagttagcaacctatccgggcagtccaacaaggggtacaaggcttgcactcactatatggatgaaacagaaagtacgtatcttaagcactgtaggaaggttgtgtatatgggtcatcgtagattccttgcaacaaaccacccggtatggaagaaaggcaagcactttgaacatacggcggaccaccgtacgaagccaaaacatcgcagcggtaaaacaatgtttgctatggttaaagatcttaaagtagtgtttggaaaggggcctggcagccagcctatagagagcgaagatggtcacacggcgatgtgaaaaaaaaactccatattttgggagttaccctattgggaattcttggacgtccgccacgcaatcgacgtgatgcacctcactaagaacatttgcataaaccttcttggcttcctaggtgtatatggaaagttgaaagatacactggaagcacgtaatgatctgaagcatatggaacaacgcggagaccttcacccggaaccaaaggagaaatgaagccattacttgagtccagccagctacactcttagcaaggcagagaaggaaagtatgtttgaatgcttggagagcatcaaggtaccgtcaggatactccacgaatataaagtgaataataagcacgaaggagaagaagtttacaaacctaaagtctcatgactgtcacgtgttgatgacacagctgctgccagttataataaggggtatcctcccagacaatgtcgggcaacaataacaaagctatatgctttcatgaacgcaatttcgcagaaggtcatcgatctggatagattagaagtccttcagaatgatgtggtgcaatgtcttgtcagctttgagctgatatttccaccttcatttttcaatataatgacgcatctgctttgtcaccttgtcaaagagatcggtattctcggccctttgtacctacacaacatgtttcctttcgagaggtacatgggcgttctgaagaagtatgttcgtaacagtgctcgtccaaaggcaagcatcgccaaggggtttgaaacataggaggtcattgaattctgcatagaatttattgaagaccttcgcccaatcggggtaccagaatcacgacatgaagggtgactacggggaaaggggactctcggaaggaaagcaataatgacggtagacaacaatttattctgtaaatcccatttcacggttctgcaacaatcttcattggtggctccttacatcgaggagcacttggctctagttcgcgccaaaaacatcggtaagtccgatgcatggattacacggcatcacattgatactttctccgcatggctgcgacaacatctcatggttaacgagacgattaaccaacaactggccttcctggcgaggggaccatctggctcgatcacgacattccagggatatgaaatcaatgggtacacattctacacgagagcccaagacatgaagagcatgaaccagaacagtgttgttcgtattgatgccatgggacacgatggtacaactggcacgtattacggtgccatcgaggacatatgggaacttgactatggacctctcaaggtccctctgttccggtgccaatgggttaggttgactggtggaggcgtaacgattgatgacagtgggatgacaacggttgaccttaacaagattggatacttggacgaaccttttgtccttgccaatgatgtaacgcaagttttttacgtcaaggacatgtctagcaaaggaaaaaagggcaaagggcctgacgagccgaagcgccacgtggttctcccaggaaaaagaaaaatcgtcggagtagaggacaagactgacgaggattacgatcagtttgatgggcaaccccctttcacggtgacgattgaccctagcatcctcctatcaaatgaagacaccccttactcacgtagcgatcataaggaaggaacaatagtgaggagaaagtacgtgcggtcaaccgtcaccgccgatgtattgctgtaattgttgtgtacacgatgtaaactattttggatgtattgaatatctatacaaatcaattgttgtatggcatatgttaattatgtatgattattagaatttttatcaaattgaaatcatccatatgctagttatatatgattattagaatttttaaaagttttaaatcatgcacgtggtatttacatatgttacttagaattttcagcaatttaatatcatgatatgctaattatatatgattattagaatttttattaattctaaatcatgcatgtggtatttacatatgttaattagaatttttaacaatttaatatcatgcatatgctaattatatatgattattagaatttttaacaattttaaatcattcatgtgcttattatatattatccacttagtttactacagacaacaatattttttcgaaggttttatcattaatttttcgactttaaataattgtaatgcattatttactattttagaaacacatatgtaatgaaattaaaaattcagtgctattatctttagtcccggtttttaactctaactgggtttaaaaataatttggaaatagagggaaaatatctttagtcctggttggtgagaacatccaggagtaaagatatctttactcctggttcgtaagaacaaccgggactaaagatcttttctttagtcccggttgtaggtacgaactgggagtaaatatatctttactcccggatgttctcaccaaacggaactaaagatctaggggtatatatattcccggtgcgccctcgtcttctccaccaacacttagaagtttttcctccgatcgatctcggcttctccttcgccgccactgcctagggcaaccccgcgccgacgccgccgtcgtctcgcggtcctcgccgcctccgccgccgacaacgccgccgcatctcttgggggagagtcgccactgcctctctctctctctcgatctatctctctctctctccaaaccgccgccgcctagctcattgccgacgccgccgccgacgtcgacgcgcgcggccgaccccgaccccgactccgcctcccgccgatgctgaccccgtcttcgacgcggccgtcaccgccaacgacgtaacatccacgcggccgccacggtgacgacgccgacgccactgccacgccgccgcccccgcctcgagctcgccacgccgccgtcgcggcacgctgccgccgtgcccccacgccgccggaccgcgccacgtcgccgcgccgccacgccgccgctccgctgccgccactgccgcgcgacacgacattgccgaacatgaacgaacgtgaacgaacatgaacgaaccgtgaacgaacgtgaagaaattcttcaagggaatgtccacaacaaacaaggaggccttaaagctatcggactatgaccgaacacttcagaaagcctatcacaagaagtccaaaccagtccctcagcttggagaacaaccaaaccaagaggtcgagctattggtgaccggcgaagattttggcataacggatttcatttcagacaccggtctaactgtggatcagctgattggaggcgcaccaatcccgaaggcggtagtggcatacaagtttgaacttggtaaaccgcttgtcacgcctgagcagctgcagtccctaccgacacagatgtacaaattccatgaacagtacatggaaatgagcgccaagggtagagagatgttcggagcgaggatcagaaaccccgacttcttgcaaggagaagatgttctcttgatccatttcaaggatgtcttcaatctgtaccatctggacgccctcgacgtctctcttctgagcgcatggattttaatggagattcaaagggcccgacggcgtggggtttacgatactgggttcatcaaatctcgaaaaatcaacaccgacatgatcgacaagtacgagaaagacacagaggacaatctcgtccatctcctaacgcaacagcatttcaagacgttcatactaccgccgtacaacacagaattccactgggtcctgttatttttcgacttggacgcatgcaaagtcactgtgtacgactcaatgaataaagaggagaagatttttgacaaggtcttccaattgatagacagggcatgcgatcggttccgtcaattggtccgcgggacttggaaagaaaaacttggacggaggtttcattttccacgtattcatatgagggataatctcccacacaagaattttatcacggttgttcaagaacaactgatgggattcatcaacgaaaaagtccttaatcccgatggtgaattctactacgacggatcgacaattcataacatcggtccttcctcttctgacataacgccggcgtcgaagtcgtagctatagctagcgagcattttttttcatgtatgcatgcagctactcgatcttgtaactgatttacgcc

SEQ ID NO: 16117 - DNA, 790 bp, Oryza sativa
  Clone ID: PAT_MRT4530_21896C.1
tgcaggaatcggcacgagggtagatcctcctcccttgctccagcccagtgcgctgccacgagggtgcctcctgcacgctcgcttcttccggtgatcctcggctcgtggcttgggcggctggatgctctgcagctgctgccgtcccttagtgcgagcgcagtgacagagacaccaaggaggagttaccggaagctcctgacttctgtgattggggagaaactgcgggatgagtgtgaacaagataacaggtccattttccgggctgtcaccatgccaccaagctctccggcaccaacgagagaagtttcattggcattagtcccaatgaaggttcaccgtcgtgaatcaccagaagtggcaactggctggtccttccttaggaagaagttcctgcctgacagaaaacctgcctcgcatgacagatcgaagatgtccgtggtgcagtgggcaatgcggctacctagtaggtattcgtcagcttcaccagtctgttcagagtacagaaccacaacaccagatggcatcacaagtgctagtcgtatttggcgtgaccgggtggctgtcccttcgagaagcaattcaggaaagtcttctgtggtgatcgaggaattggataattcctcggataaagaaattccagaggagttgattgcactcagagaaaaattcccttccgtttattctaccttcagtcacagcgagcttgcaaagatcacttctgatttctcacctgagtgtatagttggacaaggtggcactagccaagtttacaaaggttgcttagaaaatg

SEQ ID NO: 16118 - DNA, 2085 bp, Oryza sativa
  Clone ID: PAT_MRT4530_21897C.1
atggaagaagatgaagcggaggacgagaacattcccgactgggctcagtacactggatttgaaggaaatcaaacgggcgaggtggacttagatgctggcgataacgacgctgcggatgatcttcgtcagatgttgcaggacgcaaaggaggactgtgaaagtgaaaaggaggcccataaattggagcggatgttagaggaccacagaacgtcgttgtacccaggttgcgagcaggggcacaagaagaacaaggggaatgctagaatgatgcgttggcacgctgaagaacgtcaacaggacgggatgctgagacaccccgtcgatggccccaagcaacctggtaatgacatcgatgtgtacctaagaccactggtcgaagatcttaaactgttgtggaaaaaggaaggtgtccccgtgtgggacgaggacaaacaggaggagtttaatctacgagcgctgctgttcgtaaccatcaacgattggcctgcacttagcaacctttccgggcagtccaacaaggggtacaaggcttgcactcactgtatggatgaaacagaaagtacgtatcttaagcactataggaaggttgtgtacatgggtcatcgtcgattccttactgcaaaccacccggtccagaagaaaggcaagcactttgaacataaggcggaccaccgtacgaagcctaaacatcgcagcgggaaaacagtgtttgctatggttaaagatcttaaagaatttttggacgtccgccacgcaatcgacatgatgcacctcactaagaacctttgcgtaaaccttcttggcttcctagatgtatatggaaagtcgaaagatacactggaagcacgtaatgatctgaagcatatggaacaacgcggcgaccttcacccggaaccaaaggagaaaggaagccattacttgagtccagccagctacactcttagcaaggcagaaaaggaaagtatgtttgaatgctttgagagcgtaaaggtaccgtctggatactccaagaatataaagcgaataataagcacgaaggagaagaagttcacaaacctaaagtctcatgactatcacgtgttgatgacacaactgctaccagttataataaggggtatccttccagacaatatccgggcaacaataacaaagctatgtgctttcatgaacgcaatttcgcagaaggtcatcgatccggatagattagaagcccttcagaatgatgtggtgcaatgtcttgtcagttttgaattgatatttccaccttcatttttcaatataatgatgcatctgctttgtcaccttgtcaaagagatcggtattctcgggcctgtgtacctacacaacatgtttcctttcgagaggtacatgggcgttctgaagaagtatgttcgtaaccgtgctcgtccagaggcaagcatcgccaaggggtatagaacagaggaggtcatcgaattctgcgtagaatttattgaagaccttcgcccaatcgggggatatgagatcaatgggtacacattctacacgagagcccaggacatgaagagcacgaaccaaaacagcgttgttcgtatcgatgccatgggacacgatggaacaactggcacgtattacggtgccatcaaggacatatgggaacttgactatggtcctctcaaggtccctctgttccggtgccaatgggttaggttgactggtggaggcgtaacgattgatgacagtgggatgacaacggttgaccttaacaaggttggatacttggacgaaccttttgtccttgccaatgatataacgcaagtcttttacgtgaaggacatgtctagcaaaggaaagaagggcaaagggtctgaggagccgaagcgccacgtggttctcccaggcaaaagaaaaatcgtcggagtagaggacaagactgacgaggattacgatcagttggatgggcaaccccctttcacggtgacgattgaccctagcatcctcctatcaaatgaagataccccttactcatgtagcgatcgcaaggaaggaacaatagtgaggagaaagtacgtgcggtcaaccgtcaccaccgatgtattgccgtaa

SEQ ID NO: 16119 - DNA, 2565 bp, Oryza sativa
  Clone ID: PAT_MRT4530_21898C.1
atggaagaagatgaagtggaagacgacaatattctggactttgctcagtacgctggatttgaaggaaatcaaacgggcgaggaggaaagggatgctgatggtaacaacgttgcggatgatcttggtcagatgttgcaggacgccaaggaggattgcgaaagtgaaaagggggcccataaattggacaagatgttagaggaccacagaacatcgttgtacccaggttgcgagcaggggcacaaaaagttggataccactctggagttcttgcaatggaaggcaaaaaatggtgttagtgacaaggcatttggcgatttattgaaactcgtcaagaacattcttccggagggaaacaagttgcccgagacaacgtacgaggctaagaagatagtgtgtcctctaggattggaagttcagaagattcacgcatgtccgaatgattgtatcctatatcgcggtgaggagtacgagaacctagaagcatgccctgtttgcaaagcgctacgatacaagattagacgagatgatccaggagaagttgacgggcagctaacgaaaaagagaattcctgctaaggtgatgtggtatttccctataataccacggctaaggcgtttgttcaggaacaaggggaacgctagaatgatgcggtggcacgctgaagagcgtcaacaggacgggatgctgagacaccccgccgatggttcgcagtggcgaaacatcgacagaatatttaaagactttggaaatgacgcacgaaacatacggtttggtttaagtacggatggcatgaatccttttggagagatgagcagcggccatagcacttggcccgttacgatgtgtatctacaacctccccccgtggctatgcatgaagaggaagtacataatgatgccgattataattcaaggccccaagcaacctggtaacgacatcgatgtgtacctaagaccactggtcgaagatcttaaactgttgtggaagaaggaagcaatccaccaggtacggaagaaaggcaagcactttgaacataaggcggaccaccatacgaagcctaaacatcgcagcggaaaaacagtgtttgctatggttaaagatcctaaagtagtgtttggaaaggggcctggcagccagcctatagagagcgaagatggtcacgcggcgatgtggaaaaagaactctatattttgggagttaccctattgggaattcttggacgtccgccacttaatcgacgtgatgcacctcactaagaatctttgtgtaaaccttcttggcttcctaggtgtatatggaaagtcgaaagatacactggaagcacttgtaataaggggtatcctcccagacaatgtccgggcaacaataacaaagctatgtgctttcatgaacgcaatttcgcagaaggtcatcgatcctgatagattagaagccctgcagaatgatgtggttcaatgtcttgtcagctttgagttgatatttccaccttcatttttcaatataatgacgcatctgcgttgtcaccttgtcaaagagatcggtattctcggtcctgtgtacctacacaacatgtttcctttcgagaggtacatgggcgttctgaagaagtatgttcgtaaccgtactcgtccagaggcaagcatcgccaaggggtatggaacagaggaggtcattgaattctgcgtagaatttatcgaagcccttcacccaatcggggtacctgaatcacgccatgaagggagactacggggaaaggggactctcggaaggaaagcaataatgacggtagacaacaatttattccgcaaagcccatttcacggttctgcaacaatcttcattggtggctccctacgtcgaagagcacttggctctagttcgcgccaaaaacatcggtaagtccgatgcatggattacaaggcatcacatcgatactttctccacgtggctgctacaacatctcatgggtaacgagacgattaaccaacaactggccttcctggcaaggggaccatctagctcgatcgcgacattccagggatatgaaatcaatgggtacacattctacacgagggcccaagacatgaagagcacgaaccagaacagtgctgttcgtatcgatgccatgggacacgatggtacgactggcacgtattacggtgccatcgaggacatatgggaacttgactatggacctctcaaggtccctctgttccggtgccaatgtgttaggttaactggtggaggcgtaacgattgatgacagtgggatgacaacggttgaccttaacaaggacatgtctagcaaaggaaaaaagggcaaagtgactgacgagccgaagcgccacgtggttctgccgggaaaaagaaaaatcgtcggagtagaggacaagactgacgaggattacgatcagtttgatgggcaaccacctttcacggtgacaattgaccctagcatcctcctatcaaatgaagacaccccttactcacgtagcgatcacaaggaaggaacaatagtgaggagaaagtacgtccggtcaaccgtcaccgccaatgtattgccgtaa

SEQ ID NO: 16120 - DNA, 685 bp, Oryza sativa
  Clone ID: PAT_MRT4530_21899C.1
agttgtaataccaagctgccttgtgagttaactataaaaagaaagagcatccgttgattatcgaccagcagcagcctatctagagcatgaaacaccccaaaccagctggagattgtaaaaggcggagcaagattggtcgcccaagccctgtcttacaggatagtcagttaacagaaattgaccaatttacaagcgagtttctgaggcacaattcactgcattttatcccaaacactcagtcttccgtaaagagcaaaaacaatcgtcaagtcttctacttcccctcatgttcttttggtggttcagatccgacagtagaactttcagcaaatttgttgtacccccagctataccctgtgagtaccgctgccacaaccacccatgatcgcagaacattttgatacagaatctcctgacgagccagaaaagaatgccgcacggttcggatcattaggtcatcggtgatcatgttaaccggtgtattcttgacttcctcaagcaacgcatcgatctcatggttgttcctattgaaagagctgaagcgggggccccggagcttgcggggaggaggggcgccgtcggagtggtacgcggctcgccggatggccctgcccgccgccgcaggtcgtagcgtccacgccaccatagcttcccaccgtcgccactacgtcccggccgggggatc

SEQ ID NO: 16121 - DNA, 1409 bp, Oryza sativa
  Clone ID: PAT_MRT4530_2189C.1
cacgagggacaccgccgcggcggcggagagcgcaaacccccgcacccccctcgccgccgccgtagaacctaaaaccatggcctgcgctggctggaggcctgtcctcttcctcctccaccaccacatggccttcttcgggctacgcatctcgccctccgtctccgtcccctcgccccgccgccgctccgccggagaggtggcgctgctcgccgtcgtcgtagtcgccgcgctcctcaccgccaccacccatgccgcgtccgcaaccatcgagtcgcgccccgccgacgccctgcggtcggaggtcgacgagctcaggctcagggttctgcatttggaatctttgttggaggaaaacacaaaaactttgaagagtaaagcaaacaatttggaagagaacagcaatcttattggaactatggaacatgatattgagattttaatgaacaaatatgagagtaccaagaaatctcaaagcaaatcctacccagaaagcaatgtgaaagctttggaagatgaggtgcagctcctctggagagtggtcagaaagatgaatgagaatgctgactcaatagaatccctagcaaatggtgctgagaaaagggttgaatctctgagttcagaagtcaaaaagatggaaggtgtaattgcagaacaatggatccaaattcggcaacttgaacaggcatttgtgttgacgaagatgatgacatcaaaagttcatcaaagaagcaggttatccgagactgcttataaatggcctggaaaagatttagtccttaaggtatcacggttctgtaaggcaatatgtggccagcatattcgcgatgttgataagcctaatgtcttcttcttgggtggatccatctcccgatcatgtatttctgcaccttataaacaactcaagattttcatgttattggctcaaaattttcatcataaggtccagatatttctccaggatgcaatgagatccaatagttacagtagaggtttcgcaactgagataattacgttctgcttgatcgagatatgagttatatctccaatgtggattctgtggttcctctattcaacgcgatttggctcaaagaaatgaccagttgcccataaaacaagagttgcatatactgttttcatgtttttacattttacaagtatagaagagttgcatgagatggtggaaaatgcgtataattatatcttgtaatttatatcgagcacattgtatcacattccccatggaacctcccctttgcggggtggtgtatttatacccctagctcgctcgcattcttcagggacttggatggataaatttgtctactgatttaggcagtcctaggtcttcaaagaagaagcatttttttttgatcgttcaaaaatgcatcttccttaaaaaaaaaaaaaaa

SEQ ID NO: 16122 - DNA, 237 bp, Oryza sativa
  Clone ID: PAT_MRT4530_218C.1
cacactacaaaagatactatcacctcatactacacgcacgtcagagacttcttatcacttctactagcaagcgcccccttctttttttttttttttcaaaattatatctgaattgcaaaccattactggggatatttaattctgcgggggttcatcacacaaattattgcccaaactaaccaaattatttaaaataacatcttacaaactaatactacccttaacataatatttatt

SEQ ID NO: 16123 - DNA, 2964 bp, Oryza sativa
  Clone ID: PAT_MRT4530_21900C.1
atgccaagctataatttttggacatcccacggagagcaaggtgttgaaatgaaagaagatgaagtggaagacgacaatattccggactttgctcagtacgctggatttgaaggaaatcaaacgggcgaggaggaaagggatgctgatggtaacgacgttgcggatgatcttggtcagatgttgcaggacgccaaggaggactgcgaaagtgaaaagggggcccataaattggacaagatgttagaggaccacagaacgtcgttgtactcaagttgcgagcaggggcacaaaaagttagataccactctggagttcttacaatggaaggcaaaaaatggtgttagtgacaacgcatttggcgatttattgaaactcgtcaagaacatccttccggagggaaacaaattgcctgagacaacgtacgaggctaagaagatagtctgccctctaggactggaagttcagaagattcacgcatgtccgaatgattgtatcctatatcgcggtgaggagtacgagaacctagaagcatgccttgtttgcaaagcactacgatacaagattagacgagatgatccagaagaagttgacgggcagctaacaaagaagagaattcctgctaaggtgatgtggtatttccctataataccacggctaaggcgtttgttcaggaacaaggggaatgctagaatgatgcgatggcacgctgaagagcgtcaacaggacgggatgctgagacacctcgccgatggttcgcagtggcgaaacatcgacagaaaatttaaagactttggaaaggacgcacgaaacatacggtttggtttaacggccatagcacttggcccgttgtggaaaaaggaaggtgtccccgtgtgggatgaggacaaacaggaggagtttaacctacgagcgctactgttcgtaaccatcaacgattggcctgcacttagcaacctttccggtcagtccaacaaggggtataaggcttgcactcactgtatggatgaaacagaaagtacgtatcttaagcattgtaggaaggttgtgtacatgggtcattgtcgattccttgctgcaaaccacccggtacggaagaaaggcaagcactttgaacataaggcggaccactgtacgaagcctaaatatcgtagtgggaaaacagtgtttgctatggttaaagattttaaagtagtgttcggaaaggggcctggaagccagcctacagagagcgaagatggtcacgcggtgatgtggaaaaagaactctatatttgtggagttaccctattgggaattcttggacgtctgccacgcaatcgatgtgatgcacctcactaagaacctttgcgtaaaccttcttggcttcctaggtgtatatggaaagtcgaaagatacactggaagcacgtaatgatctaaagcatatggaacaacgcggcgaccttcacccagaactaaaggagaaaggaagccattacttgagtccagccagctacactcttagcaaggcagagaaggaaagtatgtttgaatgcttggagagcataaaggtaccatctagatactccacgaatatcaagcgaataataagcacgaaggagaagaagttcacaaacctaaagtctcatgactgtcacgtgttgatgacacaactgctaccagttgtaataaggggtatccttccagacaatgtccgggcaacaataacaaagctatatgcattcatgaacgcaatttcgcagaaggtcatcaatccggatagattagaagcccttcagaatgatgtagtgcaatgtcttgtcagttttgagttgatatttccaccttcatttttcaatataatgatgcatctgctttgtcaccttgtcaaagagatcagtattctcaggactgtgtacctacacaacatgtttcctttcgagaggtacatgggcgttctgaagaagtatgttcgtaactgtgctcgtccagaggcaagcatcgccaaggggtatggaacagaggaggtcatcgaattttgcgtagaatttattgaagaccttcgcccaatcggggtacctgaatcacgccatgaagggagactacggggaaagggaactctcggaaggaaagcaataatgacggtagataacaatttattccgtaaagcccatttcacggttctgcaacaatcttcattggtagctccttacatcgaggagcacttggctctagttcgcgccagaaacatcggtaagtccgatgcatggattacacgacatcacattgatactttcgccgcgtggctacgtcaacatctcatgggtaacgagacgatcaaccaacaactggccttcctggcgaggggaccatctgggttgatcgcgacattccagggatatgagatcaatgggtacacattctacacgagagcccaagacatgaagagcatgaaccaaaacagcgttgttcgtatcgatgccatgggacatgatggaacaactggcacgaattacgataccatcgaggacatatgggaacttgactatggtcctctcaaggtccctctgttccagtgccaatgggttaggtttactggtggaggcgtaatgattgatgacagtgggatgacaacggttgaccttaacaaggttggatactcggacgaaccttttgtccttgccaatgatgtaacgcaagtcttttacgtgaaggacatgtctagcaaaggaaagaagggcagagggcctgacgagccgaagcgtcacgtggttctcccaggcaaaagaaaaatcgtcggagttgaggacaagactgacgaggattacgatcagttggatgggcaaccccctttcacggtgacgattgaccctagcatcctcctatcaaatgaagacaccccttactcaagtagcgatcacaaggagggaacaatagtgaggagaaagtacgtgcggtcaaccgtcacctccgatgtattgccgtaa

SEQ ID NO: 16124 - DNA, 491 bp, Oryza sativa
  Clone ID: PAT_MRT4530_21901C.1
actgtaacaaaactacgaggtctggactctaaagtaacagagtacagatacacttaagacaaagcggacagcactttaatgaaatcgaagttacagtcatgacccacacagctggcagacatgcataacagaaggggggggggcagatacaatgaatagttgcagacggtgctatggtaaccattggttttgcgctttcagagccagatatggacaagacacctggataagcctgggacttgcatttgcggtctcctgcgaaggccagaagggagcactcggggttccactcaacactaggcatagctgccttgaatgggatctgaggaatggatcgcatcaggccgaacattggtaatgtcaatgaagggatcttcgctagcatatgctagaaactctcaagtatgattgaagctaactgaattcacaagccactccaggtaggtgaaggctgaaacggaaaggagctctctgacatgccagaaactgac

SEQ ID NO: 16125 - DNA, 6359 bp, Oryza sativa
  Clone ID: PAT_MRT4530_21902C.1
atggatcggcaatggatgtacgctgaccggcggtccaaagagtttatttacggcgtgcactattttttgagagtggctgaagctaacaggcaaaggggttttatttgttgtccatgcaataagtgtaagaatcagaaggagtattctgcatccaggactattcatttccacttgtttgagtcggggatcatgccaagctataattgttggacatcccacggagagcaaggtgttgaaatggaagaagatgaagtggaagacgacaatattccggactttgctcagtacgttggatttgaaggaaatcaaacgggcgaggaggaaagggatgctgatggtaacgacgttgcggatgatcttggtcagatgttgcaagacgccaaggaggactgcgaaagtgaaaagggagcccataaattggacaagatgttagagaaccacggaacttcgttgtacccaggttgcgagcaggggcacaaaaagttggataccactctggagttcttgcaatagaaggcaaaaaatggggttagtgacaaggcatttggcgatttattgaaactcgtcaagaacattcttccggagggaaacaaattgcccgagacaacgtacgaggctaagaagatagtctgcccgctaggactggaagttcagaagattcacgcatgtccaaatgattgtatcctatatcgcggtgaggagtatgacaacctagaagcatgccctgtttgcaaagcactacgatacaagattagacgagacgatccaggagaagttgacgggcagctaacaaagaagagaattcctgctaaagtgatgtggtatttccctataataccacggataaggcgtttgttcaggaacaaggggaatgctagaatgatgcgatggcacgctgaagagcgtcaacaggacgggatgctgagacaccccgccgatggttcgcagtggcgaaacatagacagaaaatttaaagaatttggaaaggacgcacgaaacatacagtttggtttgagtacggatggcatgaatccttttagagagatgagcagcggccatagcacttggcccgttacgatgtgtacctacaacctccccccctggctatgcatgaagaggaagtacataatgatgccaattattattcaaggccccaagcaacctggtaacgacatcgatgtgtacctaagaccactggtcgaagatcttaagctgttgtggaagaaggaaggtgtccccgtgtgggacgaggacaaacaggaggagtttaacatacgagcgctgctgttcgtaaccatcaacgattggcctgcacttagcaacctatccggacagtccaacaaggggtacaaggcttgcactcactgtatggatgaaacagaaagtacgtatcttaagcactgtaggaaggttgtatacatgggtcatcgtcgattccttgcaacaaaccacccggtacggaagaaaggcaagcacttcgaacataaggctgaccaccgtacgaagcctaaatatcgcaacgagaaaagagtgtttgctatggttaaagatcttaaagtagtgttcggaaaggggcctggaagccagcctatagagagcaaagatggtcacgcagcgatgtggaaaaaaaactctatattttgggagttaccctattgggaattcttggacgtacgccagcaatcgacgtgatgcacctcactaagaacctttgcgtaaaccttcttggcttcctaggtgtatacggaaagtcgaaagatacactggaagcacgtaatgatctgaagcatatggaacaacgcggcgaccttcacccggaaccaaaggagaaatgaagtcattacttgagtccagccagctacactcttagcaaggcagagaaggaaagtatgtttgaatgcttggagagcataaaggtaccgtctggatactccacgaatatcaagcaaataataagcacgaaggagaagaagttcacaaacctaaagtctcatgactgtcacgtgttgatgacacaactgctaccagttgtaataaggggtatccttccagacaatgtccgggcgacaataacaaagctatgtgcattcatgaacgcaatttcgcagaaggtcatcgatccggatagattagaagcccttcagaatgatgtggtgcaatgtctcgtcagttttgagttgatatttccaccttcatttttcaatataatgacgcatctgctttgtcaccttgtgaaagagatcagtattctcgggcctgtgtacctacacaacatgtttcctttcgagaggtacatgggcgttctgaagaagtatgttcgtaaccgtgctcgtccagaggcaagcatcgccaagggttatggaacagagaaggtcatcgaattttgcgtagaatttatcgaagatcttcgcccaatcgggatacctgaatcacgccatgaagggagactacggggaaagggaactctcggaaggaaagcaataatgacggtagacaataatttattccgtaaagcccattccacggttctgcaacaatcttcattggtagctccttacatcgaggagcacttggctctagttcgcgccaggaacatcggtaagtccgatgcatggattacacggcatcacattgatactttccccgcgtggatacgacaacatctcatgggtaacgagtcgatcaaccaacaacttgccttcctagcgaggggaccgtctgggtcgatcgcgacattccagagatatgagatcaatgggtacacattctacacgagagcccaagacatgatgagcacgaaccaaaacatcgctgttcgtgtcgatgccatgggacacaatggaacaactggcacgtattacggtgccatcgaggacatatgggaacttgactatggtcctctcaaggtccctctgttccggtgccaatgggttaggttgactggtggaggcgtaatgattgatggcagtgggatgacaacggttgaccttaacaaggttggatactcggacgaaccttttgtccttgccaatgatgtaacgcaagtctttttcgtgaagaacatgtctagcaaaggaaagaagggcagagggcctgacgagcctaagcgtcacgtggttctcccaggcaaaagaaaaatcgtcggagttgaggacaagactgacaaggattacgatcagttggatgggcaacccctttcacggtgacgattgaccctagcatcctcctatcaaatgaagacaccccttactcacgtagcgatcacaaggagggaacaatagtgaggagaaagtgcatgtggtcaaccgtcaccgccgatgtattgccatgcatgtggcatttacatatgttaattagagtttttcacaatttaatttaatataattcctatgctaagtatatatgattattacaatttttattaattttaaatcatgccgtatgtatatacgtatgttaattagagtttttacagatttaataatatcattcatatgctaagtatatatgattattagaatttttattaattttaaatcatatatttgcttattacgttttatccgccgcgccgctccgccaccgctccgctgccgccacaccgccgtcccgctgccgccacaccgagaatgtgaacgagcgaacgaacgtgaacgagccaacgaacgtgaatgagaacgagcgaatgaacgtgaacgagaacaaggtgaatgaacgtgaacgagaacgagcgaacgaacgtgaacgagccaacgaacgtgaatgagaacgagagaacgaacgtgaacgagaacaaggtgaatgaacgtgaacgagaacgttgtcagacgaacgtgaacgagccaacgaacgtgaacgtgaaatgcaattataggcaggttaatgaaatatatcctgaaggggcagacaccgaacttcgacacattcccaaagctaagggatcactgggacgagttcgttgcatataagacaggtgaacaagggcaggcgatgatggaaagaaacaaagaaaatgccgccaagaaaaagtaccatcaccacttggggtcaggcggctatagcgtcgcgatgccgaagtgggaggagatggaggctagcttgcttgagaggggtatcgaaccggccaccgctaattggccggaacgatcgaagttttggtacatggaacgctcaacccagctgatggctcactggtcttcggcgatcagatacgagaggttgcgcgtcgactaacagacgcagtggaagtctcttctcagggcacgttccgaccggatagagagagggacgagctgttactcgccctgcagactccagagcatccaggacgaacacgagggaaatgggtgattccttggaagattgggttcaaggaggacatccacacgtacaggagtcggatgaggagcaagagagataccgaggcgaagattgcaaatcttgagttcagggtatcgagctacgagctcagcatgcaagaggaggtggcaaggaaggttgatgaacgcatggccacacatcggtccaatgatccccagcccgtcaggaaaccgtagcagctgcgcctcaacgggacaggtaggatcacagagcatggacgccatgcaaacccaggacgaatccacctgccccgttgatgacatcactcagcggacaccatgtgagctgcatattcctttcaagaacttatcaataaaggtggcgtcgggcatggccatcccaatggacccttcaggtacttaccactgcaggctgattccagcaggatactccaaggttgaagttgagttggttgaaggcgcatacgaggacctcgagctggattatcctggaggagatggtgagacgcatctacgagacacaagccatgccattattctatggcgcaggtggtacatcatcctccctgggcgacaagcggcgtctcgtgcaccatctcctccggctccgccatctcctcctcagcatcctgcaccgtctcctcctcatgctccagcaccgtctccacctcaggctcctgcaccgactcctcctcgggctcccacaccgactcctccgcgggctcctacaccgactcctccgcaagctcctcttccgtcaccttcaaagtcaagggccccccaagctccaccacctgcccacacaagggctacgaagaaggcgaaagttgacgccgccaagaacaaggactcggggtacgattgcacgcaagaggagcttgacgcttacgtggcatcagaagtcaagagacaattcaagcctcgaagtccagaaaagaagattcctatagacccgagtgtcatgaacttcttcaggggtatgtctgcacctgccaaggaggccattaagctatcggactatgagcgaacgctgaagaaagcatcttctagaaagtccaaaccagtccctcagcttggagagcaaccaaaccaggagatcgagccgttggtgaccggtaaagaaatgacgatagaagaatttattactgacaccggtctaactacggatcaattgctaggagtcgcaccaatcgaaaaggcggaagtgaaatacatgtacgaactcggtaaaccgcttgtcaagcctgagctgctgcagtccctacccacacaaatgtacaagttccatcagctgtacatagagataagcgccaccggtagagagatgatcagagcgaggatcagggacacagacttcttgcaaggagatgacattctctggatcaatttcaagggaatctacgaactataccagctggacgccctcgacgtctctattatgagttgctggattttaatggagattcaaagggcccgacggcggggggttttcgatactggattcatcgaccctcggaaagtaaacgtcacaatgctcgaccaatatccgcaagccacagaggacaatctcgtccatctcctgaaggtgcagcattacaagacgttcatactgttgccgtacaacacagaattccactgggtgcttttactcttcgacctgtcggcctgcaccgtcaacgtatatgactcaatggataaaaaagagtctacgtttgacaaggttttcaaacttatagacaggatttggtatcggttccgtcatttggtccgcggcaaatggagagaaagacttaggcggaagttcaaatttccttttattcgcataagggataacctaaccacgcacaaggaatttatcgcggcggttcaagaacaactcatgggattcatcaacgaacaaatccttgatcccaagggtgaattctactacgacggaaacacaattcataggtccttagcttctgagctagcgactactactacgtcgaaatcgtagctagctaggacatataatggatt

SEQ ID NO: 16126 - DNA, 589 bp, Oryza sativa
  unsure (1)..(589): unsure at all n locations
  Clone ID: PAT_MRT4530_21903C.1
gaggcaacaattgagcagcagcagcagaagcaattgagatttaattccatggcgattgcgaggtcagctccggtgccggagagcctgcagctcccgcccccgggggccgcccccgtcggggactagcgggtccccccgccgccgcgggttcggctccacctgatccacagccaggtgatgaggatcaagaaggaggaggaggaggccagggagctcctccctcaagctgcagctgctggagacgcggccggccggcggcggccgctgcccggcgacgacgctccgggcatcccggtcgctctccccgctccgccgcgccggcggcgccatcccggtcggggagtgatcgatcgatgatgatcttttttttttttgtgagatcggagagttagtacctgatgcctgtccatgctgacatgctgtttactgtgatgtctatctgcatggttcagagctttagctgttggttgtagcacaccagatgtacatgttattcccctctcttgtttgtgttgtaaaatatcagtgatcgagtttacttaccttgcttatatattagcnaaaaaaaaaaaaaaaaaaaaaaaaaaaa

SEQ ID NO: 16127 - DNA, 3042 bp, Oryza sativa
  Clone ID: PAT_MRT4530_21904C.1
atggattggcaatggatgtacgctgaccggcggtccaaagagtttattgacggcgtgcattattttttgagagtggccgaagctaacaggcataagggttttatttgttgtccatgcaataagtgtaagaatcagaaggagtattctacatccaggactattcatttccacttgtttgagtcggggttcatgccaagctatatttgttggacatctcatggagagcaaggggttgaaatggaagaagatgaagtggaaaacgacaatattccggacttcggtcagtacgctggattcgaaggaaatcaaacgggcgaggaggaaagggatgctgatggtaatgacgttgcgaatgatcttggtcagatgttgcaggacgccaaggaggactgcgaaagtgaaaagggagcccataaattggacaagatgttagaggaccacagaacttcgttgtacccaggttgcgagcaggggcacaaaaacttggataccactctggagttcttgcaatggaaggcaaaaaatagggttagtgacaaggcatttggcgatttattgaaactcgtcaagaacattcttccggagggaaataaattgcccgagacaacgtacgaggctaagaagatagtctgcccgctaggactggaagttcagaagattcacgcatgtccgaatgattgtatcctatatcgcagtgaggagtatgagaacctagaagcatgccctgtttgcaaagcattacgatataagattagacgagacgatccaggagaagttgacgggcagctaacaaagaagagaattcctgctaaggtgatgtcgtatttccctataataccacggataaggcgtttgttcaggaacaaggggaatgctagaatgatgcgatggcacgctgaagagcgtcaacaggacgggatgctgagacaccccgccgatggccccaagcaacctggtaacgacatcgatgtgtacctaagaccactggtcgaagatcttaagctgttgtggaagaaggaaggtgtccccgtgtgggacgaggacaaacaggaggagtttaacatacgagcgctgctgttcataaccatcaacgattggcctgcacttagcaacctatccggacagtccaacaaggggtacaaggcttgcactcactgtatggatgaaacagaaagtacgtatcttaagcactgtaggaaggttgtatacatgggtcatcgtcgattccttgcagcacaccactcggtacggaagaaaggcaagcacttcgaacataaggctgaccaccgtacgaagcctaaacatcgcaacgggaaaacaatgtttgctatggttaaagatcttaaagtagtgttcggaaaggggcctggaagccagcctatagagagcgaagatggtcacgcggcgatgtggaaaaagaactctatattttgggagttaccctattgggaattcttggacgtacgccacgcaatcgacgtgatgcacctcactaagaacctttgcgtaaaccttcttggcttgctaggtgtatacggaaagtcgaaagatacactagaagcacgtaataatctgaagaatatggaacaacgcggcgaccttcacccggaaccaaaggagaaaggaagccattacttgagtccagccagctacactcttagcaaggcagaaaaggaaagtatgtttgaatgcttggagagcataaaggtaccatctggatactccacgaatatcaagcgaataataagcacgaaggagaagaagttcacaaacctaaagtcccatgactgtcacgtgttaatgacacaactgctaccagttgtaataaggggtatccttccagacaatgtccgggcaataataacaaagctatgtacattcatgaacgcaatttcgcagaaggtcatcgatccggatagattagaaacccttcagaatgatgtggtgcaatgtctcatcagttttgagttgatatttccaccttcatttttcaatataatgacgcatctgctttgtcaccttgtgaaagagatcagtattcttgggcctgtgtacctacacaacatgtttcctttcgagaggtacatgggcattctgaagaagtatgttcgtaaccgtgctcatccagaggcaagcatcgccaagggttatggagcagaggaggtcatcgaattttgtgtagaatttatcaaagatcttcgcccaatcggggtacctgaatcacgccatgaagggagactacagggaaagggaactctcggaaggaaagcaataatgacggtagacaacaatttattccgtaaagcccattccacggttctgcaacaatcttcattggtagctccttacatcgaggagcacttggctctagttcgcgccaggaacatcggtaagtccgatgcatggattacacggcatcacattgatactttccccgcgtggatacgacaacatctcatgggtaacaagtcgatcaaccaacaacttgccttcctggcgaggggaccgtctggatcgatcgcgacattccaggggtatgagatcaatgggtacacattctacacgagagctcaagacatgatgagcatgaaccaaaacagtgctgttcgtgtcaatgccatgggacacgatggaacaactggcacgttgactggtggaggcataatgattgatgacagtgggatgacaacggttgaccttaacaaggttggatactcggacgaaccttttgtccttgccaatgatgtaacgcaagtctttttcgtgaaggacatgtctagcaaaggaaagaagggcagagggcctgacgagcctaagcgtcacgtggttctcccaggcaaaagaaaaatcatcggagttgaggacaagactgacgaggattacgatcagttggatgggcaaccccctttcacggtgacgattgaccctagcatcctcctatcaaataaagacacccctcactcacatagcgatcacaaggagggaacaatagtgaggagaaagtatgtgcggtcaaccgtcaccgccgatgtattgccgtaa

SEQ ID NO: 16128 - DNA, 364 bp, Oryza sativa
  Clone ID: PAT_MRT4530_21905C.1
agggcaaaggcggcgtcggcttcgaggaggagtggctgggggaggggcgccgttgacggtggctccgacgaacagtggcgacggcaacagcgacggcacggccagaggagggagggtggcagcgggcgggacaaatgtccgcctgcaaaaatcatgtattttcacaggcctggagaaaccagatgaccctaacctgaaggttaacgcactgatggtgattttgatgataacacccgctcaaggtggctggggttttgttgttagggatactgatggccaggtggttgaagcagatgctggaatggaagcttatcgcacggctcttttttatgcttccgaagttggcaggggcgtgttaccttaa

SEQ ID NO: 16129 - DNA, 2214 bp, Oryza sativa
  Clone ID: PAT_MRT4530_21906C.1
atgaaaacatcagaccgagcagccccggatgacacctatccaaaccatatggatcggcaatggatgtacactgaccggcggtccaaagagtttattgacggcatgcactattttttgagagtggccgaagctaacaggcaaaggggttttatttgttgtccatgcaataagtgtaagaatcagaaggagtattctgcatccaggactattcatttccactttattgagtcggggttcatgccaagctataattgttggacatcccacggagagcaaggtgttaaaatggaagaagatgaagtggaagacgacaatattccggactttgctcagtatgttggatttgaagaaaatcaaacgggtgaggaggaaatagctgctgatggtaacgacgttgcggatgatcttggtcagatgttgcaggacgccagggaggactgcgaaagtgaaaaggaggcccataaattggacaagatgttggaggaccacagaacttcgttgtacccaggttgcgagcaggggcacaaaaagttggataccactctggagttcttgcaatggaaggcaaaaaatagggttagtgacaaggcatttggcgatttattgaaactcgtcaagaacattcttccggggggaaacaaattgcccgagacaacgtacgaggctaagaagatagtctgcccgttaggactggaagttcataagattcacgcatgtccgatcgattgtatcctatatcgcggtgaggagtatgagaacctagaagcatgccctgtatgcaaagcactacgatacaagattagacgagatgatccaggagaagttgacgggcagctaacaaagaagagaattcctgctaaggcccccaagcaccctggtaacgacatcgatatgtacctaagaccactggtcgaagatcttaaacagttgtggaagaaagaagcaaactacctggtacggaagaaaggcaagcacttcgaacataaggccgaccaccgtacaaagcctaaacatcgcagcgggaaaacagtgtttgctatggttaaagatcttaaagtagtgttcggaaaggggcctggaagccagcctatagagagcgaagatggtcacgcggcgatgtggaaaaagaactctatattttgggagttaccatattgggaattcttggacgtacgccacgcaatcgacatgatgcacctcactaagaacctttgcgtaaaccttcttggcttcctaggtgtatacggaaagttgaaagatacactggaagcacgtaatgatctgaagcatatggaacaacgcggcgaccttcacccggaaccaaaggagaaaggaagccattacttgagtccagccagctacactcttagcaaggcagagaagaaaaaggtcatcgatccggatatattagaagcccttcagaataaagtggtgcaatgtctcgtcagttttgagttgatatttccaccttcatttttcaatataatgacgcatctgctttatcaccttgtgaaagagatccgtattctcgggcatgtgtacctacacaacatgtttcctttcgagaggtacatgggcgttctgaagaagtatgtttgtaaccgtgctcgtccagaggcaagcatcgccaagggttatggaacagaggaggtcatcgaattttgcatagaatttatcgaagaccttcgcccaatcgggctccttacatcgaggagcacttggctcaatgggtacacattctacacgagagcccaagacatgaagagcacgaaccaaaacagcgttgttcgtgtcgatgccatgggacacgatggaacaactggcacgtattacgatgccatcgaggatatatgggaacttgactatggtcctctcaaggttggatactcggacgaaccttttgtccttgccaatgatgtaacgcaagtctttttcgtgaaggacatgtctagcaaaggaaagaagggcagagggcctaatgagcctaagcgtcaagtggttatcccaggcaaaagaaaaatcatcggagttgaggacaagactgacgaggattacgatcagttggatgggcaaccccctttcacggtgacgattgaccctagcatcctcctatcaaatgaagacaccccttactcacgcagcgatcacaaggagggaacaatagtgaggagaaagtatgtgcggtcaaccgtcaccgccgatgtaatgccgtaa

SEQ ID NO: 16130 - DNA, 211 bp, Oryza sativa
  Clone ID: PAT_MRT4530_21907C.1
tgtatgtgccacaacatatacaacaatcagtagtagttagcaccaagcaaattaattaacaaaacaaacacgaccttggtatatacgaaagaaacctattaagcaaacggaatatatatagacgaatgatctcgctagctacctaggaagaactaaataatgaagcagtcaacaaaaataaattgcacacacatatattcctaaatctcga

SEQ ID NO: 16131 - DNA, 561 bp, Oryza sativa
  Clone ID: PAT_MRT4530_21908C.1
atgctgggctcaccggtggacgaggagctaccggcggctggcgccggcgccggcgacaccgaggcggcggcctgcggcggcggcggcggtcggcggagggatcaggctgggcaggcggccggcggcggcggtggcgtggtggaggttctcgcagctacgtgcggacacgcggtggtggtggccgtcgtcgtcgtcgtcgccgtcgccgctgcagctgctgggtcgcgtcgtgggggagtacctcagctccgtgcgacgacggcggcggatgatgctggaggaacccgcgagctcggacgacgacgcgtcgtcggcggcggcggcggcggcgccgacggcgaggcttcggcgtgccgcgtcgaggcagtacggcggccgggtcgacgggagaggggtggtgctgaacctgtgcgtggcggaggcgctgctgctccggcggagctcgtcggtgaccaggaggtcgccgctccgggcgaggaaggcggcgcggtcgcggcgagcctcagctcgccgctcgggcccactcacatcctccaggaagaggggaatcgggaatcccat

SEQ ID NO: 16132 - DNA, 1273 bp, Oryza sativa
  Clone ID: PAT_MRT4530_21909C.1
atgacgacaaagtttgcagatcttccaagggttgtgacatcggaaaagaaagaatatccagtggatccgtcccttcccgatatcaagaacagcatctatgcttccgatgagttccgcatgtactcatttaagatcaggccatgctcgcgggcgtactcacatgattggactgagtgcccgtttgttcacccaggggagaacgcacggcgtcgggaccctcgcaagtatcactacagctgtgtgccatgccccgactttagaaagggagtttgccggcgtggtgacattaccatccccaagagcctcggcaacagctacaatggagatggctgcagcaatgggcttgatgcctggttctccatcatcagtttcagcagtcatgtccccatttacaccaccaatgtccccttcaggcaatgggatgcccccttcattgggctggcagcagccaaatgttccgacactacaccttccaggcagcagcctcagtcgagccggctccgtacctcacttagtgcaagggatatgcctgctgatgattactccctgatgcaggatattgattcacagcttataaatgatttgtgctattccgtattgggtggtatgttttcaccatctcacaaggctgctttccttaatcagttccagcaacagcagcaggcacttctttcaccaatcaacacagtcttctccccgaagtctgtggacaaccagcagttgccttcacactcatctctgttgcaagcatcacttggtatatcctcccctggccgcatgtctcctcgatgtgttgaatctgggtcccctatgaactctcatctttgcgctgctcttgctcagcgtgagaagcaacagcagacaatgagaagtctcagttctcgtgatcttgggccgagtgctgcaagagcatcaggtgttgttggctcccctctaagctcatcatggtcaaagtggggatcaccttcagggacacctgactggggtgttaatggtgaagaattgggcaagcttcgccggtcatcatcgtttgagctgagatctggtggtgatgatccagatctctcttgggtacacacactggttaaggaatctccaccagagaagcaagtcactactgctgaatccataaactttgttggaccttcaccactgatgcctcccagtgtaagcaacggtgaaggtcctagtctgaatgccccgctggatgggcatgaccaagctgctgttattggagcattgcttgaacagatgcagcttgatcagcatattg

SEQ ID NO: 16133 - DNA, 568 bp, Oryza sativa
  Clone ID: PAT_MRT4530_2190C.1
tagaatgttctattctgaaaacattaaaaaaaattttccctggggccatggatagtcctaatttcctgctggcaagagccagtagcaccaacatctcctcatctcatctccaacaagccacagctactctcttctactcctaggagtccctcaagtctcccaccaggaagcccaggacctaaaaaagtctgtcctctaccttcacagggactctccttgtcccatagagtgaaaggccatcaagcccagttcaccaatccatctgctgtggttagaggtagacagagccatagaatatctttctcgtgagaacaaagcattttgcagggtgtgatttatcaccctcagaagcaggaagagggaactccttcccatcaacatcatcttgcctgagctgggcaatccatgaaagccccctctccctctgtccccaattatcacatgggactcctattggctattaacaactgtgctcacaggatcaactttgcaaaaattagtcctaaatattagaatggaagaggtatggattccagctggggagtggggggaactgatgcagaaaatc

SEQ ID NO: 16134 - DNA, 2882 bp, Oryza sativa
  Clone ID: PAT_MRT4530_21910C.1
atgaacggcacgccgatctccgcgtccgccgcggccggcgtcgacggagtcggcgcggcggtggcgctggcggccgcgaccaagaagagtgccgccgcggcggccgccgtcgccgagatggcgaaaaccctcaccgtcgacacggacgacgccttcgcggggctcctcgagctcgccgcggacgacgacgcggagggcctgcgccgcgcgctggagcgcgccccgcccgccgccgcggacgaggcgggcctctggtacggccgccgcaaggtcctcgagcaccgcacgccgctgatggtcgcggccacctatggcagcctcgcggtgcttcgcctgctgctgtccctcccgtccgtcgatgtcaatcgccgctgtggctccgacggcaccaccgccctccactgtgcggcgtctggtggctcgccgtcttgtgtggaggccgtcaagctgctgcttgctgctggggctgatgctgatgccacggatgcttccggatatcgtccagctgatgtgatctctgttcctccaaagatgtttgacgccaagattgccctccaagatcttcttggatgcccaaaggctgggcatggcgttctccgggtggtgacaagggccgcaaactctatgttgtcacctgtatcatcccctacagcagaagatgcacgatctccatctgctgctgtgatgatgacgacaaagtttgcagatcttccaagggttgtgacatcggaaaagaaagaatatccagtggatccgtcccttcccgatatcaagaacagcatctatgcttccgatgagttccgcatgtactcatttaagatcaggccatgctcgcgggcgtactcacatgattggactgagtgcccgtttgttcacccaggggagaacgcacggcgtcgggaccctcgcaagtatcactacagctgtgtgccatgccccgactttagaaagggagtttgccggcgtggtgacatgtgtgaatatgctcatggcgtgttcgagtgttggctccatccagcacagtaccgtactcgcctttgcaaggatggcacaagctgtaatcgccgtgtctgtttctttgcgcatacaactgatgagctccgaccactatatgtttccactggatctgcagtaccatccccaagagcctcggcaacagctacaatggagatggctgcagcaatgggcttgatgcctggttctccatcatcagtttcagcagtcatgtccccatttacaccaccaatgtccccttcaggcaatgggatgcccccttcattgggctggcagcagccaaatgttccgacactacaccttccaggcagcagccttcagtcgagccggctccgtacctcacttagtgcaagggatatgcctgctgatgattactccctgatgcaggatattgattcacagcttataaatgatttgtgctattcacgtattggttcatcaacaggaaaccacacgtctcggaccaagtccctaaatccgtcaaacttggatgatctcttctctgctgagatggtctcttccccgaggtatagtaatgctgatcagggtggtatgttttcaccatctcacaaggctgctttccttaatcagttccagcaacagcagcaggcacttctttcaccaatcaacacagtcttctccccgaagtctgtggacaaccagcagttgccttcacactcatctctgttgcaagcatcacttggtatatcctcccctggccgcatgtctcctcgatgtgttgaatctgggtcccctatgaactctcaccttgctgctgctcttgctcagcgtgagaagcaacagcagacaatgagaagtctcagttctcgtgatcttgggccgagtgctgcaagagcatcaggtgttgttggctcccctctaagctcatcatggtcaaagtggggatcaccttcagggacacctgactggggtgttaatggtgaagaattgggcaagcttcgccggtcatcatcgtttgagctgagatctggtggtgatgatccagatctctcttgggtacacacactggttaaggaatctccaccagagaagcaagtcactactgctgaatccataaactctgttggaccttcaccactgatgcctcccagtgtaagcaacggtgaaggtcctagtctgaatgccccgctggatgggcatgaccaagctgctgttattggagcattgcttgaacagatgcagcttgatcagcatattggtagtctagcaacataagcgctgaatgagcctggaaagtgcaaggagttattattcttagttaatgaatttggagtaatttttttcctgttcattaagatggtcagcaagcaaaaggatggatagctgatggtggtgattcagagattggttttctttactttattgaggtaaatcatatacattattgaggttccagtaggttgaaagattgaagtaccttgattggggtcgtttcaagaccgacccaggtagaatcgcaccccggcagcttcaattcatcggtcaaaaatatttccctgttttgttaattaaccccgttaaaaaagaagactcgtttggtgtttcggaattcttttctttaccttagcggtgtttattttgtttattatgatattgatacttgatgtactgatgggtataaggttggttaccaggcatgctatagtggtatatcaagtcccaaagtattctttttctccctttcaccatttgtcgaggatcatactatggccttgttttggtcagatcttgaggcctgtataatccttggatttgtaataatgtaatattgtcattgaacttacattgctattgttttgcaatcgcaaatctcgctcaaaaaaaaaaaaaaaaaaaaaaaaaaaaaa

SEQ ID NO: 16135 - DNA, 2022 bp, Oryza sativa
  Clone ID: PAT_MRT4530_21911C.1
aaccctgaaggggtacctaactatttgtgaagagaaggggcagatggacggagcagcagtgagcgtcgccactggggtgatgggatccctccttgccaagctctctgcattgctgggagaagaacgcgggcttctgaaaggtgtcaagggtgacatcaggttcttgagagatgagctgagcaccatgaacgtctttctgatgaatatggccagtgtggaggagaacatggatgtgcaggtgaaggactggaggaacaaggtccgggaactgagctatgatatcgaggattgcatcgatttattcatgcacaaattgaatcgcggggatgataaggtcaacattgttctcaagatggcaaagaagattagaatgttatggtcaaggcatcagattgctaaccagatccaagaacttaaggctcgtgtcaaggaagagagtgatcgccgtttgaggtactacttcagcgagtgcaatgcacatgtcgacgggactaaaattgatccccgcctaccggcgctttatgttgaagaagagaagcttgttggtatccatggccctatggaagagatcattgaattgttgatgaaagaggatggttcggggcaaaaactcaaagtggtatccattgtgggttttggcggactcggcaaaactactctggctaaccaagtatacaacaaaatcaaggatcaatttgattgctcagcttttatatctgtttcgcagagtcctaacataaagaaaattttatttgatatgcttaaagatgtgaccagccgagacaactctgatgatgataagcaaattaaagttgttggggtcaaaggagataaatccgatgatgagaggcaactcattggtaagctcagagtattcctagagaataagaggtacttcatcattgttgatgatatctggagtgcatctgcatgggaacatgtgaggttagctttgcctgagaacagtctttgtagtagaataattacaaccacacggaatgtcaatgtggcaaaatcatgctgctctggttttcaaggttctgtttacaacattcaacctctaaatgagcaagactctaagaagctatttctgaaaaggcttttccactcagactccaattttcctactcacttggaagaagtttcacatgcaatcattaaaaagtgccatggctttccattagctattatctgtttagctagtctgctagctagtaaatctgatacaaaagaccaatgggagcaagtgcacaattctctcagttctgcgtttagttcacaagggatgagcgatatactgctgcttagctattatgatctaccctatcatctgaagacatgcttgttgtatcttagtgtatttccagaggattataagattgatagagatgaactgatatggagatggatagctgaaggtttcatcactgaagtgaagggtcaaacattggaccaagttggagggagttactttaatgagcttatcaacagaaacatgattcaaccaattgacatcaaatatgatggtaccgcaaatgcttgtcgagtacatgatatggtgcttaaccttatcatatccatttcatctgaggaaaattttctcaccgtagttgacgagcaagggtataaatatttgggtaataagattcgacggctctcattccagtccaactctgttgagaatgatgtgaatgtagttcaaaagatcatggacaacttgtcacagctcccagatcaattcgggaacctccattatctacaaactctggatatacgtggcagtggaatcgaaaagtttccgccaaccgtggtccgtttgcataacttggctcgtctacttgttggcaataaagtgcaattgcctgatggtattggagatctgcaatccttacaggtgctgtcttctgctcggttgtataaacccctaaaacttgtggaagatctcaggagattgaccaaactaaggacgcttgagatagttcttcatggcagtgatacacttggtgctcatgagatgggaag

SEQ ID NO: 16136 - DNA, 1578 bp, Oryza sativa
  unsure (1)..(1578): unsure at all n locations
  Clone ID: PAT_MRT4530_21912C.1
agcttgcccgggcaagaagaacaatctggccgcacaccgatcctttgaagcaaattaacatttctcttgcaaatttcgatctagctagatcatttgcaaagcttgtttgttgatcgatcgatgatggggccgaacgtgtcgtcggagaagaaggcgttggcggcggcgaagaggagggcgtacgtgacgttcctggccggcgacggcgactactggaagggcgtcgtggggctcgccaaggggctccgccgcgtccgctcggcgtacccgctggtggtcgccgtgctcccggacgtccccggcgagcaccggcggaagctggtcgagcaggggtgcgtggtccgggagattcagccggtgtacccgccggagagccagacgcagttcgccatggcctactacgtgatcaactactcgaagctccgcatctgggagttcgtggagtacgagcggatggtctacctcgacgccgacatacaggtgttcgacaacatcgaccacctgttcgacctccacaagggcgccttctacgccgtcatggactgcttctgcgagaagacgtggagccacaccccgcagtacgacatcggctactgccagcagcgccccgacaaggtggcgtggccggagcgcgagctcggccccccgccgccgctctacttcaacgccggcatgttcgtccacgagcccggcctcggcaccgccaaggacctgctcgacgcgctcgtcgtcacgccgcccaccccgttcgccgagcaggacttcctcaacatgttcttccgcgaacagtacaagcccatccccaacgtctacaacctcgttctcgccatgctctggaggcacccggagaacgtcgacctcgaccaggtcaaggtcgtccattactgtgcagcgggttcgaagccatggaggttcaccgggaaggaggagaacatgaacagagaagatataaagatgctggtgaagaggtggtgggacatctacaacgacgagagcctcgactacaaggaggaggaggacaacgccgacgaggccagccagccgatgcggacggcgctcgccgaggccggcgccgtcaagtacttcccggcgccctccgccgcgtaggcgcgctcgtcgccggcagtggccgccgtcaagtcttgatagctacaataataattggcgcttattaaggagtgctagctatgattaattaggggacatgatctgcataaacattttagtattgcagatatatcggtcatggtcttacttttgagtgtgtttttttttcttttgtttagtacgagggaacacccaaagtctgtattcagtttgtaaatacgtacgtatatggttggtctaactataaacagatctgcctactatacatgtacgttactgctgatacattttgtagttaataaaggtttttcttctatattaccatagtaaaaaaaaaaaaaaaaaaaaaagggctttggccagtgttgttatttaagtttaggtacgggtgcatgggaggtnataggtgttttttggtgttatgtaaatttaattaagtggtggggggtttataagttngtgattgggaaa

SEQ ID NO: 16137 - DNA, 638 bp, Oryza sativa
  Clone ID: PAT_MRT4530_21913C.1
cgaggctcgcttaaacccaagctctggctcgctcggtaggttgccctcgacctcccaccccttccatggccgcgccgggcgcgtgcctggcgtcgcgctcgccacccgccttcctcgccggcgggttcctcgctgcccgccctgccgccgtctctcccatcccctcccgctccgggaaatcaatcgcaccgagccgacgctttatcgtgtctaataaacttgcttgggttgaagatgagttagtggagataacagagtcacaagagccaagctccgcaagttcaaagaaaaggccacctttgaggcgtgggaaaatctctccacaacttccggtgccagaacacattccgagaccatcttatgtaggttcgaatagaccgcaagaactatctagtgtgcgccaaatacacagtgctgaaggtatcgctggaatgagagctgcttgcaaacttgctgcccgtgctctggactttgctggaacattgattaagccatcagttactacaaatgaaattgacagggaagtgcataacatgataattgaggccggtgcttatccttctcaacttggctatggtggatttcctaaaagtatctgcacgtcactaaatgagtgtgtctgtcacggagtacctgac

SEQ ID NO: 16138 - DNA, 432 bp, Oryza sativa
  Clone ID: PAT_MRT4530_21914C.1
cgcactttttctttaatatcacacacacactcacgctggggctggatttcattgcactgtacacagctgatcattagctagttgggtttctggcccggccgccggctagatgggcaaggacaagcaccaccgcgactggatccttccgcggtgctgcggctgcatcgccgactgcatactcacgcttgccatcctcggcggattcatagtgcatcgtcatttacctggtgattcacccctccaagccttctctatacctgcaggacgtccagctgcgcaacattgacctcttcgaccctgccatatacctcaacctccaggcgacgatcgtgttgaggaacccgaacgacagggtgggggtgctctaaaagacgcttcacgctgtcacaacattcatgggaggagcctatcacggcgccgttggagctgact

SEQ ID NO: 16139 - DNA, 426 bp, Oryza sativa
  Clone ID: PAT_MRT4530_21915C.1
atggcgggggcgggcttgcacacaagccgggctagctcggacgggctcacgggctgcctctccctccctcccaaactgctccacccggcacccgccgaccgcgacgacaacgaggaatatggtgacgaggaggacgccgtcctggtcggtatcatccgccgcatcccgtgggcgagagagagcgcgttaccgcgcatcgaaaggaaagagaaaggagacggaaagagggcgcggactgagggggccgctgggacacattcggcggcgtcgaagaaagcacaacggggcggggaggtaacgaggatatcagactggacaacgcgcctcccaggaacaaaggccggtgggctacggcggaagaagggacacagaccacaaaacaggaggtcagaaagcaacatccaacgcggcagagtcgtcacttag

SEQ ID NO: 16140 - DNA, 366 bp, Oryza sativa
  Clone ID: PAT_MRT4530_21916C.1
atggtggtggcgagttcttcaagcacggcagcacacaagaactatatgattcaccattatcatcttgtccaagattcatgcttcatgcaggacacggagggagtggaggaagaggtcagaggagtgtgcaacgcagtgctgtttgtgtatgcacataacaagaatgaaattaaggggagcagctctggtgcgacagggaagttggcagcacatacgcatttcattgagcacatcttgagcgttctagatttcttgaatgttttatattgtgatcagaccaataagatgaaaacagttacttgtggtatctgtaggcataattatggaagaactggattagcatggataataaatggactacattaa

SEQ ID NO: 16141 - DNA, 204 bp, Oryza sativa
  Clone ID: PAT_MRT4530_21917C.1
atgccccaggcagaggtcgtggctgcacgtgcgaagacctgcgaaggctgctccatgctagttggctgcgcagtgaccggcatgcaaagggcccgcccctgctggcatggacgtgggtcggaggccgatgcgggattctccacgcgacaggggcaagtcgtgtggtggacggtgccggtgagggcggtgccaagcggagtttag

SEQ ID NO: 16142 - DNA, 320 bp, Oryza sativa
  Clone ID: PAT_MRT4530_21918C.1
atctcctgtggcaacatatccagtagatgtaatgtaacgttccgcctctcccagaccgggtccgcttacatctgatagctttcataggttatagactgtcctcacagaccaacacatgtcttttctgtacactttgtcctcactcgtgtgcacccgggaagaatttcccggtcggtcacacatcccaaattgctccaggccaagcacgcttaaccctggagttctttggagattggcttccgaaaaaaaagttacaacttgttgatatgagtattctattaatcctattaagccctaggccaggatgttacacctctctt

SEQ ID NO: 16143 - DNA, 474 bp, Oryza sativa
  Clone ID: PAT_MRT4530_2191C.1
atggcggtgcgggtaactgcttccaccgctcccgttcaccgccggcgcacctactcaaagctccggtcctcccgtggcagcgaaggcgaggaagccacaggcgagggccggagggccgcccgtgtccccgtctctgggcaccagctgcgagggctccctcgacggcggttccgcctccctctctgcaacataaactcaacaatcggcgcacaaacgccaccgtctaggtccaccgtccaccggctgaagaccctcgttgcatacggctggggcgaaaagggtccacgtccactggacgacgaaatgctcgccctcgctgatgaccaccccatcgacgcgtcgcacacgctcctggttctatcccctctctatcctgattcccctcgtccgtccaccaccgtcgccgggcaacgccacgccgtcgacgtctgtccgccccgcgccatcgacactggtccgccacacagcttcaac

SEQ ID NO: 16144 - DNA, 194 bp, Oryza sativa
  Clone ID: PAT_MRT4530_21920C.1
atggccgacgaggtgggttccggcgatgtgggtgagtggggctcaaaacggcgccgaaaattggggaaaagattggggagaggtggacaaggtggacggaaaccgatcccacgtggtttgggcgcgagggcgcgagcaggaggggtcggaatcagggtgacgtggggcggcaatggcggcttggcgcagttggg

SEQ ID NO: 16145 - DNA, 305 bp, Oryza sativa
  Clone ID: PAT_MRT4530_21921C.1
cgcccccttgtttgctggaggaagatctaccaggtggaggggatccatcgttttaccccggagccctttctacatgtttaggagccctggcgctgcccccatacttgtgttgtatgatgaattaagaagtttatggaaccggggtagttatgacttacgacacgtatagagggtttggttcaggttctcccccgatttttggattccgtatggagattagaccccccaaggtaccgggaccagccagctcgagccttttgtaatagagcttgtagtactggattcctcccggtcactaaccccgc

SEQ ID NO: 16146 - DNA, 782 bp, Oryza sativa
  Clone ID: PAT_MRT4530_21922C.1
ttagttacggcgaggggggccaaaagttatatcaacagaatttagatatagaagtgtgcagagaggcgcttctatactctctgaagcacagagttgccctggtggccttcagccaggacgactgctaaccaacgcttgatgatcatccctggtggactttttccatgttatgtaccacgaaccaaaggcaaagataatatcagatgttgaccattttctgagtaccattgacatacagaagtttgtgttcctagaaactcctgaagtgatctcttctgtgctgaggccacactgggcgaggagggttgatggaaaggcacaggtcgttcaggcacagggtgatgtgcttgaagttgtaccgctcgggacttccaaaggaaatggggtaaaaattctgttggaatcactttgtgctagtccagatgaggtcatggcactaggcgatggaaaaaacgataaagagatgctccaacttgccggccttggtgtcgccctctgcaacggctgtgaggtgacaaaggtggtagccgacgtcatcggcgcgagcaacgacgaaagcggcgtggcacaggccatttacaaatacctctagaaaatgattccacctagctggcttagcatttctactgtggtgtggtagggcctaatatatcttgcttgcagcatccatttgcaagcgtaccatatttaaacttcaataattgtacgtggaagttggaagtactattcgctggtggattaatatcatatttgctgcttacagctaaaaaaaaaaaaaaaga

SEQ ID NO: 16147 - DNA, 623 bp, Oryza sativa
  Clone ID: PAT_MRT4530_21923C.1
ccgggctgcaggaatcggcacgaggctcacagctacatccacaagtactaaaccaatctctgccagcagtagctctcagctatggctgatcccagcaagctgcaaatcacaccctgtggcatgcttgttcagggcaaccagatcaacttcaccaaactctacctgcaccacacgccggctggtccagaacaaaaccagtcggcggtcacaagcaatgacaaaaaaaccgggttgggttgcattgtcgttaacaactggtcagtatatgacggaatcggcagcgacgccaagcttgttgcctatgcaaaaggcctccacgtttttgcgggtgcctggcacaactccttcagcctagtgttcgaggatgaaaggcttaaggggtccacgcttcaggtgatggggctaattgtcgaagaaggtgattgggctattgttgggggcacaggacagtttgctatggcaactggtgttatcttgaagaaaatgcaagaacaaaaacaatacggaaacataatagagctcactatccatgggttttgtcctctcttaaaagggtcacagtgccctgtcaccaagattgggccatggggttcatctcatgaagggacagttcaagacatcac

SEQ ID NO: 16148 - DNA, 699 bp, Oryza sativa
  Clone ID: PAT_MRT4530_21924C.1
atggaccggaagcgcatcaaggacgtgctcgagaagcacctggacaggtcgtccccgtccacatccaggggggcggcggtggccaaggagagggaccgcctcgccgccgcaggggggaagctgcccgcgccgctcggcaaggccgggaaggtctccgatggtgctcatgttgaaccaaaaaaggggcataattgcaagcttacagttatatctgtagccagtgggcagcgtgatatgaatgtttctttaatttctctgtgcatcgatatgaatgtttgtggtttttcaatctcagaagaatttgaaactgacagtgaagattcagatgtcagtggttctgagggagaggacacatcttggatttcatggttctgcagtttgcgcggcaatgagttcttctgtgagatcgatgatgattatatacaggatgatttcaacctttgtggtctgagcaatcaggtgccatattatgactatgcacttgatcttatcttagacatcgagtcttctaatggtgatgtgttcactgaggagcaaaatgaattaattgagtcatctgcagagatgctgtatggattaattcatgcaagatatatcttaaccagcaagggtctggctgcaatgttggagaagttcaagaactatgactttggaagatgcccccggggcaatcagatattcctaggtctagcacagtga

SEQ ID NO: 16149 - DNA, 344 bp, Oryza sativa
  Clone ID: PAT_MRT4530_21925C.1
acagagcagggaattctggttttagtccattggtagcattgtgtgtatgaggagattcaacaccacagacagctgcaggactcgatatccatggcttctttccatcacaaaacgggtagaaacacattcactgcttcagggttctaatctgtgtgtctccttatgactccacttctgtaagctactctgtaactttgatatatgctgtattttctttctttaaaagatttagatgttttttcagcaagctagccatacaaccattgtatctctttctcttcagtatggtttagagcccagatcagttagtaggcattcgttgtcttctctttcaatacatgtac

SEQ ID NO: 16150 - DNA, 631 bp, Oryza sativa
  Clone ID: PAT_MRT4530_21926C.1
tagaggttctataaacaggactgaagtccgtgacatgctgagatcaaggactcagacggtacaaactggtcaacaaaatgttgtcaaacatttaactgtgagataattacagttgataatatcagttcaaatatcattcaaataatcattaagtttttgagaacgaacaaaaaggctgatagtatatctccattactctatcactgaagaagaaatttaaggaaatagaagggtgaaaatatcagttaatttgatgaataaaggaactatgaaactttgagattattttcagtcaaatgccttttgtataaccatcgttgccttatatacaaatgttgaacttgataaccatagcgagattcctttgtggctttgcccatctgaagatgaatccgctatccatggtacatcttttcatgcaggattgttcattctgtagtgttattccatggcctccgagttatttttcttgagtcatcatgaattgcactttaggtctctgagtcaccacatctcgcaacaatcttgagatacaagaacacgactccttaggtggaagtgttgtcatttgcatgatttatgatgcagtaagacaaaccgcccccggcccccttcctgcggcccggtaccc

SEQ ID NO: 16151 - DNA, 1106 bp, Oryza sativa
  Clone ID: PAT_MRT4530_21927C.1
gggggggaaaatccatataatataacccgaaaagcatgcggattaacataatttgatacagtgagacaacctaggatcacagaattaacagtacaaaaacagatacagttgctcggcaattacagcgagattcaagctcacatgttctcacatcaacagaccgcaataatttcgggccacaatgttctctccctaaaaactaggtaaaaacaagcagcagcttaccgtacaagtttgtcatgactgcttgtgaagtttgaagccaaaaacttttggaacatactgctgagatggcttttgtggcttcaagtgtggatatgtcatcaggaagagatgtgggaatgttgtcccaaagtacgctccgtcaatgtcttagcaaagtaaaggagatacaagtgcaagaaaaatagtaacacaatattcatgatagcacaaaatcaatgtttgtttacccatggttatgttccaaacaaatctaatcaaattgtatgagtcgcataaaaaaaataaaggaaaaccatgtttgaatgagaatcctctacacagagccccttttcaagtgctgcctaaaaaccaacctataacttggagaaactgagagtggtgaaatccattacaggtggcataaaaactcagtagtttgattttttaaaggatgtgttttagagagcagcacaaatgggtcatgtattcataattctgcctatgttcgtgttgtgctttgctttagctgttgcgaataataagtctgattctgcttaggaaatcacaatttctaatttatgccctatcagatatcacctcgtttttaactccatatatgagtacaatttattaagaaaaaaagcagttcatataaaacacatctaagacaaacaatcaaaaggatactgccttggtacttggatcttggataatgtaaatcttcacattttggacagtatatcttcactgtgctagacctaggaatatctgattgccctgcaggaagacagggttggccacaacagtatacccgggggcatcttccaaagtcatagttcttgaacttccggggcggtgggtcgtacccggataactagcggtaccgggtgcctgcaggcgta

SEQ ID NO: 16152 - DNA, 525 bp, Oryza sativa
  Clone ID: PAT_MRT4530_21928C.1
gtttcttggatccggttagagtaggttgtggtttgtgtcggccgtcacgccatccgtcctcatggtcgcgcaaaccagcagcagttgttgtcatttttccgctgagtgtgatgcctcttctcacggccaaaccagtcacgaatgctatacagatagaaccaagggcaaatcggtctttctccgtacgaactcacggctaaacacttgatctgagcagcagcagtgacggaagtgctaccgatcgaagaaaaacaagtggccaatgcttctagtcgaaagcgggaagtttccatgctattttttggttaccgacttgttttctatgctatagatcgaattttctcaaaaagaaacctctcgttgtctcctccgctccttgcctacttgcgccgccgccaagacgagtggcggctgaacaagggagggcacggcggcgatctccatcgcagcggaggggaggggatcctggtgcgtcttctttctgattcatctctctctctctctcccaccccacccggactggaa

SEQ ID NO: 16153 - DNA, 173 bp, Oryza sativa
  Clone ID: PAT_MRT4530_21929C.1
gcaaagggaaggagccggccatgggaggagcggggaacggcggcggaaaactcggccggcggccatggaaggtggccggggttggcgcgtccgttcccggcgatttaaggcgctattcaaggggaaaattaggggcaattgaagaggaaggaatggggattaaaaccccctaa

SEQ ID NO: 16154 - DNA, 3120 bp, Oryza sativa
  Clone ID: PAT_MRT4530_2192C.1
atgacgatgagaacagattacaaagagagtaaccgaacaggcgatgccgatgagatcgtagtcgagggattcgatgaaatctcccggcgagttggctccgtagactttggcttcataaactctggtgggtgtgttggcgatgagatgcgatgccctttgcctctccctaggggtcccttttatatcgtgggataccttgaccctcaaggtttgatgtctccgagtcctacttggagaccacctgacctgcgatataaaagggaccccccgaggggacctaaggcatcgaatctcaaagcttacacaacgaccacagcctacgaagtcggagactacaagggccaagtcgccggatcctcgtaccagcgtaccccaataccctctatatccggtctacaggtacccaccgtcgacagtggcgcgccagcgtcaacaccggccccatccaaggaatccctgcttcgacaatgctgctgtggactcaagtcggcaaaatcgtcttcccggtttacaccacggtgccaatctcgggctggtccatcaatgaccggaaacgagaacgccgtggttgtaaacccagacgatcccatgtcgaagaattctcccgccgtggcggagaacggaacatcgacgtcatacgagcccgagaaggttcctagcgcggccaagccttgtccttccgacaagtactacgagccgacgaggacagcttccgaggtaaccaagtcctgttctcctatccacaagtccaggaagcacaacttgcaagcttgttgggtttttctcaacgtacaagctgaaatccgtgcttgcaaagaacgtggaatccagcgtacttctccaactcgtgatatctattgtcctattcacaagacgaagaatcacgacttctcaagctgcaagatctttctccgtgccatgaagacgacgcttccgaagggaacttacaagcgccacgcgatcgaagacgatttacacgcgttaacacagaatcagggtgaatctttgagggactatgttcagcgctttaatgagtgcagaaatacgatccccgatatcaccgatgcttctctgatccgcgctttcaaaaccggcgtcagagatcgctatactacccaggagttggcaacaaggcgaatcactactactcgaaggttgttcgaggttgtcgatcgatgtgcccatggagacgatgcgctgagacgcaaaaacgacaaacccaaggcgggaggagagaagaagccagccaaagacacacccgaaccaagcaagaagaaaagcggcaagagtgggaagaggaaagctcaagcagtagtcctcgcatctgaatacgagcgcccgcccaaacacccagacccacaaggcaatgatacaaagagaatatggtgccccatacacaagtcggacagacattctctaaaggagtgcctcatcttcaaaaaatcgttggaaaggcagctggctttggagaagggcaagcgagggactgcatccaagatgaagtggtctgaacagaagatcgagttctcagatgaagaccaccccaaggctgctgttataccaggacgatatccgatcgtggtcgaacccactatttggaatgtcaaggtggcgcgagtcctcgtcgatggcggcaactccatcaatcttctcttcgctagcactttggacgcaatgggaattccacgaggcgagttgacacctaccgatcaacccttccatggaatcacccctcaatcttcatccaagccattgggcaagatcacgcttccgatgactttcagccaagcgagcaacttccgaacggaacagataacatttgatgttgctgagttcgacacagcatacaatgccatcatcggaaaaacggcactcgcgaagttcatggccgcatctcactacgcgtaccaggtactccatccagagtggctaaccaacctagtcatggtgcggaaggccaacgggaagtggaggatgtgcgtcgacttcacggacctcaacaatgcatgccccaaggatcacttccctctacctcgaatagaccaactagtggactcagcagcaggttgcaagctgtcaagcttccttgacgcttgctccggctaccaccaaatcagcatggcaaaaaaggacgaggagaagacagcattcatcacgccgttcggtgtattctgctacgttaaaatgccgtttggactcataaccgcaggaaataccttccagcgtacggtccaaggggcacttagcgatcagctgggtaacaacgttgaggcctatgtcgatgacatcgttgtcaagaccaagacagacgactcattgattgacgatctacgggaaaccttcgacaatctcatacgatatcgcctcatgctcaaccctgagaagtgcacgttcggggtaccgtcgggcaaactgctcgggttcctcgtctctggcagaggaatagaagcaaatcccgagaagatcaaggcaatcgagaacatgaagtcgctcacaagactcaaggaagaaaccggagaggctttcatcgcactcaagcgctacttgtcaaatccccctgtacttgttgctccccaacctaatgaagagttattcctctatatcgccgccacgccctactcagtgagtactgtcattgttgttgaaagagaaaaggtgcaaagaccagtctattacgtcagcgaagctctacacgacgtaaagacaaggtacccacagatccaaaaattgctctacgcagtaatcatgacgtcaagaaagctacgccactatttccaagcccacaggatcacagttgtctccgccttccctcttggcaaagtcgtgagaaacaaagatgttgtcggtcgcattgcgaaatgggtagtcgagctaagccagttcgacgtccactttgtaccacgaacagccatcaagtcccatgttctcgccgatttcgtagccgattggactatgcctgaaaacagccaaggagcaagtgaggggttcatcttgacatcaccttcgggagatcagttcaagcatgcaattcacctcaacttcagggcgactaacaacacagccgagtacgaaggactactcgctagaatgatagctgcagctgcacttggagtcaagtga

SEQ ID NO: 16155 - DNA, 1636 bp, Oryza sativa
  Clone ID: PAT_MRT4530_21930C.1
agcaaacaacattttttcaatacctgttgatccaacaaaggattatgctttttaaacacaatataatttttataaatatgtgagaaaagccatgacttactgttttttcgaagctctgaaagaaatcaggtaaaaccagccagtttctggtcagattaccgatcaattatgcaagtaggcattggatgcctatactccacttggatttgaactgtacagtaacgaaaccttgcaaatattccatcctcaccttcttgtcccccccctgcaggaccggggacgggggctgcacacatagaaccggagagagagacagagagcaggcacacgtccacgccgccgcgtccgcagacgcacacagaggaagagggagggaaggagagggagagctgaagaaggcatggaggagcaaaagcacacagacaaggcaaaggcaaagctcagcatgttgaaatcaaaggtgatctgctgcaagctctacatttctgaaagccagaatgccaaggttgttgatgcaatcactcgcattggccagaaagaccctgaggttgttttgctcagcaagttcgaagatgaccactacaaccgtgtccgttacacgcttgcgtcttatatcatcaacgagaactcaactggtgaagtgaaatttagcccaatgaggcgagtattgttggagatgattgagaaagcgttttcaaccataaaccttgaaacgcacactggaactcacccaaggattggagtcattgatgacatgtccttccaccccttgaatcaagccacaatggaagatgctgctcaactggctaagactgtggcctctgacattggcaacttcttacaagtcccagtattcttgtatggagcagcacaccccactggcaaacctgtgactgcagtacggcgtgaactgggctacttccagccaaattacatgggcatccaatggatgggtcaggtactccctgatattctgccggtgaagccagatgagggcccagatcatgtttctcgtgaaagaggtgccataatgatcggtgctgcacctttacccctgaactataatgtgccggtactatcgaaggatatcccaaccataagaaggatcacccgaagggtgactggtcgtggtggaggactcccgacagtgcaagcgcttgccctttcccatggtgatgactgcacagagattgcatgcttcctggatccagatcatgtcagtgccgatcaggttcagcagcaggtggaacagatagcagcagagcaaggacttgaggttgaaaaggggtacttcactgacttctcaaaggatgcaatgcttgaaaaatacttcaagattgtgttgtctgttgattaacatgtgcatagtcttctatggccaaatgtcacgcatgcgttattgtttttgcacagatgattcatacctgtgtaatgatgcatgaaaaacaataaccaattttatctaacattgtgtatatagcaaactttcctttttttttcccgcttccagatttgcccgcaacatctgtgcagaagatagtttccaggaacttaatcaccagatgatacatctgataattgtgtgagcctgtaaattatcttccacgtcaacttaaaaatgtcttaaatattgttt

SEQ ID NO: 16156 - DNA, 397 bp, Oryza sativa
  Clone ID: PAT_MRT4530_21931C.1
ccggccgggaaacccatctataaatcttcgtgaataccgatcgcgtggtgacgtcccgtcatacaactccgatgcgacgttgccccatgccattcatggataggaatatgtagaatactccgttgcggatgaaggagatgtggtcgcgctgatgccgtttcaacaaaaggtgatgcgcgtggttgtgtcaaggacatcgccaccaagatccaccacaaggcactccgaaaactgaatctcagttacgatcctcctctcccccatcgtctgcacctactactactcaatggactacatagagcaggagacgttatcccacagatacctatatgtgcagtatgttgagattgccaccatttttgtaatttttatgatccactgtcattccccaatgata

SEQ ID NO: 16157 - DNA, 308 bp, Oryza sativa
  Clone ID: PAT_MRT4530_21932C.1
ctcatagaacgaccatctcgggggatcgtccttagcattcagaactgatattataagaaacttttacagtacatagcaacaacccatttgcttgcacttcatacatcaattaactgaggtattctttatccgcattgccaacttaagaggattccgccccattataaacggcttgggagctcttgccttgcaggggagtgaatgcaccgaactcatctcctctgttatgcttgagcctctgagcctcttcttttgacatgcgatatgcatttgctagaacatcagttgggagagccccgaaaaaggaa

SEQ ID NO: 16158 - DNA, 330 bp, Oryza sativa
  Clone ID: PAT_MRT4530_21933C.1
acattcttgcgccaatgactttgaacctgggcagatgagtgtacacagataggcctgggactaacaagatcatggatgacctttttaacatggaactattagaatctgcatttggtgtcctagaccgagctgcttttaacatatatgattatgctggatgggtgagagaagatgacatgatgatgctatagagctggagtcctggagatactgctatagcgttaaagacatgtgtgatggtgaacaaggacatggcacatgatggtagttcaggtttgaagcgtgtactgactgtgtctgcagagagggaacatacagatactgtatctg

SEQ ID NO: 16159 - DNA, 615 bp, Oryza sativa
  Clone ID: PAT_MRT4530_21934C.1
cacgagggggagagtatcagatcgattttgcctaaaaataataaaggcggtagaataatagtgactacaagatttcaagctgttggttcaacatgctcccctcttgaaactgatcgtttgcatacagttgattttctcaccgatgacgagtcccaaaacttattcaatacaagtatttgtgaatcaaagataagaaaagatagcaacaaagtagacgagcaagtccctgaggaaatatggaaaatatgtgggggattgcctttggccatagtcaccatggctggtcttgtcgcctgcaacccaaggaaagcctgctgcgattggagtaaactttgcaaatcattatttccagagcaagaaactcctcttaccctcgatggtgttacaaggatactggattgttgttacaatgatttgcctgcggatctgaagacttgcttattgtacttgagtatatttccgaagggttggaaaattagtaggaaacgtttgtcccggcgatggatagctgaaggttttgctaatgagaagcaagggttaacccaggaaagagttgcagaggcatactttaatcaactcacaagaaggaacttagtacgtcccatggagcatggc

SEQ ID NO: 16160 - DNA, 399 bp, Oryza sativa
  unsure (1)..(399): unsure at all n locations
  Clone ID: PAT_MRT4530_21935C.1
ccancnacacnagagnnnaagacanngaagagcacgaaccagaatagtgttgttcgtatagatgccataggacacgatggtacaactggcatgtattacggtgccatcgaggacatatgggaacttgactatcgacctctcaaggtctctctgttccggtgccaatgggttaggttgactggtggaggcgtaacgattgatggcagcaaaagaaaaatcgtcgaagtagaggacaagactgacgaggattacgatcagtttgatgggcaaccccctttcacggtgacaattgaccctagcatcctcctatcaaatgaagacaccccttactcacctagtgatcacaaggaagaaacaatagtgaggagaaactacgtgtggtcaaccgtcaccgccaat

SEQ ID NO: 16161 - DNA, 273 bp, Oryza sativa
  Clone ID: PAT_MRT4530_21936C.1
aggagacacctggggcgatccatggccgccaccgcgaccgccgttgcggcttctctgtccgtggccggggggctcgggaggcctcttgctctcgtctcgtcaccggcggcgcctatgaaagccgcctccccggcggcggcacggctggccgttttcgtccgggcgtcgtcttcgggggagccggtgaggagggagaaggcctcatctgctgccgcggcggttgtgatagccgatgaggcggccgttgcggtcgcgctggcggtgcctgaggtg

SEQ ID NO: 16162 - DNA, 2107 bp, Oryza sativa
  Clone ID: PAT_MRT4530_21937C.1
atggatcggcaatggatgtacgctgaccggtggtccaaagagtttattgacggcgtgcactattttttgagagtggccgaagctaacaggcaaaggggttttatttgttgtccatgcaataagtgtaagaatcagaaggagtattctgcatcaaggactattcatttccacttgtttgagtcggggttcatgccaagctataatttttggacatcccacggagagcaaggtgttgaaatggaagaagatgaagtggaagacgacaatattccggactttgctcagtacgttggatttgaaggaaatcaaacgggcgaggaggaaagggatgctgatggtaacgacgttgcggatgatcttggtcagatgttgcaggacaccaaggaggactgcgaaagtgaaaagggagcccataaattggacaagatgttagaggaccacagaacttcgttgtacccaggttgcgagcaggggcacaaaaagttggatgccactctggagttcttgcaatggaaggcaaaaaatggggttagtgacaaggcatttggcgatttattgaaactcgtcaagaacattcttccggagggaaataaattgcccgagacaacatacgaggctaagaagatagtctgcccgctaggactggaagttcagaagattcacgcatgtccaaatgattgtatcctatatcgcggtgaggagtatgagaacctagaagcatgccctgtttgcaaggcactacgatacaagattagacgagacgatccaggagaagttgacgggcagctaacaaagaagagaattcctgctaaggtgatgtggtatttccctataataccacggataaggcgtttgttcaggaacaaggggaatgctaggatgatgcgatggcacgctgaagagcgtcaacaggacgtgatgctgagacaccccgccgatggttcgcagtggcgaaacatagacagaaaatttaaagaatttggaaaggacgcacgaaacatacggtttggccccaagcaacctgataacgacatcgatgtgtacctaagaccactggtcgaagatcttaagctgttgtggaagaaggaaggtgtccccgtgtgggacaaggacaaacaggaggagtttaacatacgagcgctgctgttcgtaaccattaacgattggcctgcacttagcaacctatctggacagtccaacaaggggtacaaggcttgcactcactgtatggatgaaacagaaagtacgtatcttaagcactgtaggaaggttgtatacatgggtcatcgtcgattccttgcagcaaaccacccggtacggaagaaagtcaagcacttcgaacataaggctgaccaccgtacgaagcctaaacatcgcaacgggaaaacagtgtttgctatggttaaagatctaaaagtagtgttcggaaaggggcctggaagccagcctatagagagcgaagatggtcacgcggcgatgtggaaaaagaactctatattttgggagttaccctattgggaattcttggacgtacgccacgcaatcgacgtgatgcacctcactaagaacctttgcgtaaaccttcttagcttcctaggtgtatacggaaagtcgaaagatacactggaagcacgtaatgatctgaagcatatggaacaacgcggcgactttcacccagaaccaaaggagaaaggaagccattacttgagtccagccagctacactcttagcaaggcagagaaggaaagtatgtttgaatacttggagagcataaaggtaccgtctggatactccacgaatatcaagcgaataataagcacgaaggagaagaagttcacaaacctaaagtctcatgactgtcacgtgttgatgacacaactgctaccagttgtaataaggggtatccttccagacaatgtctgggcaacaataacaaagctatgtgcattcatgaacgcaatttcgcagaaggtcatcgatccggatagattagaagcccttcagaatgaagtggtgcaatgtctcgtcagttttgagttgatatttccagccttcatttttcaatataatggcgcatctgctttgtcaccttgtgaaaaaaaaaaaa

SEQ ID NO: 16163 - DNA, 3040 bp, Oryza sativa
  Clone ID: PAT_MRT4530_21938C.1
atggaagaaaatgaagtggaagacgacaatattccggactttgctcagtatgttggatttgaaggaaataaaacgggcgaggaggaaatagctgctgatggcaacgacgttgcggatgatcttggtcagatgttgcaggacgccagggaggacagcgaaagtgaaaaggaggcccataaattggacaagatgttggaggaccacagaacttcgttgtacccaggttgcgagcaggggcacaaaagtgacaaggcatttggcgatttattgaaactcgtcaagaacattcttctggggggaaacaaattgcccgagacaacgttcgacgctaagaagatagtctgcccgctaggactggaagttcataagattcacgcatgtccgaatgattgtatcctatatcgcggtgaggagtatgagaacctagaagcatgccctgtttgcaaagcactacgatacaagattagacgagacgatccaggagaagttgacgggcagctaacaaagaagagaattcctgctaaggtgatgtggtatttccctataataccatggctaaggcgtttgttcaggaacaaggggaatgctagaatgatgcgatggcacgctgaagagcgtcaacaggacgggatgctgagacaccccgccgatggttcgcagtggcgaaacatcgatagaaaatttaaatactttggaaaggacgcacgaaacatacggtttggtttgagtacggatggcataaatccttttggagagatgagcagcggccatagcactaggcccgttacgatgtgtatctacaacctccccctagctatgcatgaagaggaagtacataatgatgccgattattattcagggccccaagcaacctggtaacgacatcgatgtgtacctaagaccactggtcgaagattttaaactgttgtggaagaaggaaggtgtccccatgtgggacgaggacaaacaggaggagtttaacctacaagcgctgctgttcgtaaccatcaacgattggcctgcacttagcaacctatccggacagtccaacaaggggtacaaggcttgcactcactgtatgtatgaaacagaaagtacgtatcttaagcactgtaggaaggttgtatacatgggtcatcgtcgattccttgcagcaaactacccggtatgaaagaaaggcaagcactttgaatataaggcggaccatcgtacgaagcctaaacatcgcagcgggaaaacagtgtttgctatggttaaagatcttaaagtagtgtttggaaaggggcctggaagccagcctatagagagcgaagatggtcacgcggcgatatggaaaaagaactctatattttgggagttaccctattgggaattcttggacgtccgccacgcaatcggtgtgatgcacctcactaagaacctttgcgtaaaccttcttggcttcctaggtgtatacggaaagtcgaaagatactctggaagcacgtaatgatctgaagcatatggaacaacgcgtcgaccttcacccggaaccaaaggagaaaggaagccattacttgagtccagccagctacactcttagcaaggcagagaaggaaagtatgtttgaatgcttggagagcataaaggtaccatctggatactccacgaatatcaagcgaataataagcacgaaggagaagaagttcacaaacctaaagtctcatgactgtcacgtattgatgacacaactgctaccagttgtaataaggggtatccttccagacaatgtccgggcaacaataacaaagctatgtgcatacatgaacgcaatttcgcagaaggtcatcgatccggatagattagaagcccttcagaatgatgtggtgcaatgtgtcgtcagttttgagttgatatttccaccttcatttttcaatataatgacgcatctgctttgtcaccttgtcaaagagatcagtattttcgggcctgtgttcctacacaacatgtttcctttcgagaggtacatgggcgttctgaagaagtatgttcgtaaccgtgctcgtccagaggcaagtatcgccaagggttatggaacagaagaagtcatcgaattttgcgttgaatttatcgaagaccttcgcccaatcgaggtacctgaatcacgccatgaagggagactacggggaaagggaactctcggaaggaaagcaataatgacggtagacaacaatttattccgtaaagcccatttcacggttctacaacaatcttcattggtaactccttacatcgaggagcacttggctctagttcgcgccaggaacatcggcaagtccgatgcatggattacacggcatcacattgatactttccccgcgtggctacgacaacatctcatgggtaacgagtcgatcaaccaacaacttgccttcctagcgaggggaccgtctgggtcgatcgcgacattccagggatataagatcaatgggtacacattctacacgagagcccaagacatgaagagcacgaaccaaaacagcgctgttcgtgtcgatgccatgggacacaattgaacaactgacacgtattacggtgccatcgaggacatatgggaacttgactatgatcctctcaaggtccatctgttccggtgccaatgggttaggttgactggtgaaggcgtaatgattaatgacagtgggatgacaacggttgaccttaacaaggttggatactcggacgaaccttttgtccttgccaatgatgtaacgcaagtcttttacgtgaaggacatgtctagcaaaggaaagaagggcagagggcctgatgagcctaagcgtcacgtggttctcccaggcaaaagaaaaatcggcggagttgaggacaagactgatggggattacgatcagttggatggcactacacctttcacgatgacgattgaccctagcatcctcctatcaaatgaagacaccccttactcacgtagcgatcacaaggagggaacaatagtgaggagaaagtacgtgcggtcaaccgtcaccgccgatgtattgccg

SEQ ID NO: 16164 - DNA, 2976 bp, Oryza sativa
  Clone ID: PAT_MRT4530_21939C.1
atggaagaagatgaagtggaagacgacaatattccggacttttctcagtatgttggatttgaaggaaatcaaacgggcgaggaggaaatagctgctgatggtaacgacgttgcggatgatcttggtcagatgttgcaggacgctagggaggactgcgaaagtgaaaaggaggcccataaattggacaagatgttggaggaccacagaacttcgttgtacccaggttgcgagcaggggcacaaaaagttggataccactctggagttcttgcaatggaaggcaaaaaatggagttagtgacaaggcatttggcgatttattgaaactcgtcaagaacattcttccgagggaaacaaattgcccgagacaacgagaagttgacgggcagctctcaaagaagagaattcatgctaaggtgatgtggtatttccctataataccatggctaaggcgtttgttcaggaacaaggggaatgctagaatgttgcgatggcacgctgaagagcgtcaacaggacgggatgctgagacaccccgccgatggttcgcagtggcgaaacatcgacagaaaatttaaagaatttggaaaggacgcacgaaacatacggtttggtttgagtacggatagcatgaatccttttggagagatgagcaacggccatagcacttggcccgttacgatgtgtatctacaacctccccccggctatgcatgaagaggaagtatgtaatgatgccgattattattcaaggcccaagcaacctggtaacgacatcgatgtgtacctaagaccactggtcaaagatcttaaacagttgtggaagaaagaaggtgtccccgtgtgggacgaggacaaacaggaggagtttaacctacgagcgctgctgttcgtaaccatcaacgattggcctgcacttagcaacctatccggacagtccaacaaggggtacaaggcttgcactcactgtatggatgaaacagaaagtacgtatcttaagcactataggaaggttgtatacatgggtcatcgtcgattccttgcagcaaaccacccagtacggaagaaaggcaagcacttcgaacataaggccgaccaccgtacgaagcctaaacatcgcagcgggaaaacaatgtttgatatggttaaagatcttaaagtagtgttcgaaaaggggcctggaagccagcctatagagagcgaatatggtcacgcggcgatgtggaaaaagaactctatattttgggagttaccatattgggaattcttggacgtacgccacgcaatcgacgtgatgcacctcactaagaacctttgcgtaaactttcttggcttcctaggtgtatacggaaagtcgaaagatacactggaagccgactctcgcggtttcacgggcgcgtgtgtcgcagttgcgcaggcatgtaatgatctgaagcatatggaacaacgcggcgaccttcacccagaaccaaaggagaaaggaagccattacttgagtccagccagctacactcttagcaaggcagagaaggaaagtatgtttgaatgcttggagagcataaaggtaccgtctggatactccacgaatatcaagcgaataataagcacgaaggagaagaagttcacaaacctaaagtctcatgactgtcacgtgttgatgacacaactgctaccagttgtaataaggggtatcctttcagacaatgtccgggcaacaataacaaagctatgtgcattcttgaacgcaatttcgcagaaggtcatcgatccggatagattagaagcccttcagaatgaagtggtgcaatgtctcgtcagttttgagttgatatttccaccttcatttttcaatataatgacgcatctgctttgtcaccttgtgaaagagatcagtattctcgagcctgtgtacctacacaacatgtttcctttcgagagatacatgggcgttctgaagaagtatgtttgtaaccgtgctcgtccagaggcaagcatcgccaagggttatggaacagagaaggttatcgaattttacgtagaatttatcgaagaccttcgcccaatcggggtacctgaatcacgccatgaagggagactacggggaaagggaactctcggaaggaaagcaataatgacggtagacaacaatttattccgtaaagcccatttcactgttctgcatcactcttcattggtagctccttacatcgaggagcacttggctctagttcgcgccaggaacatcggtaagtccgatgcatggattacacggcatcacattgatactttccccacgtggctacgaaaacatctcatgggtaacgagtcgatcaaccaacaacttgccttccaggagaggggaccgtctgggtcgatcgcgacattccagggatatgagatcaatgggtacacattctacatgagagcccaagacatgaagagcacgaaccaaaacagcgctgttcgtgtcaatgccatgggacacgatggaacaactgccacgtattacggtgccatcgaggacatatgggaacttgactatggtcctctcaaggttcctctgttccggtgccaatgggttaggttgactggtggaggcgtaatgattgatgacagtgggataacaactgttgaccttaacaaggttggatactcggacgaaccttttgtccttaccaatgatgtaacgcaagtctttttcgtgaaggacatgtctagcaaaggaaagaagggcagagggcctgacgagcctaagcgtcaagtggttctcccaggcaaaagaaaaatcgtcggagttaaggacaagacagacgaggattacgatcaattggatgggcaaccccctttcacggtgacgattgaccctagcatcctcctatcaaatgaagacaccccttactcacgcagcgatcacaaggagggaacaatagtgaggagaaagtacatgcggtcaaccgtcaccgccgatgtaatgccgtaa

SEQ ID NO: 16165 - DNA, 5524 bp, Oryza sativa
  Clone ID: PAT_MRT4530_2193C.1
tggcccttttgtacattgattaccttattccttgataccttgggttattacaatttgatgtaagcgtttggaattttggatagaaattccgggcgtgacattgactcccagtccgacgtagtaatcttggaaatcggcgctgatgaactgggagccgttatccgttatgatgcggtgagccaatccatatctgcaaaatatccccttgatgaatttgatggcgttgtcagccttgatttcccccgtggatgttgcctcgatctatttgttgaatttgtcgattgccacgaataggaatttgtagctgccctgtcctcgtaggaatggaccgagtatgtcgagcccccagcatgagaacggccaagtgagagggatggtttgcagtgcttgcgctggtagctttgtgtgtttgctatgaaattgacaaccttcacaccgttgtaccatgtcgcaagcgtctttgagggcggttggccagaaaaatccttgtcgaaaggcttttccgaccaatgtacgaccgacggcatgtgacccacagacccctttgtgtatgtcgaggaggaggtgtttgccgtcgtcggacgagacgcatttgagaagtaccccatttggcgccttcttgtatagatcgttgccgatcatacagtagatttttgcttgacgggttattttctcggcttctgcatcatcctcgggtaactcgtcgctgccttcgtcgtttgcctctttcactgatggctttgtcaggatgtccagaaaggtgctgggttcgagtggctctcgtctggacgcacgccgtgctagatcgtccgactcgatgttgttcttgtgatatacgtgtcggacctcgatcccatcaaatcttttttccagcttcctgacttctgcgagatacttagacaactcaggctagagcatttgtaatctttgtgcacctggtttgcgactagttcggaatccccttttacgattagtcgcttgaccccaagtgcggctgcagctcttatcccaacgagtagcccttcgtactcggctgtgttgttggtcgccctaaagttaaggtgaattgcatgcttgaactgatctcccgaaggtgatgtcaagatgaaccccgcacttgctccttggctgttgagcacaccatcgaacgccattgtccatgtttcgttgtcggtctgactgtcgagaacctgggacttgatggctgttcgtggtacaaagtggacgtcaaactggcttagctcgactacccatttcgcaatgcggacgacaacgtctttgtttctcacgacttcgccaagagggatggcggagataactatgaccctgttggcttggaagtagtggcgtagctttcttgacgtcatgattaccgtgtagagcagtttttggatctgtgggtaccttgtcttcgcgtcgtggagagcttcgctgacgtaatagactggtctctgcaccttttctctttcaacaacaatgacagtactcacagagtagggcgtggcggcaatatagagaaataactcttcattaggttggggagcaacatgtacagggggatttgacaggtagcgcttgagtgcgatgaacgcctcttcggctgcctgtgtccatacaaatttgtcttgcttttttagcagagcgaagaaatgttgtcctcgttctcccatcctagcgacgaacctacttagtgccgccatgcatctggttagcttctgtacctccttgagtcttgtgggcgacttcatgttctcgattgcattgatcttctcggggtttgcttctattcctctgccagagacgaggaacccgagcagtttgcctaacggtaccccgaacgtgcacttcttaggattgagcatgaggcgatatcgtctgaggttatcgaaggtttcccgtagatcatcaatgaatgagtcacctgtcttggtcttgacaacaatgtcatcgacgtaggcctcaacattgttacccagctgatcgctaagtgccccttggatcgtacgctggaaggtatttcctgcggttatcagtccaaacggcattttaacatagcagaatacaccgaacggcgtgatgaatgttgtcttcttctcgtcctcttttgccatgcaaccagctgttgagtccactagttggtttattcgagggagagggaagtgatccttggggcacgccttgttgaggtcggtgaagttgatgcacatcctctatttcccgttggccttccgcaccatgactgggttagctagccactctggatggagtacctctctgatgaaaccagctttgagaagtttatcgagctcttctcgtatggcttgttttcgatctggtgcaaatctccgcagtttttactttactggcttggcatcgggtcgcaccatgagtttgtgctcaatcacctccctggggacccccggcatgtcggacggtttcttgggtggctcggctgtggcgggtgggctgggcgtgtgctcgaccatgtcgaggctccgcttgtcgcattggaccgccagctttgcgttcccttgaatagtgattgttcccttcggcccgggcatcttgagtacctgatacgcgtagtgagatgcggccatgaacttcgcgagtgcagttcttccgatgatggcgttgtatgctgtgtcaaactcagcaacatcaaatgttatctgctgtgttcgtaagttgctcgcttggcggaaagtcacaggaagcgtgatcttgcccaatggcttggacgaaaactgagtgattccatggaagggttgatcggtaggtgtcaacacgctttgtggaatccccattgcgtccaaggtgctggcgaagagaaggttgatggagctgccgccatcgacgaggactcgcactaccttgttattccgaatagtgggttcaaccacgatcggatatcgtcctgggataacagtagccttggggcggtcctcatctgagaactcgatcttctgttcagaccacttcatcttgggtgcaacccttgaagagtacgctgtggaacctccgaagatgtgcgagacatgaagatcggaatctaggtacgccgagtctgagtcctgagtggttgcctcagtggccttctcgactacacgtactcgcttgcccttctccaaagccagttgcttttccagcgactttttgaagatgaggcactcctccagagaatgtctgtccgacttgtgtatggggcaccatattctcttcgtatcactgccttgtgggtttgggtgtttgggtgggcgctcgtattcagatgcgaggacttccggttgagctttcctcttcctactcttgccgcttttcttcttgcttgatttgggtgcgtccttggctggcttcttctctcctctcgcctttggcttgtcgttcttgcgtctcagtgcgttgtctgcatgggcgcatcgatcgacaacttcgaacaaccttcgagtagttgtgattcgccttgttgccaactcctgggtagtatagcgatctctgacaccagttttgaaagcgcgaatcacagaagtatcggtgatatcggggaccgtatttctacactcattaaagcgccgaacatagtccctcaaagattcacccggattcgtggagtagacctggaggaattcttcagggtcagtgctcccatcgtacttctctattgctccgggtcagaatctcttgggccatcgaacatcacgtagagaacggttgaaagctctacacccggcgctgggggcggtgggttgtcggcgatcgtgtgtcctccgtcgatgtctatcggatgacgaagatgaagatgatgacgatgattcactcggctccggtgtgcgattccgagggcgacgttcaggttctcgagaattctgtcgtcgtccaccattgttgtcctggcgccgatccccattatcatcaccgtcatgttgacggcctcgaccagcatcgtctggtgtccgctgttcgcgattgtcgtggtcgcggcggttgtgacgattatggtggtgttggtcttcgttcgagcggcctcctcgctcttcgttctcgcgatgtcgtgaagaaacacgatgtcgggaacgattctcgttgtctcgcgcgcgtcgtgcttctcggcggccattcagatggtcgcaaagatcgctggtgccgcgaggtggaggggtagctcgtctaggcgacgtccgctgctccggtggttcgccgtcggcaccgtcagttgtcggtcgttctggttgtgctctggttgcggcctcctcgaacgcgttactgagattagctaccgattcccgtagtcgttctgtccatcgtgcgagatcatcgttaagcacggggtcatagggagcttctctcagtattgcgttgacggtgccaaggtgttgggccggtgtgaccgtctggttctccgcctctgcgttagcgtgtgcagacgtgctagtcccatcgatggcaaacacgtcgcgtggtgtactgtcagatgacgagccatagtcttcgagcaagtgtaggactgatggctcgtggggatcgatgtcgattactccaatgaatcgatccgaggtcaacgtcgctccttgttccttgtctgtatccttaagggaggttcctgactgctggaccttaggaagcgtcgttttcatggcgcggagaaagaccttgcagcttaagaagtcgtgattcttcgtcttgtgaataggacaatagacatcacgagttagagaagtacgctggattccatgctccttgcaagcacgaatttcagcttgtacgttgagaaaaacccagcaagcttgcaagttgtacttcctggacttgtggataggacaccagaactttgttacctcggaagttgtccttgtcggctcgcggttcttgtcggaaggacaaggtttggccgcactaggaaccttctcgggctcgtatgacgtcgatgttccgttctccgctacagcgggaggatccttcgacatgggatcggtcattgatggatcagccgagattggtaccgtggtgtaaaccgggaagacgatttcgccgacttgagtccacaacagcattgttgaagtagggactccttgaatggggccggtgttgatgatgttgtcgatgaagcttgatgtcatagtagtagaatcttgagcaccaagtccccctacctggcacgccactgtcgacggtgggtacccgtagaccggatatagagggtattggggtacgctggtacgaggatcgacgagatcgtagtcgagttgattcgactagatcacccatcgacttggctcctgtaggctccggcttcgtaggctgtggtcgttgtgttggctatgagattcgatgccttaggtcttcctggggggtcccttttatatcgcaggtcaggtggtctccaagtaggactcggagacatcggaccctgcacgatatagtgacgacccagtcctatatgggtaggaacctttccattggtggacttcgtgatagatttccttagcgtatagagagaatgtccgtacacgcgcagatgtaccat

SEQ ID NO: 16166 - DNA, 1669 bp, Oryza sativa
  Clone ID: PAT_MRT4530_21940C.1
cccggcggccgcctcccggctccaagctagttctcactcacacatccctctcctccctccgccgccgccgccgccggagctaaggaagacgacgacgcttaggtagataatcgtcggcggccatggctaaggaggcgttcgtgaacgggttcctgagcgtgttcatgcacgtggggctaacgctggtgctgctcgtctacctccccatcgccttcgcctgccgcgccctgggcaggctgctcgtcaggcccttcgtctccggcgaggacctccgcggcaaggtcgtgctcgtcaccggcgcctcctccggcatcggcgagcatctagtgtacgagtacgcgaagaagggggcgtgcgtggcgctgacggcgaggacggagatcgccctgcgcgcggtggcgaagacggcgcgcgacctcggcgcgccggacgtgctcgtcgtgccggcggacatcaccaaggtcgacgacgccaagcgcgccgtcgaggagaccgtcgcccacttcggcaaactgaatcacctggtggccaacgcagggatctggtccagttgcttcttcgaagaaattaccaacataaccgccttccacaacgtgattgatctcaacttctggggcgccgtgtacccgacctacttcgcgttgccgtacctgaaagccagccgtggcaacatcgtcgtcacctcctctgtcgccggcagggtcccgacggccaggatgagcttctacaacgcgagtaagggcgcggtgatcaggttctacgaaaccctaagggctgagctgggctcacatgtccgtgtcaccattctcaccccgggctatgtcgtctccaacctcaccatgggcaaaggcatccagaaggacggccatgtcggcattgacgaggaggctcgcgacatcaatgtggggccgctgccggtggggaagacggagacgctggcgaaggtggtggtggcggcggtgcggcggggcgactactacgtgacatggcccgggtggtactggccgttccacatggtgatgtgcacggcgccggagctcgtcgactggttctcccggaccttctacgtctccaagtccagcgaccacgatggcgacgccctcagcaagaagatcctcgaggccgtcggcggcaagaagttcctctaccccaagaccatccgcagccatgccatcgccgctagctaatatatataatgctcatatatcaacaactgattgatcgatccatccaagctatagttgcaacctacctatatatatataaactttttttgatacatgatgatatcatgatcttttgataatgatgattggtttgttttagcataagaaatacttcagttaaagaggattgggagatgaaatgggtgtgtgggtggatatatagtgtacttgttcttttactaccccttttttttttgcatttgggcttttttttagtttctttttttcttttttctctttaaaaaatcaatgtaagcaatgtgatgtgaatctattcggatatatatgtctactagtggccggtggtatggcgctctgttctaaaacagggcatgaatgcaattgatgttcgagcacctgagttgaaacatttattgcactcaaatacccagtgccagatatttaactatttgccactcttataaaaaaaaaaaaaaaaaaaa

SEQ ID NO: 16167 - DNA, 2763 bp, Oryza sativa
  Clone ID: PAT_MRT4530_21941C.1
atgaagtggaagacgacaatattccggactttgctcagtacgttagatttgaaggaaatcaaacgggcgaggaggaaagggatgctgatggataccaaggaggactgcgaaagtgcaaagggggcccataaattggacaagatgttagaggaccacagaacttcgttgtacccaggttgcgagcaggggcacaaaaagttggataccactctggagttcttgcaatggaaggcaaaaaatggggttagtgacaaggcatttggcgatttattgaaactcgtcaagaacattcttccgaagggaaacaaattgcccgagacaacgtacaaggctaagaagatagtctgcccgctaggactggaagttcagaagattcacgcatgtccgaatgattgtatcctatattgcggtgaggagtatgagaacctagaagcatgccctgtttgcaaagcactacgatacaagattagacgagacgatccaggagaagttgacgggcagctaacaatgaagagaattcctgctaaggtgatatggtatttccctataataccacggctaaggcgtttgttcaggaacaaggggaatgctagaatgatgcgatggcacgctgaagagcgtcaacaggacgggatgctaagacatcccgccgatggttcgcagtggcgaaacatcgacagaaaatttaaagaaaatttggaaaggacgcacgaaacatacggtttgaggaagtacataatgatgccgattaatattcaaggccccaagcaacctggtaacgacatcgatgtgtacctaagaccactagtcgaagatcttaagctgttgtggaagaaggatggtgtcctcgtgtgggacgaggacaaacaggaggagtttaacatacgagcgctgctgttcgtaaccatcaatgattggcctgcacttagcaacctatccggacagtccaacaaggggtacaaggcttgcactcactgtatggatgaaacagaaagtacgtatcttaagcactgtaggaaggttgtatacatgggtcatcgtcgattccttgcagcaaaccacccggtacggaagaaaggcaagcactttgaacataaggctgaccaccgtacgaagcctaaacatcgcagcgggaaaacagtgtttgctatggttaaagatcttaaagtagtgttcggaaaggggcctggaagccagcctatagagagcgaagatggtcacgcggtgatgtggaaaaagaactctatattttgggagttaccctattggaaattcttggacgtacaccacgcaatcgacgtgatgcacctcactaagaacctttgcgtaaaccttcttggcttcctaggtgtatacggaaagtctaaagatacactggaagcacgtaatgatctgaagcatatggaacaacgcggcgacctttacccggaaccaaaggagaaaggaagccattacttgagtccagccagctacactcttagcaaggcagagaaggaaagtatgtttgaatgcttggagagcataaaggtaccgtctggatactccacgaatatcaagcgaataataagcacgaaggagaagaagttcacaaacctaaagtctcatgactgtcatgtgttgatgacacaactgctaccagttgtaataagtggtatccttccagacaatgtccgggcaacaataacaaagctatgtgcattcatgaacgcaatttcgcagaaggtcatcaatccagatagattagaagcccttcagaatgatgtggtgcaatgtcttgtcagttttgagttgatatttccaccttcatttttcaatataatgacgcatctactttgtcaccttatgaaagagattagtattctcgggcctgtgtacctacacaacatgtttcctttcgagaggtacatgggcgttctgaagaagtatgttcgtaaccgtgctcgtccagagacaagcatcgccaagggttatggaacagaggaggtcatcgaattttgcgtagaatttatcgaagatcttcgcccaatcggggtacccgaatcacgccatgaagggagactacggggaaagggaactctcggaaggaaagcaataatgacggtaaacaacaatttattccgtaaagaccatttcacggttctgcaacaatcttcattggtagctccttacatcgaggagcacatggctctagttcgcgccaggaacatcgctcaagacatgaagagcatgaaccaaaacagcgttgttcgtgacgatgccatgggacacgatggaacaactagcacgtattacggtgccatcgaggacatatgggaacttgactatggtcctctcaaggtccctctgttccggtgccaatgggttaggttgactggtggaggcgtaatgattgatgacagtgggatgacaacggttgaccttaacaaggttggatactcggatgaaccttttgtccttgccaatgatgtaacgaaagtctttttcgtgaaggatatgtctagcaaaggaaagaagagcagagggcctgacgagcctaagcgtcacgtggttctcccaggcaaaagaaaaatcgtcggagttgaggacaagactgacgaggattacgatcagttggatgggcaaccccctttcacggtgacgattgaccctagcatcctcctatcaaatgaagacaccccttactcatgtagcgatcacaaggagggaacaatagtgaggagaaagtacgtgcggtcaaccgtcaccgccgatgtattgccgtaa

SEQ ID NO: 16168 - DNA, 3329 bp, Oryza sativa
  Clone ID: PAT_MRT4530_21942C.1
atggatcggcaatggatgtacgctgaccggcggtccaaagagtttattgacggcgtgcattattttttgagagtggccgaagctaacaggcaaaagggttttatttgttgtccatgcaataagtgtaagaatcagaaggagtattctgcatccaggactattcatttctacttgtttgagtcggagttcatgccaagctataattgttggacatcccacggagagcaaggtgttgaaatagaagaagatgaagtggaagacgacaatattccggactttgctcagtatgttggatttgaaggaaatcaaacgggcgaggaggaaagggatgctgatggtaacgacgttgcggatgatcttggtcagatgttgcaggacgccaaagaggagtgcgaaagtgaaaagggggcccataaattggataagatgttagaggaccacagaacgtcgttgtacccaggttgcgagcaggggcacaaaaagttggatatcactctggagttcttgcaatggaaggcaaaaaatggggttagtgacaaggcatttggcgatttattgaaactcatcaagaacattcttccgaagggaaacaaattgccggagacaatgtacgaggctaagaagatagtctgccctctaggactggaagttcagaagattcacgcatgtccgaatgattgtatcctatatcgcggtgaggagtaggagaacctagaagcatgccctatttgcaaagcactacgatacaagattagacgagacgatccaggagaagttgacgggcagctaacaaagaagagaattcctgctaaggtgatgtggtatttccctataataccacggctaaggcgtttattcaggaacaagagaaatgctagaatgatgcgatggcacgctgaagagcgtcaacaggacgggatgttgagacaccccgccgatggttcgcagtggcgaaacattgacagaaaatttaaagactttggaaaggacgcacgaaacatacagtttagtttgagtacggatgtcataaatccttttagagagatgagcagcggccatagcacttggcccgttacgatgtgtatctacaacctcccccctggctatgcatgaagaggaagtacataatgatgccgattattattcaaggccccaagcaacctggtaacgacatcgatgtgtacctaagaccactggtcgaagatcttaaactgttgtggaagaaggaaggtgtccccgtgtgtgacaaggacaaacaggaggagtttaacctacgagcgctgctgttcgtaaccatcaacgattggcctgcacttagcaacctatccggatagtccaacaaggggtacaagggttgcactcactgtatggatgaaacagaaagtacgtatcttaagcactgtaggaaggttgtatatatgggtcatcgtcgattccttgcagcaaaccacccggtgtggaagaaaggcaagcacttcgaacataaggctgaccaccgtacaaagcctaaacatcgcagcgggaaaacagtgtttgctatggttaaagatcttaaagtagtgttcggaaaggggcctggaagccagcctatagagagcgaagatggtcatgcggcgatgtggaaaaagaactctatattttgggagttaccctattgggaattcttggacgtccgccacgcaatcgacgtgatgcacctcactaagaacctttgcgtaaaccttcttggcttcctaggtgtatacggaaagtcgaaagatacactggaagcacgtaatgatctgaagcatatggaacaacgcggcgaccttcacccggaaccaaaggagaaaggaagccattacttgagtccagctagctacactcttagcaaggcagagaaggaaagtatatttgaatgcttggagagcataaaggtaccgtctggatactccacgaatatcaagcgaataataagcacgaaggagaagaagttcacaaacctaaagtctcataactgtcacgtgttgatgacacaactgctaccagttgtaataaggggtatccatccagacaatgtctgggcaacaattacaaagctatgtgcattcatgaacgcaattttgtagaaggtcatcgatccggatagattagaagcccttcagaatgatgtggtgtaatgtctcgtcagttttgagttgatatttccaccttcatttttcaatataatgacgcatctgctttgtcaccttgtcaaagagatcagtattctcgggcctatgtacctacacaacatgtttcctttcgagaggtacatgggcgttctgaagaagtatgttcgtaaccatgctcgtccagaggcaagcatcgccaagggttatggaacagaggaggtcattgaattttgcgtagaatttattgaagaccttcgcccaatcggggtacctgaatcacgccatgaagggagactacggggaaagggaactctcggaaggaaagcaataatgacggtacacaacaatttattccgtaaagcccatttcacggttctgcaacaatcttcattggtagctccttacatcgaggagcacttggctctagttcgcgccaggaacatcggtaagtccgatgcatggattacacggcatcacattgatactttcccagcgtgggtacgacaacatctcatgggtaacgagtcgatcaaccaacaacttgccttattggcgaggggaccgtctgggtcgatcgcgacattccagggatatgagatcaatgggtacacattctacacgagagcccaagacatgaagagcacgaaccaaaacagtgctgttcgtgtcgatgccatggcacacgatagaacaactggcacgtattacggtgccatcgaggacatatgggaacttgactatggtcctctcaaggtccctctgttccggtgccaatgggttaggttgacaagtggaggcgtaatgattgatgacagtgggatgacaacggttgaccttaacaaggttggatactcggacgaatcttttgtccttgccaatgatgtaacgcaagtcttttacgtgaaggacatgtcgagcaaaggaaagaagggcagagggcctgacgagcctaagcgtcacgtggttctcccaggcaaaagaaaaatcgtcggggttgaggacaagactgatgaggattacgatcagttggatgggcaaccccctttcatggtgacgattgaccctagcatcctcctatcaaatgaagacaccccttactcacgtagcgatcacaaggagggaacaatagtgaggagaaagtatgtgcggtcaaccgtcaccgccgatgtattgccg

SEQ ID NO: 16169 - DNA, 282 bp, Oryza sativa
  Clone ID: PAT_MRT4530_21943C.1
cgtatgctgccggcggtcggctggtaggctcttgtggagcggccctcctttttttttttttttgacaaattaaataaacccatgggggagacaagagcggagcgcgctaagattcattcattcattcagttggacaaagcaaacgagacgagctttattgtcgggatcaaaaacacagactgggcaaccacacatttaacacaaggtagatagttctacacaaagctaacgatgataacgatcggatggggatgaccgcagatggattagatggatagataa

SEQ ID NO: 16170 - DNA, 2643 bp, Oryza sativa
  Clone ID: PAT_MRT4530_21944C.1
atgaaaacatcagaccgagcagccccggatgacacctatccaaaccatatggatcggcaatggatgtacactgaccggcggtccaaagagtttattgacggcatgcactattttttgagagtggccgaagctaacaggcaaaggggttttatttgttgtccatgcaataagtgtaagaatcagaaggagtattctgcatccaggactattcatttccactttattgagtcggggttcatgccaagctataattgttggacatcccacggagagcaaggtgttaaaatggaagaagatgaagtggaagacgacaatattccggactttgctcagtatgttggatttgaagaaaatcaaacgggtgaggaggaaatagctgctgatggtaacgacgttgcggatgatcttggtcagatgttgcaggacgccagggaggactgcgaaagtgaaaaggaggcccataaattggacaagatgttggaggaccacagaacttcgttgtacccaggttgcgagcaggggcacaaaaagttggataccactctggagttcttgcaatggaaggcaaaaaatagggttagtgacaaggcatttggcgatttattgaaactcgtcaagaacattcttccggggggaaacaaattgcccgagacaacgtacgaggctaagaagatagtctgcccgttaggactggaagttcataagattcacgcatgtccgatcgattgtatcctatatcgcggtgaggagtatgagaacctagaagcatgccctgtatgcaaagcactacgatacaagattagacgagatgatccaggagaagttgacgggcagctaacaaagaagagaattcctgctaagaggaagtacataataatgccgattattattcaaggccccaagcaacctggtaacgacatcgatatgtacctaagaccactggtcgaagatcttaaacagttgtggaagaaagaagcaaactacctggtacggaagaaaggcaagcacttcgaacataaggccgaccaccgtacaaagcctaaacatcgcagcgggaaaacagtgtttgctatggttaaagatcttaaagtagtgttcggaaaggggcctggaagccagcctatagagagcgaagatggtcacgcggcgatgtggaaaaagaactctatattttgggagttaccatattgggaattcttggacgtacgccacgcaatagacgtgatgcacctcactaagaacctttgcgtaaaccttcttggcttcctaggtgtatacggaaagttgaaagatacactggaagcacgtaatgatctgaagcatatggaacaacgcggcgaccttcacccggaaccaaagaagaaaggaagccattacttgagtccagccagctacactcttagcaaggcagagaaggaaattataataaggggtatccttccagacaatgtccgggcaacaataacaaagctatgtgcattcatgaacgcaatttcgcagaaggtcatcgatccggatagattagaagcccttcagaatgaagtggtgcaatgtctcgtcagttttgagttgatatttccaccttcatttttcaatataatgacgcatctgctttgtcaccttgtgaaagagatccgtattctcgggcctgtgtacctacacaacatgtttcctttcaagaggtacatgggcgttctgaagaagtatgttcataaccgtgctcgtccagaggcaagcatcgccaagggttatggaacagaggaggtcatcgaattttacgtagaatttatcgaagaccttcacccaattgggatacctgaatcacgccatgaagggagactacggggaaagggaactctcggaaggaaagcaataatgacggtagacaacaatttattccgtaaagcccatttcactattctgcaacactcttcattggtagcttcttacatcgaggagcacttggctctagttcgcgccaggaacatcgtcgatcaaccaacaacttgccttcctggcgaggggaccgtctgggtcgatcgcgacattcagggatatgagatcaatgggtacacattctacacgagagcccaagacatgaagagcacgaaccaaaacagcgctgttcgtgtcgatgccatgggacacgatggaacaactgccacgtattacggtgccatcgaggatatatgggaacttgagtatggtcctctcaaggttcctctggtccggtgccaattggttaggttgactggtggaggcgtaatgatggatgatagtggtatgacaactgttgaccttaacaaggttggatactcgggcgaaccttttgtccttgccaatgatgtaacgcaagtctttttcgtgaaggacatgtctagcaaaggaaagaagggcagagggcctgacgagcctaagcgtcaagtggttctcccaggcaaaagaaaaatcgtcggagttaaggacaagactgacgaggattacgatcagttggatgggcaaccccctttcacggtgacgattgaccctagcatgctcctatcaaatgaagacaccccttactcacgcagcgatcacaaggagggaacaatagtgaggagaaagtacgtgcggtcaaccgtcaccgccgatgtaatgccgtaa

SEQ ID NO: 16171 - DNA, 352 bp, Oryza sativa
  Clone ID: PAT_MRT4530_21945C.1
cacgctcgccactctcctcgccgccgccgacgccgccgccttcgacgcggactccgccgctgcccgacccgtctgcagagatggacgcgctgtccgcgcagtcggcgtgggcgctggcgctggccggggtgggcctcatggtggccgcgaccgactaggcgcgcctcgagcggtggctctacgcggcgttcctccgcccgggaagccctgcgccgcggtacgggagtggcggtcgtacggcgccacgacgcatcgcggcgctcggtcgtcgcgcgccgatgagctggctgggcgagccacagtggcggtcggagaaggaagacagcggcgacttgtatccgcagctcgcagg

SEQ ID NO: 16172 - DNA, 396 bp, Oryza sativa
  Clone ID: PAT_MRT4530_21946C.1
accgtataacttaaccttatcgcaatctgggctataaattcctcccgtcccggaccaatatgaccagagccgcccggaatcttccggaatggtcattcctaaaaagaagaccattggattttcccgaaaggtccatcttaataaggagacctttggtgggaacggaccttcccaatacatttattccaaatttgggtttcctaaaaacccaaaggctgaatcctccaagttaagttaggcttatggttttgtaacatgcccatcgatctttttccagggaaaataaactaaacccccccttttttccccattggtctaaaggacaggctcttttttcatgtaaaggtacaaaaagggaaaattgggggggaacaaataaacccaggccctcccccc

SEQ ID NO: 16173 - DNA, 1451 bp, Oryza sativa
  Clone ID: PAT_MRT4530_21947C.1
gtcgactctagaggatcccctataataccacgtctaaggcatttgttcaggaacaaggggaatgctagaatgatgcgatggcacactgaagagcgtcaacaggacgggatgctgagacacctcgccgatggttcgcagtggcgaaacatcgacagaaaatttaaagactttggaaaggacgcacgaaacatacggtttggtttgagtacgaatggcatgaatccttttagagagatgagcagcggccatagcacttggcccattacgatgtgtatctacaacctcctcccttggctatgcatgaagaggaagtacataatgatgccgattattattcaaggccccaagcaacctagtaacgacatcgatgtgtacctaagaccgctggtcgaagatcttaaactgttgtggaagaaggaagcaaaccacccggtacggaagaaaggcaagcacattgaacataaggcggaccaccgtacgaagcctaaacatcgcagcgggaaaacagtgtttgctgtggttaaagatcttaaagtagtgttcggaaaggggcctggaagccagcctatagagagcgaagatggtcacgcggcgatgtggaaaaagaactctatattttgggagttaccctatagggaattcttggacgtccgccacgcaatcgatgtgatgcacctcactaagaacctttgcgtaaaccttcttggcttcctaggtgtatatggaaagtcaaaagatacactggaagcacgtaatgatctgaagcgtatggaacaacgcggcgaccttcacccggaaccaaaggagaaaggaagccattacttgagtccagccagctacactcttagcaaggcagagaaggaaagtatgtttgaatgcttggagagcataaatgtaccgtctggatactccacgaatatcaatcgaataataagcacgaaggagaagaagttcacaaacctaaagtcttatgactgtcacgtgttgatgacacaactgctaccagttgtaataaggggtatcctttccagacaatgttcgggcaacaataacaaagctatgtgcattcatgaacgcaatttcgcagaagagatcagtattctcgggcctgtgtacctacacaacatgttttctttcgagaggtacatgggcgttctgaagaagtatgttcgtaaccatgctcgtccagaggcaagcattgccaaggggtatggaacagaggaggtcatcgaatttcgcgtagaatttattgaagaccttcgcccaatcggggtacctgaatcacgccatgaagggagactacggggaaagggaactcttggaaggaaagcaataatgacgatagacaacaatttattccgtaaagcccatttcacgtttctgcaacaatcttcattggtagctccttacatcaaggagcacttggctctagttcacgccagaaaacattg

SEQ ID NO: 16174 - DNA, 911 bp, Oryza sativa
  Clone ID: PAT_MRT4530_21948C.1
ccggccgcgacgacccacctgtccatcccgcacccatctagaaacgcgtccacgcagatcggagagaccgaggctgcttcttcctcttcttcttcttcccccagccgcgtcgtcgagaaggttctagagggttcgagagagggtgggagggaccgcgaaagcgacggacgatggcgctgcagtggatgatcctggcgtgcgtggtggcggcggaggcggcggtggccgtgatgctcacgctcccggcgccccgcgccgtgcggaagcagatcgtcgggctcacctcgatgctcctccagccattcgccgggatactccccttcgcggccttccagctcctcgatatctactggaagaacgagcacaggttgatgtgcacctccgagatttgcaccgctgacgagcgtatccgctttgagaaatccatcttcaaggcccagaggaatgtcattctttgtgtttcagcatgcctcctttactggtgcattttccgtatttgcaagtacaacaaggatattaaggcattggaggagactgagaaacgcctcaaggaagagtagattaatcacacttacaggtggattttgtgctattcctgtccttcagatgtatgcagatagttatgtgggattcccagtgtatattgttcgccttgaggcaaagaaaatgttacgctgtttcggcacatgattttcagtacgatttctcgtttaattgtaagtcgtccggattctctttttttgtgttttaacttgggatgatgtcagtacgatttctcgtttaattgtaagtcgtccggattctctttttttttgtgttttaacttgggatgatgtctaccaagaatacatgagaaccactgaaccctggtcatccttcaattcaaccgtttgaacaaaaaaaaaaaaaaa

SEQ ID NO: 16175 - DNA, 3150 bp, Oryza sativa
  Clone ID: PAT_MRT4530_21949C.1
atggagttcggattccccgccaattccaagatggatcggcaatggatgtacgctaaccggcggtccaaagagtttattgacggcgtgcactattttttgagagtggccgaagctaacaggcaaaggggttttatttgttgtccatgcaataagtgtaagaatcagaaggagtattctgcatccaggactattcatttccacttgtttgagtcggggttcatgccaagctataattgttggacatcccacggagagcaaggtgttgaaatggaagaagatgaagtggaagacgacaatattccggactttgctcagtatgttggatttgaaggaaatcaaacgggcgaggaggaaatagctgctgatggtaacgacgttgcggatgatcttggtcagatgttgcaggacgccagggaggactgcgaaagtgaaaaggaggcccataaattggacaagatgttggaggaccacagaacttcgttgtacccaggttgcgagcaggggcacaaaaagttggataccactctagagttgttgcaatggaaggcaaaaaatggggttagtgacaaggcatttggcgatttattgaaactcgtcaagaacattcttccgggggaaacaaattgcccgagacaacgattggaagttcataagattcacgcatgtccgaacgattgtatcctatatcgcggtgaggagtatgagaacctagaagcatgccctgtttgcaaagcactacgatacaagattagacgggacgatccaggagaagttgacgggcagctaacaaagaagagaattcctgctaaggtgatgtggtatttccctataataccacggctaaggcgtttgttcaggaacaaggggaatgctagaatgttgcgatggcacgctgaagagcgtcaacaggacgggatgctgagacaccccgccgatggttcgcagtggcgaaacatcgacagaaaatttaaagaatttggaaaggacgcacgaaacatacggtttggtttgagtacggatggcatgaatccttttggagagatgagcagcggccatagcacttggcccgttacgatgtgtatctacaacctccccccctggctatgcatgaagaggaagtacataatgatgccgattattattcaaggccccaagcaacctggtaacgacatcgacgtgtacctaagaccactggtcgaagatcttaaacagttgtggaagaaggaaggtgtccccgtgtgggacgaggacaaacaggagaagtttaacctacgagcgctgctgttcgtaaccatcaacgattggcctgcacttagcaacctatccggacagtccaacaaggggtacaaggcttgcactcactgtatggatgaaacaaaaagtacgtatcttaagcactgtaggaaagttgtatacatgggtcatcgtcgattccttgcagcaaaccacccggtacggaagaaaggcaagcacttcgaacgtaaggccgaccaccgtacgaagcctaaacatcacagcgggaaaacagtgtttgctatggttaaagatcttaaagtagtgttcggaaaggggcctggaagccagcatatagagagcgaagatggtcacgcggcgatgtggaaaaagaactctatattttgggagttaccatattgggaattcttggacgtacgccacgcaatcgacgtgatgcacctcactaagaacctttgcgtaaaccttcttggcttcctaggtgtatacggaaagtcgaaagatacactggaagcacgtaatgatctgaagcatatggaacaacgcggcgaccttcacccggaaccaaaggagaaaggaagccattactcgagtccagccagctacactcttagcaaggcagagaaggaaagtatgtttgaatgcttggagagcataaaggtaccgtctggatactccacgaatatcaagcgaataataagcacgaaggagaagaagttcacaaacctaaagtctcatgactgtcacgtgttgatgacacaactgctaccagttgtaataaggggtatccttccagacaatgtccgggcaacaataacaaagctatgtgcattcatgaacgcaatttcgcagaaggtcatcgatccggatagattagaagcccttcagaatgaagtggtgcaatgtctcgtcagttttaagttgatatttccaccttcatttttcaatataatgacgcatctgctttgtcaccttgtgaaagagatccgtattctcgggcctatgtacctacacaacatgtttcctttcgagaggtacatgggcgttctgaagaagtatgttcgtaaccgtgcttgtccagaggcaagcatcgccaagggttatggaacagaggaggtcatcgaattttgcgtagaatttatcgaagaccttcgcccaatcggggtacctgaatcacgccatgaagggagactacgggaaaagggaactctcggaaggaaagcaataatgacagtagacaacaatttattccgtaaagcccatttcactgttctgaaacactcttcattggtagctccttacatcgaggagcacttggctctagttcacgccagaaacatcgcccaagacatgaagagcacgaaccaaaacagcgttgttcgtatcgatgcaatgggacacgatggaacaactggcacgtattacggtgccatcgaggacatatgggaacttgactatggtcctctcaaggtccctctgttccggtgccaatgggttaggttgactggtggaggcgtaatgattgatgatagtgggatgacaacggttgaccttaacaaggttggatactcggacgaaccttttgtccttgccaataatgtaacgcaagtcttttacgtgaaggaaatgtctagcaaaggaaagaagggcagagggcctgacgagccgaagcgtcatgtggttctctcaggcaaaagaaaaatcgtcggagttgaggacaagactgacgaggattacgatcagtttgatgggcaaccccctttcatggtaacgattgaccctagcatcctcctatcaaatgaagacaccccttactcacgtagcgatcacaaggagggaacaatagtgaggagaaagtacgtgcggtcaaccgtcaccgctgatgtattgtcgtaa

SEQ ID NO: 16176 - DNA, 243 bp, Oryza sativa
  Clone ID: PAT_MRT4530_2194C.1
ggcacgagccgcactcaaagacttaaatgtctctctggatgacgactggacaatacaacaggtactacagatagagcgttgggactcaggccactcataatagtagctgttatcacagctggtgctaatgactcaatcacaatgcatagcggtgatgtaaatggtaggctacctgactatcctcaaggttgaaatccatcttgacaagaccaggccgagaagtatctccggggtattaagact

SEQ ID NO: 16177 - DNA, 2799 bp, Oryza sativa
  Clone ID: PAT_MRT4530_21950C.1
atggcggtggccatcttctacctcctccacaaaaagaacgagatccatggttatacggccttcaccatctacgtcgtcctcacgtactgcttcctcgacttcctcatgccgtgtgttgccgcggtgggcgccgcgcttggcatggagctggagccgcagttcgacaggccgtacctctctgcctcgctgctggacttctcgggaaggcggtggaaccttatggcgtcggcgatgctccgcccggcggtgtacgaccgtgttagggcccgcctcggtgcaccgggcggcgtgctctccacgttcctcgtgtctgggctgatgcacgaggtgatcgcgtactacatctccttccgcgcgcccaccgggcagatggatcggcaatggatgtacgctgaccggcggtccaaagagtttatcgagggcgtgcattatcttttgagagtggccgaagctaacaagcgtaacggttttatttgttgtccatgcaataagtgtaagaaccagaaggagtattctgcatccaggattattcatttccacttgtttgagtcggggttcatgccaagctataattgttggacatcccacggtgaggaaggggttgaaatggaagaagatgaagcggaggacgagaacattcccgactgggctcagtacgctggatttgaaggaaatcaaacgggcgaggtggacagggatgctggcgataacgacactgcagatgatcttggtcagatgttgcaggacgcaaaggaggactgtgaaagtgaaaaggaggcccataaattagagcggatgttagaggaccacagaacatcattgtccccaggttgcgagcgggggcacaaaaagttggataccactctggagttcttgcaatggaaggcaaaaaatggtgttagtgacaaggcatttcgcgatttattgaaactcatcaagaacattcttccggagggaaacaaattgcccgagacaacgtacgaggctaagaagatagtctgccctctaggattggaagttcagaagattcacgcatgtccgaatgattgtatcctatatcacggtgaggagtacgagaacctagaagcatgccctgtttgtaaagcactacgatacaagattagacgagaggatccaggtgaagttgacgggcagccaacaaagaagagaattcctgctaaggaaggtgtccccgagtgggacgaagataagcaggaggagtttaacctacgagcgctgctgttcgtaaccatcaacgattggcctgcatttagcaacctttccgggcagtccaacaaggggtacaaggcttgcactcactgtatggatgaaacagaaagtacgtatcttaagcactacaggaaggaattcttggacgtctgccatgcaatcgacgtgatgcacctcactaagaacctttgcgtaaaccttcttggtttcctaggtgtatatggaaagtcgaaagatacactagaagcacgtaatgatctgaagcatatggaacaacgcagcgaccttcacccggaaccaaaggagaaaggaagccattacttgagtccagccagctatactcttagcaaggcagagaaggaaagtatgtttgaatgcttggagagcatagaggtaccgtctggatactccacgaatataaagcgaataataagcacgaaggagaagaagttcacaaacctaaagtctcctgactgtcacgtgttgatgacacaactgctaccagttgtaataaggggtatccttccagacaatgtccgggcaacaataacaaagctatgtgctttcatgaaagcaaatttgcagaaggtcatcgatccggatagattagaagcccttcagaatgatgtggtgcaatgtcttgtcagttttgagttgatatttccaccttcatttttcaatataatgacgcatctgctttgtcaccttgtcaaagagatcggtattctcgggcctgtgtacctacataacatgtttcctttcgagaggtacataggcgttctgaagaaatatgttcgtaaccgtgctcgtccagaggcaagcatcgccaaggggtatggaacagaggaggtcatcgaactctgcgtagaatttattgaagaccttcgcccaatcggggtacctgaatcatgccatgaagggagactacggggaaaggtggttctcggaaggaaagcaagaatgacggtagacaacaatttattccgtaaagcccatttcacggttctgcaacaatcttcattggtggctccttacatcgaggagcacttggctctagttcgcgccagaaacatcgccaaagacatgaagagcacgaaccaaaacagcgttgttcgtatcgatgccatgggacacgatggaacaactggcacgtattacggtgccatcgaggacatatgggaagttgactatggtccactcaaggaacaaactgactggcacactcgcatctcatcaagatttggacctgcacaggagctaagcagatctcccaggccaacccgcaagggagcacttgttcagaagtataaaataaaggtggttcctgatgaccccgggactagttcttccaaggatgacgaagggaaacaagctccagatggctcggctcaaccgagtgacaaaggttctacagatggttttccagcaaatcaaggtgacaacttgcaaggagtgcacggggttcaaggcgatggttctcaaggtgttcaaggtgatggtgttcaaggtggaggtgttaatcaagacggcaatgcagcacagttgcagttcaacaactttcaagattag

SEQ ID NO: 16178 - DNA, 380 bp, Oryza sativa
  Clone ID: PAT_MRT4530_21951C.1
cacaagcaagccacgccgtactacttcatgccatcacctcgagctgcgacgtcatcgccgccacgtccttcccgcgcggccgccgccaccgatgccgcccgtcgtcgagcgccgccttcccaccgtttcggagctcggtgccacgccatgagtccgcctctgtctcctcatgccagtgctgccactcgcagatgccgccgagcgttgtctccgccgaatgccgccgcgccggagcgcacccacgacgcgatggagcgctgccttcaccagagagttcatcaccactggcggcatctagaagccgagcagccgcggccatgacattagaaaggggaaataaggaggaacaagagaatatgacaacaaataaccacgtttag

SEQ ID NO: 16179 - DNA, 365 bp, Oryza sativa
  Clone ID: PAT_MRT4530_21952C.1
ttttgggggttttttttttttttttgttttttttttttttttttttttttttttttttttttaacacatgaaccgaaacactttgggaacagaaagcacaagagtttagttgcagtttcagggttaacaagagaacataagcaagggttgcgtttccatctgaagggaatgcaattctacaggggttaaatagtagcaccaaaatacttaattgtctaggacttgactgtgagggccaacagctaattaaaaacttttgaggggacatttatggcaaacaggagactgatcaaaacaaacgggggaatacttttgagacaggaccatgctcatttcattttgcaaaaaaaacaggtaggttgcca

SEQ ID NO: 16180 - DNA, 144 bp, Oryza sativa
  Clone ID: PAT_MRT4530_21953C.1
atggccggcgtgccactggccactattgcagtcctggacgatttgtctatgcggatatatgagttgcagcgcaggaaggggcagggcagtcagtgggtggggccaccgatggagcgtggaaactgcgtgcgcgtcgtagcgtaa

SEQ ID NO: 16181 - DNA, 327 bp, Oryza sativa
  Clone ID: PAT_MRT4530_21954C.1
atggcaaagagcgtgacgtcaggcgggcgtcaccgtggcgtcaccggggccgcgtccctctcaaccgcggcgcgtccttttccggctttgggcgacgggacgagacgacgacgagaggggagagaatcgcatcgcgaagcagcgggggctgcacgattcgtcgtcgtcgctttcctcttcatcctctcctcgccgtgtgcgcggtgcggcctcgttcgcgtcggcgtcggcgtcggaggcggagacggaggcgaaattgcaaggaaaacgacgacgggcgtcggggacgggaaggagcggagggaggcgtacgtggatgtgaactga

SEQ ID NO: 16182 - DNA, 270 bp, Oryza sativa
  unsure (1)..(270): unsure at all n locations
  Clone ID: PAT_MRT4530_21955C.1
gttttcctttaatcggaagccgccgaaccctcnctgctgggggacgcttagcggccagccggccaccttccactgcctagagctcctctccttctccgggttggtgtggcgtggagatccatcctggccgacctctttcgctagtttatgaaatttacttacaaaaacaagataaaagtggagtactcgaatatcttccccttgcgccatctagcggttgaacaggggaggggcgccaatctccatcttgcgagcaggggaggggagggg

SEQ ID NO: 16183 - DNA, 2750 bp, Oryza sativa
  unsure (1)..(2750): unsure at all n locations
  Clone ID: PAT_MRT4530_21956C.1
ggagggagggagcgcgcgcgcgttgttgtcttgcgtcgtcgtcgttgnggttgtcgttcgtgtttgggggggagcatagttcattggggccttgcaagatgattgaggggaggaggcactccgttgacatcccgatttcgagggctctactggccgtcatgaggtccagatctctgagggaccctgagaccaactcgctggccaagttctcggcgaagaagaccatctgggagggttgttctctcgaggaagatgacctggaggggagcaattatggtaggcacagctttagttacaacatgtatgatcatctccagaggaggagggaggagtttggggacagcgcgaggtctggtcggctggtgaactcgccgatcaacatcatcaaggccaatgcgagggtcaaggcggcgcttcataaccagacctgctcctcggtgatctcggggatgtcaagggcaacaaaggacagggcatcctctttgatgattgaaggagagcaattgggtcggagggagggagctacatttcaagaaagcgcgagaagtttgcttcaaaagtaccggcccaaggctttctctgagctggctggacaaaatgttgttgctcagtctctttcaagtgctgttttgaaaggaaaacttgctccaatctatctcttccatggtccacatggcataggaaagacatctgcagctagaatatttgccgcatcactgaattgccactcttcaggtgggaaccagccttgtgggcactgtgaggaatgcatggccatattctcaggaaacagtagcagtgtgatagagattgatgcttctaaactggattgcaaatctagagttgctgccttgctgaggaatgcctgtgaagttcctgcttcttcgcacttcaaggttcttattgtggatgattgccaacacatggataaggagggatggtactctgtctacagtagccttgaaggcatccctgacagctcaatctttgtgatgatcacatctgacattgataaactgccaagtaattcagttggatggtgccagagctacaggttttgcaaggtagacgaagcagagatcgccctccgattgagtaggatttgcataaatgaaggtatggagttcgaggccgaagcactggagcttattgctcgcaaggccaacggttccattcgagatgcagttcaaatgcttgaccagcttactctgctaggaaaaaggatcagcaaatcagtaacatatgacctaataggcgatgtctcagatgaggagttgcttgatcttcttaatctggctttttcatcggatgctgctaccattgtcaggagggctagggagcttttgagctcaaaggttgaccccctgcagttattagctcagcttgcaaatcttatcatggatattttagctgggaggcaccagtcagattcccaagaagttagaaaggttactgcggctgaaattgatgtgcacaaacttagaaatgcactggaaatactttctgaaactgaaaagcagctgaaaaccacaaagaaccagtctacatggcttacagcagcgctgttacagtttaatatgagagagccgtactgcctagatgatgctgcagtttcaagcatgttcacagagagtcagacagatgatggggctgctatcttgaaagacgaaagcttagataccagttctcatctttgctatcagaacaaaatcggttgtttagatatgaacttaggagatccagatgtgctcgagaccatatggattaaggctcttgagaactgcacgtctaaaccacttcatagtctgttgagaaaagatgggaagttgtcatccctgtacaccactcaaggtgtagcagttgctgagctgcagttctgccaccccgaggatgtacctacaacagagagcttttggaatccatttgtggtttctctgcagaatttgctaaagtgcaatgtggatatcaggatcaatctttccccaatctccaccagcaacagagttgtatccaagaattcatcagtaagcctggtcatgcaatccagagaagatcaggagacagaagatccagttgccgcaggttgcagaacagtagcttcatcaagaaaagagtgcccttctccactcgcggtgcaaccaaaggagaagccgtcgcacattctggggtgcctccatgctacagatggcgacgcggtggataccgagtcgaggatcttgagctatcagaagatttcagtcatacctgaagcatccactccaggaaatggttccttcaaagctggagggcacacaccaaaggttgacgaagccagagctcgccgaggctgtttctcgaagcttctacagcgccgtgctggtgctccttatcaaaatggagctttgcctcgcaggggactgttcaaatgctgtttctgcaagatcagaccagactgcaagacgaaagtggaagaaactgatgggttccaagggcacagtaaaaactgaaacaagggttgatgatcaagatgatgaatttcatttggttgaagctgactacaagttgtccattcttgtatactgttattttagatgggctctgggttaagatcacctcagtttagatgaaagtatgtgaatctgttaactgcatctctcttgtgagttctgacacaatagatgcgcatcactgactgaaatgttttgaacatctctggtagtagctcaatgattgaccatcagttggatcacatattcaaaaaaaaaaaaaaa

SEQ ID NO: 16184 - DNA, 760 bp, Oryza sativa
  Clone ID: PAT_MRT4530_21957C.1
atggccaagtgtttgcgcacaccggaacgtggaccagctgctgccgcggccgccgccgagatcgaaaaggccaggagcaaactaggcttgggtgccgctgccgctaactcctcgtggtcgcgcactgcgaagcgccggctctcctctcctcttggcccggcggcggcggcggcgtcctccgggctgtgcggcgcgcggatctggaagacggcggcggcgggaagacggccgtgcggcggcgccctcgaccaccgatgtcggacgaagacgacgacgagctcgtccgggccgtgcggcggcgtcctccgggccgtgcggcggcgccctcgaagacagcagcgcggcgcggatctggaagacggcggcggcgggaagacggccatgcggcggcgccctcaaccaccgatgtcggacgaagacgacaacgggagcagcgtcagggtcgtcgcgacgtggagcggcaacggggccctaaggtttccccgacggcgtggccgagagctccccggcggcagtctccggctcttcccggcggcgcaggtacgagctccccgacggcgtcgggttccgagcgaaggtggtggcggcggccgatctgctcgcggcggtattcctcaaccgcatgaactgagtccgtcccttttccgcgtccagtgggccctgcgccaggaatttggccgagcaccctgtttctttgttggagaagcgaaaaacccaccatagctttggggcccccccctgttttcccttcacgtaaacc

SEQ ID NO: 16185 - DNA, 479 bp, Oryza sativa
  Clone ID: PAT_MRT4530_21958C.1
ttggacgcccagttcttcagcccgccgtacctgttccagccgacgcaggacccccgcccagcggcccgtcatccgcagcctggcccggcctcggggccaacggcgccgtcgaggtcagggccggcgaccaggtcaccgtcaccatgcaggacgccggcgcctacagcttcagcatgatccgcaccggctccaccacccacacggtcaacaccgacagcaggcgcattccgctcgccggccaggacgtgggcggcggcagctacgtcgtcaccgtgccgagcgactatggcatcgccacgcccggctactacatgttgtttgcgttgagcgaggccggcgttcccgctgtggccaagttcttcagagtaggcttgtaaggttgttgcgagctgtgtgggcgcctcctgtttttttccttttgtttttccttttgttaatagtttatagatttgacattagacccgaaaaaaaaaaaaaaa

SEQ ID NO: 16186 - DNA, 425 bp, Oryza sativa
  Clone ID: PAT_MRT4530_21959C.1
ttttgtttttttatattttttgtgttttttttttggggaccattccatcctcaattatgtgcataaaagggaatacaaagagaacaagaataagggaactggaatcctgagcaaataattgatggattttttttttctgtgaaagaacttgaacgaatatagggccaaaaaaaaaaaggctttactaacgaaaaggaaaatggtgcagttaggcattcaaaaaaaaaaaatgttgcagctggtatttaattacagcggccttgggggatggagcttgcctttactggaggtggaggtaatccatggggtccaggaggaggggctcgaagcggtcgagatcgagggggatgtccaggttgccgaggtagaccttggctaccttacggcacccactcggggggaccgactccgggtcgtgcaccccc

SEQ ID NO: 16187 - DNA, 6558 bp, Oryza sativa
  Clone ID: PAT_MRT4530_2195C.1
atgtcaggattgaagagccatgactgtcatgttattttaaatcgtatactccctcttgctctgcgtggactgctccctgaaaatatttatgaaccacttgtggagctatcccagttctttaagaaattaaattcgaaggcattgtcagttgaacagcttgaagaaatggatgctcaaataccaataattctttgtaagcttgaaaaggaatttccaccatccttctttgatgtcatgatgcatttgcctgttcatttggctagagaagctctaattggtggaccaaccatctatcgatggatgtatttatttgagagacaaattcactgcctaaaatcactagttcagaatatggctcgcccagagggttcaattgctgagggatacattgcagatgagtttatgacattaagctctaggtacttggatgatgtcgagacaaaacacaatcgtccaggaagaatacatgacacatctattggtaacaaatttaatttatcaatcttctcctgtgctggaaggcccattggttctcgtaaaactcgagatcttgatatgcttgaatcagaacaagctcatatttatattctgcggaattgcgatgaagtccaagaatatatcagtgagtactgcaacagtacagagggttcttcaatggtacaatttacctcaacatggaacaaaaaattcatcaactggtttaaagagaagatatatcagcagcaccagcatgataagagtgaggtcatggaagaccttttgtcattgtcgcgtggtccgctgaagaatataacatgctttactggatatgacatgaatgggttcagatatcgcacagaaagacgggacagccgcaggtgtacacaaaacagtggtgtgatggttcttggtgatgatgtggaatattatggagttttgacagaaatacttgagattcagtacttaggtggaaggagggtgccgttatttcgctgcaactgggttgatgtatttaataaagaccgtggaatacggatagataaatatgggcttactagtgttaacctacagcggttgcttcaaacagacgagccatttgttttagctagtcaagctgctcaagtattttttgtgaaagacaatcagatcaaaggttggcacttgattgagaaaatgcaaccacgtgacacttaccaagttgttgtgatgatttctggaaggtatggaagaaatagagtgtctgcactacaaaacaacaactcgaagttcattagtcctggactacttcagcaacaagttgcaagacggacagcaccttcaacagctgatgatttatttgggtcaccagagaacatggtgtcagctacagctattgtgcaagaaggaaagagcaagcctgtctatgtaaggcagagcaatctaaagtaccagaaacacactgctgtgccacaacctggagaggaggatgattcagacgaagagtcaatagacacatggcttcggagagctagggaatataacaattccaaaacattaacatgtattgtagacatgggcgatgcaaatgatgataccaccgaagaggatggcgtacataatagtaatcaagctgctaaaagaagacttcgtccgcaaactaattcacgtgctccaagtgatggttctcaatcagttaagcgcagtagctgtggcaaaaacaaatatattagtaatagcaataatggatcccatgcttcggatgatgcacataacagtatccttgctgcaaagagaagacgttctactcaacctaatttgcaagatacagaacaagatactgagcaagatgtaattgaacgagtccaggtgcagagtttgaatggtaccttacaaaatggtactaaaatggttcagcacaagggccatggcaagaacaaatgtaaggaagttgccaaactcaaggagaaccaaaaaattaaagttgagttttacaacaatcgtgctctttcgaatagtttgtcacgtcatctgggtagaattgttcgtgatcggaacattactccggtcaaagtgaagaaatggtcagacattagtaacacagagcaggaacacatatttgcctcgattacagacaagtttgaaaatgaagatccagatattaaaattgatgtatacaaagatgagataatggaacatgccaagtctctttggattaactggcgtggagatttgcatcgacattttgtgaaaccggcaaaaactatgcagcaggctacaaaaaataagccaaaggattttgacccatctgattggcaatggcttgtccaggagcatttttatagcaaagattttattgcaatgagccttagaaactctcggaacagagcaggcttaaaaatgcctcatcgcactggaagcaaacccttcaaagagataatctacaatatgggaggaaaggaaaacagaccaccaactttggatgagttattctttgagactcgcaagaagggagacactttggtggatgttgaatcttctaggatgcatgcagaacttgtggatgtagttagctcagatcctaatctctccaatgttgaagttatggataaatgttacaacggtaataagcggcgtgatcatttaattggatttggtggtggtgtcaaagcaagagatgtacgaggcccagcacttagcaaagctgaattgcatgctagacttcgagcaacagagagggaaaacaaaatgcttcgagaagaaaatagtcaggttgttgagtctgtaaatcaaatgcagaatgaatgggctgagatgaggagagactattatgctaactgtgaaaatagaagtgacactggctcacaaagacgtcatgagaggatccacagtgaaagagatgactatgatgcaaatgaagatggacaactcaatgttatattcgttgtgctgttagacaaatgtgggaatcaatatattacaagcggacaccagaagatgatggtcgagggcatcgacatgaagaagatgataatggtgaccggcgtcaggacaacaatggtggacgatgacagatttctcgagaacctgaacgtcgccctcggaatcgcacgccggagtcgagtgtcagagatcgctatactacccaggagttggcaacaaggcgaatcactactactcgaagacgatgcgctgagacgcaaaaacgacaaaccaaaggcgggaggagagaagaagccagccaaggacgcacccgaatcaagcaagaagaaaagcggcaagagtgggaagaggaaagctcaagcagaagtccttgcatctgaatacgagcgcccgcccaaacacccagacccacaggacggtgatacaaagagaatatggtgccccatacacaagtcggacagacattctctggaggagtgcctcatcttcaaaaaatcgttggaaaggcagctggctttggagaagggtaagcgagtacgtgtagtcaagaaggcaactgagacaactactcaggactcggactccgcgtacccagattccgatcttcatgtctcgcacatcttcggaggttccacaacgtactcttcaaagcgagaatacaaaaaagtggagcgtgagccattgggcaagattatgctcccagtgactttcggccaagcaagcaacttccgaacggagcagataacatttgatgttgctgaattcgacacagcatacaacgccatcattggaagaacggcactcgcgaagttcatggccacatctcactacgcgtatcaggtacttaagatgcccgggccgaagggaacaatcactatccaagggaacgcaaagctggcggtccaatgcgacaagcggagcctcgacatggtcgagcacactcccagcccacccaccacagccgagccacccaagaaagtgatcaaaacgactaagacgccgaaaccagacggcgcaatcaaaatcgtcccactctctagtgccaaccccgacaagacgccgtccgacatgccgggggtccccagggaggtgattgagcacaaacttatggtgcgacccgatgccaagctagtaaagcaaaaactgcggagatttgcaccagatcggaaacatgccatacgagaagagctcgataaacttcttaaggctggtttcatcagagaggcgtgccccaaggatcacttccctcttcctcaaatagaccaactggtggactcaacagctggttgtgagctgttaagcttccctgatgcttactccggctaccaccaaatcagcatggcaaaagaggacgaggagaagacagcattcatcacaccgttcggtgtattctgctacgtcaaaataccgtttggactcataaccgtagggaacactttccagtgcacggtccaaggggcacttagcgatcagttgggtaacaatgttgaggcctacgtcgatgacattgttgtcaaaaccaagacaggcgactcattgattgacgatctacgggaaaccttcgacaacctcagacgatatcgcctcatgctcaatgctgaaaagtgcacgttcggggtactgtcgggcaaactgctcggattcctcgtctctggcagaggaatagaagcaaatcccgagaagatcaaggcaatcaagaacatgaagtcgcccacaaggctcaaggacgtacagaagctaaccggatgcatggcggcgctaagtaggttcgtcgctaggatgggagaacgaggacaacctttcttcgcactgctaaaaaagcaagacaaatttgtatggacacaagaagccgaagaggcgttcatcgcactcaagcgctacttgtcaaatccccctgtacttgtttctccccaacctaatgaagaattgttcctctatattgctgctacgccctactctgtgagtactgtcattgttgtcgaaagagaaaaggtgcagagaccagtctattacgtcagcgaagctctacacgacgcaaagacaaggtacccacagatccaaaaactgctctacgcagtaatcatgacgtcaagaaagctacgccactacttccaagcccacaaggtcacagttgtctccgccttccttcttggcaaggtcgtgagaaacaaagacgttgtcggccgtattgcgaaatgggtagtcgagctaagccagtttgacgtccactttgtaccacgaacaaccatcaagtcagatagtcatatcgacaacgaaacatggacaatggcgttcgatggcgcgctcaacagccaaggagcaggtgcggggttcatcttgacatcaccttcaggagatcagttcaagcatgcaattcacctcaacttcagggcaaccaacaacacagccgagtacgaaggactactcgctgggatgagagctgcagccatacttggggtcaagcgactgatcgtgaaaggggactccgaactagtcgcaaaccaggtgcacaaagattacaaatgctctagccctgagctgtccaagtatctcgcagaagtcaggaagctggaaaaaagatttgatgggatcgaggtccgacacgtatatcgcaaggacaacatcgagccggacgatctagcatggtgtgcgtctagacgagaaccactcgaacccggcacctttctggacatcctgacaaaaccatcagtgaaagaggcaaacaatgaagatagcccagtaacccccgacatcagcccgggggctacaaaggcagaatgcgccgttgtcgacatcgagaccacggacgactggcggaccccactcattaaattcataaacagagacgagttgccccaagacgacgcagaagccgagaaaataacccgtcaagcaaaaatctactgtatgatcagcaatgatttatataagaaggcaccgaacggggtacttctaaaatgcgtctcgtccgacgacagcaagcacctcctcctcgacatacacgaaggggtctgcgggtcacatgccgccggtcgtacattggtcggaaaagcctttcgacaaggatttttctggccaaccgcccttaaagacgcttgcgacatggtcgaaagggcaaacggcatagtactacaagggatcaagacccgtatctacggcaggctcatgtcacatgacaagaagtgggtcgaagaactcccctcggtactatgggccatgcgcaccacaccgacaacgtccaacaaggagacacccttcttcctcgtgtacggctcagaggccatgctccctaccgagttacgacatcagagtacacgagtacagaagcactccgatgaggatcaggaggaacagcgaaacgatgacgtgaacctactcgaggaatatcgagaacaggtcgccgcaagagcagctagctaccaacaggccctccgccgatatcacgagaagcgcatccgagcacgcatactttcgatcggcgactacgtcctccgacgagttcaaagccaggcagggcgaaacaaactctcgcccaaatgggaaggaccgtacacgatcacacaagtcttgcggccaggcgcattcaagattgcagacggcgatggtcgtgagttagcaaattcttggaacattgaccagttgcataaattctatgtataa

SEQ ID NO: 16188 - DNA, 527 bp, Oryza sativa
  unsure (1)..(527): unsure at all n locations
  Clone ID: PAT_MRT4530_21960C.1
gtttttgttttttttttttttttttttttttttttttttttttttttttttttttttttttttttttttttttttttttttttttaaaaaaacattaaaatttatttttattttaccttttattttttttttttcttttttttaaaaacggggggggtttttcttccccacttcccggtttttttttaaccgaaattccggtccgggacctgcacctttaccaattttcctttttcttattcggattaaaatttggccttatcatagtcattgctttttcctttttcaaattgaaattcctttacaattccaaacaaaatacaaacccgaagcataaagtttaaatcttggggttcctaatcattaagataactcaaattaattttgtttggcttactcccccttttccattnagaaaacctaaacctcccgttccattaatgattaggaaaccccccaggcagagggggattcgcttttggtcccccgggccgtttttttttttcttttaacacggggaacagcta

SEQ ID NO: 16189 - DNA, 2994 bp, Oryza sativa
  Clone ID: PAT_MRT4530_21961C.1
atggcccgcacgacgaacgcgaacgccggcgccggaggaggccaccgtcagggcgtcccgcgggtgccgcccagccgcagagacgccggccgagaggacggggttgcggaggatgggagtacgggggctcctgcggcaaccaccgtcatccccggctgcgccgcggcacgcgcggtgggtgcggcagggagcaaatggaggaggaaggggacgagcgggagggaggcgccgtacgaggaggactcgggcagggttcgctctgcgttcggtctggatgccgtgctctcgtacacgccgcaggtggtgatggtcttcacggagaacgataacaagggaagagaagatggcacgcacacccaaggccacaatctgagcctcacttggccgccacccaaggatgacatccgcggcgatggccacgacgaagcggggcatcggattgcgagggatgctgctgcggccaccggcgcccgttcggtggatgtcgcgggaaggaatccgaggaaggagaagagcgggagggctgcccggcccgacgcggtggatttgggtaagcaagacccatcgggcgtttcgcccacatcgggcgtttcgtcgccagcgttggctccttcgtgtctgtcggaggatggtaatttccatcgggagaatgtcgaaatgcaagctgaaagagccaatggttggaggaggaaggagaggaaggcggcagtggaagcatcggaggtggaggtgaagaggcctggaaatcagaaggggcatggtttgcttgatcagagcggagattcagttggcaacaatcatgttcttatcagcagtagtaatcatgagaggaagaagagaccaatgtataattctgaggccgctaaggaaaagaatagagtgcaatccagcagcaatgatcgattccacagacttaacaatgataagatcaaagaatgttccagtgctgaaaaggtacccaagttgtcggatgtgaataccaaggagaaaagtgaaattgatcagctgaccaaaggagcaatacttgccaacgaagatcaatatgagtgggatgatctgttctttgatgatggtggaagtaaatttctgactgtagaaaacaagtgtgaagtggaaggcgtggaggccagtgataaaaacgatatgggtaccagaggtttagctcatcctgctaaagtggaacaggctaggaaagatatgggcctccgctcaccagtctgctgctttcttggccacagtggattgctgttaattgatactcctggtcatgagaccttcaggaactttcgttgtataggttctcgcctctgtgatattgctatcctggtggttgatgttatccttgggcttcaaatgcagacattagagtcattggatcttctgaagaagcataagattgatttcatcattgctttaaataaggttgataatatcgatggctggaaacaatatccaaatgcatctttcgagaaggctcttgcacttcaaagtgaatctgttaggatgggatttgagaagagattgtctgatattgtgagccaactcaatgctcaaggcattgtttctggtctatactacatcaacaaggacaaggatgacaaatttaagaacattgtgcctaccagttcaatcagttgtgaaggcatttcagatttgttgctcttgttatcagatagggcacaaaagatgaatgaacggcttaccatacgggacaaaattgagtgtaccattctggatgttaagttcattgaaggtcatggcactaccattgatgttgtgttgtctagtggtgttcttcatctaagagatcaaataattatgtgtggctcacaggggcccattaagactcatatcagggctttgttaacacccaataagatgaaagaacttcaagttaagagcccataccaacatcataaggagatcaagtgtgctcgaggcataacaatatctgcaccggggctagagtattcgattgcaggtacttgtctctatgttgtacggcctggtgatgatcagcaagatgtagtgaacaatgtattgtcagatattgctacatcatcgaactggattgacaagagcaaggagggtgtttatgtgcaagcttcttcccttggatcattgaaagctataactgaatttctgaagagccctgctatgaacatacctgtctgtgacttcaggcttgggccagtccttcggaaagatgtcatgaaggccagatttatggtcagaaagaagacacaatatgctactattttggctttcaacgtaaaagtatctcctgatgcccaaaaattggccagtcaagatggtgtgaagatcattcttgcagatgtaatcgatcatttattcgagcaattcagaaaatacattttcccaagaaatgagaaaactgaagaagttgtattcccctgtgttctgaagatcattccagactgcgtattcaacagaaaaggcccaattgttctaggtgtcgacatgctgtatggagtagccaaggtcggaacccctctttgcatcccttccaaaggcttcatccgcattgggaaaattgcttcaatccagaatagccataagcaagttgatgtggcaagagagggagagaaggttgcgataaagattgtagggagcaaccaagacgaggcaaacaatagttttggtagaacatttggacttgatgatgagcttgttagctacataacaaaggagtcgattgatgttcttaaagaacatcatcgggaaattgcagatgaggttatgttaagctcgttacctgaggctgacgacgtcctgccatcgatcattcgaaattatattgcgtctgaagagttccaatttgagacccagttttgttctctctacatagagaagttttatagtgtttacgaggtccagaagcattcatgctactttgatgaagagttgaagatgaaaccaagaggaggctactccttttctcagagaagaggagtatgccctgggaagatttag

SEQ ID NO: 16190 - DNA, 276 bp, Oryza sativa
  Clone ID: PAT_MRT4530_21962C.1
atggagagttgttcggccctcgccagcctgtcgtcgccgccactccaacgcccgccctcaagcccgccgccgccatcgtggccctcgcctggtgctgctccagtgcccgcccatacgccggccaccgtccaccaccaccgccacttcggcacgcgcccattgccttctcagccaccccatcaacgcgggacggagctcagcgagggtgctctagtggacgccattgaggcagccggcgccggcgccgatagccttgccgtgtcaagctcgaaatga

SEQ ID NO: 16191 - DNA, 672 bp, Oryza sativa
  Clone ID: PAT_MRT4530_21963C.1
aaattgcgggacccactgacaggtagggcccacatgtcagtttatcccttcacccatctctctctgtctctcatttcgagcttgacacggcaaggctatcggcgccggcgccggctgcctcaatggcgtccactagagcaccctcgctgagctccgtcccgctgccatcatcaccagtcgcagtcccttgcgagcaagaaaaggagattggggagagagagagagagagagagagagagagtccctcaccgttgatggggtggctgagaaggcaatgggcgcgtgccgaagtggcggtggtggtggacggtggccggcgtatgggcgggcactggagcagcaccaggcgagggccacgatggcggcggcgggcttgagggcgggcgttggagtggcggcgacgacaggctggcgagggccgaacaactctccatggccacccctcttgtggacctcggtgtccgcgctgctcgatgccgccgccgctccaggtctaggggtgcccaccaccaccgttggtcgatcgcctcgccctttcgttcccctcagattcacttgccgtggtggcgccatatcgaagatggaagaggaggcgacgctgctagagaaacggagaagcctggatgccttgcgtcgccacctagctcttttcccctaccggctactgctcac

SEQ ID NO: 16192 - DNA, 370 bp, Oryza sativa
  Clone ID: PAT_MRT4530_21964C.1
ctgttacctctccaattcattctctgctactgtctccaacatatccatgtttccactccacacccatctagggatcttactcctgctcctcttctctcttgcgcaatccatcatgctccgccgcagtgaatgatactctcgcggaggtgcaggtgctcaccgtcggggagacgctcatctcgaggcacgggaagatcgggctcggcttctacaagccggcacatcctgcaggcaatgcgagtgagtctggcaacatcacctctcctggaaggtaccttgctatatggaccaacaagagcccggctagcaccaccgggtgggttgctcatagggagaggccaatcactgatctagagatcaggttaacaca

SEQ ID NO: 16193 - DNA, 2919 bp, Oryza sativa
  Clone ID: PAT_MRT4530_21966C.1
atggatcggcaatggatgtacgctgaccggcggtccaaagagtttattgacggcgtgcactattttttgagagtggccgaagctaacaggcaaaggggttttatttgttgtccatgcaataagtgtaagaatcagaaggagtattctgcatccaggactattcatttccacttgtttgagtcggggttcatgccaagctataattgttggacatcccacggagagcaaggtgttgaaatggaagaagatgaagtggaagacgacaatattccggactttgctcagtatgttggatttgaaggaaatcaaacgggcgaggaggaaatagctgctgatggtaacgacgttgcggatgatcttggtcagatgttgcaggacgccagggaagactgcgaaagtgaaaaggaggcccataaattggacaagatgttggaggaccagagaacttcgttgtacccaggttgcgagcaggggcacaaaaagttggataccactctggagttgttgcaatggaaggccaaaaatggggttagtgacaaggcatttggcgatttattgaaactcgtcaagaacattcttccggggggaaacaaattgcccgagacaacgtacgaggctaagaagatagtctgcccgttaggactggaggttcataacattcacgcatgtccgaacgattgtatcctatatcgcggtgaggagtatgagaacctagaagcatgccctgtttgcaaagcactacgatacaagattagacgggacgatccaggagaagttgacgggcagctaacaaagaagagaattcctgctaaggtgatgtggtatttccctataataccacggctaaggtgtttgttcaggaacaaggggaatgctagaatgttgcgatggcacgctgaagagcgtcaacaggacgggatgctgagacaccccgccgatggttcgcagtggcgaaacatcgacagaaaatttaaagaatttggaaaggacgcacgaaacatacggtttggtttgagtacggatggcatgaatccttttggagagatgagcagcggccatagcacttggcccattacgatgtgtatctacaacctccccccctggctatgcatgaagaggaagtacataatgatgccgattattattcaaggccccaagcaacctggtaacgacatcgacgtgtacctaagaccactggaaggtgtccccgtgtgggacgaggacaaacaggaggagtttaacctacgagcgctgctgttcgtaaccatcaacgattggcctgcacttagcaacctatccggacagtccaacaaggggtacaaggcttgcactcactgtatggatgaaacagaaagtacgtatcttaagcactgtaggaaggttgtatacatgggtcatcgtcgattccttgcagcaaaccacccggtacggaagaaaggcaagcacttcgaacataaggccgaccaccgtacgaagcctaaacatcgcagcgggaaaacagtgtttgctatggttaaagatcttaaagtagtgttcggaaaggggcctggaagccagcatatagagagcgaagatgatcacgcggcgatgtggaaaaagaactctatattttgggagttaccatattgggaattcttggacgtgtatacggaagcacgtaatgatctgaagcatatggaacaacgcggcgaccttcacccggaaccaaaggagaaaggaagccattacttgagtccagccagctacactcttagcaaggcagagaaggaaagtatgtttgaatgcttggagagcataaaggtaccgtctggatactccacgaatatcaagcgaataataagcacgaaggagaagaagttcacaaacctaaagtctcatgactgtcacgtgttgatgacacaactgctaccagttgtaataaggggtatccttccagacaatgtccgggcaacaataacaaagctatgtgcattcatgaacgcaatttcgcagaaggtcatcgatccgatccgtattctcgggcctatgtacctacacaacatgtttcctttcgagaggtacatgggcgttctgaagaagtatgttcgtaaccgtgctcgtccagaggcaagcatcgccaagggttatggaacagaggaggtcatcgaattttgcgtagaatttatcgaagaccttcgcccaatcggggtacctgaatcacgccatgaagggagactacggggaaagggaactctcggaaggaaagcaataatgacggtagacaacaatttattccgtaaagcccatttcactgttctgcaacactcttcattggtagctccttacatcgaggagcacttggctctagttcgcgccaggaacatcgcccaagacatgaagagcacgaaccaaaacagcgctgttcgtgtcgatgccatgggacacgatggaacaactgccacgtattacggtgccatcgaggacatatgggaacttgactatggtcctctcaaggtccctctgttccgatgccaatgggttaggttgactagtggaggcataatgattgatgacagtgggatgacaacggttgaccttaacaaggttggatactcggacgacctttttgtccttgccaatgatgtaacgcaagtcttttacgtgaaggacatgtctagcaaaagaaagaagggcagagggcctgacgagccgaagcgtcacgtggttctcccaggcaaaagaaaaatcgttggagttgaggacaagactgacgaggattacgatcagttggatgggcaaccccctttcacggtgacgattgaccctagcatactcctatcaaataaagacaccccttactcacgtagcgatcacaaggagggaacaatagtgaggagaaagtacgtgcggtcaaccgtcaccgccgatgtaatgccgtaa

SEQ ID NO: 16194 - DNA, 3508 bp, Oryza sativa
  Clone ID: PAT_MRT4530_21967C.1
atgggaagacggccgaggaggaggcagccgccgtgggcttccctcgtactgctgctcccagtggtgccggagatagacgacgccgaggcgctcgccatcaagccaaggaaggaccagcgctcacccgtcagccgctcgtccgtttccgcccccgacaacgccgacccgacgcccccacccatctgcaaactcctcatccatctccacccctaccgaatcaacaacatcctcaagctgctcaattccagcaacaggcaaagaaatcgtcaacaaagactacgtgtgtacagatggacgctcggcgcagacatggatcggcaatggatgtacgctgaccggcggtccaaagagtttattgacggcgtgcactattttttgagagtggccgaagctaacaggcaaaggggttttatttcttgtccatgcaataagtgtaagaatcagaaggagtattctgcatccaggactattcatttccacttgtttgagtcggggttcatgccaggctataattgttggacatcccacggagagcaaggtgttgaaatggaagaagatgaagtggaagacaacaatattccgaactttgctcagtatgttggatttgaaggaaatcaaacgggcgaggaggaaatagctgctgatggtaacgacgttgcggatgatcttggtcagatgttgcaggacgccagggaggactgcgaaagtgaaaaggaggcccataaattggacaagatgttggaggaccacagaacttcgttgtacccaggttgtgagcaagggcacaaaaagttggataccactctggagttgttgcaatggaaggcaaaaaatgaggttagtgacaaggcatttggcgatttattgaaactcgtcaagaacattcttccggggggaaacaaattgcccgagacaacgtacgaggctaagaagatagtctgcccgttaggacaggaagttcataagattcacgcatgtccgaacgattgtatcctatatcgcggtgaggagtatgagaacctagaagcatgccctgtttgcaaagcactacgatacaagattagacgggacgatccaggagaagttgacgggcagctaacaaagaagagaattcctgctaaggtgatgtggtatttccctataataccacggctaaggcatttgttcaggaacaaggggaatgctagaatgttgcgatggcacgctgaagagcgtcaacaggacgggatgctgagacaccccgccgatggttcgcagtggcgaaacatcgacagaaaatttaaagaatttggaaaggatgcacgaaacatacggtttggtttgagccccaagcaacctggtaacgacatcgacgtgtacctaagaccattggtcgaagatcttaaacagttgtggaagaaggaaggtgtccccgtgtgggacgaggacaaacaggaggagtttaacctacgagcgctgctgttcgtaaccatcaacgattggcctgcacttagcaacctatccggacagtccaacaaggggtacaaggcttgcactcactgtatggatgaaacagaaagtacgtatcttaagcactgtaggaaggttgtatacatgggtcatcgtcgattccttgcagcaaaccacccggtacggaagaaaggcaagcacttcgaacataaggccgaccaccgtacgaagcctaaacatcgcagcgggaaaacagtgtttgctatggttaaagatcttaaagtagtgttcggaaaggggcctggaagccagcatatagagagcgaagatggtcacgcggcgatgtggaaaaagaactctatattttgggagttaccatattgggaattcttggacgtacgccacgcaatcgacgtgatgcacctcactaagaacctttgcgtaaaccttcttggcttcctaggtgtatacggaaagtcgaaagatacactggaagcacgtaatgatctgaagcatatggaacaacgtggcgaccttcacccggaaccaaaggagaaaggaagccattacttgagtccagccagctacactcttagcaaggcagagaaggaaagtatgtttgaatgcttggatagcataaaggtaccgtctggatactccacgaatatcaagcgaataataagcacgaaggagaagaagttcacaaacctaaagtctcatgactgtcacgtgttgatgacacaactgctaccagttgtaataaggggtatccttccagacaatgtccgggcaacaataacaaagctatgtgcattcatgaacgcaattttgcagaaggtcatcgatccggatagattagaagcccttcagaatgaagtggtgcaatgtctcgtcagttttgagttgatatttccaccttcatttttcaatataatgacgcatctgctttgtcaccttgtgaaagagatccgtattctcgggcctatgtacctaggcaacatgtttcctttcgagaggtacatgggcgttctgaagaagtatgctcgtaaccgtgctcgtccagaggcaagcatcgccaagggttatggaacagaggaggtcatcgaattttgcgtagaatttatcgaagaccttcgcccaatcggggtacctgaatcacgccatgaagggagaatacggggaaagggaactctcggaaggaaagcaataacgacggtagacaacaatttattccgtaaagcccatttcactgttctgcaacactcttcattggtagctccttacatcgaggagcacttggctctagttcgcgccaggaacatcggtaagtccgatgcatggattacacgacatcacattgacactttccccgcgtggctacgacaacatctcatgggtaacgagtcgatcaaccaacaacttgccttcctggcgagcggaccgtctgggctcgatcgcaacattccagggatatgagatcaatgggtacacattctacacgagagcccaagacatgaagagcacgaaccaaaacagcgctgttcgtgtcgatgccatgggacacgatggaacaactgccacgtattacggtgccatcgaggacatatgggaacttgactatggtcctctcaaggttcctctgttccggtgccaatgggttaggttgactggtggaggcgtaatgattgatgacagtaagatgacaactgttgaccttaacaaggttggatactcggacgaaccttttgtccttgccaatgatgtaacgcaagtctttttcgtgaaggacatgtctagcaaaggaaagaagggcagagggcctgatgagtctaagcgtcaagtggttctcccaggcaaaagaaaaatcgtcagagttgaggacaagactgacgaggattacgatcagttggatgggcaaccccctttcacggtgacgattgaccctagcatcctcctatcaaatgaagacaccccttactcacgcagcgatcacaaggagggaacaatagtgaggagaaagtacgtgcggtcaaccgtcaccgccgatgtaatgccgtaa

SEQ ID NO: 16195 - DNA, 138 bp, Oryza sativa
  Clone ID: PAT_MRT4530_21968C.1
atggaaggtttgaggaagagcaaacgggcatcggcctccttaactaaggagcacatatcacgaactatcgcggtgttgcccataccacgacagttccaggctaaacaattcattgctcctggcgagacccagccatag

SEQ ID NO: 16196 - DNA, 2718 bp, Oryza sativa
  Clone ID: PAT_MRT4530_21969C.1
atggatcggcaatggatgtacgctgaccggcggtccaaagagtttattgacggcgtacactattttttgagagtggccgaagctaacaggcaaaggggttttatttgttgtccatgcaataagtgtaagaatcagaaggagtattctgcatccaggactattcatttccacttgtttgagtcggggttcatgccaagctataattgttggacatcccacggagagcaaggtgttgaaatggaagaagatgaagtggaagacgacaatattccggactttgctcagtatgttggatttgaaggaaatcaaacgggcgaggaggaaatagctgctgatggtaacgacgttgcggatgatcttggtcagatgttgcaggacgccagggaagactgcgaaagtgaaaaggaggcccataaattggacaagatgttggacgaccacagaacttcgttgtacccaggttgcaagcaggggcacaaaaagttggataccactctggagttgttgcaatggaaggcaaaaaatggggttagtgacaaggcatttggcgatttattgaaactcgtcaagaacattcttccggggggaaacaaattgctcgagacaacgtacgaggctaagaagatagtctgcccgttaggacgggaagttcataagattcacgcatgtccgaacgattgtatcctatatcgcggtgaggagtatgagaacttagaagcatgccctgtttgcaaagcactacaatacaagattagacgggacgatccaggagaagttgacgggcagctaacaaagaagagaattcctgctaagaggaagtacataatgatgccgattattattcaaggccccaagcaacctggtaacgacatcgacgtgtacctaagaccactggtcgaagatcttaaacagttgtggaagaaggaaggtgtccccgtgtgggacgaggacaaacaggaggagtttaacctacgagcgctgctgttcgtaaccatcaacgattggcctgcacttagcaacctatccggacagtccaacaaggggtacaaggcttgcactcactgtatggatgaaacagaaagtacgtatcttaagcactgtaggaaggttgtatacatgggtcatcgtcgattccttgcagcaaaccacccggtacggaagaaaggcaagcacttcgaacataaggccgaccaccgtatgaagcctaaacatcgcagcgggaaaacagtgtttgatatggttaaagatattaaagtagtgttcggaaaggggcctggaagccagcatatagagagcgaagatggtcacgcggcgatgtggaaaaagaactctatattttgggagttaccatattgggaattcttggacgtacgccacgcaatcgacgtgatgcacctcactaagaacctttgcgtaaaccttcttggcttcctaggtgtatacggaaagtcgaaagatacactggaagcacgtaatgatctgaagcatatggaacaacgcggcgaccttcacccggaaccaaaggagaaaggaagccattacttgagtccagccagctacactcttagcaaggcagagaaggaaattgtaataaggggtatccttccagacaatgtccgggcaacaataacaaagatatgtgcattcatgaacgcaatttcgcagaaggtcatcgatccggatagattagaagcccttcagaatgaagtggtgcaatgtctcgtcagttttgagttgatatttccaccttcacttttcaatataatgacgcatctgctttgtcaccttgtgaaagagatccgtattctcgggcctatgtacctacacaacatgtttcctttcgagaggtacatgggcgttctgaagaagtatgttcgtaaccgtgctcgtccagaggcaagcatcgccaagggttatggaacagaggaggccatcgaattttgcgtagaatttatcgaagaccttcgcccaatcggggagcacttggctctagttcgtgccaggaacatcggtaagtccgatgcatggattacacggcatcacattgatactttccccgcgtggctacgacaacatctcatgggtaacgagtcgatcaaccaacaacttgccttcctggcgaggggaccgtctgggtcgatcgcgacattccagggatatgagatcaatgggtacacattctacacgagagcccaagacatgaagagcacgaaccaaaacagcgctgttcgtgtcgatgccatgggacacgatggaacaactgccacgtattacggtgccatcgaggacatatgggaacttgactatggtcctctcaaggttcctctgttccagtgccaatgggttaggttgactggtggaggcgtaatgattgatgacagtgggatgacaactgttgacattaacaaggttggatactcggacgaaccttttgtccttgccaatgatgtaacgcaagtctttttcgtgaaggacatgtctagcaaaggaaagaagggcagagggcctgatgagcctaagcgtcaagtggttctcccaggcaaaagaaaaatcgtcggagttgaggacaagactgacgaggattacgatcagttggatgggcaaccccctttcacggtgacgattgaccctagcatcatcctatcaaatgaagacaccccttactcatgcagcgatcacaaggagggaacaatagtgaggagaaagtacgtgccgtaa

SEQ ID NO: 16197 - DNA, 1137 bp, Oryza sativa
  Clone ID: PAT_MRT4530_2196C.1
gttttttatggattagagtatgcacatgcattggatgatcttaaagcagtagttgcggaattatacaaatcacattctcgcagtgttgaagttcagtatgcagatgttctctgttcagttatgagcccaagctctgctgcagaagtggaacacggtcaatccgatggaagcactcatagtgatgatttatctatacaaagtgatgtagcgacatttgtgaataattgttgcaacgtggaaggatccacacgcaagtatagccttggaggactaacatggtctacatccatagatgataatatggaggactatttgttatattggataggacaagataactcagcatttgccaacattgtgcttaccttcaataaatgtgatatagttaggtatgatacagtagcaaatcaaccatcaagggatgtctctcatctgatgaaaatacttaggcgcagatattaccttgtggagaaggcgaaggatgcaaatattgttggcattttggtggggaccctgggtgttgctggttatcttcacatcattgagcaaatgaaagatctgatcaaggctgctggaaagaaatcatatacgttagtcatgggccgacctaattccgcaaaacttgctaatttccctgagtgtgaagtttttgtttatgtttcttgtgcccaaactgctctattggatagcaaagattttttagctccagtcattacgcctttcgaagctgtattagcttttagcaggggaagggaatggacaggagagtatcttctagatttcaaggatttgatcactacagataaaccagaaatttcaagcacaactgaagaagcaagattttcctttatcaaaggtggctatgtggaagataattgccttgaagataacgaggaacagccagagacatcgcttgcacttgctgaggtaacagagaaggcgctaagtataaaaaatcagaataatgatgcagttctttaccaaggaggagcaaagtctgcgatcgactatctcaaggcacgatcctaccgtggtctcaccggagaatacgagggtccagcaccagactcggtcttgacaggcagaacagggagagctgccggttacaacaacgagaaaaaggagattacacagtga

SEQ ID NO: 16198 - DNA, 353 bp, Oryza sativa
  Clone ID: PAT_MRT4530_21970C.1
ggaagacgaggtgccgggctatcgcactctcataggcttgatctgttgcgagtgctagctggacgtgcggacgaacctcatcatgctcgacggcatggactacaacgctggccaggtagcgagcaggcgtcggcagcggctgaagatgatagtaggcaagcattatagggaagggaaggcttagcctttcttccaggtatccctctatgcatactaaatccgttgctggaggacgaggagggggctatcctgttcaagctaatgtgatgagtgtgtcggtgatggtaacacttcatgttagcttcatagattgcgatcaatcgagagcgatgctagcgacaacataggcttag

SEQ ID NO: 16199 - DNA, 2658 bp, Oryza sativa
  Clone ID: PAT_MRT4530_21971C.1
atggaagatgatgaagtggaagatgacaatattccagattttgctcagtacgttggatttgaaggaaatcaaacgggcgaggaggaaagggatgctgatggtaacgacgttgcggatgatcttggtcagatgttgcaggacgccaaggaggactgcgaaagtgaaaagggggcccataaattggacaagatgttagaggatcacagaacttcgttgtacccaggttgcgagcaggggcacaaaaagttggataccactctggagttcttgcaatggaaggcaaaaaatggggttagtgacaagacatttggcgatttattgaaactcgtcaagaacattcttccggagggaaacaaattacccgagacaacgtacgaggctaagaagatagtctgcccgctaggactggaagttcagaatattcacgcatgtccgaatgattgtatcctatatatcggtgaggagtatgagaacctagaagcatgccctgtttgcaaagcactacgatacaagattagacgagacgatccaggagaagttgacgggcagctaacaaagaagagaattcctgctaaggtgatgtggtatttccctataataccacggctaaggcgtttgttcagtaacaaggggaatgctagaatgatgcgatggcacgctgaagagcgtcaacaggacgggatgctgagacaccccgccgatggttcgcagtggcgaaacatcgacagaaaatttaaagaatttggaaaggacgcacgaaacatacggaagtacataatgatgccgattattattcaaggcctcaagcaacctggtaacgacatcgatgtgtacctaagaccactggtcgaagatcttaaactgttgtggaagaaggaaggtgtccccgtgtgggacgaggacaaacaggaggagtttaacctacaagcgctgctgttcgtaaccatcaacgattggcctgcacttagcaacctatccggacagtccaacaaggggtacaaggcttgcactcactgtatggatgaaacagaaagtacgtatcttaagcactgtaggaaggttgtatacatgggtcatcatcgattccttgcagcaaaccacccggtatggaagaaagacaagcacttcgaacataaggctgaccaccgtacgaagcctaaacatcgcagcgggaaaacagtgtttgctatggttaaagatcttaaagtagtgttcggaaaggggcctggaagccagcctatagagagcgaagatggtcacgcggcgatgtggaaaaagaactcgatattttgggagttaccctattgggaattcttggacgtccgccacgcaatcgacgtgatgcacctcactaagaacctttgcgtaaaccttcttggcttcctaggtgtatacggaaagtcgaaagatacactggaagcacgtaatgatctgaagcatatggaacaacgcggcgaccttcacccggaaccaaaggagaaaggaagccattacttgagtccagctagctacactcttagcaaggcagagaaggaaagtatatttgaatgcttggagagcataaagatcagtattctcgggcctatgtacctacacaacatgtttcctttcgagaggtacatgggcgttctgaagaagtatgttcgtaaccatgctcgtccagaggcaagcatcgccaagggttatggaacagaggaggtcattgaattttgcgtagaatttattgaagaccttcgcccaatcggggtacctgaatcacgccatgaagggagactacggggaaagggaactctcggaaggaaagcaataatgacggtacacaacaatttattccgtaaagcccatttcacggttctgcaacaatcttcattggtagctccttacatcgaggagcacttggctctagttcgcgccaggaacatcggtaagtccgatgcatggattacacggcatcacattgatactttcccagcgtgggtacgacaacatctcatgggtaacgagtcgatcaaccaacaacttgccttattggcgaggggaccgtctgggtcgatcgcgacattccagggatatgagatcaatgggtacacattctacacgagagcccaagacatgaagagcacgaaccaaaacagtgctgttcgtgtcgatgccatggcacacgatagaacaactggcacgtattacggtgccatcgaggacatatgggaacttgactatggtcctctcaaggtccctctgttccggtgccaatgggttaggttgacaagtggaggcgtaatgattgatgacagtgggatgacaacggttgaccttaacaaggttggatactcggacgaatcttttgtccttgccaatgatgtaacgcaagtcttttacgtgaaggacatgtcgagcaaaggaaagaagggcagagggcctgacgagcctaagcgtcacgtggttctcccaggcaaaagaaaaatcgtcggggttgaggacaagactgatgaggattacgatcagttggatgggcaaccccctttcatggtgacgattgaccctagcatcctcctatcaaatgaagacaccccttactcacgtagcgatcacaaggagggaacaatagtgaggagaaagtatgtgcggtcaaccgtcaccgccgatgtattgccgtaa

SEQ ID NO: 16200 - DNA, 2391 bp, Oryza sativa
  Clone ID: PAT_MRT4530_21972C.1
atgccgcagagaaattggaggaagagcgaaagtggggaacgggtgctgcgccgtgggggagagggtggcgacacgcttgccggaggagagcagactccggcccttgggaacgcttccctcaactgctgcatcgacctctcccttgactccctccccgacgacgaacactgggcactcgtggacagccacgatggcctcctcctcctctgcacaaaattcagcaaccgcatggacatcccggacaactccgccgtctgcgaccctgtctccggccgctgcgcaccgacgagaacgacgtcggtggtggacgaggagcggtgggaaaaaagagaagaggggagcatggaggaagaagatccatatgaatatgacgaagaagacagaaaacgtgacgacagtggcatggacactaaggaggactgcgaaagtgaaaagggggcccataaattggacaagatgttagaggaccacagaacgtcgttgtacccaggttgcgagcaggggcacaaaaagttggacaccactctggagttcttgcaatggaaggcaaaaaatggtgttagtgacaaggcatttggcgatttattgaaactcgtcaagaacattcttccggagggaagcaaattgcccgagacaacgtacgaggctaagaagatagtttgccctctaggactggaagttcagaagattcatgcatgtccaaatgattgtatcctatatcgcggtgaggagtacgagaacctagaagcatgtcctgtttgtaaagcactacgatacaagattagacgagatgatccaggccccaagcaacctggtaacgacatcgatgtgtacctaagaccactggtcaaagatcttaaactgttgtggaagaaggaaggtgtccccgtgtgggatgaggacaaacagatggagtttaacatacgagtgctgctgttcgtaaccatcaacgattggcctgcacttaccaacctatccaggcagtccaacaagggcgggaaaacagtatttgctatggtgaaagatcttaaagtagtgtttggaaaggggcctggaagccagcatatagagagcgaagatggtcacgcggcgatgtggaaaaagagctctatattttgggagttaccctattgggaattcttggacgtccaccacgcaatcgacttgatgcacctcactaagaacctttgcgtaaaccttcttggcttcctaggtgtatatggaatgtcgaaagatacactagaagcacgtaatgatctgaagcatatggaacaacgcggcgaccttcacccagaaccaaaagagaaaggaagccattacttgagtccagccagctacactcttagcaaggcagagaaggaaaacaatgtccgggcaacaataacaaagctatgtgatatcatgaatgcaatttcgcagaaggtcatcgatccggatagattagaagcccttcagaatgatgtagtgcaatgccttgtcagctttgagttgatatttccaccttcatttttcaatataatgacgcatctgctttgtcaccttgtcaaagagatcggtattctcgggcctgtgtacctacacaacatgtttcctttcgagaggtacatgggcgttctgaaaaagtatgttcgtatctgtgctcgtccagaggcaatcatcaccaaggggaatggaacagaggaggtcattgaattctgcgtagaatttattgaagaccttcgcccaatcggggtcaccgtcgggatcgccaagtcgtcgccgtcctcgtcccgccctccgtttccgccgaggatcgccggagcaccgccgtcgtcgtcgacccgaacgtctccgccgcttcaacctcgccgccgtcgccgtccgttgatcgtccgtcgtcgtttgggtcaccgagcaccagactgtgaagtggcggagataagcccatgggggtcgctggggagtccataccttgtttacaaggggggatatgagatcaatgggtacacattctacacgagagcccaggacatgaagagcacgaaccaaaaaagtgatgttcgtatcgatgccatgggacacgatggaacaactggcacgtattacagtgccatcgaggacatatgggaacttgactatggtcctctcaaggacatgtctagcaaagaaaagaagggcagagggcctgacgagcctaagcgtcacgtggttctcccaggcaaaagaaaaatcgtcggagttgaggacaagactgacgaggattacgatcagttggatgggcaaccccctttcacggtgacgattgaccctagcatcctcctatcaaatgaagacacaccttactcatgtagcgatcacaaggagggaacaatagtgaggagaaagtacgtgcggtcaaccgtcaccgccgat

SEQ ID NO: 16201 - DNA, 531 bp, Oryza sativa
  Clone ID: PAT_MRT4530_21973C.1
atgcctgagccgccgccatcagaacttcacccgccggggtcaccttttgaaaggcaaccaacgggggagtcaacgtcggccaagacaacgaaaacagcccaatccaaagcatcgaaagggcgagctgcaactggaagcaacgatgacaacgacgcaggagacggccctcgcgtcgccaccgtcgccgcgggccgcgtccgcgccgcagccgccgctgaggactggatccgcgccaccgccgtcgccacgggccgcgtccgcaccgccgccatcgcgtcgggccgcaaccacgtcgtcgccgccgccgcggacctgatccgcgccgccgctgccgccgcggactggatccgcgccgccgccgtcgcctcgggtcgtatccgcgtctccatcgcagtcgcgagccgcaacctcgtcgcctccaccgtcgctggtcgcaatcgcgtcgccgccgccatctccaacttccatcgccacactaacgagaagaaaacgggaagaacccgacctaacgagactagcccgactacgtaa

SEQ ID NO: 16202 - DNA, 2619 bp, Oryza sativa
  Clone ID: PAT_MRT4530_21974C.1
atggatcggcaatggatgtacgctgaccagcggtccaaagagtttattgacggcgtgcactattttttgagagtggccgaagctaacaggcaaaggggttttatttgttgtccatgcaataattgtaagaatcagaaggagtattctgcatccaggactattcatttccacttgtttgagtcagggttcatgccaagctataattgttggacatcccatggagagcaaggtgttgaaatggaagaagatgaagtggaagacgacaatattccggactttgctcagtatgttggatttgaagaaaatcaaatgggcgaggaggaaatagctgctgatggtaacgacattgcggatgatcttggtcagatgttgcaggacgccagggaggactgcgaaagtgaaaaggaggcccataaattggacaagatgttggaggaccacagaagttcgttgtacccaggttgcgagcaggggcacaaaaagttggataccactctggagttcttgcaatggaaggcaaaaaatggggttagtgacaaggcatttggcgatttattgaaactcgtcaagaacattcttccggggggaaacaaattgcccgagacaacgtacgaggctaagaagatagtctgcccgttaggactggaagtttataagatttacgcatgtccgaacgattatatcctatatcgcggtgaggagtatgataacctagaagcatgccctatttgcaaagcactacgatacaagattagacgagacgatccaagagaagttgacgggcagctaacaaagaacaaggggaatgctagaatgttgcgatggcacgctgaagagtgtcaacaggacaggatgctgagacaccccgccgatggttcgcagtggcgaaacatcgacagaaaatttaaagaatttggaaaggacgcacgaaacatacggtttggtttgagtacggatggcatgaatccttttggagagatgagcagcggccatagcacttggcccgttacgatgtgtatctacaacctctccccctggctatgcatgaagaggaagtacataatgatgccgattattattcaaggccccaagcaacctggaaggttatattccttgcgattccttgcaacaaaccacccggtacggaagaaaggcaagcacttcgaacataaggccgatcaccgtacgaagcctaaacatcgcagcgggaaaacagtgtttgctatggttaaagatcttaaagtagtgttcggaaaggggcctggaagccagcctatagagagcgaagatggtcacgtggcgatgtggaaaaagaactctatattttgggagttaccatattgggaattcttggacgtacgccacgcaatcgacgtgacgcacctcactaagaacctttgcgtaaactttcttggcttcctaggtgtatacggaaagtcgaaagatacactggaagcacgtaatgatctgaagcatatggaacaacgcggcgaccttcacctggaaccaaaggagaaaggaagccattacttgagtccagccagctacactcttagcaaggcagagaaggaaagtatgtttgaatgcttggagagcataaagaaggtcatcgatccggatagattagaagcccttcagaatgatgtggtgcaatgtctcgtcagttttgagttgatatttccaccttcatttttcaatataatgacgcatctgctttgtcaccttgtgaaagacatccgtattctcgggcctgtgtacctgcacaacatgtttcctttcgagaggtacatgggcgttctgaagaagtatgttcgtaactgtgttcatccagaggcaagcatcgccaagggttatggaacagaggaggtcatcgaattttgcgtagaatttatcgaagatcttcgcccaatcggggtacctgaatcacgcaatgaagggagactacggggaaagggaactctcggaaggaaagcaataatgacggtagacaacaatttattccgtaaagcccatttcactgttctgcaacactcttcattggtagctccttacatcgaggagcacttggctctagttcgcgccaggaacatcgcgagcgattccattccacaggcaacccttgacggcagcgatgaaaccaacctcttcaagacatctccaactgagaagaacttcaactctgggctgacgtcagcacaaggaggggtggcgccgacacgcgggacccgcgggtcagtgactcaaggagagagaggggcggctggcaagcgggccccaccgagcggcggctcatggggacgaggagatgcccggtcggctcggctcggcctcaaaccggccgaccggttatggcgagggcggtggcgcgcacgcacggtcgccggcgacggcaaccggaggcgcggaaagcggcggcggatgacggcggcgcgaaggcggcggcacacagccgcagcggcggctcggcccggcacggcgctaggagggagagaaaggggaaaagagggggaggggcgcctcaccgcgagttggccggcgtggggggaaaagacgacggcgaacggcgacggcgagcgaccggggaacggcgacgataggcggacgagctccgagacctcc

SEQ ID NO: 16203 - DNA, 235 bp, Oryza sativa
  Clone ID: PAT_MRT4530_21975C.1
atgcgcgcgcactttagcttgtttttctctacagagtgcgccctctctttttttttttttcaggagtatcaaaatgaaagtttcggcgggttcccaaaaataggccatttaagttcagtaccaacaaatttattaaaatcggatttagaaatattcaaatggcccataggaaaatcaattgggctcagttacaattcatcaaacacatgcacacgaaaattgtgtttccaacaat

SEQ ID NO: 16204 - DNA, 1943 bp, Oryza sativa
  unsure (1)..(1943): unsure at all n locations
  Clone ID: PAT_MRT4530_21976C.1
ctagtgcgcgccgccgtgcggggtggcgtcggcggacgggatgacgaggtactcgtagagaagcccggcgaggccggcaccgatgaaggggccgagccagtacacccagtggtgcctccagtgccagccgacgagcgtagtgttagactcgtggaatttgtcctcgttgccggagtagtcgaccacggtgtcggaggcggagtcctgcgtggagacgaagctctgggcggcgaccatggcgatgtccccctcctcctcctcgccctccctggacagcggccgcggcgacgccttgacgggggcgagcaggtggtcatagtcgacattggacagcgcgcctcgctcgccggctaaagaccacagctggccctccgagcggatggactctagaaccactgcaaccgaagcgagcgcagagtcgaaaacctcgccgttgtcgatcaccttggcgccgtccatccagatgatgcagcggatgctcttcccctgcgtgagcagctcgaacgccctgttgatctcctcgaaccccatctcgtgcgtgatgaactcctccagctccagctccttgtccaggtacttctgagccagcatcgggatgtcgttcttgggcttgatgccgccgaagagcgacccgatgaccgatcttccccggaggatctcgtgcgacgggatgctgatcggcgccttgttgccggagacgccgagcaggatcgtcttcccccacccatttcgagtgctttggaaggcttccgccatgaccgaagtcgagccgatgcactcgaagcagtagtcggcgccgccgcccccggtcatctccttgatgacctcgctcacggtcttcccgccggtatcgttcgggttgatgaagtcggtcatgcccagcctcttaccaacgtcgaatttgtccgggttcaggtccaccccaataatcctcttagccccacgcatcctcgccccttgagcaaccgctaacccaacggcacccaggccgaacacggcgacactcgagccgggctccactgctgccaccttccatgccgcaccaacaccggtggaaatgccacaactgaggaggcatgccatcgccggtgggaatccaacatcgagcttgacaatgtgggtgatgtcaacgacggtgtactcggcgaagctggagacggagaggaagtggcggatgggctcgccggtggagacggaggagaagcgcgtcgtgcggtcgcgaggcatgaggccggcgacgttgggcagtttggagcagaggttgctgcggtcggagaggcagtcagggcactcactgcactgcgcggcgaacaccggcaccaccatgtcacccaccgccacctcctgcacgtgctcccccacgctctccaccacaccgactgcttcatggccaaagatagacggatgattgccttccatacgccagaaggtgatgtccgtgtggcagatggatgtgcagaggatcttgatccggacctcgtgcgcccgcggcggcgccacctccacctcctccatctccagcggctgcccggccaccatctcctcattcttctcttttcttcgttcttctctcatggtcccgacgaaatgaggcacgccgccgccatctcccgcggtcgcggcggcggacggcgggagcatgcgcgcgggcgacgacgtgggcacaggtacggccaccgccgcggcagcggactggagcgagcgggcgatgacgttggagtcacgcggagaacagcggagaaggcgagtgaggcgggcggcgaccttgctcccgttcgcgtgaggcgtcggcgtcaccttcatcctccgcagcgatttccccgacgagctagcggaagaaccgggtcggcgggcaggcggcgtcgaggctaagcgtcaagcatggctccgatggagcggcacgtctcggttgggcgggttggagcaggangggcggacggcgg

SEQ ID NO: 16205 - DNA, 3519 bp, Oryza sativa
  Clone ID: PAT_MRT4530_21977C.1
atggcgaaggcggcgaacacgatcgcggcgaggaaggccgagaaaggaatcgaaggaatgggtggccaccatagacgtgatggttgggaaccatcgtgcccgttgtcaaggagcgccgagaaggcgagggtttatcccaagtcaaactttttctctaagatggatcggcaatggatgtacgctgaccggcggtccaaagagtttattgacggcgtgcattattttttgagagtggccgaagctaacaggcaaaagggttttacttgtttttcatgcaataagtgtaagaatcagaaggagtattctgcatccaggactattcatttccacttgtttgagtcggggttcatgccaaactataattgttggacatcccacggagagcaaggcgttgaaatggaagaagatgaagtggaagacgacaatattccggactttgctcagtacgctggatttgaaggaaatcaaacgggcgaggaggaaagggatgctgatggtaacaatgttgcggatgatcttggtcagatgttgcaggacgccaaggaggattgcgaaagtgaaaagggggcccataaattggacaagatgttagaggaccacataacatcgttgtacccaggttgcgagcaggggcacaaaaagttggataccactctggagttcttgcaatggaaagcaaaaaatggtgttagtgacaaggcatttggtaatttattgaaactcgtcaagaacattcttccggagggaaacaagttgcccaagacaacgtacgaggctaagaagatagtctgtcctctagcactggaagttcagaagattcacgcatgtccaaatgattgtatcctatatcgtggtgaggagtacgagaacctagaagcatgccctgtttgcaaagcactacgatacaagattagacgagatgatccaggagaagttgacgggcagctaacgaagaagagaattcctgctaaggtgatgtggtatttccctataataccaaggctaaggcgtttgttcaggaacaaggggaatgctagaatgatgcgatggcacgctgaagagcgtcaacaggacgggatgctgagacaccccgccgatggcccaaagcaacctggtaacgacatcgatgtgtacctaagaccactggtcgaagatcttaaactgttgtggaagaaggaaggtgtccctgtgtgggatgaggacaaacaggaggagtttaacctacgagcgctgctgttcataaccatcaacgattggcctgcacttagcaacctatccgggcagtccaacaaggggtacaaagcttgcactcactgtatggatgaaacagaaagtacgtatcttaagcactgtaggaaggttgtgtacatgggttatcgtcgattccttgcagcaaaccacccggtacggaagaaaggcaagcactttgaacataaggaggaccactgtacaaagcctaaacatcgcagcgggaaaacagtgtttgctatggttaaagatcttaaagtagtgtttggaaaggggcctggtagccagcctatagagagcgaagatggtcacgcggcgatgtggaaaaagaactctatattttgggagttaccctattgggaattcttggacgtccgccacgcaatcgacgtgattcacctcactaagaatctttgcgtaaaccttcttggcttcctaggtgtatatggaaagtcgaaagatacactggaagcacgtaatgatctgaagcatatggaacaacgcggtgaccttcacccggaaccaaaggagaaaggaagccattacttgagtccagccagctacactattagcaaggcagagaaggaaagtatgtttgaatgcttggagagcatcaagctgctatcagttgtaataaggggtatcctcccagacaatgtccgggcaacaataacaaagctatgtgctttcatgaacgcaatttcgcagaaggtcatcgatcctgatagattagaagccctgcaaaatgatgtggtgcaatatcttgtcagctttgagttgatatttccaccttcatttttcaatataatgacgcatctgctttgtcaccttgtcaaagagatcggtattctcggtcctgtgtacctacacaacatatttcctattgagaggtacatgggcgttctgaagaagtatgttcgtaaccgtgctcgtccagaggcaagcatcgccaaggggtatagaacagaggaggtcattgaattatgcgtagaatttatcgaagaccttcgcccaatcggggtacctgaatcacgccatgaaggaagaaagggaactcttggaaggaaagcaataatgacggtagacaacaatttattccgtaaagcccatttcacggttctgcaacaatcctcattggtggctccctacatcgaggagcacttggctctagttcgcgccagaaacatcgtgttgtttgtatcgatgccatgggacacgatggtacaactgacacgtattacggtgccatcgaggacatgggaacttgactatggacctctcaaggtccctctgttccggtgccaatgggctaggttgactggtggaggcgtaacgattgatgacagtgggatgacaacggttgaccttaacaagattggatactcggacgaaccttttgtccttgccaatgatgtaacccaagttttctacgtcgaggacatgtctagcaaaggaaaaaagggcaaagggcctgacgagccgaagcgccacgtggttctcccaggaaaaagaaaaatcatcggagtggaggataagactgacgaggattacgatcagtttgatgggcaaccccctttcacggtgacgattgacatcctcctatcaaatgaagacaccccttactcacgtagcgatcacaaggaaggaacaatagtgaggagaaaaaacacatatgcaatgaaattcaagacacagctgctattatctttagtcccggttcctaaccctaaccggatggctgatcgcgatgaggaacagatactatacgatacaatcgcagagggaagcagccagtactggaacgaagaagaggggaacaacgatccaaaccagtacttgaacgaggaggggaatgtggagagggatgcggaggggaacaaggaggggaacgatgcggaggaggctagtggaagtcatccctcggctggacagaagagggcacgcggacaacgaggtgccgtgaagaagatagagggtcggcacatcatagctgaggtggacgaagacggccgacctagtgccccggcagaagcagccaagaattttgtatgccacagcggttgggttgtgagggacaacgtgcctgtcagcacggtgtactggcgcaaaacaagggcacgcggggataatgacagctttgtcccggactcagagaaagagatgctgtggaccacaatgctcgagacgttcacgctacccgcgggtacggagaacatagtgaaacagtggactctgaagaaaatggcagaacagtttcagagcttcaagtga

SEQ ID NO: 16206 - DNA, 122 bp, Oryza sativa
  unsure (1)..(122): unsure at all n locations
  Clone ID: PAT_MRT4530_21978C.1
gtagtaaaataagcaaganaatatatgaccgccatcggctcggtctgaccgaatacggctccatcggctctatatcggccatcccgagcagcaccatcccggcctccagggggccggtctga

SEQ ID NO: 16207 - DNA, 574 bp, Oryza sativa
  unsure (1)..(574): unsure at all n locations
  Clone ID: PAT_MRT4530_21979C.1
gattctgtaattattttttttattagtgtccaaacacctcatgtgacaccctatgtgacgtaccaaaactttatattcctggatctaaacaccccctagatcccacctaaaatttgttgacctcgtcacatcgaacatttaaacacctgtatgaagtattaaatatatgcttaaaaaataactaattgcatagattgggactaatttacgtgaaatcttttaagcctaattgctccatgatttgacaatgtggtgctacagtaaacatttgtaatgacagattaattaggattaataaattcatctcactgtttaccgtcagattctgtaaatagtttttttattagtgcccaaacaccccatacgacaccctatataatacccgatatgacatgccaaaactttgcacccctagatctaaacactcccttactattgcctagtttcaaaatataagtaaatttaacatttaaattggggaaacatgtaatattcacgaaaaatntataaaaaaactgatatttacttctagtagtataacaccctatccgcaaagtctcattttccaattttt

SEQ ID NO: 16208 - DNA, 254 bp, Oryza sativa
  unsure (1)..(254): unsure at all n locations
  Clone ID: PAT_MRT4530_2197C.1
cccccgcttcgcccacgcgcaggcnacacggggggcgaaacctagctccgangcccccttnttccccctttccccacctngccgccgccggagctcaccgccggaaagttggccggcnagttaggagggcggcggcggggccttctcctgtggtggcgtcccctcttggcgcggggaaggcggcgaaaaccggcggcggggagtggcggcggcgagctctccgggcaagacgatgacggatctncggttgctgt

SEQ ID NO: 16209 - DNA, 6295 bp, Oryza sativa
  Clone ID: PAT_MRT4530_21980C.1
atggatcggcaatggatgtacgctgaccggcggtccaaagagtttattgacggcgtgcactattttttgagagtgaccgaagctaacaggcaaaggggttttatttgttgtccatgcaataagtgtaagaatcagaaggagtattctgcatccaggactattcatttccacttgtttgagtcggggttcatgccaagctataattgttggacatcccacggagagcaaggtgttgaaatggaagaagatgaagtggaagacgacaatattccggactttgctcagtatgttggatttgaaggaaatcaaacgggcgaggaggaaatagctgctgatggtaacgacgttgcggatgatcttggtcagatgttgcaggacgccagggaggactgcgaaagtgaaaaggaggcccataaattggacaagatgttggaggaccacagaacttcgttgtacccaggttgcgagcaggggcacaaaaagttggataccactctggagttgttgcaatggaaggcaaaaaatggggttagtgacaaggcatttggcgatttattgaaactcgtcaagaacattcttccgggggaaaacaaattgtccgagacaacgtacgaggctaagaagatagtctgcccattaggactggaagttcataagaatcacgcatgtccgaacgattgtatcctatatcgcggtgaggagtatgagaacctagaagcatgccctgtttgcaaagcactacgatacaagattagacgggacaatccagaagaagatgacgggcagctaacaaagaagagaattcctgctaaggtgatgtggtatttccctataataccacggctaaagcgtttgttcaggaacaaggggaatgctagaatgttgcgatggcacgctgaagagcgtcaacaggacgggatgctgagacaccccgccgatggttcgcagtggcgaaacatcgacagaaaatttaaagaatttggaaaggacgcacgaaacatacggtttggtttgagtacggatggcatgaatccttttggagagatgagcagcggccatagcacttggcccgttacgatgtgtatctacaacctccccccctggctatgcatgaagaggaagtacataatgatgccgattattattcaaggccccaagcaacctggtaacgacatcgacgtgtacctaagaccactggtcgaagatcttaaacagttgtggaagaaggaaggtgtccccgtgtgggacgaggacaaacaggaggagtttaacctacgagcgctgctgttcgtaaccatcaacgattggcctgcacttagcaacctattcggacagtccaacaaggggtacaaggcttgcactcactgtatggatgaaacagaaagtacgtatcttaagcactgtaggaaggttgtatacatgggtcatcgtcgaatccttgcagcaaaccacccggtacggaagaaaggcaagcacttcgaacataaggccgaccaccgtacgaagcctaaacatcgcagcgggaaaacagtgtttgctatggttaaagatcttaaagtagtgttcggaaaggggcctggaagccagcatatagagagcgaagatggtgtatacggaaagtcgaaagatacactggaagcacgtaatgatctgaagcatatggaacaacgcggcgaccttcacccggaaccaaaggagaaaggaagccattacttgagtccaaccagctacactcttagcaaggcagagaaggaaagtatgtttgaatgcttggagagcataaaggtaccgtctggatacaccacgaatatcaagcgaataataagcacgaaggagaagaagttcacaaacctaaagtctcatgactgtcacgtgttgatgacacaactactaccagttgtaataaggggtatccttccagataatgtccgggcaacaataacaaagctatgtgcattcatgaacacaatttcgcagaaggtcatcgatccggatagattagaagcccttcagaatgatgtggtgcaatgtctcgtcagttttgagttgatatttccaccttcatttttcaatataatgacgcatctgctttgtcaccttgtgaaagagatcagtattctcggacctgtgtacctacacaacatgtttcctttcgagaggtacatgggcattctgaagaagtatgttcgtaaccgtgctcgtctagaggcaagcatcgccaagggttatggaacagaggaggtcatcgaattttgcgtagaatttatcgaagatcttcgcccaatcggggtacctgaatcacgccatgaagggagactacgaggaaagggaactctcggaaggaaagcaataatgacggtagacaacaatttatttcgtaaagcccattccacggttttgcaacaatcttcattggtagctccttacatcgaggagcacttggctctagttcgtgccaggaacatcggtaagtccgatgcatgtattacacggcatcacattgatactttccccgcgtggatacgacaacatctcatgggtaacgagtcgatcaaccaacaacttgccttcctagcgaggggaccgtctgggtcgatcgcgacattccagggatatgagattaatgggtacacattctacacgatagcccaagacatgatgagcacgaaccaaaacagtgctgttcgtgtcgatgccatgggacacgatggaacaactggcacgtattacggtgccatcgaggacatatgggaacttgactatggtcctctcaaggtccctctgttccggtgccaatgggttaggttgactggtggaggcgtaatgattgattacagtgggatgacaacggttgaccataacaaggttggatactcggacgaaccttttgtccttgccaatgatgtaacgcaagtctttttcgtgaaggacatgtctagcaaaggaaagaagggcagaggacctgacgagcctaagcatcacgtggttctcccaggcaaaagaaaaatcgtcggagttgaggacaagactgacgaggattacgatcagttggatgggcaaccccctttcacggtgacgattgaccctagcatcctcctatcaaatgaagacaccccttactcacgtagcgatcacaaggagggaacaatagtgaggagaaagtacgtgcggtcaaccgtcaccgccgatgtattgccccgccgagtttcagacgccgacgccgacctcgtcacgacacgacgccgcgccacgagatgccacgacgccgcacgccgccgccgcgccacgccgatgccgtgcgcggcgccacgccgccgccgcgccgccccgccgccgctccactgccgccacactgccgtcccgctgccgccacaccgagaacgtgaacgagcgaacgaacgtgaatgagaacgagcaaacgaacgtgaacgagaacaagatggctgatcgcgatgaggaacagatattgtacgatacaatcgcggagggaagcagccagtactggaacgaagaagaggggaacgaggatccaaaccagtatttgaacgaggaagggaacgtggagagggatgcggaggggaaccaggagggacacgtggaaagggatgtggaggggaaccaggaggaggaggctagtggaagtcaaccctccgttggacagaagagggcacgtgagcaacgaggtgccacgaagaagcttgagggtcggcacatcataacggaagtggaagaagatggacgacctagtgccccggcagaagccgccaagaactatgtacgtcacaacggttgggttgtgcgggataacgtgcctgtcagtacggtgtactggcgaagaacaagggcacgtggagatcatgagagctttgtcccagatttagagaaagagatgctgtggactacaatgctcgagacattcacccttcccgcgggtacagaggacaaagtgaaaaggtggactctgaagaaaatggcagaacagtttcagagcttcaagggagagctgtacaagaaatatatcctgaaggggcagacaccgaacttcgacacattcccaaagctaagggatcactgggacgagttcattgcatataagacagctgaacaagggcaggtgatgatggaaagaaacaaagaaaatgccgccaagaagaagtaccatcaccacttggggttaggcggctatagcgtcgcgatgccgaagtgggaggagatggaggctagcttgcttgagaggggtatcgaaccggccaccgctaattggccggaacgatcgaagttctggtactatgctcacggtggaacgctcaacccagctgatggctcactggtcttcggcgatcagatacgagaggctgcgcgtcgactaacagacgcagtggaagcctcttctcagggcacgagtcggatgaggagcaagagagataccgaggcgaagattgcagatcttgagttcagggtatcgagctacgagctcagcatgcaagaggaggtggcaaggaaggttgatgaacgcatggccgcacatcggtccaatgatccccagccgaccattcctcctgcaatggtgagcccgtcaggaaaccgtagcagctacgcctcaacggggcaggtaggatcacagagcatggacgccatgcaaacccaggacgaatccacctgccccgttgatgacatcactcagcggacaccatgtgagctgcatattcctttcaagaacttatcaataaaggtggcgtcgggcatggccatcccaacggacccttcaggtacttaccactgcaggccgattccagcaggatactccaaggtcgaagttgagttggtcgaaggcgtgtacgaggacctcgagctggattaccctggaggagacggtgagacgcatctacgagacacaagccatgccattattctatggcgcaggcggtacatcatcctccctgggcgacaagcagcgtctcgtgcaccatctcctccggctccgccatctcctcctcaggatcctgcaccgtctcctcctcatgctccagcaccgtctccacctcaggctcctgcaccgactcctcctcaggctcctgcaccgactcctcctcgggctcctacaccgactcctccgcaagctcctcttccggcaccttcaaagtcaagggcccctaaagctccaccgcctgcccacacaagggcaacgaagaaggcgaaagttgacgccgccaagaacaaggacccagggtacgattgcacgcaagaggagcttgacgcttacgtagcatcagaagtcaagagacaattcaagcctcgaagtccagaaaagaagattcctatagacacgagtgccatgaacttcttcaggggtatgtctgcacctgccaaggaggctattaaactatcggactatgagcgaacgctgaagaaagcatcttctggaaagtccaaaccagtccctcagcttggagagcaaccaaaccaagagatcgagccgttggtgaccggtaaagaaatgacgatagaagaatttattactgacaccggtctaactacggatcaattgctaggagtcgcaccaatcgaaaaggcggaagtgaaatacatgtacgaactcggtaaaccgcttgtcaagcctgagctgctgcagtccctacccacacaaatgtacaagttccatcagctgtacatggagatgagcgccaccggtagagagatgatcggagcgaggatcagggacacggacttcttgcaaggagatgacattctctggatcaatttcaagggaatctacgaactataccagctggacgccctcaacgtctctattatgagttgctggattttattccactgggtgcttttactcttcgacctgtcggcctgcaccgtcaacgtatatgactcaatggataaaaaagagtctacgtttgacaaggttttcgaacttatagacagggcttggtatcggttccgtcatttggtccgcggcaaatggagagaaagacttagacggaagttcaaatttccttgcgcaaagcaaaagaagggaactaacttgtgcagctattacgtgtgcgagtattgccactgccttgcagaccaaatcatcaccacaagagagctcaattttattcgcatgagggataacctgaccacgcacaaggaatttatcgctgcggttcaagaacaactcatgggattcatcaacgaacaaatccttgatcccaagggtgaattctactacaacggaaacacaattcataggtccttagcttctgagctagcgactactactacgtcgaaatcgtag

SEQ ID NO: 16210 - DNA, 330 bp, Oryza sativa
  Clone ID: PAT_MRT4530_21981C.1
atgcagccgcagaaacgtatgaataaacccgaaattccagaggtgtatgatgaattcgcctgcagagtagtggagcgcgccattgctcacagcagattcattgtttgttggctcatgaggcgggttggtcctcagaaccaaacaactgcctacgaaaatggcaaccgggggcggctcagcgcgcgcaaggaggtggcggcggcggcgtcggtgtcagaagaggaggagccgacggccatcggcgcatgcaaggaggagatccgtccgccggcggtggaggcggcgacggcggatgtaacgctccgctttttgcgtgacgttaaaaactaa

SEQ ID NO: 16211 - DNA, 3568 bp, Oryza sativa
  Clone ID: PAT_MRT4530_21982C.1
aaactgtaacataaattttcccctggacctgtggaatgaacaaattgtagttacaacttacaaacatatatagagtatcttgtttttgcaaaatgaacaaaatttaacctcataacttaagcaaattatgaacctttttccgtttgtgaaataatgagtcagctttcctcacaaccataccacattcatggcatacacgacccaaatcttcataaacatgaatatcgtggttgtaattgttcaactgttttttattattcacttccgatgtgtcgagctgtccaaaacatataattagaataaaaaaattaacaatgattggcttcaaaagcatgtattttgtggtttcaacttgtacctgtgtgctctccacagccacatagaaagcaccccaacgatccttaagacaatctgctgctggatctacctctcctttttgttttctctccctagggatggccatagtgctatcactgaaatgaaagtcctggtcagatttctgatgtttttcttccatcttctccatgttgccactggccaaaattattgtttctctttcttctgctttctccacggaacaattgcaaattcttcctagaacttctgtagtgttgtatccccatccacaaatcttgttttcaacagaaacttgttgcagccaattcttaagcgtatgcaccacctttcttcccttcccaaagtagtatagcagagcaaaaggcacagcagagcagagagaaggaagaggtaatggtcctgcgactgccaatagatggggaggggttgcagctgtcactgccagtaccactgcttcagttagccatggatggatacttggatacctccagcttttgcaagcttcttgcttatccttgatgctgcccttgcttgcaagcaaggcaatctgccccttttcgtcgtacaaaatacgaaagatacgtataagggtgatttttcccatccacgaggaaataccaaattttacactagaaaatggtacttcccgggtaccaatcaagaaccataagatttctctacatattgagagagaacatgttgtatttacagggacacagacgaaggagaacacatgaacaaagtggactaacatagtttcagaggcaatgcttaagtaccggtttttttcagaatcttggtcaccttggcctataacattaccgccagtatcatggacactgagtcctgagctggacacattattaaaacaaactgttgcttcactgactaaacccatgtcaatactttgatacaaagccttgatatcctgacgaataacatcagtctccaacaattcatctctggagccatcgatacagacttgattcagcttgaagtcttcagttgtgcagcgcccgctccattggaaccatagctttggtatgacttccttgttgaatgcagtttcatgggccttctcctctggagaatcagcagctacaagtctatacacaaacactttcttcttctgtccaggcctgaatgtgctcccgatggcttggcgcgtaacagacgggttcaggtgaacatctaggatgacaattcttgatgcacccacaagggagatgccctccccaaatgccttgatggaaccaaacagaacttttgcatcggcagagccgttgaactgatccattgccaattgtccatcttccatgctagtatcaccatttatcacaaaaatttccttccctacatgccagcccatctccttaaccagcagcctttccaaaaatttcatggggagtgtatactgactaaaagcaactaatttctctcctgcagagttggcaagcgcaaggatgttcagaaaaaacctggccttcaccccatctcccaggttgatgctgttgaccaaactatcaactctgtcatccctatcaacatcattagcttcagaaatttctgaaaggcaagggtgaacatagagtgcagcccctacagcgcttgttttgagcatcccatggtcttcttctaacttgcaaagaatgtctttctgcttgggactgagttccaagaacacactgaagtctagtaagacaggaaattcattcaagtcctcacccttacagtagtgaagcacatctttggttagttctccaagacttctgataacattaacttttcttgtgaagttatcatcattcagcagggtatcttccattgactcagagatctctgttatactcctggcacttgatatttctagttgacccatcatacgtgtaacaatgggccagaatgtctccgtcttgagaaaacctgggcgtacaagatccaaggtgttaaacacttccttgacatgattatggaagagtgtaccagacatgaccactttgcatggcgtttgcactttgcgcgcagattgtagcatatcagtctcatcaatgctaggtgtatggccctcatcaagtatcaacaagctggggaccataagaagcgtgtccctgcattcagctacagcattttcatccctatcatcgcagacaatttgggtgaaatgcttggatccaacaaagagtatgctcctcttagagctccaagattttaggacttccagttgctctactctattgtcagccttaatagaatcgaaatcatacagtggtatgtcctccacttgccactgctggaattctctcttccatgtacctaatatcccttcaggaagcacaacaaggggccttgcagtgaaatgtcttgccatgaagccttgaatgaaactgataagcataaatatttcccctgaacctggggcatgaacaagaatgcagcctccaggttcatcagtgaccaagttattaaccaggaatttgaatccttccaactgatgaggccggatattcttggcatgtcttggatgaatggcaatatctgaaaatatgaaatcttcagagagactaatagcatcagagcctaccttcttcaagcaaacctcattcacatttgttcttttccttgaagcctttttccactgatagtgaaataatgagtcagctttcctcacgaccaaaccacattcatggcatacatggcccagatcttcataaacatgaatatcgtggttgcaattgtccaactgttttttattattcacttctgatgtgtcgagatgtgtgctttccgcagtcacatagaaagcatcccaaagatccttaacataatctgctgctggatctagctcgccttttctttttctgtccctagggattgatttctgttgtttttctcccatcttctccgtgttgctaatggccggaattactgtttctctttcttctgctttctccacagaagaattgcaaattcttcctagaacttctgtagtgccaagagcacaacctcccccatctctctgccttgcaccattcctgcccctcccaggaaccaccacctcctgtgcttctttgcaccacaccggacaaagacaacaccacctttcacgaatcagatcgcaacgccttcgtttccttcccacgatgccactgctgtcgctgcctccgcctacgatgagggcaacagtgtctaaactgttgccagaaccagacat

SEQ ID NO: 16212 - DNA, 3369 bp, Oryza sativa
  Clone ID: PAT_MRT4530_21983C.1
atggcgaccggagcggaggaaggcggcgacgcggctcgggtggacggggtcgacggtgctccggtggtcggcgagcgaaacggaggggtggacgaggtcgccggggatgcggcgaagccgaaggaggcggcgccgaggggagagatggatcggcaatggatgtacgctgaccggcggtccaaagagtttattgacggagtgcactattttttgagagtggtcgaagctaacaggcaaaggggttttatttgttgtccatgcaataagtgtaagaatcagaaggagtattctgcatccaggactattcatttccacttgtttgagtcggggttcatgccaagctataattgttggacatcccacggagagcaaggtgttgaaatggaagaagatgaagtggaagacgacaatattctggactttgctcagtatgttggatttgaaggaaatcaaacgggcgaggaggaaatagctgctgatggtaacgacgttgcggatgatcttggtcagatgttgcaggacgccagggaggactgcgaaagtgaaaaggaggcccataaattggacaagatgttggaggaccacagaactttgttgtacccaggttgcgagcaggggcacaaaaagttggataccactctggagttgttgcaatggaaggcaaaaaatggggttagtgacaaggcatttggcgatttattgaaactcgtcaagaacattcttccggggggaaacaaattgcccgagacaacgtacgaggctaagaagatagtctgcccgttaagactggaagttcataagattcacgcatgtccgaacgattgtatcctatatcgcggtgaggagtatgagaacctagaagcatgccctgtttgcaaagcactacgatacaagattagacgggacgatccaggagaagttgacgggcagctaacaaagaagagaattcctgctaaggtgatgtggtatttccctataataccacggctaaggcgtttgttcaggaacaaggggaatgctagaatgttgcgatggcacgctgaagagcgtcaacaggacgggatgctgagacaccccgccgatggttcgcagtggcgaaacatcgacagaaaatttaaagaatttggaaaggacgcacgaaacatacggtttggtttgagtacggatggcatgaatccttttggagagatgagcagcggccatagcacttggcccgttacgatgtgtatctacaacctccccccctggctatgcatgaagaggaagtacataatgatgccgattattattcaaggccccaagcaacctggtaacgacatcgacgtgtacctaagaccactggtcgaagatcttaaacagttgtggaagaaggaaggtgtccccgtgtgggatgaggacaaacaggaggagtttaacctacgagcgctgctgttcgtaaccatcaacgattggcctgcacttagcaacctatccggacagtccaacaaggggtacaaggcttgcactcactgtatggatgaaacagaaagtacgtatcttaagcactgtaggaaggttgtatacatgggtcatcgtcgattccttgcagcaaaccacccggtacggaagaaaggcaagcacttcgaacataaggccgaccaccgtacgaagcctaaacatcgcagcgggaaaacagtgtttgctatggttaaagatcttaaagtagtgttcggaaaggggcctggaagccagcatatagagagcgaagatggtcacgcggcgatgtggaaaaagaactctatattttgggagttaccatattgggaattcttggacgtacgccacgcaatcgacgtgatgcacctcactaagaacctttgcgtaaaccttcttggcttcctaggtgtatacggaaagtcgaaagatacactggaagcacgtaatgatctgaagcatatggaacaaagcggcgaccttcacccggaaccaaaggagaaaggaagccattacttgagtccagccagctacactcttagcaaggcagagaaggaaagtatgtttgaattcttggagagcataaaggtaccgtctggatactcaacgaatatcaagcgaataataagcacgaaggagaagaagttcacaaacctaaagtctcatgactgtcacgtgttgatgacacaactgctaccagttgtaataaggggtatccttccagacaatgtccgggcaacaataacaaagatatgtgcattcatgaacgcaatttcgcagaaggtcatcgatccggatagattagaagcccttcagaatgaagtggtgcaatatctcgtcagttttgagttgatatttccaccttcatttttcaatataatgacgcatctgctttgtcaccttgtgaaagagatccgtattctcgggcctatgtacctacacaacatgtttcctttcgagaggtacatgggcgttctgaagaagtatgttcgtaaccgtgctcgtccagaggcaagcatcgccaagggttatggaacagaggaggtcatcgaattttacgtagaatttatcgaagaccttcgcccaatcggggtacctgaatcacgccatgaagggagactatggggaaagggaactctcggaaggaaagcaataacgacggtagacaacaatttattccgtaaagcccatttcactgttctgcaacactattcattggtagctccttacatcgaggagcacttggctctagttcgcgccaggaacatcggtaagtccgatgcatggattacacggcatcacattgatactttccccgcgtggctacgacaacatctcatgggtaacgagtcgatcaaccaacaacttgccttcctggcgaggggaccgtctgggtcgatcgcgacattccagggatatgagatcaatgggtacacattctacacgagagcccaagacatgaagagcacgaaccaaaacagcgctgttcgtgtcgatgccatgggacacgatggaacaactgccacgttgactggtggaggcgtaatgattgatgacagtgggatgacaactgttgaccttaacaaggttggatactcggacgaaccttttatccttgccaatgatgtaacgcaagtctttttcgtgaaggacatgtctagcaaaggaaagaagggcagagggcctgatgagcctaagcgtcaagtggttctcccaggcaaaagaaaaatcgtcggagttgaggacaagactgacgaggattacgatcagttggatgggcaaccccctttcacggtgacgattgaccctagcatcctcctatcaaatgaagacaccccttactcacgcagcgatcacaaggagggaacaatagtgaggagaaagtacgtgccgtaa

SEQ ID NO: 16213 - DNA, 3171 bp, Oryza sativa
  Clone ID: PAT_MRT4530_21984C.1
atgggaggtcatgccaaaatttctattgaatttattttggtgattacatacaaatcggagatggatcggcaatggatgtacgctgaccggcggtccaaagagtttattgacggcgtgcactattttttgagagtggccgaagctaacaggcaaaggggttttatttgttgtccatgcaataagtgtaagaatcagaaggagtattctgcatccaggactattcatttccacttgtttgagtcggggttcatgccaagctataattgttggacatcccacggagagcaaggtgttgaaatggaagaagatgaagtggaagacgacaatattccggactttgctcagtatgttggatttgaaggaaatcaaacgggcgaggaggaaatagctgctgatggtaacgacgttgcggatgatcttggtcagatgttgcaggacgccagggaggactgcgaaagtgaaaaggaggcccataaattggacaagatgttggaggaccacagaacttcgttgtacccaggttgcgagcaggggcacaaaaagttggataccactctggagttgttgcaatggaaggcaaaaaatggggttagtgacaaggcatttggcgatttattgaaactcgtcaagaacattcttccggggggaaacaaattgcccgagacaacgtacgaggctaagaagatagtctgcccgttaggactggaagttcataagattcacgcatgtccgaacgattgtatcctatatcgcggtgaggagtatgagaacctagaagcatgccctgtttgcaaagcactacgatacaagattagacgggacgatccaggagaagttgacgggcagctaacaaagaagagaattcctgctaaggtgatgtggtatttccctataataccacggctaaggcgtttgttcaggaacaaggggaatgctagaatgttgcgatggcacgctgaagagcgtcaacaggacgggatgctgagacaccccgccgatggttcgcaatggcgaaacatcgacagaaaatttaaagaatttggaaaggacgcacgaaacatacggtttggccccaagcaacctggtaacgacatcgacgtgtacctaagaccactggtagaagatcttaaacagttgtggaagaaggaaggtgtccccgtgtgggacgaggacaaacaggaggagtttaacctacgagcgctgctattcgtaaccatcaacgattggcctgcacttagcaacctatccggacagtccaacaaggggtacaaggcttgcactcactgtatggatgaaacagaaagtacgtatcttaagcactgtaggaaggttgtatacatgggtcatcgtcgattccttgcagcaaaccacctggtacggaagaaaggcaagcacttcgaacataaggccgaccaccgtacgaagcctaaacatcgcagcgggaaaacagtgtttgctatggttaaagatcttaaagtagtgttcggaaaggggcctggaagccagcatatagagagcgaagatggtcacgcggcgatgtggaaaaagaactctatattttgggagttaccatattgggaattcttggatgtacgccacgcaatcgacgtgatgcacctcactaagaacctttgcgttaaccttcttggcttcctaggtgtatacggaaagtcgaaagatacactggaagcacgtaatgatctgaagcatatggaacaacgcggcgaccttcacccggaaccaaaggagaaaggaagccattacttgagtccagccagctacactcttagcaaggcagagaaggaaagtatgtttgaatgcttggagagcataaaggtaccgtctggatactccacgaatatcaagcgaataataagcacgaaggagaagaagttcacaaacctaaagtctcatgactgtcacgtgttgatgacacaactgctaccagttgtaataaggggtatccttccagacaatgtccgggcaacaataacaaagctatgtgcattcatgaacgcaatttcgcagaaggtcatcgatccggatagattagaagcccttcagaatgaagtggtgcaatgtctcgtcagttttgagttgatatttccaccttcatttttcaatataatgacgcatctgctttgtcaccttgtgaaagagatccgtattctcgggcctatgtacctacacaacatgtttcctttcgagaggtacatgggcgttctgaagaagtatgttcgtaaccgtgctcgtccagaggcaagcatcgccaagggttatggaacagaggaggtcatcgaattttgcgtagaatttatcgaagaccttcgcccaatcggggtacctgaatcacgccatgaagggagactacggggaaagggaactctcggaaggaaagcaataatgacggtagacaacaatttattccataaagcccatttcactgttctgcaacactcttcattggtagctccttacatcgaggagcacttggctctagttcgcgccaggaacatcggtaagtccgatgcatggattacacgacatcacattgatactttccccgcgtggctacgacaacatctcatgggtaacgagtcgatcaaccaacaacttgccttcctggcgaggggaccgtctgggtcgatcacgacattccagggatatgagatcaatgggtacacattctacacgagagcccaagacatgaagagcatgaaccaaaacagcgctgttcgtgtcgatgccatgggacacgatggaacaactgccacgttgactggtggaggcgtaatgattgatgacagtgggatgacaactgttgaccttaacaagtttggatactcggacgaaccttttgtccttgccaatgatgtaacgcaagtctttttcgtgaaggacatgtctagcaaaggaaagaagggcagagggcctgatgagcctaagcgtcaagtggttctcccaggcaaaagaaaaatcgtcggagttgaggacaagactgacgaggattacgatcagttggatgggcaaccccctttcacggtgacgattgaccctagcatcctcctatcaaatgaagacaccccttactcacgcagcgatcacaaggagggaacaatagtgaggagaaagtacgtgcggtcaaccgtcaccgccgatgtaatgccgtaa

SEQ ID NO: 16214 - DNA, 240 bp, Oryza sativa
  Clone ID: PAT_MRT4530_21985C.1
atgccggatgacgtggccaaccgtttcccgccacgtggaggatctactggtcgctcggctgcccgcgtggcgcgctttgaccgacaaaaccagaaccgctcgctcttcaagggcgcgcgccgcgtcgtcggtaacgccatcgtcgcacggtgtacggcagcacggctgtcccgccacgcctccgggtgcgacgcgacgcgggcttcgccggcagcagcagccaaccaaccgatcgactag

SEQ ID NO: 16215 - DNA, 277 bp, Oryza sativa
  unsure (1)..(277): unsure at all n locations
  Clone ID: PAT_MRT4530_21986C.1
cttgggctgagatccggttcgaggttttgctcnttnttnnttttttgaatactatanttcagaagaaagaggatgacccttcatccttcttttancctttcacagnnccataaatgtgaaaggatataatacaaggtgaattnaacacctttntggggggtaaatggaagaaacaaaaaaggctcacatcccaggccttctctagcttgtcatggagataacctaccctagcaccgcatagggagggttacccntccataacnaattaaacaaatgt

SEQ ID NO: 16216 - DNA, 875 bp, Oryza sativa
  Clone ID: PAT_MRT4530_21987C.1
aggtgcggtgtccattgaccaaataccatatttatggagtaagtaacgtaaacaagtatctctctgtttctttttgtttgatgccggttagttcaaaattacactaatcaatactatttatttgaaaacagaggtagtaataaacatggtgaatatttgtttctcattgtttatttgtttctcattattccatatcgatcgaaaagtcaatagtgttaattcttcagacttagactcaaatatttcgaaagtgaaacaatataaaaccacaagtttaatgatgcagcatttgcacgctcgtgttgttgatgagttgattttgacaaagaatgtgttgaaaaaaaatacaaagttgctttttgtgcaagttctttggtcaatgcttcatgtgcaaataaggcaaaacaaaacaatggtgttttgatttctcaagattgctcaaagtgtgttttgaatgagatgaagttgaaagatgctttagggcgtgttaaacacatggaagaaattgttaaacaagataaggttttgattcttatgcttatcatgctagacatcctcctattattttgggtgttgctaggagagaaaaaggaaagagaaattgcttttgcaaaatgacattggcaaaaatcgggttttaattcgaggagcacagttagaccgacattgtccaagttgccaggcccggtcagaccgcaggtacagcggcggtcagaccggccttggggcaatttttcgcatacttcaaatcggacttttgtgaaacgacaaggtaaaaaatatgaaaaaatgaataccgaatccttggaaacagtcttgacgacaaagacgtattcgatgtgagtaaaataatgggtgccgaatccctggaaaca

SEQ ID NO: 16217 - DNA, 277 bp, Oryza sativa
  unsure (1)..(277): unsure at all n locations
  Clone ID: PAT_MRT4530_21988C.1
agatctcccccatttcaactccctcctcctccactttcccccccgcatcgagcagcgaagnncgatggcggaggancagccgcgcgcggcggcggtagggcggcggcgagacgctgtatggagaagatcgccgacaagctccacatcggtggggacgggtcgtcgtccgacnccgangctgacgagcgcaagcagcngaagccctcggngccgccggccccggccgatgtcgcaacggagtcgtttgttgattcggctgctgntgccgcggccgaag

SEQ ID NO: 16218 - DNA, 902 bp, Oryza sativa
  Clone ID: PAT_MRT4530_21989C.1
ttatttttgaaaaggaaaagaggattattgcgtcagcggctcgggttcacggtgaaccggttgcacagaggcggtctacggaacggacggccaagaacaaccctatccaaaatggacggccgagatcgacttgatctactgccggtctacgggaaacggcgacgatgacgtcagtggtgacgtcaccaccggcggcggctcgggcgcgcatgctcgccagcgaacgacggtgcggcggcgcaaacggagagcatctacgggtagcgggcgacacggcgaactcaccggtgacccaaacgacggcggcggcgacgatcgggttgacgacgacagcggtgctccggcgatcttcggcggaaacggaggggtggacgaggacggcgacggcttggcgatcacgatggcggccttcccgagcgacgacgatgaccagagcggcggcgtcgcacggctggacttgcggcggcgacggcggcgcacgggtgaacgcggagacggcactacaagcggcggcgagctaaggcgagggtggcggtgggggctaggaggcggcgacggaggcccacggcggccggcagcgagaaggaaagattagggttcgggagagagagaggaatccgattcgagatcgaatccggcactttccaagcgattttagccgatgattccaaaagagaaaagatagaggggatcccggagattatttcccctcaatcaattcgggcggagaaggaaagaggcggtgggccccacctgtcagcggctgagagagaggagggagggcgcggcgaattgggctggcttgggccgggcgcaagcaggccgaggagagggagagagagagacttgggccgactttcggcccaaagccaaaaagagagatttaaaaatctttttctatt

SEQ ID NO: 16219 - DNA, 386 bp, Oryza sativa
  Clone ID: PAT_MRT4530_2198C.1
aaacaccaaaccctgggggaatcaggggtaaacaaagggaaaaaggaacgagtcaacaaaaaaaaaaaaggggccgatatttcgttccccacaaaggaaaagggaaaaaaaattaaagggggggaaaggaaggccttcccgggggcccaaacaaaaaggggaccagggcaaccaagaagcttaacatggaccccatcggggaggaatccacccccgctttaaagccggacgaaatcatggggggggaactgggggaaaccccactttttaccccaaaggaactttgggggaccagggaacttgaacttggcacaaaggggggcttcgcgggaaaggacaaaattggggggcttgccccccaaaaaaaggagcggccccgggggccc

SEQ ID NO: 16220 - DNA, 2214 bp, Oryza sativa
  Clone ID: PAT_MRT4530_21990C.1
atggggatctccgagtccgatgagctccgggcattcgaggccaccggaatctaccgtctcgccgaatccggcgctgctttcctcgaccccgtccgcatcctcaacgcgtcctaccgccgcttccgcctcgtcccttctgcgtactactcccgaagcttcggcacgtcgcgtcagggaggcgaagcggaaaccgaacgaactggggaggcgtctccagaacggaagaagcggaagcggaagcggcagcggcagccgaagcccagggaactgaacgaagtggagcggatggcagaagctcggcaccaggaagcaaggcctttgctatcgagcgcacacaaatcactgcttaaggctaaagatctactggagttccttccgaggatgatcaaggaagatgtgcgcatgcttgatgtggaaagtaatttggagaagaatcttgttgaacttgggagctcatggcgagcgcctttatgtgagatgactctttgctttcagaagtcttctggtgaggatagtgaggaagataattacaatcaaggttacaaccttatagttgttgatccaccttgggagaatggatgtgttcgtcagaaagtagcgtaccctacacttcccaacagacatttcttgtaccttccagtacaagaacttgcccatccagctggagctcttctagttttgtggattacaaatcgggagaaactttggaagtttgttgaggaggagttatttcctgcttggggagtgaaagatcatactgtgttctattggctgaaggtgaagccagatggttcgctgattggcaatctagacttgctccatcacaggccttatgagtgcctccttgttggctacataaatcttaacaaagaggccgtacgaggttcaaaattcaagtttttggaagaaaggcgggtgatttttttttctcaaagtttacccatggtggaggtggataggaatataatggtgtctatggccaaggctatttctcgtgtcactctcttcttgacgtacacagcctttgccattctcattggaggagtgcatctgcagaatgtgcgtgtcgagcagcagaatggagaagcagcagcatcagctctatgcctctacgtgtggcaacgcttgtgcgtaacggcacgaggcgttggacccaaggcaccaaatccccttatccctcgtcgtgccgaggccgttgcacccgccgccgaccgcgacgtccagcccgacgcgaccgaccttgccgacgaggcgacgacgccagctcaaaggcttgcttccgagatgccaggcctaaggcccgagtctccggcaatcccatcgccagagctccgccgtgtccggacgtcgttcaccggagcttcttcctgggtagccacgactgccatgggtaaggtggtacgatcagccaatgcgccggtcgagccgaaggcgaaggtagaggatgtggagaagcagaggaggaggggtaagggaggttgcaatgggaccgtctcgtcggcgaggtgtaggagcccaccgccgtctcctgtcagcccggagctggggaagacgaggtgttcatggatcacagtcaactctgaacccctttatgttgctttccatgatgaagaatggggagttccagttcatgatgaccagaagctgtttgagctgcttaccttatcacaagccttagctgaaatcacctggcctatcattctgaacaagagggacgaattcagggagatgtttgatggtttcaactatgcatcagtgtctgagttcacggacaagaagataaaccttttgtcgaaatcaaatggaaacatgctactttcggagcaaaagatacgggctgttgtaacaaatgccaagcaaatgcataaggtaatccaggatttcggatcgttcagcaactactgttggagcttcgtaaaacacaaacccgtcaaaagcaacttccgctatgctcgccaagtacctatcaagacgcccaaatctgaggccataagcaagggcctgatgcgacgaggcttccaatgcgttggccctacgacaatctactccttcatgcaggtttctggcatcgttaacgaccatctgtcatgctgcttcaggtttcaggattgcagagatatcaaaaggaacctgagagctgagccaggattgatagaaagaaggttgaactcaccgccttcctcagaagactctgaaactagcagggaggcgtga

SEQ ID NO: 16221 - DNA, 1473 bp, Oryza sativa
  Clone ID: PAT_MRT4530_21991C.1
atgggggcaaagcttttgctcttactggtggcctcatctctatgtctatctgctgcgatcgctacgcagcaaacctgtccggccgacctcgatagcaagtgtggtgatgctgcttcaggggattgggaaggggagttcttccctggcatccccaagatcaagtatgagggtccaagcagcaagaacccgcttgcttacaagtggtacaatgctgaggaagtgattcttgggaagaagatgaaggattggatgcggatgccaacagtggtgatccccagatcccgtggtactgcaggagatccttttggtgtctttacaaagtttttgtgtttgtatcatgggtcgttaagaatggtgggcttgcacctggtggattcaactttgatgccaaattgaggagggagagtactgatgttgaggacatgtttctggctcatatatcgggaatggacaccctagcccgcggccttcggaatgttgtcaagctgatcgaggatggttccctggatgagcttgttcgcaagcgctaccagagttttgatagtgagatcggtgccttgattgaggctgggaaaggagacttcgagacactagagaagaaggttctggagtggggtgaacccattgttccatctggcaagcaggaactggctgagattctgttccaagctgctctatagatggtgccgtggtgctgttcatagttctaggaataaagcctagcacgcctttggaaacggaatgtgcattctatcattgtctactacgagcaataatctagttatagtttagttattagccttccatgcaatgaacttttgtacactacagcatggaacttaaataatgatgagttgtgcctttctaaactgaaataaaagagtcggtacctttatgaattaaacaccaaaattaaaaaaaaaaattgaatgcaaccacgctactctatctggacatagctgccaccatgagcttgagactgcaagaattaatggtctgcttgggaatattgatgccaacactggtgatccccagatcggttgggacaccgatcagttccttacagatatttcagaggctactttggttatgtcaagtgtggttaagaatggtgggcttgcacctggtggattcaactttgatgccaaattgttggttcccgctgacattgttttttttttttgtgtgaggagggagagtactgatgttgaggacatgtttctggctcatatatcgggaatggacaccctagcccgcggccttcggaatgttgtcaagctgatcgaggatggttccctggatgagcttgttcgcaagcgctaccagagttttgatagtgagatcggtgccttgattgaggctgggaaaggagacttcgagacactagagaagaaggttctggagtggggtgaacccattgttccatctggcaagcaggaactggctgagattctgttccaagctgctctatag

SEQ ID NO: 16222 - DNA, 399 bp, Oryza sativa
  Clone ID: PAT_MRT4530_21992C.1
atggcgctgaggagcctggttcggccgaacctggggctggcccaactagcccatgcattccccaacggagtcgccaaaaatcgtgttggcaacttttatggcaagaagaaaatcacgatcgggacacttaaatgccttgtggctagcggagccaatttggagaaacaagcaataaacacccgtcttgtgtacgaacggaaggtttacgggatgtacaagggatttcgcactcccttagaaaaggtcctcctccacgttcaacttaggatagaaaccactacaaacccgaaacatgcctccccgagcaagaaatccagagacccgacgaaaacagactcggaatcggacactatcgatctgatcgaccaaacaacgccggtcagaccgacccacaagtag

SEQ ID NO: 16223 - DNA, 648 bp, Oryza sativa
  Clone ID: PAT_MRT4530_21993C.1
gaaatccccaaagtcccaaatcaaattaacatcacagatctaattgacattacagatccaattcataacatcctcaacaacaaaattattcacaaaaacataacaaaaatatacaatggagagggattcacaaaaacatcacgaaaaaaatctgccgccatcaatacctccgcagcccgcctcgtgcatcgcccgctgcccacatcgcccgccgccgcctaatgcctcccctcccatcacatccagtggaggagagggctctgccgctgcctcctctcccacaacggtcgtcgtttgcctgccgcccccctcgtgcctcatgggcgcccgccgcccacatcgcccaccgccgcttgacggggctctgccgccgcctcccctcccacaacggtcaccgccgcctgccgcctcccctcctgctagatccggcggaggggacgccggatccgacggagggggcgcccgccacatcccctcccacaacagccgctgccgcccgccaccgccttgtgcgccgcagctgccacctccgagccgccgggccaccgccaactccgagcctcccatcgccgtcgccgggcgcgggggagggagaggcctcgagagatagagctgagagagggagagagagagagagagagagctgtg

SEQ ID NO: 16224 - DNA, 2541 bp, Oryza sativa
  Clone ID: PAT_MRT4530_21994C.1
atggctagaggcggcggcgtgcacgaccaccggcggcgaccggtggcggcggacggcgcaaaggcggcagcgcacagctggagcaacggcgcggccaaaagcgacggcgcacgcgggaaggggaaggaaaggaagggggagggagtcctcaccagagagggcggcggcgaccggcggcggaaaacgagggaggcggcgaagtccggcgatgccgagggtttactcttgcttttacaccgatattttcttgggaccatttataaattcaatttaggcttaggaggagaacttcagggtgtgacatacgggcacctcaacttcgacgctctccgctcactggcgagccgcggcatggtgcgcggcattcccactctggagcgggttaccaagatgcatgatgaaggccaagaacatgccgggggagttctagggcgaggcggtcaccactgccgtctacatcctcaaccgggcgccgacaaagagcgtccgcgacaagacaccgttcgagtcatggcacggtcaaacacctgttgtgcactactttcacacatttggctgcgtcgtctacgtcaaggaggtgaaaccacacatcaagaacttgatgatcggagcaaggtgatggtctttctcggctacgagccgggttcaaaggcatatcgtatatacgacccggtggccaagcgcatcgtcgtgagccgtgacgccgtgttcgatgaggcggcatcatggccatgggcgtcacccggggaggaggacgggggaacgtctcctcaggaaaccttcaccgtgcgctacgaggtagtggcggtggacgtgccgtcccgccactccgactccatgtcgtcgccggctcacatgggaacaccagtgccatcaatctctgcgtcaccgggtgtcctagcggtggagtttgtgtcgctgcctgcggaaacacctgatgtcgacgacgacagcacagggccacgtcgtttttggatggtggccaaaatccttgacactacctcgccaattgagctcgactccgacgagcttcatcgtcccattggcctgaaatgggtgttcaagctcaagaaggacgagacgggcgcaattgtcaagcacaaggcccgcctggtcgctaagggttacgttcagcggcaggggattgatttcgacgaagtattcgcccctgtcgccagaatggaatccgtgcggctgctactcgccattgcagctcaccttgggtcgtctgtgcatcacatgaatgtgaagtcagccttcctgaacggagagctagaggaggaggtgtacgtcgcccagccactaggcttcatcgacgacaagcacccacatcaagtcctgcgcctaaacagagcactttatggtctgcgtcaagctcctcgtgcctggaacgcgaagctggatgttagtcttcatgaactcgggttcacacggggcatcacagaacatgctgtgtacacgcgcgggaccgggaacgcgcggctaattatcggcatatacgtcgacgatctcatcatcaccggcgctcactctaaaacaattcagagtttcaaggaggagatgcactccctattccggatgagtgatcttggattactcagctactacctcggcatcgaggttcatcaaggcaacgatgggatcacaataaaccaatccacttatgcgcagaagcttttgaagatgggtggcctggcggcttcagcttccgttccaatggaacccagattgaaactgacgaagaacagcgatcgaccaagtgttgattcaaccttttatcgcggcttagtggggagtttgcggtacctggtgcattcacggccagacattgctttcgcggtgggttacgtcagccgattcatggagtcaccgcgcaatgatcatctcacggcggtgaagcacattctgcgctatgttgcaggagaagagggaatccatttgctaggattttctgacagtgatttggggggagatgcgcacgatcggaagagtacctgtggtgctctcttcttcctcggctcaagcccgattgtatggcagtcccagaagcagaaagtggtcgctctttcctccagtaaagctgaatatatcgccgccactggagcagcgtgtctcggcatatggctggctcgattgctagctgaggtgctgggaagtgatccagggaaggctctcctcaaggtcgacaacaagtcggcgatctccctgtgcaagaatccggttttccatgaccggagtaaacacatcgatacaagagagaaactgatggagcagaagaagaagaagaagaagaagaagaagaagggatcagtgaggagattggaagagacgttgctgcttaatttcatgcagcaggagaaacgttccttcattgcagaccaaacagaaacgacgtcgccgtgtccctgccgtggcgaggatggcggcatgggctggcctggaaccagggacaggcaaattaagaaatacgaaaaatgggacgtaacacggcagcttccactcaggatgggaatggttaagtttggcccatttaaccactga

SEQ ID NO: 16225 - DNA, 5181 bp, Oryza sativa
  Clone ID: PAT_MRT4530_21995C.1
gtgcttatacattggtctgatgatgtgatcgccaatgcaacttgggaagacttggaagatcttcgtactcgtttcccaagagcactggcttgggggcaatccagttttcaaggggggaacattgtcaaggctgcgttgggtgctgatgctgacattgccaaggaggagaagatcgaagggagagttctgaatcctagtttaggcagctatcatgagggcgagagggtggcaccattccacgatggcagcagcacctctgcacgaaggcgacaacgacaacacatgggagaggaccggggattaaccactgatgaggacattgaggtgcttaccacgatagagaggtggcagcaatgccgggtggttgacaacaagttgatggcgatggtggatggcttgatggaagacggcgcaggaagtggggaagacgacagaggtggatggcataacagtgctgcgccattcgctgctcgtgcttgcgatgacagcggcaacattggtgctcactcgatcggactgcaacacaaccgcgtctactcgatgtcccgaggcaggaacctaggccggattatagtgagcagcaatagcagcaagacatggaacggtggtctgcaaagggaaaaggagggggtgctggatctacttatagaggaggacagggagttgagcggccagccggaagatgctcaaggtctgtgggatgctgtcgacaccggcgatgtcccgtatcaggaagattgccaggcgctttcagccatcttgcgagcggtgccggctgagatggtccggccgcttgccgagaaggacagcgccaaagacgcctgggatgcgctcaaatccatgcgagtaggcgcagatcgtgttaaggagtcccgagcacagaagctgcgccaaacttttgagtccatgcgattcaagaatggcgaacacctggaggatttcagccttcgtctccagtccttggagatgatctgtctgaagagaaggttgtttgaaaattgcttcgcgtcgttccccggaggcgctgtccctcacgacgcaggaggtgggagaaaatccccggcgcagaggcggctggcagaggagaagacatggatgggagcaactctcaaaattcttgaagacaacaaaaacaatgctcgccaggagggcaaggcatgcagatttacaacacacgtcgacatcatggccgagtgtcgacgagatgaaatggccaatttatcaatatttgtgctatgtccgagaccgacgagtccggataacatattggctaaagctgacaaggctgcagtcattaactcattccatttgtctatgaccgacgaggtgctcttcagcgaaaaggaggcccctgctcactcaaacaaggaagctgggcagaactcagccggggggagggcgtccagctcacggcaaccacaccgcagcaggcgcgagcgcgacggcaacggctccgacggcaagtcaggttcgtcccaagcggcaaaccgcaatgtgtccaaggacaaatgccggtactgtggcaaacttggtcactgggccaaggactgttgcaaggcgaagcgagaccgcgagaaactggctcaggcaaaccttctcatcaccgagcctgctcaagccgcggacgaaggggagccgacactgctgatggcgcaagtgtgcgagcttgcccctgctaccgatcctgtcattactgacggggaggtgacactgaaggaggaacgtgctcacgtttctcttcaggatgaaggaaagcccgttgatctagactggatccttgacacgggcgcttcaaatcacatgacgggctcccgtgatgccttctccgagcttcacaccaccgtgcgcggcactgtcaagtttggtgatgcgtcgagagtccggattgaaggacgaggcacggtgctgttcgcctgcaagaacggcgaccactgcgcgctcactggcgtctactacatccccaagcttcggagcaacatggtcagccttggccagcttgatgaggcacgttgcaagacggtgatcgaggatggcgttctcactctgcgtgattcacagcgacggctgctgtgtagggtgcgccgaggaactgggtgcctctatgttctccacgtcgagctggcgcaaccggtttcccttctcgcaaaggggaacgatcaagcctgggtctggcacgccagatacgggcacctcaacttcgacgcactccgctcactggcgagccgcggcatggcgcgcgacattcccactctggagcgggtcacccaggtctgcgatggctgtctaataggcaaacagcgacgagcgccgttcccaacagcggcgttgcatcgcgccactggtcgtcttgatctggtgcacggggacatctgtggacccatcacgccgtcgacacatggcggagtggaggtggagaccggctgcaagctgcgcgttctccgcactgatcgaggaggcgaattcacctctgtcgagttcgggctatactgcgcgaacgaaggcgtcgctaggcagttgatggcgccgtactctccacagcaaaacggcgtcgtcgagcgccgcaaccagacggttgtggcaatggccagatgcatgatgaaggccaagaacatgccgggggagttctggggcgaggcggtcacaactgccgtctacatcctcaaccaggcgccgacaaagagcgtccgcgacaaaacaccattcgaggcgtggcacggtcgtacacctgctgtgcactactttcgcacatttggctgcatagtctacgtcaaggaggtgaaaccacacatcaacaaacttgatgatcggagcaaggcgatggtctttctcggctacgagccgggttccaaggcgtatcgtatctacgacccggtggccaagcgcatcgtcgtgagccacgatgccgtgtttgacaaggcagcgtcgtggccatgggcgtcacccggggaggaggatggggtggcgtcttctcaggaaaccttcaccgttcgctacgaggtagcggcggtggaagtgccgtcccgccactccgactccatgtcgtcgccggctcactcgggaccaccggcgccatcaatctctgcatcaccgggcgtcccagcggtcgagttcgtgtcgccgcctgcggaaacgcctgatgtcgacgacgacaacgtagggccacgtcgtttccggacggtggctaacatcctcgacactacctcgccaattgagctcgattccgacgagcttcatctggctgctgccgaggaaccaagtaaccacactgaggcggcacaggacacactctggcagcgagcgatgcaggaggaactaaagtccatcgtggagaacaacacgtggactctcgctgacctccctgctggcaagcgtcccattggcttgaagtgggtgttcaagctcaagaaggacgagacgggcgtaattgtcaagcacaaggcccgactggtcgctaagggttacgttcagcagcaggggattgatttcgacgaagtattcgcccctgtcgccagaatggaatccgtgcggttgctactcgccattgcagctcaccttgggtggtttgtgcatcacatggacgtgaagtcagccttcctgaacggagagctggaggaggaggtgtatgtcgcccagccaccaggtttcgtcgacgacaagcacccacatcaagtcctgcgcctgaacagagcactttatggcctgcgtcaagctcctcgtgcctggaacgcgaagctggatgttagtcttcatgaactcgggttcacgcggggcatcacagaacatgctgtgtacacgcgcgggaccgggaacgcgcggctaatcgtcggcgtctacgtcgacgatctcatcatcaccggcgctcactctgaaacaattcaaagtttcaagggggagatgcactccctattccggatgagtgatcttggattactcagctactacctcggcattgaggttcatcaaggcaacgatgggatcacaataaatcaatccacttacgcgcagaagctcttgaagatgggtggcctggcgggatgcaattcagcttgcgttccaatggaacccagattgaaactgacgaagaatagcgatcgaccaagtgttgattcaaccttttatcgcagcttagtggggagtctgcggtacttggtgcattcacggccggacattgctttcgctgtgggctacttcagccgtttcatggagtcgccgcgcgatgatcatctcacggcggtgaagcacattctgcgctatgttgcaggtactgtgaactacggttgcaagtttgcacattcaggagaagaggggatccatttgctgggattttccgacagtgatttggggggagatgtggacgatcggaagagtacctctggtgctctcttcttcctcggctcaagcccggttgcttggctgtcccagagcaagctcccgctgtcgtcgtccatcaccacaagcagcagcaagttgtatacgccctcctgttcgtcttcaacagcatcagcaagtcggggcccccaggccgccgtcgatcgctgtacgccccgcgccgatctccgcccgcatgcgccgtcgccccgccagtttcggagttcggacgcgtcggcactccgcccgccgtcgcccctcttcgcccgcatgcgccattgccccactccgcccgttgccgccccgccggcttcgcgcgcgtcgctgctccgcccgccgtcgccccgcttcgccctccgtccaagatggactgtttcttttcatcgacgtggcgtcaaggaggagaggacgatactgaaggggataaccgacaaggtgaggccgtgggaggtgctggctgtactgggaccatcggggagaggcaagtcgacgctggtctccatcctcggcgggcggctcgccggccggcacgccgggatggtgctggcaggcgggcgcgcgccgtgccgtgccgtgcagcggcgcgcggggttcgtggcgcaggacgacgtgctccacccccacctcaccgtctgcgagacgctcctcttctgcgccatgctccgcctcccgacctccgcgcccgccaccgccgaggccgccaccgccgaggccgtcatctccgagctcggcctcgcgtcgtgcgccgacaccatcgtcggcaacgccggcatttgtgcctacctgagtgctaagtatatggtgattctctga

SEQ ID NO: 16226 - DNA, 2247 bp, Oryza sativa
  Clone ID: PAT_MRT4530_21996C.1
atggagttttatcctcttcccggaacaacaccggcaacacccatagtatatattactcaggccgaccaacatgaagccttgttgatgaacatgaagctgacgttcatggtggtgctcatggctctcatgggctccatcatctacagcaccggctttctacgcctctccttcaggcggctgcctacctgcggtggcatgttcctttaccggtacgaccttacccggatcgtgcgttttgtgctcaacttcgtcttcttccagttcgttcctctcctctcctcagccttttcacagagcgaaaaccggagcaaaaccgagctcctcctgatactcctgtggatgctcctcgccgagatcatccgcaagaagggggatcggacggttcacgctcatggattacgcctacgacacactagtcacctagtgtggatcggctacctcatatgctccaaattgccagatgataaatccctgagcatcaccttcgctgtgctctggttcctgtgctttgtgaagctcgtgctaagcgctgtgaacaggtggttcgccagctactccttccacacggcgaggaaccctcttgttattgcaggctacatgacgaaagtcatggacaagtacaaccgcgacggcgatggccggagcgccgtgccggccaacgacatgtccaactgcaaattcgtggtgatgggaaggcgcgtcgtcgtcgccggcggtggccaccaacaccaagccacctactgcaacgaaaacgagcagaagcatttacatctctgtatcgccgaacccgatgactactccaacagcgactccaacaaggaatggcccttggtcactgtgaaaacaatatgggagatgcgcgaaaaacacaagaacatcttccatggcaagataggggatttccttgaggacttatgcctatctttctctcttttcaagatgctccggcgccagttcgagcactacccgatggtggaggtcggctccgacatggctcgcgccatgatgctcgacggcctcctcaaactcaacttctctagcccaggcagcaactcatcccatgatcaactccaaaggcctttccaagtgcttctaatggagcttgagctcctcaagaactactaccagcaagcggctgcccctgtggtgatgtcccaacctatccttttctgcaccaacttcttgtcctccattatcttcttgtattttttcatcgatgccgtagttgacatactaatcgtcaacaaggatgcagcaccattatattgccgaatcatgggctggggaagaacccctgtgaattccccgtccctcatcctctccttgaccatgttgcttgtgctcacggtcattctcatcgaggctcatgacttcctgacctcgtttgtgttctccgattggaacatagtccgcatgctgtgctcctacgaccggcccagtagacggtggctacagaaaatctattccgtggtcatctacatacgctcttgtttactttcttcatccaaaaacaagatgacaatctgccaggtatccattcttgacgcctgtggtccaatcgacaagcattttgcaaggacttcccaggttaccctgccggcgagtgccactgcgcagatcatccaagccttgtgttcatgtcacattatcaatcgcagcactggagccatcaaccttccatcaggcatcgattccaaccagatgaccaccaccgaggccatcctggcgtggcacctggcgacggagctgctcgagacgacgacgacgatggacaagcagaagaaagaatgccagatcgcgtcggtgctgtccaagcggtgcggctgccgcgcgtgcccgccgagccgccggtgcaggaagaagaagatcgccaagaccgccatatcaggcgaccagtgggagaattcgttccaagacccgacggtgcggagaggtgtaaagctgttccactggctcagggagaagcccgccgacgaggcgtgggacgagctggcgcgcctctgggtgcacctcgtcatctacctcgcgccgtccaacgacgtgcagggccatgccaaggcgttggcctcatggggcgccgacctcatcacctgcctctgggcactgtgcacgcacgccgggatcacgcgccagccgcctcccgagcaacatgatgtactagtgcacgacgagcagcagatcgacgtcgtcgtcgcccatcgccagccgacactcaaccacgacgatgacaactccatcaatgtataa

SEQ ID NO: 16227 - DNA, 552 bp, Oryza sativa
  Clone ID: PAT_MRT4530_21997C.1
atggtgtcggcgcacgacgcgaggccgagctcggagatgacggcctcggcggtggcggcctcggcggtggcgggcgcggaggtcgggaggcggagcatggcgcagaagaggagcgtctcgcagacgattaagtggcgtgcaaacggaggacaagaaacagtccatcttggacggagggcgaagcggggcgacggcgggcggagcagcgacgcgcgcgaagccggcggggcggcaacgggcggagtggggcaatggcgcatgcgggcgaagaggggcgacggcgggcggagtgccgacgcgtccgaactccgaaactggcggggcgacggcgcatgcgggcggagatcggcgcggggcgtacagcgatcgacggcggcctgggggccccgacttgctgatgctgttgaagacgaacaggagggcgtatacaacttgctgctgcttgtggtgatggacgacgacagcgggagcttgctgaaagccaagcctaagatttgtgtaaactcactatctctctctcacacgaattcactgatctcggaagaacgatga

SEQ ID NO: 16228 - DNA, 7899 bp, Oryza sativa
  Clone ID: PAT_MRT4530_21998C.1
atggctcaagatgggaaactcgatctcttgttgaagatgatggaggaggccgagaaggagcgggaggagatggataggaagcgcgaggagtcggaggccctgaatcttgtggagttgcagctgttgaagcttgcgatggagtcccgcatacccttggtggagaaacaggtgagcgagttggggggttctgcgaatgatttggcgaagagggtgaattccttgcaggcaagtgtggagaaatgtcagcgggaagttcagcagaacgcgctatacaaaggggaatccagccaaggaccaactcaattcccaaatgatgatgacctcaatggaaactcaccgaatcctttcctgttcacaccccaacaaggatggcgaaatcctccgcagttcaattctgtaagcccatttactcctgagaactcgggttgtccaatctttgattctggaatggctagtattggtggcaatgtcccttctatgtcttgccctcagtttgatggagaaaatccccagatgtggagagataactgtgaaatttattttgaggtctatggggtacatcctgctaattgggttaaggttgctctgctgaatttcactggaagtgcttcgttctggttgcaatctgttaggaatgagttggtagggatttcctggttggagttatgtgatagagtgtgcccgcagacaggcagtgtgactgagtatgtggagagatttgatagtctcatgcatcagctgttggcgtatgacaatgcccttacaccaaggtacttcctaactaagtttgtggatggcttgaaggatgacattagaggggcagttatgcttcagagaccggaagaaatattggaaggaagcagaaaaccaagttacaggaaatctgatggaaccaatttcaacaaggtgttttcccgacctactcagccaactgtttggccaaaaagtcctgctcagactactggagatgacaggaagctgattgagtcagggaagataagagtcaaggggttgatacaggggactaaattactgatgcttattgactctggcagttctcattccttcttagatgagaatattgttcagacaatgcaaggagttacatcccttccacaacctgttaaggttaaggttgctagtggtgaagttctgatttgtgacaaacaattaccggattatgcttggtggcttcaggggagatgttatagaaccaactttaaattgctttccctgcctgggtatgatgccatcctggggatagactggttacaagggctgggagtcatgagaataatttgggttcaaaagtggttggaatatgagatcaatggaagtccagttaggattcaaggggtgatgcccaaggttgatgcctgtcctctaatatctggagataaactcatgggcttgtgcaaaatgggagctcttatgcatctgtttcagattaccagtgaaaccgacatacataaacctgagattcccattatgatacaagaagtgatgaatgaattcaattcagtttttgaagaaccacaaggactgccacctaggaggcgttgtgaccattccattccattaattcctgggtctaagccggtcaaccttcggccctatggatacaatccagcccagaaggatgaaattgaacagcaagtacgagatatgttaaagtctggagttattcatcctagtgttagtccgtattcatctctggcattgctagttaataagaaagatggcacctggaggctttgtgtggatcatagactgcttaatgctatcaccatcaagagcaaataccccctgcctgttattgatgaacttttagatgaattggccggcacaggttggttttctaagttggatttgagggcgggatatcatcaaatcaggttggttgctggagaggaacctaagaccgcctttcaaactcattttgggcactttgagtatcgggtgatgtcctttgggttgacaggggcacttgcaaccttccaaggagctatgaatgaaaccttggcttcggtcttaaggaagtgcgccttggtgttctttgatgacatactgatttacagtccaaccttggaagctcatgctcaagatcttagaactgtcttgcaactcttgcaggatcatcagtggaaggtgaaattgagcaagtgctcttttgctctgaaggaactcaattatttagggcatactattggagtggctggagtttccactgaccctagcaaggtacaagatattgtcaattgggctattcctactaccttaaagaagttgaggggattcttgggaatagctgggtattatcacaaattcgtgaagaattttggtgtgattagtaaaccactcacaaacctgttaagaaaaggggttgagtttgtgtggactccggaggtgcatgagtccttcgagcaatttaagaaagctttggcttcagctcctgttcttgctcttccggattttactaaaccttctgtcattgagactgatgctagtgagatcggaattggtgcagttttgtcccaggataaacaccccattgcttatatgagtaaggcattgggtcctcgtactagggggttatccacttatgaaaaagaatgcttggcaatcctattggcaattgagcattggcggtcctaccttcagtatgcagagttcactatactcactgaccacaagagcttgatgaatcttactgatcagcgcttgcatactccttggcaacaaaaggcctatacaaagttgctagggctgcagttcaaaatttgttacaagaaaggaatccacaatgaagcagctgatgcccggtccagatgtgaccataactcttctttggaggtggttgctatttcgcaacatttgaacagagcacaacagtttatgaagagccaagctgacaagaaaagaagttttagagcttttgcagtgggagattgggtctatttgaagttacagccatatgtccaaacttcagtagcagccagggctaatcacaagctgagtttcaagttctttggtccttatgaaattcaagagaagattggtgttgtagcataccgtttagtccttccggcgagcagctctattcaccctgtttttcatgtctcgcagctcaaagcagctcaaggttttaaaggggatgcttctgttcatcttcctgttcagtcttctactaaacaagttcctgtggctattctggatactagggtgcgcaagtcaggtatgtctgttattcctcaggtgcttatacattggtctgatgatgtgatcgccaatgcaacttgggaagacttggaagatcttcgtactcgtttcccaagagcactggcttgggggcaatccagttttcaaggggggaacattgtcaaggctgcgttgggtgctgatgctgacattgccaaggaggagaagatcgaagggagagggaggaagaacgtgaaagcggcgcaggtgcttaccacgatagagaggtggcagcaatgccgggtggttgacaacaagttgatggcgatggtggatggcttgatggaagacggcgcaggaagtggggaagacgacagaggtggatggcataacagtgctgcgccattcgctgagaattcgcgtgagagagagagtgaggattcacaatcttgggctttgctatcatttggtatcagagccatgtccgctcccgccagcggttcgtctcgcactcaccggcgaacaggccgccggctctcgccgtctccgccgcgcgtgagcgggcgacagctcgtcgtgcagcggattgttaaggaagatggctccgtctactatccaatactcagacgctcaaattactccgattgggcggtgttgatgcgagtcaatctccaggctcaaggtctgtgggatgctgtcgacaccggcgatgtcccgtatcaggaagattgccaggcgctttcagccatcttgcgagcggtgccggctgagatggtccggccgcttgccgagaaggacagcgccaaagacgcctgggatgcgctcaaatccatgcgagtaggcgcagatcgtgttaaggagtcccgagcacagaagctgcgccaaacttttgagtccatgcgattcaagaatggcgaacacctggaggatttcagccttcgtctccagtccttggagatgatctgtctgaagagaaggttgtttgaaaattgcttcgcgtcgttccccggaggtatcgccaaatggctctatcgattgaaaccttgattgatctcactttgctttctattgaggatctgactggccggcttctcaccgtcgacgatcaccccgactctgatggcgaggacgcgggtcaggtgctcttcagcgaaaaggaggcccctgctcactcaaacaaggaagctgggcagaactcagccggggggagggcgtccagctcacggcaaccacaccgcagcaggcgcgagcgcgacggcaacggctccgacggcaagtcaggttcgtcccaagcggcaaaccgcaatgtgtccaaggacaaatgccggtactgtggcaaacttggtcactgggccaaggactgttgcaaggcgaagcgagaccgcgagaaactggctcaggcaaaccttctcatcaccgagcctgctcaagccgcggacgaaggggagccgacactgctgatggcgcaagtgtgcgagcttgcccctgctaccgatcctgtcattactgacggggaggtgacactgaaggaggaacgtgctcacgtttctcttcaggatgaaggaaagcccgttgatctagactggatccttgacacgggcgcttcaaatcacatgacgggctaccgtgatgtgttctccgagcttcacaccaccgtgcgcggcactgtcaagtttggtgatgcgtcgagagtctggattgaaggacgaggcatggtgctgttcgcttgcaagaatggtgaccactgcgcgctcactagcgtctactacatccccaagcttcggagcaacatggtcagccttggctagcttgatgaggcgcattgcaagacggtgatcgaggatggtgttctcactttgcatgatccacagcgacagctgctgtgtagggtgcgccaaggagttgggcgcctctacgttctccacgtcgagctggcgcaaccggtttcccttctcgcaaaggggaaggatcaagcctgggtctggcacgctagatacgggcacctcaacttcgacgctctccgctcactggcgagccgcggcatggtgcgcggcattcccactctggagcgggttaccaaggtctgcgacggctgcctaataagcaagcagcgacgagcgccgttcccaacggcggcattgcatcgcgccactatccatcttgatctggtgcacggggacatctgtggacccatcacatcgtcgacacatggcagtaaaaaatacttcctacttctgattgatgatctaactcgctacatgtggttgtttctgttaacatcaaaaagcgaggctcccgctaccatcaagcggttcaaggcaggagtggaggtggagaccggctgcaagctgcgcgttctccacactgatcgaggaggggaattcacctctgtcgagttcgggctatactgcacgaacgaaggcgtcgccaggcagctaacgacgccatactctccacagcaaaacagcgtcatcgagcaccgcaaccaaacggttgtggccatggccagatgcatgatgaaggccaagaacatgccgggggagttctagggcgaggcggtcaccactgccgtctacatcctcaaccgggcgccgacaaagagcgtccgcgacaagacaccgttcgagtcatggcacggtcaaacacctgttgtgcactactttcacacatttggctgcgtcgtctacgtcaaggaggtgaaaccacacatcaagaacttgatgatcggagcaaggtgatggtctttctcggctacgagccgggttcaaaggcatatcgtatatacgacccggtggccaagcgcatcgtcgtgagccgtgacgccgtgttcgatgaggcggcatcatggccatgggcgtcacccggggaggaggacgggggaacgtctcctcaggaaaccttcaccgtgcgctacgaggtagtggcggtggacgtgccgtcccgccactccgactccatgtcgtcgccggctcacatgggaacaccagtgccatcaatctctgcgtcaccgggtgtcctagcggtggagtttgtgtcgctgcctgcggaaacacctgatgtcgacgacgacagcacagggccacgtcgtttttggatggtggccaaaatccttgacactacctcgccaattgagctcgactccgacgagcttcatgtggctgctgccgaggaaccaagcaaccacgctgaggcggcacaggacgcactctggatgcgagcgatgcaggagtaactcaagtccatcgaggagaacaacacgtggactctcgctgatctccctgctgacaagcgtcccattggcctgaaatgggtgttcaagctcaagaaggacgagacgggcgcaattgtcaagcacaaggcccgcctggtcgctaagggttacgttcagcggcaggggattgatttcgacgaagtattcgcccctgtcgccagaatggaatccgtgcggctgctactcgccattgcagctcaccttgggtcgtctgtgcatcacatgaatgtgaagtcagccttcctgaacggagagctagaggaggaggtgtacgtcgcccagccactaggcttcatcgacgacaagcacccacatcaagtcctgcgcctaaacagagcactttatggtctgcgtcaagctcctcgtgcctggaacgcgaagctggatgttagtcttcatgaactcgggttcacacggggcatcacagaacatgctgtgtacacgcgcgggaccgggaacgcgcggctaattatcggcatatacgtcgacgatctcatcatcaccggcgctcactctaaaacaattcagagtttcaaggaggagatgcactccctattccggatgagtgatcttggattactcagctactacctcggcatcgaggttcatcaaggcaacgatgggatcacaataaaccaatccacttatgcgcagaagcttttgaagatgggtggcctggcggcttcagcttccgttccaatggaacccagattgaaactgacgaagaacagcgatcgaccaagtgttgattcaaccttttatcgcggcttagtggggagtttgcggtacctggtgcattcacggccagacattgctttcgcggtgggttacgtcagccgattcatggagtcaccgcgcaatgatcatctcacggcggtgaagcacattctgcgctatgttgcaggtactatgaactatggttgcaaatttgtaaattcaggagaagagggaatccatttgctaggattttctgacagtgatttggggggagatgcgcacgatcggaagagtacctgtggtgctctcttcttcctcggctcaagcccgattgtatggcagtcccagaagcagaaagtggtcgctctttcctccagtaaagctgaatatatcgccgccactggagcagcgtgtctcggcatatggctggctcgattgctagctgaggtgctgggaagtgatccagggaaggctctcctcaaggtcgacaacaagtcggcgatctccctgtgcaagaatccggttttccatgaccggagtaaacacatcgatacaaggtaccactttatcaggcaatgcattgaggagaaaaagttgaggtggagttcgttccttcggacgaataggttgccgacattctcacgaagccactcggacgaatcaagtttcaagagtttcgcagtcaggcgggcatggatcaagctcatcaggaa

SEQ ID NO: 16229 - DNA, 357 bp, Oryza sativa
  Clone ID: PAT_MRT4530_21999C.1
atggagatcaagagggtgaagattgccgttcacgtagcgaggatcatctcgatgatcctcgccatcggggtaatgtgtgtcatttatataccgacatcttatgtcaagcctctgtcctacagatatgtcttagtggctatgtggtttgaggtgcttatgtgttgcacgtggggtatggctattgcagccttgagcactgccctatttgctagacagcacagattttgcatcagcgtgtttaagtgcacacggttcctagttggatttgtgctagcggtgtctgttggatttcttagcgccgtcaaggcattaggtatgctatggatcctcggatcccaatttcctcgtgccgagtag

SEQ ID NO: 16230 - DNA, 373 bp, Oryza sativa
  Clone ID: PAT_MRT4530_2199C.1
aaaaaccccttaattgcaaaaaaaaaagaaaaaggcccagccaaaaaaaaaaaaatatgaacctcaaaagtaaaaaaagtaaaaacccaaaaagggtttttggacaaaaaaaaaaaaaaaaaaaaaaggaaaaacaaaaatgatccttgggaaaaaaagtggcgctaaaaaaatctaagcttccaaagggaaaagttaaatgcaacctgacaaaccaaaaaatgtaaaaaaagggagggaagcccccgttttaagcgaaaaatgcaaaaaaaacaacaaaggcaaaaacccttaaggcaaaaggcagctaaaacaaagggcttgaatttaaatgaacttccgaaaaaataactggagaaaaaaacaccacgtc

SEQ ID NO: 16231 - DNA, 309 bp, Oryza sativa
  Clone ID: PAT_MRT4530_219C.1
atggctcaacatctacttgctgcagcagacaagtatggcctgcataggttgaagatgatctgcttagaaatattaagtagccatattgatgccaactccgtggcaaccatcttggtgctagctgagaagcactattgctatggtctcaaggaggcatgctttgagttccttaactccttagcagtattgtccgcgattgcagcaagaggcaaggagagtgtgggtgcgacggccgacgccggggtgcgggggaatgcagagaacatgcaagttgcaagggatcaaggcactttattgattaatgattag

SEQ ID NO: 16232 - DNA, 302 bp, Oryza sativa
  Clone ID: PAT_MRT4530_21C.1
gacgcgcagccgcgtacgtagctggaccttaagcggcgcctggtgggggtttttttttttttttttttgggttttttttttttttttttttggttttctggttttttttggtcctgtggtgtccgttttctttggggggtcgcttgcgggtggctttcacccggggggggggccgcttcattgtttggcgtacattcccgcaggagtcgagccgggagcggaaagggtaaaggctgggggggccaaggggggggctaacggacaggaatgggggtgcgctcaggggccgctttcgagggggg

SEQ ID NO: 16233 - DNA, 1119 bp, Oryza sativa
  Clone ID: PAT_MRT4530_22000C.1
atggcggaggcggccgtgaggtgcctccgggacgggcgcctcgacggggagcacgctccggcacttgccgtggcgagtaatatccagtgcggcccgctcgccgccggcgccatgctccacctcgcggccgccgtggcctccaacgccgccgcggggaaggcgcaggcgaggggactggtgatcgtggcgttcgatcggagcccggaggtgtatctcgacttcatgcggcgccgcggccttgatccaaatgctttgaatcgatgtgtacggatattggattgctattcagacccaattggatggaatcagaagattagaagtcagcagcaacaagaaagtggtgcagatctctgctcagcgaacaaagagaatgttacaattttcagaaatgtgaaggatcttgataaattgatgtgctccactattgatcttggaagagggtttgcaggagaaggcaaaatctatttttcaattgctgttgactcaattagttctatgttaaggcgtgcttcagtgtcatcaatttcaagcttcctcagtaatcttcggagccatgatcaaatatcatcaatattttggctaatacattctgatctccatgaacccaaattttcccgagcctttgaatgtctctctaccatggttgcttcattagagccagctgtggttgattctgtttatgaggaagaaattccagggaatatttctttcctggaggaaaattattctaaagcaaagttttatttacgcctaaaacggcggaatggacgggtcaagcacctttacgaggagttacatgttgagggaaatgatgttagatttgtttctgctccttctgttcagttcaatcttgagctgtcagagaaggagcgcagtgacaaggcaaatgttgttcttccttttgaacatcaaggaaagggtgagcctatccatatatacgacggacggagatctctcccagaggctcaacaagatagcaatttaactgcatccgctctcctggatgaagtaaaatttcctaaatctgcagctccaaagggtgaaattcattactttcgtgattctgatgatgagcaacctgactccgatgaagacccagatgacgatttggatatttga

SEQ ID NO: 16234 - DNA, 618 bp, Oryza sativa
  Clone ID: PAT_MRT4530_22001C.1
cccgggctgcaggaatcggcacgaggattctgaacttccttttaagaacttcgaattgtagtgataatatataggagactataaaagcatgatggttctcctgggaacctagatattcatgtgtcctgcataacactcaactgcttaaggctgtgttcgataccgggagttcccaactcccccctctcgttttccgcgcacgctttttaaactactaaacggtgtgtttttttgcaaaaagtttatatatgaaagttgcttaaaaaatcatattgatccattttcgaaaaaatagctaatacttaattaatcacgcgctaatggaccgctccgttttccgtgcataggtgatgggatcccaacacccaccaccgaacacagcctaagtgatggtatctccacaggttcttttgtgttgttgttttcattaaataaatgatatttgtgttttagccctcaaaactgctggttctgtttaagttgctcctgtaccatgatgcatttctgcctgctgtatgatatcactagtaggctccactcaaaatgcttatttgacattgtagtgagtgatgagtgatgactgtcacttcctatgaattcacatgcgcatctttaacc

SEQ ID NO: 16235 - DNA, 2136 bp, Oryza sativa
  Clone ID: PAT_MRT4530_22002C.1
atgctgccgaccccccgccgcgtcaagaacaaagcaccggcgcccgtgcagctcacggccgagcatctcatccgtgaggcccgcgaactgcacggcgatggatcggtgaccgtctgcctgccggcggagtccaagaagaggaggatcgtcgatgccgacgagctcgccgagcaccggctcgagcgacgcgcacggttcgaggccatcgtccgccgagccggcagcggtcgcggaggatgcggcgacgcgtcgtcggagtggatgaggtacgcgcggtgggaggagttccccggcggcggcggcggcgaccccgcccgcgcgcgatccgtgtacgagcgcgcgctggccggcggcgcgccggcgtaccgcgaccatggtgtgtggataaagtatgcgcagttcgaggctcgtggcggccgcgtcgggcacgcgcgcaacgtacttgaccgcgccgtggcgatcctcccgcgcgctgaccgcatctggtcggagtacctccgcatggaggatctcctcggcgccacagacaacgcccgcgtagtgttcgataggtggacgtcttggcgccccggcgccgatgcctgggccgcgtacgccgcgttcgagctccgccacggcgagctggaccgtgccagagccgtgcacgagcggcatgttgctgctctcccgtgcgccgacgcgttcatccttttcgccgagttcgagacgaaactgaagaacctggaccgcgcgccccgcgtgtacgagcacgccgggagcctgctcgccgccgccggcgacaacgacgacaccgccgtgctgctcgccgcgttcgccgacttcgaggagcggtgcggggagccggaccgagcgcgtgcaatataccagcacgcgctccgtggcgagccgcccgagccccgcgccgaggagctgcgcgagaagctcctctctctcgagaagcggttcggcgaccgccatggcgtcgaggacagcatcgtcaccaagcggaggtcccagtacgagcgcgcggtgaccacgaacccgctgtgctacgacgcgtggttcgacctcatcaggctggaggagagcgccaacaccggcgacgcgaaccggatcagggacctctacaggcgcgccgtcgccaacgttccaccggcggcggcggcggcggagaagcggcattggcggcggtacatctacctctggatcaactacgccctcttcgaggagctcgacgcggaggacgtggcgcgcgcccgcggcgtgtaccgggagtgcctcaggacgatcccacacaagaagttctccttctccaatatctgcgtcatggcggcggagctcgagatccgtgacaagaacctcgccgcggcgcggcggctcctcggcaacgcgatcggcgtcgcgccccggccgaagctatccaggaggtacatcgagatcgagctccagctcggcaacgtcggccggtgccggattctgtcccagaagttcatcgagcacgctccgagcagcagccacgtatggagaagctacgccgcgttggagaagaagctgggcgagaccgaccgcgcccgatccgtatacgacctcgccgtctctcagccggcgctggacgccccggagctagtgtggacggactacatccagttcgagatcgacgccggcgagctcgacagagcgaggcagctctacgagaggcttctcggcaaaacacaacacctcaacgtgtgggtgagctacgccgagttcgaggccacggcgtgctccggcggcgccgccatcgccgggaacgcggcggagaaggccgagcgggtccggaggtgccgcgccgtatgccgaagagcggacgaacacttcaggggatgcgctgatgatcccgccatgaaggaggcaagggcgatgcttctccaacaatggctggcgaaggaggccgcgttcggcgacctcggagaggtggagccggtcgagaagaagacgccgagaagggtgaagaggaagaggagtctcctcgccgacggcaatggcggaggaggaggatgcgaggagttcttcgattacatttttggtgatgaagaggatgcaacggcagcagctggcttcaaactgatgaaagctgcttacgaatggaagaacagtggccatgttattacttattag

SEQ ID NO: 16236 - DNA, 1271 bp, Oryza sativa
  Clone ID: PAT_MRT4530_22003C.1
gcacgaggctctctctctctctctctctctcttcttggtgacccctttcactccctcaaacacttgggcccaatactagacactagcacaacattatattctctcttctcctcacttctgtcatcatctctctcagacttctctttctctctctgtctccagccatggcagctgctgaagaaggtccagagccactcaagtatcagactttggctttgaaggttagcatccactgtgagggctgcaagaagaaggtcaagaaggtgctacatagcatagaaggggtgtacaagacggacatagacgtgcagcatcagaaggtggtggtcatcggcaatgtctccgtcgacacgctcgtcaagaagctcgtcaagacgggtaagcacgccgagccatggccggagcccgctccgccgccgccggcggcagcagcggcggccaactctcccggcggtggcggcggcggcaagaagaagaaaaagaataagaacaagaacaagaatcctgcgaacggccagcccggcgagccggcgccgcctgctgcgacggcggaggtggccgccggcggcggcggtggaggtggctctgtccctccggagaatgacgaccatgggggctcgtgtgatgaggcgtccgatgacgagggcaacaagcagggcggtggtggtggatccccgaagacgatggtggccggagacgggcaaggcggcggcgccggtgcggtggcgccgccgttcgccatgacgccgcacggtaagcagcccgttgcacctcccggcaatggcaatggcggtggaggaggaggcggcggcggtggcaagaagaaaggaaagaaaggcggtggcggtggcggtggcggcaatggcaacggcaacggcaatgccgccgccgccgccgccaatgccaccggagacggcgccggtgcagtagtggaggcaagcccgcaggacgcgccgacgaaaccgtcccccggcaacgcgggtcctctcgccgtcgtcgacggcggcgtcttctacccgccggcgacgccgatgagctacccggcgtcctactacggcggcggcggcggcgggcacatgccgccgtacgtcatgagctacagcacggcgcacccgctccggagcagcgcctactactacccgatggccggcggtttcggcggcggcggcggtggcggctacctctactcgacggcggcggcggcgccgccgccggcgtcgtcgtactacatgttcagcgaggagaacgccaacgcatgcagcgtcatgtga

SEQ ID NO: 16237 - DNA, 886 bp, Oryza sativa
  Clone ID: PAT_MRT4530_22004C.1
atggcagtgactcggggagggcggtccacggtggactgggtccatggaccagggaggagcggcgcaccacgtgttgcacacgtggcgccgacatggcgcacacgcggcagccacgcgggtggccgaaccgacggccccgatctaccgcccggtagatcggacggcgggtgcggctcgcggccggtgcgtgcgggcacagctcaagccggcccggcggccatggcgcgcggcggcgcagcgcgcacgcagcggcgacgcgaggcggcgaccggccggcggcggggggcggcagcgtcgcggcgacgcgggcggctaagcagcggctaagcggctaagcggcggcgcggcggctaagtggcgtgggagagagagaggagggggaggagggacctcaccgacgacgactgacgacggcgagcgacggatggcgacggcgatggcgggacgagctccggaaccacctagcgaacaaggtgagagggattagagggagagagggaaatgggagagggtgagggtgccggccaaaggcagcggccatggcggtgctcaccggcgcacgatgcggagagggttccggcggcggattccgacggaggaggggtggacggaacggcccgcacgacggcgaacgcgacggcgtcaacggcgtggctcggcacggcggctagcggcgaccggagcggtggcggcggcggcggagaggagggcgatggcactagggcgttagagggcacgggagcgcttggcgaaatagggaaaaagagagaggggagagtggggatgcttaaataggggagagggagctcagacgtggccgggagaggcaggaatcgccggccgacgtgggggagtgggagaggagagagaggcgggattcgaaaat

SEQ ID NO: 16238 - DNA, 323 bp, Oryza sativa
  Clone ID: PAT_MRT4530_22005C.1
agacacgaccttgacgtcgggactccttgagtgtgacaaagagtccctagcagaggaggcaaatcggtcgtgccctagtcggtattgtgatttgggagaagattggaagacattggagctaggatgggagtcttggatacacaaacacgagttgggaagatgcaagataggtcttgcggatcaaactggtagcacgctgtatctcatgaacctttggacttgcactggagctaagcagatctctcaggccgttgtgttcgtcgacttagttcgcgccaatacagttctagcaccatcagccaagcgcggatttttcatcaaca

SEQ ID NO: 16239 - DNA, 549 bp, Oryza sativa
  Clone ID: PAT_MRT4530_22006C.1
atggatcttccgcagcagcagcagcatcccgagatcaatctcgacgagaaccggggtgcaagggtgatgctgatggaaaagaccctcctgaatccgatcttcctcgtggcgcttatgatgtactcgcttctcatcgggaacagccttagcggccggacggctaccccacatggatatggggctccacccccatctccagctgggctcgccacgttcatgggggtcagcttcatgtgcctctcattcgtgacggtgggcatggttcaccttgtgcttgttcttcatcttacgatgttatggcatatggaggagcgagtggataaccttctgcatcgcgggggtcatctttgtcgtgatcaatctctcaatgatgctgaggccattgaggcaggttggcttgactgccttcgagtagtaggtcgtctctacgtccgcgcgttgccgccaagaggaggagctcgaggttctgtggttggacaagcgtcaagaggtgacgtgcggtgcggagggcctaccatgtatcgtccagttctagtggttcttcagtag

SEQ ID NO: 16240 - DNA, 722 bp, Oryza sativa
  Clone ID: PAT_MRT4530_22007C.1
gttaaaaacagtctccttccatcaatggcaaagctcttgaaactcaacgaggattactttgtcagacaattctctgacaggcctaccactattgctcgattcaactactaccctcagtgtccaaggcctgatcttgtctatggcatgaagcctcattctgatgcaaccattcttacaattcttatggttgataacgacgttggtgggctacaagttcttaaagatggtgtctggtatgatgtcccaactaaacctcacaccttgctgatcaacttaggagatcacatggagataatgagcaatgggatttttaagagctcggtgcatagggttatgacaaatcctgaaaaggagagaatatcagtggtgttgttttattttatgaatcttgagaaagagattgagccagcacttgagctgatcgatgaaaggcacccggcaagatacaagagggtgaagattatggactaccttgcagggctctttgaacatttcttgcaagggacaagagtgattgacacagtgaagatctgagtcactatgccagttaaaataaatagtgattgtgatatgtactctgtaaagtttatcagaaaaaaagaactattgtagagtatgagtcacatggtcgcatactcatgtaattatgccatccagatctgtagcgtttatcagaaaagaaaaatattattgtgaggtttcaaaaaaaaaaaaaaaaaaaa

SEQ ID NO: 16241 - DNA, 1128 bp, Oryza sativa
  Clone ID: PAT_MRT4530_22008C.1
atggaggatgtgagatcaacactacttgtgcaggagcttgccggcatgagaagcaaatctgtgccaagacagtacattgtgcaacaagaagaccaaccgaccattgcagccactgcatcattccccattgttgaccttggtcgcctgtcccaaccagatggtgatgccaatgaggcggtgaaactccggcaggcgatggagtcttggggccttttcatggtaactaaccatggcatagaagatgctctgatggataacgtgatgaatgtgtcaagagagttttttcaacagcatcttggagagaagcaaaaatacaccaacttgattgacggcaagcatttccagctagaagggtatggaaatgaccaggtgaaatctgatacccaaatcctggattggttggatcgattgtatctgaaagtagatccagcagacgagagaaatctttccgtttggcccaagcatcctgaatctttcagggatgttctggatgagtttctcataaaatgtgatggagttaaaaacagtctccttccatcaatggcaaagctcttgaaactcaacgaggattactttgtcagacaattctctgacaggcctaccactattgctcgattcaactactaccctcagtgtccaaggcctgatcttgtctatggcatgaagcctcattctgatgcaaccattcttacaattcttatggttgataacgacgttggtgggctacaagttcttaaagatggtgtctggtatgatgtcccaactaaacctcacaccttgctgatcaacttaggagatcacatggagatgggcgatggcggcatcctggatgtcgtgaccaccatggtggcatcgttttcggagcctcgtctctgtggtgttgccataatgagcaatgggatttttaagagctcggtgcatagggttatgacaaatcctgaaaaggagagaatatcagtggtgttgttttattttatgaatcttgagaaagagattgagccagcacttgagctgatcgatgaaaggcacccggcaagatacaagagggtgaagattatggactaccttgcagggctctttgaacatttcttgcaagggacaagagtgattgacacagtgaagatctga

SEQ ID NO: 16242 - DNA, 282 bp, Oryza sativa
  Clone ID: PAT_MRT4530_22009C.1
atgccggcctggcccgacagccgggccgtgcctgggctgcaccctcagcatggtaggccggcccggagtagctaccaagcatttgcagggtcggcggcgactagggcggcgattgcgggggtgactccggtgacggtgggcggtgacttcggcgacgggacggcggcacgctctgaggcagagagggcggcgcgttctcaggctgtctcaacccacgacgatgtcgaggagctcaggtacgtcgcagggcttgtcttcgtcttcttgggctggacgtggtga

SEQ ID NO: 16243 - DNA, 570 bp, Oryza sativa
  Clone ID: PAT_MRT4530_2200C.1
atgggggagctcggggtggcgatgatagaggagctggtggctgtggagaggagaataaagctcggcggcggcgtcgtctcggctcgggcggaaacgggaggcggcgatggaagggaaaggccggcacgggggagctcgggacagcggccgtggcgcgggcggtcgcatgcgaggcggccggctcgcgacgacgtggccaacgcgacagcggtgtgtcggcgcggtcgtcctcctcccccagtcgccgtcgtccccctccctcccgtcagcgccgccgtcctcctccctgagtcaccgccgtccccctccctcccgtcagcgccgctgtctccctcccgtcgcgcgctcgcctccggcacggtggctcggcgaaaccgcggcagtggcggcgcccatggtgtgcggtggttcggcatcgccgccgctgtcctcctcccatcaacaccgcccccgcgcgctcgccgctgccgcaagctcgcctccgaccccggccatggcctcctcacgtcggcttccccgcctccgccgcgccggcaaaagcacggtctacgcggctttggacctagatga

SEQ ID NO: 16244 - DNA, 627 bp, Oryza sativa
  Clone ID: PAT_MRT4530_22010C.1
atggtgtcctcggtctcgtctccacggcgtgggagcggaggatggcaacgaacttggcgaagcggagcgaagcgcgaggacgacgacgaggtccgcgacgtggagcgggagatgatgacgaggtcagtggcacaggagcgggatatggcaacgaggttggcggcgcaggagcgggggacagcgacgagctcaccagcgtcgctgcatcaagtttccctggcgacgaatcgagtaagctcgccggagtgggtctacctcctcgccctagtcctctcctcgctcattcctctccgcccattcctcccttgcctttgccgcaacccgacctgcccccgccgctttttcacgtccttcgtcttctccccttcctcatcggcactcggcagcgtcgccggcgagctccaagcccgctcggatcttggcaatggcggcgcaggtctgcagcagatagcagagattgtgatcttttctgctggtctgctagccactctggcagaaatgagacgggacactattgctacttgcttcctctgtcagttgccggtgccacttccggcgattgagaagaattgcaagggtcaacccctttactttaaatttgttgccgattggggtatatgtgagtga

SEQ ID NO: 16245 - DNA, 3630 bp, Oryza sativa
  Clone ID: PAT_MRT4530_22011C.1
atgagtaaagtcattgcaacaacactcctcctctccgtcatcagccatggcgcctacccggccatgggttcagcttgggaggaggaagacttcgccagaaattgtccaccgtcctggtgcagtgacagtggaccagagatccggttccctcaccagcttgaatccagcaactcatcttcatcatcatcatgcagtgcttcatgcgcgaggctagcatgctctggtccagacaccatcctgcatcacccatttctggggccatgcaaggtaactgccatagattacaagaaagctgttttccagatcatcccgctcgtagactcattgtcttcatacccgcttcagaagctcatcatcgacaatctaccggaaccagattatcattccagtcgctgttcattatacaatgcccagcctgggaaaatagtatgctgttcaaaagtgctcacaccaagtatgtctccgaccaatgactatgatgggaatattgctgatcatgctgtcgtgggcccaatctcctgcctcagtgacccaagccacttctcatatttggtggatgcttatgaagacatttattcacttccattggactgcaaggctgtctctaaaggcattgttccgatatccggtgcagtcaccgctgatggtccaacgttcaagcaactggcagaaagaatcctcaactttgctgagacaactgtaagttggtccgagggaggcattcctgacaattgttcacgtgtcaaagtcattgcagaggtgcacttgaaggttgaaatgtttctaaggacatatggcacatctaaacctacaaggtatactttctctgaagtaaagaagatagcaagatgcttcaaggaaaaagtaggccaaggtggatttggaactgtatacaaaggaaagctaccaaatggagtgcctgtggcagtcaagatgctagagaaccctacaggggatggagaagagttcattaatgaagttgcaaccattggaacgatccaccatacaaacattgtccgtctcctaggtttctgctctgaaggaacaagacgtgctcttgtttatgaattgatgcctaacgagtcattggagaaatatatattcttgcgtgatcctaatactcaagagctcctgtcaccagacaagatgctagatattgctttaggcattgcccgaggaatggagtacctgcatcaaggatgcaaccagcgcatcctccactttgatatcaagcctcataatatcttgctggactataacttcagtccaaagatttcggactttggtcttgcaaagctgtgcccaagggaccaaagcattattaccttgaccaaagcaagaggcacaatgggatacattgcaccggagctatattctaggaactttggggagatatcttacaagtcagatgtttacagttttggcatggttgttttagaaatggtgagtggaaggaggagctgggacccaagtattgagaaccaaaatgaggtatactttccagagtggatctatgagaaagtaattacagagcaggacttcatacttagtagggaaatgacagaagaagagaaacaaatggtgagacagctggcccttgtggcactgtggtgtattcagtggaacccaagaaatcggccctcaatgacaaaggctgtaaacatgataactggaaggttgcagaacatacagagccagggcagccacgcgcagtggcgctgggagcctggaagtcgggttgattttggcgccggcaccggcggcgccgccgccgtctgctggagcgccgccgcagcccgcaggtcgccgccggtcagggatcaacaacatcaactaggagatcgtcaccgacctgcactgcaccaggattgcaccatcgtcacctgcaacttttgggcagacagcaccaactacgccgccggagccacgctgaacatcaccaaccgatgctccttcaccgtgtggccggccgccgtgccggtgggtggcggcatgcggctcgacccaggcgagtcgtgggcgctcgacgtgcccgccaacagcggcgcagggcgtgtgtgggcgcgcacaggctgctcattcgatgccaatggcaacggatcgtgccagacgggagactgcggcggcgtgctcaagtgcaagaacagcggcaagccacctcagacgctcgctgagttcacggtggaccagaccagcgtacaggatttcttcgacatctccctcaccgacggcttcaacgtgcccatggacttcctccccgtgccggctccggagcagaggcacggagcaccaccgtgcagcaaggggccacgctgcccggccaacatcacgtcgcagtgccccagcgagctcaaggcgcctggaggctgcaacagcgcctgcaatgtgttcaagcaagacaaatactgctgcactggcaccactggcaccaaaacctgcgaacccaccaccttctcactgccattcgtcaggatgtgccctgacgcatatagctacagtttggatgacagctccagcactacattcacttgcccgtcagggacaaactaccagatcatcttctgccctccaactgatctcacgtcttcatctccggttcctcctcctgcacctattgctattgggccttcaggcttggattcctcatccaaaagaggaggaaggcttgttgccactatcgtggtctctgtgatcggctctacttcagtactcaccattatcatcgcttccatcattatcatcaaacgaagaatacgaagacaccaggagatgcaagaagaggaacaagagtttgaggagctaccccttcaaggaatgccgaggaggttcacatttcagcagctacaagaagcaactgatcaattcagagacaagctcggtcaaggggggtttgggtctgttttcctgggacagattggaggtgaaagagtagcggtgaaacgcttggatcaaagtggtcagggaatgagagaatttatggcagaggttcagacaatcggcagcattcaccatatcaatctagtgaggctgattggcttctgtgcagagaaatcacaaaggcttttggtttatgagcatatgcccaaaggatccttggacaggtggctctatcaccagcaaggttctcctgctcctgctctagattggtggacacgatacaagattattactcaagtagccaagggtctctcttatcttcatgaggagtgcatgatgagaattgctcacttagatgtaaaaccacaaaatatcctcctagacgacaacttcaatgctaaactttctgattttggtctatgcaagcttattgatcgagataagagtcaagtgattaccagaatgagaggcacacctggatatttagctccagaatggctgacatcgcagatcacagaaaaggcagatgtctatagctttggcatagtagtcatggaaatgatcagtgggagaaagaaccttgacacttccaggcctcaaatgtctgaggttgtcaaagttttggaaggcaccacaagtattgagactgacatagaccatgacttcgtcgcaacaaatccagtaagctttggtgttgctggaattgtggactccgacccccctgtagcatctaatttatcaggccccaggtga

SEQ ID NO: 16246 - DNA, 176 bp, Oryza sativa
  Clone ID: PAT_MRT4530_22012C.1
ggaccacgacgtgggcggaggagggaggggcgcggacgcggtcgaggcggagccacgcgcgcgccgacggttcgaaccactctgggtcgagctaaaaccgtccctgccttgctgagctggactccagacacggggacacacccggaacagacctggagcagattagaaaaatgttt

SEQ ID NO: 16247 - DNA, 1893 bp, Oryza sativa
  Clone ID: PAT_MRT4530_22013C.1
atgggtaccattctcgcaacagccttcctgctctctgttctcagccatggcagctacatagccatggcttcctcatcttgggatgaccaagacttcttcaagcattgtccaccgtcccggtgcagcaaacatggaccagagatccggttccctcaccggctgcaatccagcaacacaccttcatcatgtggcagttcacacgccaagctaatatgctctggccaggacaccatcctacatcacccatttctgggcccttgcaaggtgactgccatagattacaagaaggctgtcatgaagatcatcccgtttgggggttcatcttctccatgcctgcttcacaagttcaattccacaaatctatcagctgatgtcaacgatcagaatcaattatacctcactgaacctgggagaatagtgcgttgttcaaaagagttcacaacaagtagagcttctatgatcgacggctacaacactgttattgccgataaagttgtccgcttgatcccctgcctaagggacactacaagccacttctcatatttggtgtctactcggctctacctgtatgcgcttccattggactgcatggtcgtctcaaaaggcaacattccaatccccaatccatacacggctggtttaacgttcaagcaaatggcagaaaggataatcaactctgctgagatcacccttgatttgcttctcggaagtattccctacaattgcacgcggtgtgaacagcaagggcaacgctgcgcgttcagctcacaaaggaatcaaacattctgcatgcatcacggttcacgcgtcaaagtcattgcagcaacatcagtagctgcatttgttgctgtttcattggtggtggctactgtgctctatctctccctgaagcaaaggtataatgaagaggtacacttgaaggttgaaatgtttctcaggacatatggcacatcaaaacccacaaggtatactttctctcaagtaaagaagataacaagacgcttcaaggaaaaagtaggccaaggtggatttggaactgtctacaaaggcaagctcctaaatggagtgcctgtggcagtcaagatgttagagaaccctacaggagacggagaagattttattactgaagttgcaaccattggaagaatccaccatgcaaacattatccatctcctgggcttctgctccgaaggaacaaggcgtgctcttatttatgaatttatgcctaatgagtcactagagaaatatatattcttgcatgatcataatactcctcaagagctcctgtcaccaaacaagatgctagatattgctttaggcattgcccgaggaatggagtacctgcatcaaggatgcaaccagcgcatcctccactttgatatcaagcctcataatatcttgctggactataacttcagtccaaagatttcggactttggtcttgcaaagctgtgcccgagagaccaaagcattgttaccatgaccaaagcaagaggcacgatgggatacattgcaccagagctatattctaggaactttggggagatatcatacaagtcagatgtttatagttttggcatgcttgtgttagaaatggtgagtggaaggaggagctgggacccaagtattaagaaccaaaatgaggtatacttcccagaatggatctatgagaaagtaattactgggcaggagttcgtacttagtagggaaatgacagaagaagagaaacaaatggtgagacagctggcccttgtggcactatggtgtattcagtggaacccaagaaatcggccctcgatgacaaaggtcgtaaacatgataactggaaggttgcagaacatacaggtgccccctaagccatttgtttcgtatgaaagccatcctatgccataa

SEQ ID NO: 16248 - DNA, 324 bp, Oryza sativa
  unsure (1)..(324): unsure at all n locations
  Clone ID: PAT_MRT4530_22014C.1
gccccgcgtccggggagctcggcgccaccgaggccgggcaccccatggccgaggtgttccccggctgccggagaggggacttggagcgcgcggcggcgagcctcccggcgttctgcnacgtggacatccccaatgggcctgttggtgtctgctnctggcttgggtntcctggggcggcggggagccggtcactaggctactatngttagctgtgtgtgtgtgactgtgtggggttgctnattcattagtgctttcttttgtcnggncgcatctttttatctctctgtggtgcctcnctgctgaccttcactgttcttctgaata

SEQ ID NO: 16249 - DNA, 342 bp, Oryza sativa
  Clone ID: PAT_MRT4530_22015C.1
atggcgaagccaccctccttcggcaggcacccttcgtctagaatgtacagtctttgccatgggggtccatctcttgccgtcctcactccattgtctttgccatgtggcttcggcgtcttcgctgtggggcttcgccccgttgaacttaacaccttaaacctgaatcctgactggtcgcatggtttcggcagatggtttgaagtttggatagttgtgctcatggcaattaaggaccggtattttgaggagaaaacacatccgtcatgcgacaaaatggacctccgcgcattcaggatgcgtttacacggattggaggaccatatgtcagccaaaactacttag

SEQ ID NO: 16250 - DNA, 176 bp, Oryza sativa
  Clone ID: PAT_MRT4530_22016C.1
tcgtccaagcgtacatgctgacccggcccgtgatgacgtgcttgaacttacctgtgaacggactactggtgatgcagcagactctaaggatgacccaatagaagctgcggcgacagtcattgaatacattacacgtagccattgtatacatttggctgtcgcataaaaatgaaccg

SEQ ID NO: 16251 - DNA, 345 bp, Oryza sativa
  Clone ID: PAT_MRT4530_22017C.1
atggtgaggccggccagcagcagcacgaagagcgcgaagctcgccgccggtgaggctgtggcggccatgggcgcggcgagcgagcccgcggccagggacgcggtagcgaaccccacgccacgaaggcagctgcgacgaacgtgctcgccggcgctcgccgcggccggaggagggtcgacgccggcgccgctcgccgcattactgtccacgcgcacgccgacggcctcgtggtcgtcatcgtcggaggaggtgcgctcgccgccgtgccgcctacagctgtctgtcaagcaagcttccctgggagacgacgtcgaccgcgtgcccggtttaaatagaggggtttga

SEQ ID NO: 16252 - DNA, 363 bp, Oryza sativa
  Clone ID: PAT_MRT4530_22018C.1
atggccatcgtgttactacatagttccgcgagattagagctgagaaaagatgggtggttggcggagttagcaggcgggttgactgaggtctatgttgatagtgggagtcctcatgcagtgaacacctccttggcaatgttagctttactttactctggacagattgaacgagatccaacaccattatatcgtgctgcaaaacaattaattagcatgcaacttgaaacaggagagttcccccaacaagaacatgttggatgcttcaattcttcactttacttcaattacccgaactaccgcaacttatatcccatttgggctctcggagaattctggcaccgacttgttgcaagcaaggactga

SEQ ID NO: 16253 - DNA, 1817 bp, Oryza sativa
  Clone ID: PAT_MRT4530_22019C.1
taaattcctgtgagtggcgacatggctaaggaagacattcgaagtccttttgctcactatagaggtggatgcgaagaagagagtggaggcggaggagcgcactcgtccagagtactcatatctgaagaggacggtggagtcaaggattccagcggcagagaagaaggtgaaagaacttcgcgtggcatttcagtcattgagcagtaaggtggagaagctagaggacaagattcagaggtcaacggtgggagatatgcactcgggagtgggagctaccacctacccagccgtcccaaaggaacaacaattcactccacccccaggccaaaattttccaagcttgaatggtaagcgtgaacacaactttctctcccctgttccttactgttttgaaatttctgtcagacatgagcctactgcatctgtggatctgagtgatactatacaccccatgctatgtcctcaattcaatggtgccaatcctcagatgtggaaatccaattgtgagcggtattttgatatctacaatattcatcctaaccactgggtgaagattgccaccttgaatttttgtggtaacgcaacattatggtcgttacagtccattagaattcaaattcaggggataaactggttaaccttaactgatcttgtttgctctcgattcacttaggatagacatcaggccttaattcgataatggattcacatctatcaatctgactctgtttgtgactatgttaaaagatgtgatggactcatgcatcgattactagcttatgaccgtaccatgcatgctacctttctatttggtaactaaatttgtggagggccttagagatgatatcaagcctggagttatgatgcaagacctcatgatttagatattgcttgtgccttggccctgttacaggaggaaccatttggaaagggttaagcaaatcctctcttactatgtaaagtcagagcccactaaatcctaagcgaagataccacatcatcatccacttataattattacatttaaacatcatgcaagcatgttatattatctataattttatgatttattaaattttactaggaataaggaggacaagtttgctgctctcaaatctacaaaaggagtaaagggttgtgttttacttgtggggagagatggggaaggaccacaaatgtgctactctgttcaattgaatgtggtacaagaattattagaagccatgcaggaggaatctaattatgaccagaaaatggaagtggaagatcttagtgaccaaggcaatttaatggctatatctcatgaggcattgtggggaactgaatattccaagtccagaagattaagggggtgtatacagggaactgatcttctcatgttgtggtagactctggccgtactcattacttcattgatgatcaagttggacagaaattcccaggcatcagaaagctgaatcatcctttgtctgtgagaatagctaatgggggcacaattcattgctgtcaagaattaccaaactgtacttggtggatgcaggggtacaatttcaggagtgatttcggaatactgcctctagggttgtatgatgttattttaggcatggactggctagaatttttcagtcccatgcagattgactgtgttcagaaatggatgcagttttagtatcagggatctcttgtcaaaattcagggacttctacctcagacaagtcattgcacaactatttcactgaacaactttatggtatggtcaagaagggcttgttggcaactttttaccaattgaacattgccgaaccattgacaagctt

SEQ ID NO: 16254 - DNA, 405 bp, Oryza sativa
  Clone ID: PAT_MRT4530_2201C.1
tcgttcacctgaacgtcttcgaagaccagcaggtggtgaagctcttcaactgctggtcctttaaatacgttcatgtcatcgccttattcccggtcgccacctctgatgagcacatgcgcattatctcgagttttattacgatagatgagtgtactgctttcatgcatatcatgaaatgttttagctaatggctggactccttaatgatcatgatctgatgaaatgaaatcttacttccctcacccaagattaatcttagaaaatagcaaagaattaagcatgactgataaaaacagcttatgatgctcaattccccctctaacgtgcctgctactttcatcttcctccatgactctgctaccgagaccctctccctcacccatccttgtttgctatttgctctct

SEQ ID NO: 16255 - DNA, 327 bp, Oryza sativa
  Clone ID: PAT_MRT4530_22020C.1
tatattcctgccggagcagcttaaggacaggctggggggttttaaaaaaaagcaagcgggcttatccacaccaagaactatgtctatggcaagctcgcggggcacacaggccattctgtcgagaagatccatgaggacctgtctagggagcagcgcttcgacgccgatggggctatcgagaacgggagcatcgacacgtgcggcaggcacgctcggagcaagacagagggctccactgctcaaaggagggacatgcggaacctgggacttggctaatgacagacgaacgaaatcctgtggtatgagaagttcatgagcatggggatg

SEQ ID NO: 16256 - DNA, 2256 bp, Oryza sativa
  Clone ID: PAT_MRT4530_22021C.1
atggcgccctctcctgttatccttgttatggctgcactgtttctccaagctgcaacaatggcggcaacaaccgcgctaaccgtatcgctgccgggctgcccgagctcgtgcggcagcatggtcatcccctacccgttcggcgtcggcgccggctgccacctcgccggcttcgccgtcacctgcaaccgctcctaccacccaccgaagctcttcctgcgcgacgccgacgccgctgaggtgctcgagatatccctcctaaactccacggtgatcgtcagcagcgccgtccggtacgacgccgccaaaggcgagggcgcgtggggccgcggcctcgccggcgcgttccgcctcagggagcggcggaaccggctcgtcgtcgtggggtgcaacctgcaggccgtcctcctggacggcgacgacatcgccgccgcgtgcaccaccatctgcggcggcgccggcgccacctggccagcagcggccgacggcgagctcgcggattactcgtgcgcgggcgttggctgctgccaggcttccatctacctaggcctcacgtcgtacggcgttcggctgtcgccgttcggcacaagcaccgggccgccgccgccgccgccgacctcctccgcctcgtcgtctaaccaatcggattcggctctcgtgttcgtcgcggacaacgagtggttcggcgggaacgcgagtaagctcggatcagcagcagcgacgatgcgaccgggcggcggcggcatgccggtggcgctggccgtgctcgactgggcgatcgggaagtcggggtgtccgccgcatgggcccgacgacacggcctgtagcagcagcaacagctactgccgcaactctaccagcacctcgcttggcggctactcgtgccagtgcgacaacgggtaccaaggcaatccgtacgttgcaaatggatgtcaagctctccttgtggcgataggaggaaccatcggcataggaattccatccgtgttcgtgataggcatggcaatgacgaacatgatcaaggcacggagggccaagaaactgagagccgtattcttcaagcagaaccggggtttactgctgctgcaacttgttgataaggtgattgctgaaaggatggtgtttaccttggaagagctcgaaaaggcaacaaatcgattcgacgagatgagaaagctcggcagcggcggccatggcactgtctacaaaggcaccttgccagacagacgtgtcgttgccatcaagaaatcgaatattacggttcgtaaggagatcgatgatttcataaacgaagttgtcattctttcgcagatcaaccatcggaatgttgtgcggttattcggatgttgccttgaaacacaggttccactactggtctacgagttcatatcgaacggcactctttccgaccatctccatgttgaaggccctacattgttgtcatggaaaaatagattgaggattgctcttgaagctgcaagcgctttagcctacttacattcatccgcttcagtatcaataattcatagggatgttaagtctgctaacatattgcttgatggtcgcttaacagcaaaagtttcggactttggagcctctcgaggcattccggttgatcaaggtggtgtgacaacagtgatccaaggcacatttggatatcttgatcctgaatactatcaaacaagtagattgaccgataagagtgatgtgtacagttttggtgtcatactcgtggagatgctcacaaggaagaagcctactgtttttgaatcatcagataatgtcagcctaattgcactttttaatttgctaatggtacaggacaacatctacgagatattagaccctcaggtaatttcggagggcatggaaaatgtgaaagaagtcgcggcgctagcatcggcatgcctaagattgaagggggaagagaggccaacaatgaggcaagtggagataaggctggaaaggctgttaggcggtgacattttgcaagggctttcagctgagctgcactgtctaccacctcaactgagcaataccgacactactagcaagctatacaacatggagcgggattttttgctatcgtcgagcttcccacggtgatcttactacatgtgtacaaactacatacaactttaccacttaaagttgtttagcatgtgtttgatttgaagatgaggtgagatgtgttagatgaattgggatcacctgcagtggctatagacagtgatatccgaaaccttcctgaatcaactc

SEQ ID NO: 16257 - DNA, 300 bp, Oryza sativa
  unsure (1)..(300): unsure at all n locations
  Clone ID: PAT_MRT4530_22022C.1
ttaaaggaaggaaattccgnaattccaanacccttaagggaaccattggaaaccagggtccggctgggaaattgttttaacggaattaaanaccattcataatttgttgctacatctttcgtcngccttttgtgaatgctttttcattttgattggatgcaaattaaattaaaaatgaacaatgctcgacgcacactcgagagcaaagtggagtggttaatgagtgtgcctgaagacgtacgggtcactcctttaatcaaatccctttttgatttttaattttcaaaaaaaaaaaaaaaa

SEQ ID NO: 16258 - DNA, 2843 bp, Oryza sativa
  Clone ID: PAT_MRT4530_22023C.1
atgaagggcctgtggaagcagagcggcctggcgggcatggcgtgcgccgcggacgttggcgcggcgggcgcggggcggcgcgcgaggctcgcggtgtacgtgctcgccgtggccttcgcggcattcaccgcgtacgtggccgtctcctcctcctcgccgccccccgccggggagggcgcgtcgtggttcggcggggtgtacgcgtccacggcgccgtaccgcgcgcaggtctcggggttcttctcgtccatcttccccaccggctcctccaccccctcgccggagcagcagccgccgccgccgcgccgcggcgagggaggcggccaggtgagtagccatgggatcgatgagcacgcgcgggtgcggagcggcgcagcgcacagcgtccctgtcgatccagctgcgtctaccaagcattcgggaagtggaggtggaggtggtgcggcaagcaacaatggcggtggtgggagtgcgcctccgcccggcaatttggcaggaagtggcactccacctgcaaagggaagcggcggcgacggcggcggcgctccggcgaataattccacaagtggcggcgccccggcgaacagcgcggtggagcagagtagcccggccggagatgggggtggatccccatccacagccagtagttctgccggaaaatcatcctccgcgaacaccggcgaggagagtgtagataagtccaataagcagtcaggaagtggaggtgaagctcccagcaatggcgatgccgtttctgacaagaagaacagcacggcgaaggccgataccgaagttgctgttaaagcatccagtgataattctactggaactggaagttcagcaaagggtgaatctaatgttggatctaatagcagtgcaggaagtggaaatggtgttgcaagtagtgtttcttctgctgctgtgaatagcactgcggtaaagacagatgcaaaagacgtagtcgttgctacgagtactgattctgccggaagtgtctcagatgtgaaggccgatttgagtaacagatcagatactccgccagcgagtggaagtggacattccaaccatacatcagatgtgactgttagtccggcgaagggaaatgctaaagatggcggagctgatacaaataaagcgagtgggaatgtggcttcaactagtaatcagactgctagtactgcaatggtcgcaaagaaagcgggtggatccccaagcaagaatcagacatctgtagcatcgacaaattcgaagaatcagaaccagactagtgctggagttgcttctggtggaagtagtggtacaacaagtaagcaggaggaaacaacttcgcagggtagtgttggttcatctaaggatcatcctgcccaagcaatcaactcaaaaactagcaactacagcgaagtgctggtgaaggggaatggatcatcaacaaaacaggcatcacaaaaacagcctgataaaaaggttgactggatcaaggagatggccagctgtgatatgttccatgggaattgggttcgggatgagtcgtaccctctctaccctgagggatcatgccctcacattgatgagcccttcgactgttatctcaatggccggccagatcgagcctaccagaagctccggtggcaacctagtagctgcaacatcccgagattgaatccaactgatatgttggagaggctgagggggaaaagactggttttcgttggtgattcacttaataggaacatgtgggaatccctggtctgcatcttaaggaactccgttaaggataagaggaaggtttttgaggcatctggtaggcatgagtttaagactgagggctcatactctttcctgttcacggactataactgcagtgtggagttttttcgctcccctttcctagtccaagaatgggagatgaaagtgagcaatggaaagaaaaaagaaactcttaggcttgatatagtcgagcaatcatcaccaaagtataaggatgcagattttctaattttcaatactggacactggtggacacatgagaagacttctctagggaaggattactatcaggaaggtaatcacgtgtatagtgagctcaatgttgtggatgcctttcacaaagctcttgtcacctggtccaggtggattgatgcgaatgtaaatcccaagaaaaccactgtgttgttcagaggctattcagcatcccatttcagtggtgggcaatggaattcaggtggtagctgtgacaaagagacagaaccaataagaaatgaacagtacctgtcaacctacccaccaaagatgagcattttagaggatgtgatccacaagatgaaaactccagttgtttacttgaatataacaaggatgactgactatagaaaggatgcacatccttcaatctatcgcaaacggaacctgactgaggacgagagaagatcaccagagagataccaggactgcagccactggtgccttcctggagtaccggattcctggaacgagctgctttatgcccaacttttgatcaaacagcatcaaatgctccaacaataaaggcaagtatggggttttctggatgagggtgcttgtagttgtatatgaactgttcgccatgataataatcaacacgattaccaaaagtaaggtcgatagagacctagggattttgaaatccctatagaccccaaaactccccgttgatgagatctctcaatacgcacacaaattcttgtgttagaggcttctaggacttcatattgtaaagttcatgtgtagttctaatgagtaatagccaatagtatagatgctatcacataaaaattattccttttttggcaaacccccccacaccc

SEQ ID NO: 16259 - DNA, 737 bp, Oryza sativa
  Clone ID: PAT_MRT4530_22024C.1
ggccaccaaccgcccccatggcacccgccaccgccaccgccgtggcgtccccctccacctcctcccggctcctacaccgcagcctcctctcgccaacacccacggccgctcgctgcctccggccgccgctgtgccgcgggcgcctccgcaccgttcgccaggttgtcgccaacggcgacgtctcctcgccgtcctcggacgtggccgccgaggagtccgcggcggcccccaagatcggcaagcgcgtgcgcgtcacggcgccggtacgcgtccaccacgtctccaaggcgccggacctggacatctgtggcatggagggtgtggtcaagcagtacgtcggcatctggaagggcaaacgcatcacggccaatctccccttcaaggtggagttcgagctcagggtggatgggcaggacaaaccggtccggttcttcgcccaccttcgagaggacgaattcgagctcgtcgaagacgaatagctgaataggtctcttttacagaataatgtgctctcgtcgtctgcagtctgcagatgcagtatctgtatattagaagagaagattgaagagggtgcgaggagatcgcaagtaagttgttgtttgtttacttgtcgcgtgctcttcctcactcttttgtagttctgttaaacaccaacattttgagatttgagaaactgagaacggttcggattatgacaagtatgaatgaaagtggttaaaaaaaaaaaaaaaaaaaaa

SEQ ID NO: 16260 - DNA, 436 bp, Oryza sativa
  Clone ID: PAT_MRT4530_22025C.1
atttttgactgcttcacttttataccaagatggcaaggtgatatgtcttaaccgtgaggattgattttgcgttgcagtcggacattcttgtcaattatcagtggagttgttgccggaatctggggattcacaggcttgatgggattcgtgttctaccttcttgtaatgatggtggcatcccttgggcttttgctgaaggccaaattttcaattcatacatactttgacagctggaacaggattttgattgaaggagtttttggtggccttatggtaagccatactggagctgtaacattgtgatgcacacctttatttccataaaacttgaatgtccagatcattcaacatgatttacatgaacttgtatctttcatgtttaatctatattctatgttattatgaagcatgggatgatgggaagattgatcatttt

SEQ ID NO: 16261 - DNA, 223 bp, Oryza sativa
  unsure (1)..(223): unsure at all n locations
  Clone ID: PAT_MRT4530_22026C.1
ggaggaagaaggaggaggtntagggaggaacccggagcaaccctcggaggctagtccaaactnagtnggaggtttgtcttttccggaaagccgaggccngaggctnttcnatcaataaagntttnttaaccccnaccnacgggggaaaaagacgnctnatcaattgatcaaaccgatctntncatagntaggtagacaggaggagangaggaagaagaagggg

SEQ ID NO: 16262 - DNA, 360 bp, Oryza sativa
  Clone ID: PAT_MRT4530_22027C.1
ggggaaagggaaccaaaccattattggcccaagggggaaaaaccatacatagtttcatttgccggcccctgttatgtccattcattccgaaaacaattacctaatggtgggcggacttttcctagcaaaagaaaaagaggccgccccttggaatgacaacctggggtataaagatcaacccgggcataaaaaccagtccttcaaagcacagattaaaaattttttttttagctcccaagggggcaaatataaatgggggcggaccattccctgggggcagggctgctttttatatttgaagaacaaccaccggcagataatccgctggcatctttttaagtttcgggacgaactgggggg

SEQ ID NO: 16263 - DNA, 195 bp, Oryza sativa
  Clone ID: PAT_MRT4530_22028C.1
ggatttatagttcttttatgttcatacttctccgatgtgttgaactcataccgcagatccgcaatcagttccccctagcctgtccaaacttattttttgtggcatttgaaatccatctgaaccgcattgtcattcatattttgattaaagaatgcctgaagggaaaattagttcaagtgaaaaaaaaaaaaaaaa

SEQ ID NO: 16264 - DNA, 257 bp, Oryza sativa
  Clone ID: PAT_MRT4530_22029C.1
tttagttgaaattggaacgatgagacgagccgaaccgacatcgatgcccaatcagaggacgagaccgacgccgtcatcctcctttagggatgaaaaccgatcgaatacggtcggaaactagctctatcatatttgttttcatattttttctcggaatcgaaatcggaatcggaaacccggatacgaaaacggaatcgaatattatcgaatacagatacggagcgaatacgaatcgaaatgaatacggtaacgaataa

SEQ ID NO: 16265 - DNA, 294 bp, Oryza sativa
  Clone ID: PAT_MRT4530_2202C.1
atggggggcgggcgatgcgcgcgccgacacggcgggacaccggaccccgccacggtgaggcgcgaccgggtgatgggcggtggcacgcgagggagaccgcccggccgcacggggaacccgcgcgcgtgcggcgacgtcgcgtcactcacgcccgggagcggatcggatcggaggggacgtcgcggcctcgcggtcgcggcccagggatatttgggtcttcgtcctgatctgcggaaggaggcagcccagcccacacagattggttcgcaccttcaaggtgaatctgctgcatag

SEQ ID NO: 16266 - DNA, 312 bp, Oryza sativa
  Clone ID: PAT_MRT4530_22030C.1
atgccatggatcacaaactcaataaaaactcaaacaaatccatgggatagagagaggaagaggaggagattcacttacggtgtaactagagtgattttgacggttgaaccggatggatttggtggagggaggtggctagggtttgggagaggagagaggaggagttttttcgaattggggatgaatggggatgagaagagaagaggtaggtgcgggatagagaagaagaggataaaaaccctgggcccaccagctcggccggtcagaccagccctatgcggccggttaaaccgcctcgtccacaccggttag

SEQ ID NO: 16267 - DNA, 565 bp, Oryza sativa
  Clone ID: PAT_MRT4530_22031C.1
cgcacgagggtacgggcaaggtgcaatcaccacttctgatgtgcagcatctcctttgcaaataccgagagtgagcaggttgctcaaagggtccaacaacttgccgaagaatctcttcaagggtcttttcagtcatgtagagaaaaggacatactaactgaggccctaggaaccaaagaacacccaggtcgcacacgaggcctcggagctacagttccgtggaaggcgggattcactgacaattctgatttgtacaagaaacacaggagaagcaaaggcgagtgtgaagaaaccaacgtagcacagctcaaaaaggagatatatgatgaattagcagcaaaaatagatagtgaagttgaagagagattacagcaggcccttaatcagaggtcggtagcctcccccgtggaacccagccccaacacaattcaggactcggtagtctcccccgtccccgtcgaacccagccccaatacgaatcagggtaactgtggggctgttgcacattctcaccctggtggcagcattatccatgataggtatcctgttgatgacatcgaggaaca

SEQ ID NO: 16268 - DNA, 312 bp, Oryza sativa
  Clone ID: PAT_MRT4530_22032C.1
atgccatggatcacaaattcaataaaaactcaaacaaatccatggaatagagagaggaagaggaggagattcacttatggtgtaacccgagtgattttgacggttgaaccggatggatttggtggagggaggtggctagggtttggtagaggagagaggaggagttttttcgacttggggatgaatggggatgagaaaagaaaaggtaggtgcgggatggaaaaaaaaagggtaaaaaccttgggcccaccagctcggccggtcagaccggccctctgcggccggtcagaccaccccggccacgccggttag

SEQ ID NO: 16269 - DNA, 711 bp, Oryza sativa
  Clone ID: PAT_MRT4530_22033C.1
atgggcgttcacgtcttcaccgaccggctcgccttcgtcgccgccgactggtgtctccgcatacacggctggcctattatgccgccgttggtgggcgtcttcgctttcaccgtcgaccgcctccgtcgccgccgactggtgtcctcgcctatacgaatccagatccagatatgcataataggaattcatggctttaagcctatctcctacgcttcaggaatggatcagtcagaacatcaccatcggctcgccttcgccgccgctgactggtgccctcgcctatacggttggttggtcacaccaccgttgttgggcgtctacgtcttcaccgaccggctcgccttcgccaccaccgaccggtgtctctgcctgcacggctggcctattatgccaccgttgttgggcatctacgtcttcaccgaccggctgccttcgctaccaccgactggtgccctcgcctatacgcattggcaaactctattgccgctactttgcaagttttgctacttcaccaaccacgacgtctacatgggcctcgacatctcggcacgcgtcgcgaaatttgacgtcatgctaatctactacaagtggttctccaattttcaagaattctactcggacatcttcaacatgtatcttcactcaagtgatggctactcgatgacgacaagctacagttctcgactctatgttcagttgtttccgaactaa

SEQ ID NO: 16270 - DNA, 1878 bp, Oryza sativa
  unsure (1)..(1878): unsure at all n locations
  Clone ID: PAT_MRT4530_22034C.1
cggcacgaggctacagtggagtaccacgactgtgtatgtgacagcttagctaactcaatgattagagtctcgccagatccctccggccggatcaatccactgagaagtaagcgaacgagatcgcctgggccggctcgtcggagaaggctcacacgcgacgcgcgccatggcagctgcaaccgcagctgatgttgccgaggatacggccagtgtgtactccggcaagcttaccctctacgtcttcctcacctgcggcgtcgcggcgaccggcggcctcatcatcggctatgacatcggcatctctggtggtgtgacatcgatggacacgttcctggggaagttcttcccgtcggttctccaccaagaacagacggcgcagggcacaagccagtactgcaagttcaacagccagccgctgaccgcgttcacctcgtcgctgtacctcgcggcgctcgtggcctccttcttcgtcgcgtccttcacgcgcgcgctgggcaggaagtggtccatgttcggcggcggcgtctccttcctcgccggtgccaccctcaacggcgccgcgcggaacgtcgccatgctcatcgtcggccgcatcctcctcggcatcggcgtcgccttctgtggtctgtccactccgatatacttgtctgagatggcgccaccgcggctgcgtggcatgctcaacatcggcctccagctgatgatcaccgtgggcatcttctccgccaatctcgtcaactacggtgcggccaagatcaggggtggctgggggtggcgtgtcagcctcggcctcgctgccgccccggcatgcgtcatcgccgtgggctcgctcttcctcccggactcaccgagctccctcatcaaccgtggccgccacgagcaggcgcggcgggtgctgcggcgcatccgtggcaccgacgaggtggacgacgagtacggcgacctcgtcgcagcagccagcgagatcgaggtgtattccggctgctccgcgagacgacggccgtggcgcgacgtcctgcagcgcaggtaccggccgcagctcgccatggccgtcctcatccccttcttccagcagctcaccggcatcaacgtcatcatgttctacgcgcccgtgctgttcaagaccatcggcctcggaggagacgcgtcgctcatgtcggcggtcatcaccgggctggtcaatatcgttgccacgttcgtgtccatcgccaccgtcgacagccttggccgacgcaagctcttgttccagggaggctgccagatgcttgtgagccaggttatcattggaacgctgatcggtgtggtgtttggtacgagtggcgatggcaacatctcgagggcgttggcggtctgcatcgtggtgttcatctgcgtctacgtcgccggcttcgcttggtcgtggggcccgcttggcgtcctcctgccgagcgagatcttcccgctggaggtccggccggcggggcagagcatcagcgtggccgtgaacatgctctgcacgttcgccgtcgcggaggccttcctcccgatgctctgccacatgaggttcggcctcttctacttctttagcggatgggtgctcgtgatgacgctcttcgtctcggccttcctgcctgagaccaagggcgtgccgatcgagaagatgaccgtcgtgtggagaacgcactggttttggggtagattttactgtaaccaggatgcagatgcacacgttcaagtggcaaacagcaaagtttgaaatgcacaatgccactgctgtctgattttatacagatgtagcaaatgtgagatgcgtattttgggactggttaatttgctgctgatatccagcatgcgcatctcgaagtagcgccggancaaagttcaaataaaaaaaaaaaa

SEQ ID NO: 16271 - DNA, 1790 bp, Oryza sativa
  Clone ID: PAT_MRT4530_22035C.1
ccaaacctcctgcactcatgctgtagagattatggatacccaataccaccgccaaattcgccgtggtttccatagaacacgtcggacgatgccgccgcagattagtgtcctcgactgcatggttggttggtcacaccaccgttgttgggcgtctacatcttcaccactggtctgcctttgtcgccgccgactggtatctccgcctacacggttggttggttacagcaccgttgttgggcttctacattctcaccgccggcttgtcttcgtcgccgccgactggtgtatctgcctacaaggctagcctgttatgccaccgttgttgggcatctacgtcttcaccgaccggctgccttcgctaccaccgactggtgccctcgcctatacggttggttggtcacaccaccgttgttgggcgtctacgtcttcaccgaccggctcgccttcgccgccgccgacttgtgtctccacctgcacggctggcctattatgccgccgttgttgggcatctatgtcttcaccgaccggctcgccttcgccgccgccgactggtgtctccgcttgcacggctggcctattatgccgccgttgttgcgcatcctcgtcttcaccgaccggctagccttcgccgccgccgactggtgtctccgcctgcacggctagcctattatgccgccgttgttgggcgtctacgtcttcaccgaccggttgccttcgccgccaccggctgccttcaccgcctccgactggtgccctcgcctatatggttggttggtcacaccaccgttgttgggcgtctatgtcttcaccgaccggctcgccgccttgtatgacgccaactggtgatatcgtcttcacagccggccacgtcgccgccaccgctaataggcgttatcaccttcaactcaatttgtctacgtctgctgccgactggtttcttcacttccttggctgcatgattctgccactagttgttggccttatcgtcttcaccgccgatcctctacgtctggtttataccgctaccactactgatggacatcatcgtcttctgttgccgactggttatgccaccgccgactggagcttttatcttcacaattgcgcgttttcgctaccggtttgcttctgttgctgccgactcgtgttcacttcatcacggcaatgcaactttttcatcatagtggagcgacttcacctttattatcttcagcattggcaaactctattgccgctactttgcaagttttgctacttcaccaaccacgacgtctacatgggcctcgacatctcggcacgcgtcgcgaaatttgacgtcatgctaatctactacaagtggttctccaattttcaagaattctactcggacatcttcaacatgtatcttcactcaagtgatggctactcgatgacgacaagctacagttctcgactctatgttcagttgtttccgaactaaccaaagagtcgggggctacacaaatacaagactcctcagtttagacgagttggacaacagcatctactttcctccaatatttcaccttcatggttgacctactacgcaaacgctgatgatcgtcttcatcattatcatcggctgctacaccgctattgactggatcgccgacatcgtcatcttcatcaacatcctgtcaagcctcttcaacatagcctaatctactgctatcgatgggcaacttcgtcatcatagtcgatcatgtctgttgctgctaattgtcattacagtcgattgcgtttgccgtcgccgactattttcttcatcttca

SEQ ID NO: 16272 - DNA, 310 bp, Oryza sativa
  Clone ID: PAT_MRT4530_22036C.1
aatccagatccagatatgcataataggaattcatggctttaagcctatctcctacgcttcaggaatggatcagtcagaacatcaccatcggctcgccttcgccgccgctgactggtgccctcgcctatacggttggttggtcacaccaccgttgttgggcgtctacgtcttcaccgaccggctcgccttcgccaccaccgaccggtgtctctgcctgcacggctggcctattatgccaccgttgttgggcatctacgtcttcaccgaccggctgccttcgctaccaccgactggtgccctcgcctatacg

SEQ ID NO: 16273 - DNA, 893 bp, Oryza sativa
  Clone ID: PAT_MRT4530_22037C.1
taatacatacctctcatcatttttactttcatatccaaataagactagtcaaagaaaggctcataaaaacgttacacacgcacggaaacaaatgcaatccaccaccatcgtcgtcttctctctcctagatgtctccaagtctacacttgtctttggattagggacttttttactgatctcctcctcctatgccaaagacctaaactataacacaatcacagcagcttcatatcttggcctagtctaccttggtctaaggttccttagcaagtccatacttaacaggtatgatgatgctgagaggagtggtgaaaggtacctggtgggggaggaggaggccatctggctgctcaggcttgttctgccttacatcaatgaggtgctcctgaatctaaggtccctcttctctggtgagcctgcaacaaccatgaagctggcactcctgctgtttgcaatggcccggtgtggcaactttgtcaccctctggacactggcaaaactggtgttctttggggtcttcatcattccgaaggtgtgctcatcttactccacccagcttgcaagatatggtaagttttggctggagaggttcagggatggatgggagtcctgctcccacaagaaggcggtcgtggcagccgtcttcacccttgtctggaacgtctcatccacggttgctcgtgtctgggctgtgttcatgctggtggtggccatgaagtgctaccagcagcggatgatggagtacggctggagcagcacggtggaggactcacaggaggccaccgccgccgccaccggcgacgatgagtcaccgcaggaagaaactcctgctagatcaagcccggacaactccaatcttgctgagttcatattcgagagagtagactatgcta

SEQ ID NO: 16274 - DNA, 1280 bp, Oryza sativa
  Clone ID: PAT_MRT4530_22038C.1
ctggagccgccgccttcgtctcctccctccttccgcgcgcctgcgcctttgccaccgccacctccgtcattacgcgccgaagccaccttcttctttcgatagtcacgactaggatatttggacagtatagggatcgttggtaccagagtatatgtgagattgagttaaaagagatggagacagggatttttatacaggttcgggcccctgaattgtcagtcgacaacaaggtagtcttcctcttcgagtttgtgcccggcgagattagagacgacgctagatccctacggccgacctctgatgctttcatcggtgagccatccggctgcgacccgtcacaggggagggaggggaggcgcggcggcgctggcccggccgccagatccggcagaggcgggaggggcgggggcgccagcgccggcccggccaccagatccggcaaggtctctgacagcgtcgactcctacgagcacatccgtgcagaggagatccgggcgctcgttcgcaacctatttggatgtgccagccacgccgttgccgtgcgcgagtgcctcgtgaacgcgacgctgcggaacatcctccacatgtcggtcggcgagaagtggtcgggcgtctacggcagcgctgatggggaggtgttccggcgcacggagagtagcgcggtgacaatggagtgggcgatggcggagctcctccgctgccccgacgccatcgccaccgccaccgacgagcttgaccgcgtggtggggcgggcgcggtgggtggcggagagcgacctgccggacctcccctacgttgacgccgtcgtgaagggggcgctgcggctgcacccggtgggcccgctgctcgtcccgcaccacgccatggaggacacggtggctgcttgcaacgacgtccctgtcggcacgcatgtactggtgaacgtgtgtgccatcgcgcgcaacccgacgtcgtggccggaccgcctagacgtgttcctgccggagcgcctccgcgtcacccgccgcctccgctccgtgtctcccgccgccgccgacctcgccaaatcgtatgacgctcaacttagacacctcagcgtcacgtcaactggtgctgaatgccgtgccactacagatgggaggctgagtcggcatgccaacgctcaaattgttaaaatttgtgcggtgaacgaggatgcgatgatggcgagctcgccatgcccggtgcggcggtgccgggagctgtgcgccgaggagacggcagcacagaaaggggatggatggaaatatggaatgctgtaa

SEQ ID NO: 16275 - DNA, 389 bp, Oryza sativa
  Clone ID: PAT_MRT4530_22039C.1
ggacaaagctaaggcacacgaccaaatatcagtgataaactataaaagacgtcgaagcttacaacaaatctctaaacaacatacacctcacacaaacaaaactacacctagcctcttaaaacctgcactatattattttaatcttgtagaaaaactacacaaacttctttctctcaaaaaaggtcttcaagtgccacacctgaaaccccgcaacggatatgcaaattcccattgagatgaaccctacccatgccattcttgaattaattccctacatcagaatctccatttggtgggggctttcacacaagtaaaacatttcttcatggataaatttgatggtttcttataacttcttcaactacatctccatcacatgaaccttccct

SEQ ID NO: 16276 - DNA, 1404 bp, Oryza sativa
  Clone ID: PAT_MRT4530_2203C.1
atggcggccgcggccggcgccggcgagccgtcgccgtacgcggaggcggcgggatccgacctcgcgaatgcgcgggcgccgtctcccgtggtcggcaagcacctcccgtcgggcgccgtgccgcgccacgcgtacgtgttcgacggcgagggggggttcgccgacgcggcgtgggacgtcgcggcggcggcgccgggggcgttcacgtggcaccacatcgagctcccgcggcagcagcccgggggcgccgccgcgaagccgctccaccacgcgcaggcgctgatcgagctgctctgcccgccgctcacgctgcaggagatcctcgcgttcgtcgccacgggcccgcactgcggcgtcgtggacggcggcggcggcggcggggcgggcgcgctccttctccgcgtgagctcgccggggccggtggggagcgcgttcgcgctccgcctcgccgcgcgcgtcacggacagctccgtggtgaccgtgtccgtgggcggcgtcccgcgcctcgcgttcgggaccacgcaggcgtcgctcctctccgaggtgccgctcggggtgaccgcgtcgctctccgacgagggccacggcggcgggcgcgccgtcgagggcggggtggtgatcgaggagcggctgctcgagtcgctgctcgccatgaaccacgccgacggcgcgcacaccgacaaccccgtgccgcggaccgtgtccaacctcctcgtgcacgtcctgggaacgcacgtagaccacgtccacgacatcgtcacgcgcctcgagatggagctcgacagcatcgagctgcatctcgacaagggtggtcactttatgaggaaacttttgttggatggaaggagattccccaaaatgcatcttgatctacagcgcctgcttcaggttgtttctcatggtgaccaagtattcccccgtgtaaaggaaaaatgtgcgagcaagagttggtttgcgagtgaagatattgttgctcttgaagatctgataggccgtcttaggaggctgaaggaaaatcttggatttataacgaatagggtgactacacttcaagctagtctagatagctggcaatctgagcagataaacaaaagcttgtactatctttcatttttgtccataatattccttcctctatccattgtcactggagtttttgggatgaatgttggtggtgtgccatggactgagcagaaaaaccctgcaaatctagatggcttcttcaatgtcatgttaatatgcgtcgtgatcttgttgatcctgctgctttgtttcttatttccttcattgtattcacacgtgtcggcatggagaacccgccgtgcactggcccggagcagttctcagaacaagagacatctgaaactctttaagggtcacaaagatggttacatgcgcctctga

SEQ ID NO: 16277 - DNA, 529 bp, Oryza sativa
  Clone ID: PAT_MRT4530_22040C.1
gtgtgggggggtgtgttttttttcttttttttttttttttttttttttttttttttttttctttttttttttttttttttttttttttgttttaatttttttttttttttttttttttttttttttttttttttttttttttaattaaaaaccccggagggggggggggggaaaaaaaaaaaaattttgacctttttttaaactcccaacccctttttttttaaaaacctattaaaaaacccccccagggggggaaagggaccgggggcccccaaaaccccgggggggaaccccaaattaaagggggccgtaaaaaccaaaaaagggtgggccttggcccaaatccccataaaagaaaaaaccaccaaaccgggggggtggaaccttttgaacttgggcccaaaaaatgtaaatgccccaaaagggaaatgggggccccaccaccccgagcgtttacaaaatttgggggttttcaatgtaaaacccaccttttgtaaaaaaaggggcttccccttttgccaaacggggg

SEQ ID NO: 16278 - DNA, 261 bp, Oryza sativa
  Clone ID: PAT_MRT4530_22041C.1
atggcttgcctcgtgaaatgtggccttcgggagcttcaacgtagccttctaggtccacttcagttcctgcgagtccggtgggatcttcaacgcgatctagcaggaatagcggacttcggctcgttcactttgaaggagagaagggcgcaggacggcgcgtgcggcggctgcctcggctgggccaacagcagtcgtgggccagcacggcccaaacagagggaaatgggcaaaggaaatccagaatatgggctggattgctag

SEQ ID NO: 16279 - DNA, 229 bp, Oryza sativa
  Clone ID: PAT_MRT4530_22042C.1
aaaagctgtaaacaaggatgagggagaccttgcattatctaatatatagtgtgataaaacataatgacagcctattggacaccgattagttacacataataggggaagtgactgactgatccactgtgttctttgcattggcgaatttgagcagggaggggacaaacataaattatacaatgattgaatgatatgatcactctagatcatgtcaacactatgtgaacaa

SEQ ID NO: 16280 - DNA, 1887 bp, Oryza sativa
  Clone ID: PAT_MRT4530_22043C.1
atggctcctcgcaagcctaccaaggccgggtcaactggcgaagatcctggcaaccttggcgaaggatggtcgtgcttccttggcaaatcacttgtcaaagaggccgacttgggcgaactgcgttctgccgtttccatcaacgcgaagccaaacatggaaatcaatgggactctcgagtcccggctcatactccttcgtaaggttgcccggcggctaagcacccgggacctttgtgaggagttttgtctgcttcggatttcccctctcgctcgtgtgtgggacgtttccgtgatcgagggcgaagaagttcttgggcttccccgccttgttctccctgccggggttgaaatgcgggctttggaagacgccgaaatagaggcatcgaagatgatcagagctctaaccacggccgagttcgcccgcttgctacagcgccaagccgacggccgggtgaaccatgtttataccggcgaatttccaagccaatcgaaaccctctcgggccggtgatgatgaagttggcacttcgaagaagcacaagcgtgcggtcgtgaaaggcgaccaagttcgaactcgccgcagcgtgaaggttgccgtcgaaagtgatggggatgaggaggaagaggaagatgtggaggctggttctaaggatgacggctctcatgatattgtcgtggcgaacaccctcttggcgatctccagcacagccgcgaaaccggtgatgaccgctagaaggaagaagaaagggaaggttgtgcaggtcggcaatggcttttcggacaacgaggggtccgacgggactcctacttcgccggttttacggcgcgcagcttcccgtggtaggcgcatgtctccgccacctgctagcgatgccgaagcggcgacgggtgggagtgtctcagccccggccgctggggcaaatgttgctaaggacgaacgggttgatgcagttccttcacctgttcgtcaacgagagggaaaggccccggcggttgaagcgagcgtttcggacgtgacgcttaccgccccacattttgtccccgctgacttcgccacgcggccagagatcactccgttcgtggacggtgtgtgccaggtcatagccccaaccgaaggccttgggctcttcaccaaactgaacgagttcagcgaaagctgcgcggctgtggaaagcctatttgtgcggggccttgccgcgcacctaagtgccaagaagtccgccttagagcgactggatgggtaccgccttcgccttcgcaaatccgaagaagatcttcgccacaaggaagacgaaagacgcgttgtggcggagactttgaagaaggcgaatgctgaaaataggtctctccgctctgaccttgaagcagcacgcaagcaggacgccgaacaggaccgacaacttgcttcggctaaggagaatattaaatgcctcgaagcccgtcttgtgtccgccaaagatgccgccgcgaccctggtaccagccacggagtctgccaaggaggcctgttacactctccagctggcccttaacgaccttggggctcgggcaaaaggtgctccgggcgaaggcgggactgtgctcgatttttccgaatggacgcaggaggcggccggctcggttgtcgaagtggcaggcgcctatggggactgttgcgctcgtgtttcggcgggattcgttctcagcctcttgcacacacacggctgcgaccacatcgggaattttcctgatttcgtgaaggaggaatggcctagcaatacgcagtgctccggggctgcgctaagggcctttcggaaggggttttgggaggatggcggccgggacggttttgggaggatggcggccgggactgtgcgaagattcgactccgcgagaaccttgaaaggatag

SEQ ID NO: 16281 - DNA, 657 bp, Oryza sativa
  Clone ID: PAT_MRT4530_22044C.1
ccgggctgcaggaattcggcacgaggtttatttcataagacaaatacaaacatgatatcttatggtccattagtttagttgacctatacaccattctgatttcacgatgaaaagtgagtatcaaacaatgatagttgcctatttgtaattaactgaaaagtttttttaaagaaataagaccaagagtttaactgattcaagtaaccacggaatgacacaactttttatatactcagcagtttgcacaaaccccgttattggtacttatgccctttaggacttgcatgcttttccaatggtagttggacagatttcttgctgtcatcaattcatcaatgatgattatcgtgttcgctaaaaaataaaatcaattatgcttatctgatcagttgttctcatggtgatatctctttcagtccaatatcccaaacaatagatccctgtataggacatctttatgttgaaaatctgttgcaatgggacttatgtttgtttttactgtataagcacaatcgacaagttatgtaagatgtgatgggaaaaaaaagatcgataactgacatcttaaaaaaggtaacaccgtaacattagtgcacaatttgatcttgtttccttctacataagtaatccatagattctatctaattaaccttttaa

SEQ ID NO: 16282 - DNA, 1187 bp, Oryza sativa
  Clone ID: PAT_MRT4530_22045C.1
actagtggatcccccgggctgcaggcatatccatggatcagaggattgagcactcctacctgcccatcagaggcctgaagcttcacatagctcacattggaaaaggtgaagctgcaactctgctcttcgttcatggcttccctgaggtgtggtactcatggaggcaccagatgattgcagcagcagcagccgggttccgtgctattgcacttgatttcccaggctatggcctctcggagccaccggctgacctaacacaggcgtcatggcagggcctgatgaatgacctcttggccattctagactcgctgtcgattcccaaggtgttccttgttgcaaaggattttggagtcaaaccagcatatgatcttgccctctgccatccggaccgcgtatgtggtattgtgagcttaggtgtgccacctcttgtggaaagcctcagtttcagtggacttcctgagggattttacatacacagatggagggaacctgggagagcagaggcggattttggccgattcgacacgaggaggatcttgcgcacaatctacatcctcttctccaggagtgagattccagttgccaagcaaggacaagagatcatggaccttgcagatgaatcaacaccgatgcctcagtggttcaccgaagaagacctctcagcttacaccgacctgtatgagaaatcaggtctcatgactgctatccaaattccatataggaccaaggctgcaaaagcagaaggtgctaatccaaggtttgaaatgccaatgtttgtgattatgggtcagaaagactacatcctcaagtttccagcactgaaggaatatatgtcaagtgaaaaactgaaagaaattgctccagactacgggatcacttacatcccagaaggatcccattttgttcaggagcaattccctgacctggtgaatcagcttgtgatagacttcgtcagtaaacatgcatgagatagcaacaaaaacaaggtgcaatttgacaaatccccagactgcaaaaaggtaacagttgagccctgcgttcactgatgtgcaccactaaagagttgacgttgtaacgtcgtgctcatgatggtatcgcaaactattttagtgttgtataaataaatgtgcaactgaagaaaattatcctctttttttcagatttaatactacaaatttgtcccccct

SEQ ID NO: 16283 - DNA, 2391 bp, Oryza sativa
  Clone ID: PAT_MRT4530_22046C.1
ggcgctgtgttggtgggctgtgacgagggcgcgaatggccggcgcctcctccacctccgcgtcggcgcgggccacgccaccggctcgctcattgcctccgctcggcgcgtcggggagccagcaggagccggctgccactgcgagccaccacgccgccggcgccggcgcctcgtccaggccgatgcggcgcaagggaaggaagcagaagcagctgtggccgaagacggtgcttcggaaatggctcaacatcaggtcgccggaatccgacttcagcgccgacgagggcgaagccaccggcgacgacgacaccgatagcgagttcgagtacgaagaaatgtgccattgggagcgccaactatatgatgaggagaggagactgcgtggtttgggcgctgagacaattggtatttatttgattcgcataattattgtgttcaacacattcatcggcaaaagggttttgtttaatagtatgttttcttctttgttttgccacacactgaaaattgtgaaatacggtgttgattctgccaaactaagagatactacatgggtctgcgtaggaacatggaatgttgcaggaagacttccacctgatgacttggatattcaagattggttggatatggaggagccagctgatatttatgttcttggatttcaagaaattgttccattaaatgctgggaatatatttggtgctgaagacaaccgtcctgtcgcaatgtgggaacatatcattcgtgaaacattgaataagattagtcctgataaaccaaaatataaatgtcacagtgatcctccttctccatcaaggttcaagccttctgacgatgtggaagatgaacttgttagtgaatctgacagcgaaagtggcggggaagtgcacccatggaatgaacaagattttaccgttgatgatgacagtgttcatagtaataaatatgagcactctacttctggtcctactgaaactaccgtaaatggaaacaacttcagcagggtgccttcaatgaagattttcgatagatcacacaacttaagttttaaagactatgtatctagtttggaagagccaatccatcaaaaaatgttaactaaaacactcagctactcagagaggcttggaatgatttggcctgaacaaccgttggatatattggcccagcgtcttccagacagcacgaaaccatttatttcagagaaggcactgaggtcatgtttgtctttcaaatcagcacatggagattccaatgcttttccagatgattgtttagttcatgattttaacatcaaaagtgcactagtcaaaacgaaaagaccatacttcgtaaggataataagcaagcagatggttggagtttttatttcaatatgggtacgaagaagcctgcggaagcatattcaaaatttgaaagtatcaaccgtaggtgtcggtgctatgggttatattgcacctagttttgtgcactttggtcgtaccatctcatgtacatttactatgcgctggataatatggttaggagatctcaattataggatcaacttatcatatgaaaaaacacatgaattcatatccatgaaggactggaatggtttgttccagaatgaccagctaaaacgagaatttaagaaagggcatttatttgatgggtggactgaaggagttatcagctttcccccgacatacaagtacaaggttaactcagagaaatacacgagtgatgagccaaaatctggaaggagaacacctgcctggtgtgaccgaattctttcctttggcaagggaatgaggctgcaggcctacaggacagttgatatcaggctatccgatcaccgccctgtgacagctgtgtacacttccgatgttgaggttttctgtcccaaaaagttgcagagagctcttaccttcaccgatgcagaggttgaggaccaattctcatttgaggaagagagcacttctggaatctttagcttttgactaggatgagcaccaagtacatcggggaatttatgtaatgaattgcgatgcttttctgaagtctccgaggaattattgttctcacatttcatccgctatttccagtatccatcctactcgcaattagcatcggccatcatgtacattccttccacactctgtatttggagaccagggcgtggcatgtttttttttttttttagctttactcttgtgtgcctcttctgactatgaggagtttgtacgcaataatggcctccgtgacgatctgattttgtaattaaacatttgaatactgtagattcctaggcagaccgattgtgcagttcagttggggtttgacctatactcctatgtgcagttttgaatctattgctaccagtaaggaagcaaaccagtgtacattaatt

SEQ ID NO: 16284 - DNA, 498 bp, Oryza sativa
  unsure (1)..(498): unsure at all n locations
  Clone ID: PAT_MRT4530_22047C.1
gcaggattcggcacgagctcgtgccnactncggcaccagctagctacctntacnnacncaaagaatccatacatcgcngcganntncccgatnctccccggcgtcncnncngccactctcctnctcntctccaacnatntgggncatncnacncaacantccgggacggntgagncncaagntccatangggtanggttcnggcnntnnncnacctgagntcngnggtgccganaccngaggtggnggnnacggncnaaacagnggtggcngcaatgntnatnatcatannccttgatgtngatcagnattgcaatacgtggtgnttttcnatntaccacncaatntgtgtctctctcacnatcaaaaaaagcntcgctcaccctctntataacactttctngctcanacgtgttttctntnttngccaacctatctanctangtgtatctatctcgcnaccnaatntgactcgttcgtcagcttgaaacgcttggat

SEQ ID NO: 16285 - DNA, 1338 bp, Oryza sativa
  unsure (1)..(1338): unsure at all n locations
  Clone ID: PAT_MRT4530_22048C.1
atgggctctaagaagcggtcgcctcagcatccggccgccgcggcgccccctcccgccgtcggcggcggcggcggcggcgaggtctccggcgatggtggcgcctcgacggcgaacgggccggtggtgccgaagccgtcggaggtggcgccgttcctgacgaaggtgtacgacatggtctcggaccccgcgaccgacaacgttatctcgtgggccgagggcggcggcagcttcgtgatctgggactcgcacgccttcgagcgcgacctccacaggcacttcaagcacagcaatttcaccagcttcatacgccagctcaacacctatggatttcgtaaagttcaccctgatagatgggagtgggccaatgaaggttttattatgggccaaaaacatcttctgaagaccattaagaggaggaagaagtcttctcaggaatcacctagcgagatacagaaggcgcctgtcaaaactgcacctggtactgaaaatattgagataggaaaatatggtggccttgaaaaggaggttgaaacccttaagagggataaagctcttctcatgcagcagcttgtagatctcaggcactaccagcaaacatctaaccttgaagtgcagaatttaattgaacggcttcaagtaatggaacagaaccagcagcagatgatggcacttctagcaatcgttgtccagaatcctagttttctcaaccagcttgtgcagcaacagcagcagcagcgcagatccaactggtggagtcctgatggaagcaagaaaaggagatttcatgctcttgagcagggccctgtaactgatcaggagacctctggccgtggggcacatattgttgaatatctcccacctgtcccagaaacatcaggtcaagtaaatccagtggaaggagccatttgttcggccaactcacaaccagttccaagtcctgcagttgccacacccatggacatgcaaacgtctaacgttgctgatactctcggttcatctgaggagcctttcgctgataactctactctacatgaatgggatgataacgacatgcagcttctgtttgatgataacctagacccaatacttccaccatttgagaatgatggtcaaatgggccctcctttgagtgttcaagattatgattttccgcagttagagcaggattgtctgatggaagcacaatataactccaacaatcctcaatatggtaatgactaattactgtataccctatgtttttgttcatcattttgtggaaaacaagcgtgatgtcattttagttaactgtggagtttctangtgcatgtttcatgccaaaaaaaaaaaaaaaaaaaa

SEQ ID NO: 16286 - DNA, 1357 bp, Oryza sativa
  Clone ID: PAT_MRT4530_22049C.1
ttcttgagctgcaagcctggggaagccaagccccaagcccacgtgccgcctcggcctggcctcctcctcctctctgtgtcgccagcccaagccaccgccgaccgagcccgcgccagccgcccgcaagcccacacggccgccgccaaatcccgcaagccgcgccgccaaattcggagccgccgcctttccaaagcttgcgcagtgcgccctaaccctagctactccctcctctataaataccgtcggcccccgcccccttttccccctttttttccaaagccgccgccatctccaccgtgagcagccgccgccgggagccgcgccgttatcgtcaccgtcttcctaccgcaccgcagccgctggtaaagccctgaggccgagcctcttttccttccgcgccgttttcctctctcctcaactccggtgtccgccgctcgtcattgatgggtcatctccaattcgtcccggagctcggtgctgcgccaccggattcgcctccgcctcctcttgccgacgccgctgctcgtcactgcagctgcgcgccgtcgccggagaacgccgccgacgtcgctgtgccggagtcgccatgcctggttaggtggtaatgtatctgtgtgatcgttgccgggtatggtctctgtgtgagcctactgttgagctgtgtgctattgtagtttggcaagttgccttggtcaattaaggacttcacttcataagttatggatttgagcctaacatgcaaccacatgttctcatgggaagaacctggcccagtaggattccgagtcttggcactgtcagcccaggtggctagatgataggagtttaggttcgccatggggactttcttgtctgtgtgtgggaaaggtgtctcatgggggaaggcagtgttgggacggagtttctaaaaagccttgttacagactccttggccgcacacaacttgaagaggcaaggtacaccaaaagttgacacagttcagagtttaacaagcggaagcgcgcttgacggcaggcacgagctagacaccaaagccttcctcatccaggggctcctcttctgggtttgggaaaaattgagcaagactgagtacaaccaccccgaggggagggggcgcgcggaccgggtccatgggagtggggcccacgcggcagcctcacggtccacggtggaccgggcgcacccgggctcgcaccggtcggcgcccggggccccacgttgtagccgcacccgagggcgcgggcggctgactggcgggccccacgcggcggttactctgggcgcccgaatgcgggcacttcgcgtggcccgcgggaggcggcgcccgcgcccctatggtcgccagcggcggccatag

SEQ ID NO: 16287 - DNA, 2422 bp, Oryza sativa
  Clone ID: PAT_MRT4530_2204C.1
agagagggtaatccggggagtaggactagactactactagtacatgagatcgatcgatcgatcggcatctgcatctccgcccccgcccccgtggatctgaagcggcggaagagggatgtcgtcgtcgtctccctccggccacctgctcgcctctgtctcctccgccctcgccgtcctcctcctcctcctcgcctgcgtcgagctcggcgacgctgctgccgccgtcggagtctaccgcctcatccagtacgacctcgccggcgcccctctcggctcccgcgccgccgccctcaaccaccacgccgccgccctccctctccccgccgccgccgacctctcccgctccgccctcgtcgcgccgctcctcgatctcccgctcgccttcctccgcgactacttggcggacaaaaaatatctgggaggcttgctcattctactgcctaaaaaactaaaccatgaacccaacaatgaagacaagggacaagtaaaggcttctctggctgagctggaacagttgctcttgcatcaacaagtgccatatccggtctacttcgctttccaggatgaccactttgataacctgctggcggatatacgtaaaattgcctcttcaggtcagccagcctcagcaacaacaggaggttacaagcttgtcgtgtctacgccggaacctagaaaagtggcatctccgaccatttcaaatatccagggatggttacctggattgaaaggagagggtgaaactgaacaacttccaactattgccattgtttcaaattatgatactttcggtgctgcaccagcactttctgtgggaagcgacagcaacgggagtggagctgtggctcttctagagattgcaagactgttttcacgcctctattcaaatcctaagaccagaggcaagtacaaccttctgtttggcttaacatctggtggaccctacaattacaatggaactaacaagtggcttagaagtttcgatcagcgtgtgcgtgagagcattgactatgcaatttgcttgaacagcgttggttcctgggacaatgaactctggatgcatgtgtcaaagccaccagaaaacccctacattaaacaaatctttgaagatttctctgatgtctctaaagagatgggtgtttcagttggaatcaagcacaagaagattaatgtctcaaatcctagggttgcgtgggaacatgagcagttctcaagatttagggtgactgcactaacactttcggaattgtcctctcctcctgactttttagaaagcaccggtggcctttatgacactagagaatcagcagatgctgagtcagtaattagaactgtcagattagtttctgaaagtcttgcgaataatttgactgtccctgtgagacacatctatggactaaaaggaaagaatattgatgtttttgcggagaacagcagtttagccatcaaccctcactacatccagtcctggttggatcttttatcacgaacaccacgggttgcaccgtttcttcagaagaacgatccctttatagcagccctaaagaaggaactatctgagcacactgctgatgtccacgttcaaagcgatgttcttgatggcatgttcactttctatgatgcaacaaaggcaactctaaatgtatatcaggttgcaagtgttacttttgatttactgttccttctggtgattggctcctacctaattattctcttcagtttcctagtaatcactacacggggtcttgatgatctcatcaacatattccggcgaccaccatcacgcaaggagctggcggttcggcgacgcggccggccagcgaaagcggagccagggatgacctcggagacgaggacgccggggagctgcgcctggacggggacgccgacggtgattgttgttactggactcagagttggtgttgttgttgttgagctcaccgtgatcagatcaaaatatggtgtttttgtttatctcttcttttgccctttcggcgatgcggcgtcaagggaggttcggtcgcctccgccacttcccgcggcatccacatctccaagttctccgtcggctttccccgacgacgaaccggactccggcttctcgcccgacgacccggacctcttgcgcaaccgccccgtccccgaccggctcctcgtcgtctccgccggcgtcgccgccaacctcctcttcgccttcctcatcgtctacacccaggcgctcaccgtcggcatccctgtccaggcgcagctccccggcgtcctcgtctccgaggtcatccctggctccgtcgccgccagccggccggccgcgtcgccgaaccgccagctcctggagagaggagaggggagatggggagagaggaggaagaagatgaggagagtgaatgacaagtggggcccatgtggaccacaccatttttaa

SEQ ID NO: 16288 - DNA, 177 bp, Oryza sativa
  Clone ID: PAT_MRT4530_22050C.1
atgatcttcccgcaggattaaataaatatggtacccttggaatactctcgggtgaaatgctacaatgatatatccgtgcgcttacggatgaactctgtaaccataatataccaggagtatttctgcgctattgctgggaattatatttctagtaatgtcgttaagaaatactaacac

SEQ ID NO: 16289 - DNA, 231 bp, Oryza sativa
  Clone ID: PAT_MRT4530_22051C.1
atggccatgcagaacgccatcacagagatcaaggatgggctcgacaaagtgacaaaatcggtattggccctccgcgcggggtttgaggcaaagaaggtgcggggagaaacaacgacgatgacgacgacgccgtctctgtcggccacgtggtcggagttggttttcttccttgatgggaaggtgcggtacacctattttgaggtttcgtgccgtttgctagatctcaactag

SEQ ID NO: 16290 - DNA, 1265 bp, Oryza sativa
  Clone ID: PAT_MRT4530_22052C.1
cggtgtgggccgtggaggagttgctcgtacctgctcttccgtggaggagttccgcggaggaggaggaggccgccacgcggtacctgctcctccgcagcgcctacggccggtacctcggcgccaccgacgcggcccccggcgaggccgcccgcaacgccaccgcccgcgccgccgccgccagctctgacgtccgccaaccacacgaccgcgagggttgctgcggctgctgctgctgctgctgccgactccccttcggcttggtcgaggccacgcagcgcgaccgcgatgaggaggagccggaggtcgacgccatcatgtggctggcaaccaggtgcggcgaccaagacgtacaagaggatcgcgacgcccgcggcgtcgtccttctgcgcgacaggtccgggcgctacctgcgctgcaacaagagtatcctggcttgccgccgcagcatctcagtcgacgccaacttcgaggacgaagatacgttgctgtgggaggtggtgcgcgtccccccgagtgaagacatgccggagctcccgatcgccactcagccgctgcgggagatccagttcgtggacgaagccgacctcgacaacatcagcgagggagaaaactgggctacggttcagatcagagggaggtcggtgaggctcctgagagagaagatcgcggagcttgtgggctacgacgacttcacgatgtgcgtcagcgccggccgccatgggcagttcacccctctgctcatcgacctgcctcgccgccgggagaccctgcagatcgtccttgtcaggcccaacaccgatgttccggtttgcaaatgctacatgctagtatctgctggttctaaacttactgattaccctaaaccaattgttggatccagaagtaaagtacacaggattaagactatgtctgatgccctgaagcattcagggtttgtcccagtccttgtgataagctcacccaaggatgctcaaattacatccagcacatccatggccatctcaaacgcaatgaaatttctgcgggttgggattaagttcaagttctttaatctcaacctgccgaaatttattttctttgcaattacccatttgagtaaatttaaagcagcaaataatcatgtttcaagcaaacctcaatttggtggcggagacctggtggccttctgcgtgctctcaacacagcttatttcgattgcttatccgccaaaaatggtggagcttgaacgaaaaattggagaggaccaatatgatagtttcatttaa

SEQ ID NO: 16291 - DNA, 1089 bp, Oryza sativa
  Clone ID: PAT_MRT4530_22053C.1
atggcgtggagacgtgggacgtcgcgcgggtatcgggtggggatggaggttttcgacgacgtggtgttcgcgcggctgcggagccatgtgtacggctcgtacctccacgccgacgaggacgggaggtccgtctaccacggcagcctccgcggcggcgcctcgcagcacaacgcggtgtgggccgtggaggagttgctcgtacctgctcttccgtggaggagttccgcggaggaggaggaggccgccacgcggtacctgctcctccgcagcgcctacggccggtacctcggcgccaccgacgcggcccccggcgaggccgcccgcaacgccaccgcccgcgccgccgccgccagctctgacgtccgccaaccacacgaccgcgagggttgctgcggctgctgctgctgctgctgccgactccccttcggcttggtcgaggccacgcagcgcgaccgcgatgaggaggagccggaggtcgacgccatcatgtggctggcaaccaggtgcggcgaccaagacgtacaagaggatcgcgacgcccgcggcgtcgtccttctgcgcgacaggtccgggcgctacctgcgctgcaacaagagtatcctggcttgccgccgcagcatctcagtcgacgccaacttcgaggacgaagatacgttgctgtgggaggtggtgcgcgtccccccgagtgaagacatgccggagctcccgatcgccactcagcccgggttcttcgtcagggtgtgcttcccccagccgctgcgggagatccagttcgtggacgaagccgacctcgacaacatcagcgagggagaaaactgggctacggttcagatcagagggaggtcggtgaggctcctgagagagaagatcgcggagcttgtgggctacgacgacttcacgatgtgcgtcagcgccggccgccatgggcagttcacccctctgctcatcgacctgcctcgccgccgggagaccctgcagatcgtccttgtcaggcccaacaccgaatcgtatgatcagttgatattcccgaatccgaatgcattgccgtcagccgaggccacagatgaagacgatcccacgattgagtga

SEQ ID NO: 16292 - DNA, 2354 bp, Oryza sativa
  Clone ID: PAT_MRT4530_22054C.1
tttttttttttccaggaatctcatctcactagtgttttcattcaggttgcattgccattgttataggttcaaccataaataaaaaaaaacccgtactctggtgtggaatggaacagtacgcaaaaaatgcgatggacagtaatctgcatgggatttgagtctgataattacagttgaagcacatcagcacgagtcacagaagtcacttcatctatacatcagataccgtagcattggtggactcgattttaacttacttctacagttctttgacgtgactgtactgctggattaactatgagctaacctacttttctactggcaaaattgctagcaagatcagcacatcacacctttggtcgtttgttagcacctctgtggtccaccgataaattaacctttatatgtaagggggctgctgctgctgctggctcttccttatacgcaggtcatcagcaagctgagcacacttcttttttgtctccgctagttgttgctctagctccccgaccgtttgcctcaactgtgtatctcgttgtcgaagttcttcacgccttgtgaacagaccgatgttttcttcactcagcttttccatgatatagggatcaagtgcaccttcagagccaatatctactgaattctcatccaagcctactggctccatactgttttcttgagcttggccaaatgatcgtacgcgagaacctgaaccattggctgtcagtccaatgacttcggtatcatcatatgtctctggtagcaaatttgatgtatgccctcctgtcctcctactagtggaagctttctgctgagacttaggtccaggattccctgaatctttgagagcagccttatactgggatcttaattgtggatccactggctggtaacctattaaatgacacttttctttccaataatcaaggataatctgtctaagcttagcttctagtcgaatgaatagtggggttctctcaaaatcttgtttgtcatgtgccggctcaataaaatttgcctccagtacaccgacaacacttcttcctctactagatccctcttgaaggaccttccagaagggcattattagccgatttttatggtaaacattcatcccaaaaatccccagaacaggtgcctcctttgcaaagccaacatcgactttcactgagaccacttgagaatcatgtgcaacttgaggtttgtaagtaactaatttcttaaatttcagttcatcagcaatcctgatctgttcaacgggttttcctcttaatataatttggaaattttcaaacttcttaaggtaaaggatggaagtatatgctcgcaatgaaaatctgagtctgtgggatatatgttgctgaacaatttctttttgggcctttgttactcccccactggctttatcttgatctctgagtaatatgtctttgtacaatttgcatctttgatcaatcaaaaagcaggccataattgcaacgaaaattatatgaagacttgcctcatcatcatcctcgaagtcaagttctaaaagaccatcatcgttcatccataaattgtatattgccaccttagttccatgactaacaatatccttgaactgttgtagcagttcttcctttgaagaaaaaggggaccactctagtattatcttcaagctgctatcccaatcaccctgtgaaccatacaccaaaggtacaatgtggccatcttggattttaaaatcgagcatgggaacaactatgtcgtctttcattgttctcctcaagaaagtgtaagagagcaaaccaatactcaaggtaacattacttccacggtttgcgcgagtaaacactattgcatcagcaccaagtctcatcgtgcttgtcttaaagccatttccatactggccaatggttttctttgatttcttggttgagaatcctaaactcatgcatcgtcgtaccccttcaggatccattcctcctccatcatcttgaaaaaccagcattgtgctattgtctttcaggttgacgcttttatccacttttataaatgtggcaccattgcatatctcatctactgcattgtcaagaagttcagctatagctccgaatgcccacttgtgagaggtcgcgttggtgtgcagaaacttggggtgaacgcgcgcgcgatcgaaatcccctgccacaagcgcatcgtggaactcgcgggagggggcggaggcggactcgaacgcgccggccttccagaagctgcggcaatcgagggccctaccgccgccgccgccagcgccgcctgtgccgccggccatcgccgccggcattgagggataggggtggttgggtttgggagcttcaccggagggattttgccga

SEQ ID NO: 16293 - DNA, 1077 bp, Oryza sativa
  Clone ID: PAT_MRT4530_22055C.1
atggcgtcgagacgtgggacgtcgcgcgggcatcgggtggggatggaggttttcgacgatgtggcgttcgcgcggctgcggagccatatgtacggctcgtacctccacgccgacgaggacgggaggtccgtctaccacggcagcctccgcggcggcgcctcgcagcacaacgcggtgtgggccgtggaggagttcctcgtcgagggggaggacgaggaggtcgaggaggaggcccccgtgcggtacctgctcctccgcagcgcctacggccggtacctcggcgccaccgacgcggcccccttcgaggccgcccgcaacgccgccgcccgcgacgccgccgccaactctgacgtccgccaaccacacgcccgcgagggttgctgcggctgctgctgctgctgccgactccccttcggcttggtggaggccacgcagcgcgaccgtgatgaggaggagccggcggtcgacgccatcatgtggctggcaaccaggtgcggcagcgaagacgtacaagaggatcgcgatgcccgcggcgtcgtccttctgcgcgacaggtccgggcgctacctgcgctgcaacaagagcatcctggcttgccgccgcagcatctcagtcgacgccaacttcgaggacgaagatacgttgctgtgggaggtggtgcgcgtccccccgagtggagacatgccggagctcccgatcgccactcagcccgggttcttcgtcagggcgtgcttccccccgccgctgcgggagatccagttcgtggacgaagccgacctcgacaacatcagcgagggagaaaactgggctacggttgagatcagagggaggtcggtgaggctcctgagagagaagatcgcgaagcatgtgggctacgacgacttcacgatgtgcgtcagcgccggccgccatgggcagttcacccctctgctcatcgaccttcctcgccaccgggagaccctgcagatcgtccttgtcaggcccaacaccgaatcatatgatcagttgatattcccgaatccgaatgcattgccgtcagcagaggccacagatgaagacgatcccacgattgagtga

SEQ ID NO: 16294 - DNA, 348 bp, Oryza sativa
  Clone ID: PAT_MRT4530_22056C.1
acaatctgtgaattgatcgaattccttctgctgccattgttgattttgtgcagtccggcttcgtcgcggcgtgcttcccaccgctgctgcgagtgatcgagttcgtgggcgaagacgacctcgacaacatcggcgagggagaaatctggactacggggaggtcggtgaggctcctgagagagaagatcgcggagcttgtgggctacgacgacttcacgatgtgcgtcagcgccggccgccatgggcagttcacccctctgctcatcgacctgcctcgccgccgggagaccctgcagatcgtccttgtcaggcccaacaccgaatcgtatgatcagttgatattcccga

SEQ ID NO: 16295 - DNA, 1221 bp, Oryza sativa
  Clone ID: PAT_MRT4530_22057C.1
atggaggttttccaggaggcgctgaggatctggaagagcggctcgtacctccacgccgacgaggacgggaggtccgtctacatcggcagcctcccccgcgccggcggcgactcgaggcacggaacgatgtgggccgtcgagccgccgatcgacgccgcggcgccgctgccgcagtacgcgcgcctccgcgccgcctacggccgctacctcgggacccccgactcctacggctccccgctccccttcctcccggtggacgccgcgcagcgcgaccgcgacagggtggagatggacgccatcatgtggcagcccgtcgcgtgctccggctccgacgtggtcggcggtcgcgatgcccgcggcgtcgtcctcctgcgcgacaggtacgggcgctacctccgcggcagcaacaatctcctggctccccgccgcagcgtccctgtcaagccctacgtcgtgaacgagcatatgtttcggtgggaggtggtgcgtgtccccctgagtgaagccaggccggagctcccgatcgccgctcagtccggcttcgtcgcggcgtgcttcccaccgctgctgcgagtgatcgagttcgtgggcgaagacgacctcgacaacatcggcgagggagaaatctggactacggttgagaccagagggaggtcggtgaggctcctgaaagagaagatcgcgaagcttgtgggctacgaagacttcacgatgtgcgtcagcgccggccgccatgggcagttcacccctctgctcatggatgccaacttcgagggcgaagatacgttgctgtgggaggtggtgcgcgtccccccgagtggagacatgccggggctcccgatcgccactcagcccgggttcttcgtcagggcgtgcttcccccagccgctgcgggagatccagttcgtggacgaagccgacctcgacaacaccagcgagggagaaatctggactacggttgagatcagagggaggtcggtgaggctcctgagagagaagatcgcggagcttgtgggctacgacgacttcacgatgtgcgtcagcgccggccgccatgggcagttcacccctctgctcatcgacctgcctcgcagccgggagaccctgaacatcgtcctcctcaggaccaacagcgaagcgaatgatcagatgatattcccgaatccgaatgcattgccgtcagcagaggccacagatgaagacaatgccacgattgagtga

SEQ ID NO: 16296 - DNA, 531 bp, Oryza sativa
  Clone ID: PAT_MRT4530_22058C.1
atggccttctcctctttctcgtggccgttccgccgccgaggcggcggaggcggaggcggcccgagcaaaacctccgcctcctccgccgccgccgccgccgccgccgcggccgggaacgaggaggaggagctgggcgtgacgccgcagctgctcgacttcctccggacgctctccccggactccttcaagtcctccgcgctccagctccaaggcaacagccacacactcgccatctccatctcgatttcatccttcccactccgatccgggctcgatcgtgctgtccgtgcgtgcttctcgcaggggtggaagctggcgacctcaccggctggcaggagcggcacgccgtgctcgtgctctccaaagccaaggtatgagctacgagccatacaaaaggagaaggtaagaaggatggagacagaaaatgggaaggcaaaagatgtgactactgttgaggtcgagatgcaagaatcaaaatgcagtagggattctcaaacgttaccaggtgatgaagaatctcaagattcatag

SEQ ID NO: 16297 - DNA, 357 bp, Oryza sativa
  Clone ID: PAT_MRT4530_22059C.1
atggagagctcaccggcgtgcgagggaaacggcgcttcggcgacgattggcggcaaccgaatggtggccgaggtgcgggcgggctcggtgagcgcgacggcggcgactgcgcggcacggcggtggctatagaggcggcggcgcgtggccggagacggcggtccttgacttcattggcaccgtcgtccaatatgacaacgctaatgatggtggcaccgagaaaagggtccatcctagaatgagcggagcatgtgatgagcgcagttgcaaagtttgctgtcgtgggcaggaaggagggcatcaagcggctgggagctgtgtcgcatggtgcagatctggagcaagcacagccagctag

SEQ ID NO: 16298 - DNA, 859 bp, Oryza sativa
  Clone ID: PAT_MRT4530_2205C.1
tgataaaataccgaagatgattaatcagcctacatgtcgagtgcacacttcttatcatcaggcagttaccaccacaggtcgactttcttcaagtgatcctaatttacaaaatattcccattcgtacagaagcgggacggcgtattcgtcaagcatttatcgcacgtgatggttataaaatcgtggcggctgattattcccaaattgaattgcggattatggcacatttagcaaatgatgaaggaatgattaccgcttttgctaatggccaagatattcatcaagcaacagcagcagaaatttttggtttaagcttagctgaggtaacgagtgaacagcggcgcagtgcgaaagcaataaattttggactaatttatggtatgtcagattttgggctagcaaatcagctagctatctcacgcgatgaagcgaaagaatatatggcgcgttatttccaacgttatccaaatgttcagcaatttatgcgcgatattcgtgaatctgcaagtgtaaaaggttatgtcgaaacattgtttggccgtcgattgtatttgccggagattaaatcaaataatgctatacgccgtaaagctgctgaacggctagcgatcaacgcaccaatgcaaggcaccgccgctgatatcattaaaatcgcgatgataagtatcgataagcaaattcgtgctgaccagaatataaaaatgattatgcaagtgcacgatgaattaatatttgaagttaaacaagaatgtatagagtactacactggcttaatcaaaacggaaatggaaaaagctattgcgatgaaggtgccactgattgctgaagtgggcgtaggtgctaattgggatgaagcgcat

SEQ ID NO: 16299 - DNA, 595 bp, Oryza sativa
  Clone ID: PAT_MRT4530_22060C.1
gggcctaaacccggggaaaaaccccccaaagggggcaaaaaaattggggccaaaaaaccaaaatgggtaacgggggcatgggaagggcccccatttttggcaaccccgggaaaaaaaaaaaaaatggccccccggggggggccgaatttttttttttaaaacaaaaaaaaaaaaggggtcggcccccctgggtttggaactgggcaaaaaaccccccggcccaaagggggaaacccaaaaaaccggggggccccccaaacttggggggcccccccggtttaaaaacccccccggggttttcggggcccctggggggaaaaaaaagccctttgccctttttccgggaggaaaaaaaaaaaaaaacccccaagggccggggggccaatttcaaagttccaaaaccccccccccccgggggaaggggcctttgcccccccagggggccttttgagacaatcccccccccgggaaaatttttttccccccccggggaaaaggaggggcggccaaaattttccgggcgaaaaggaaaatttgggttgggggggctcccttaaaagaccagtgcgggggggggcgaaaacccccttttttt

SEQ ID NO: 16300 - DNA, 905 bp, Oryza sativa
  Clone ID: PAT_MRT4530_22061C.1
gcgaggcggcggcgaggcacggccaccgacggcggtgaccggcggtgcgggaagcggcggctactgtcgaaaggcggcggcagcggctgaaggcgacggcacacgcgcgaaggccggcggcgcacacgggagagggggaaaaaggaagggggagaggggattcctcaccgatgagcacgacggccggcgggagagcgaccacggcggctagagcagccggccggagttgggtggaaatggagagctcaccggcgtgcgagggaaacggcgcttcggcgacgattggcggcaaccgaatggtggccgaggtgcgggcgggctcggtgagcgcgacggcggcgactgcgcggcacggcggtggctatagaggcggcggcgcgtggccggagacggcggtgcgggagggggcggacgtggccggggaggtggccgatttggccggcgacgtggggaggagagagagtgagagaggtggattcgaaatcgaatcccgccctctcgagcgcgcgcgcgggccgggagatgcgggggaatcggcggcgacgtgggcgcgaggtgcgggcgcggagtggaggcgcgacgtggagcggagaaggcggcggcgcggcggattcggcggcggcatgggcggttggagcttcggctccagcggccggaggtgggagacgaccgacaggggaggtggtctgcgaccgccccgtctaatcgccattaatgaggggctttttgcctcgcatttgagctcggaccagttcttctcgcaccggagtggttccttttcacggcgccagtgtgattggtgccatgatcaagatggcgactccaatgtccttgacttcattggcaccgtcgtccaatatgacaacgctaatgatggtggcaccgagaaaagggtccatcctaga

SEQ ID NO: 16301 - DNA, 255 bp, Oryza sativa
  Clone ID: PAT_MRT4530_22062C.1
atggcaatttcccccgtggggccggggacccgcaggggacccgcccctacgggggcgggtgtggatttcaacctgcggggagtcggggccggggctccggtcatgagcgggggcgggggcgggggcgggggcgggaccatccggatgtttcggtttgatagagtccccgggcttgctggtaggagcgatgtgacgctgggggaggagtgctcgctgctggcgcacacgcgccagctagcagccccctctgggtag

SEQ ID NO: 16302 - DNA, 2505 bp, Oryza sativa
  Clone ID: PAT_MRT4530_22063C.1
atggctgcaagaggaaccaagaggaaatttgaggccgctgaacctctgatctgctcctccccttcttcggcgtcgcccatcgacgtcggtaagctgggagaggagtccgtggagctggaattgagcgaagattcgaccaaatcttacctcttcgacgctgcatccggagccactgcacaagacgatgtggagcttgtcactcgtgcactctcctccgtagctgcgaagtcccccgaagccgtccggcagttcatccgccgcctcaccccggagaagatggccggcggaggtcacactcactggactgaggacgaactccatgcgttcttggaaagctgcatggaggaaatagaagctcgcaacatcacttcgtcatgccccaagactcaggggtatgccaacttgcaggccaagatgctgtccaaggcagggaagcatgtcagcaagcagcaagtgaagaacttctggggtgcttgtcgccgccgtttccagacctggacatggttggaatcgatggctacagggctgggaacaaacccgtacaccggcagcattgacgcctccccagagtggtgggaagcaatggaaggggatcaaactaactggcacgctcgcatctcatcaatctttggacatgcacaggagttaagcagatctcccaggccgatgagaaaatgtgctaggtctttcaggaatgcacctctcagattcattgctgagcaccatgctgtcttcagggggaggtgtgttgtcggcaaccgttcaagtgtcccaggcactgaactggaacagcagttgcagccagccaacgcagaactcctcgatgttgaggaccttgtcgacgtgccagatgcgccacagtcacctgatccaccatcacggtcaaggccaaccaggggtaggggcaaaagggtggcaacaccggctagtgggtctaggggttccaaaaggacccgcagtgactccaccggtgaggctttgcataggctcgctgatctgagggttaagtctagtgagagtaaggcacaaaagcagcgagaacgtgaggctatgagtgctcgtgcatgcattgagttggtcaagtctgatgggcacttatttagctcagatgtttaccacatgggggttttgctctttagtgacccatacttttgcgagttcttcctaggtgatgccattaccccggagatgcgtgagtactacattaggttccactatgccatgaagtttcctaatggtggaggatttttccctccaccatcttgctcagggggttggtttccacctggtggtacacggtttgatgggggtgatggggggaccctggggatgatggtgctgggggagccgacggagctgcagtgtgttgagtggatgagcaccacctcagggaacacttcagggtctaaagatggatacacaagcgaggaggatgaaacaattatggagttgttggctgatgcttttcaaaggaatgtaagcacacgagcaccaagacgggtacctcagcagtcgggcatgcaatgggttatggaaacaatgaacaacccagagcagtgccataacatgtttcggatgagagcggaccagattcacgctctctacaatctccttgtgagcagggtgttgaatgctgtcaatgagatggcagccgacatcatcaaacaagttgatccaaacaacttcccgcagcattaccggcttgcccaagatgatgcattccttccctttgctggtgttgtaggagcaatagatgggacgcacgtaccgcttcttgtgcgtagagataattcaattccacataggaaccgccacaatgaaacttctagaaatgtgctaaccatcattggttgggacgaacgagttatgtttgtagatgttggttggcctggttcagtacacgaccaaagagttctatcggaggcagttcgccgctatccatttgcttttccacggttgccatgggggaaatatctgcttgttgactctggctatcccagtagataccatgttgatgatttcgaaggcaacgaagctccaccaccggttggaaaggaagagactttcaactacatgcactctgccatgcgtaatacagttgaaagagattttggggtgatcaagagtcagtggagagtcctgcggggaattcctttatatggagaggaagctgctcagacgaagattatagttgctacttttgctctccacaactttatgactgatagtaatgacccccacttcatgacacagaaccctttgtacaacgggtacccccgtgtgccacaggcgccacccctccgcagttgcatatccaaaaacaagtatagtaaatataaatttcatacagtcagacatactggtggtcaaacttttggtggatctggcaatggagctagagctgatgttgctaggaagatgaaggaggttgatcatctattggcaaaattagaaaatgagggagtggagataaatggcaagatagctagtattattgaagattag

SEQ ID NO: 16303 - DNA, 1257 bp, Oryza sativa
  Clone ID: PAT_MRT4530_22064C.1
atgccgcccctcatcctggtaatggcggcgctgctgctcccggcggcggccgacgcgacgtcgtcggtgctgctgggcatcaactacggccgcgtcggcaacaacctgcccccggcgaacgccgtgccgccgatgctgtcgtcgctcggggtcggccgagtccggctctacgacgccgacccggccaccctccgcgcgttcgccaacaccggggtggagctcgtcgtcggcgtcccggacgagtgcctggctgccgtgtcaaccccctccggcgccgcgtcgtgggtccgctccgtcgtccagccggcgctcccggcgaccaagatcgcggtgctcaccgtcggcaacgaggtgctcaccggcgccaacagctcgtcgctgtcgcggtcgctgctcccggcgatgcagtgcctccacgacgcgctcgcgcagctcggactcgacaagcaggtggccgtcaccacggcgcacaacctcggcgtgctcgccacgtcgtacccgccgtcgtcggcgtacttccgcaaggacctcctcccgctgctctgccccatcctcgacttccacgcccgcaccggctcgccgttcctcgtcaacgcctacccctacttcgcctacgccgaggaccccaccggcgtcgagctcgagtacgcgctgctcgagccgacctacgccggcgtcgccgacccctcctccggcctgcactaccccaacctgctcgtggcgcaggtggacgccgtgtaccacgccatcgcggcggccaacaccgcggcggcgcgggcggtggaggtgcgggtgtcggagaccgggtggccgtccgccggcgacgccaacgagaccggcgcgacgccgcagaacgccgcgaggtacaacggcaacgtgatgcgcctcgtcgccgacgggaagggcacgccgctccggccgtcggtggcgctgcgcgcctacatgttcgcgctcttcaacgagaacatgaaacccggcccgacgtcggagcgaaactacggcctcttcaagcccgacggcacgccggtctacgagctctcctaccgcctgcccaaggacaacaccaactccggcggcggcggcggcggcatcggcggcggcagcggcaccattggcggcggcggcgagtacaatggccatggcgaggatggcggctactacagcatctcggcctcagcaaagccggcagataatctgaaaagtgttgtatttatcatgcttggtgcttttgcaaacacaaggaatgtcaaggcataa

SEQ ID NO: 16304 - DNA, 322 bp, Oryza sativa
  unsure (1)..(322): unsure at all n locations
  Clone ID: PAT_MRT4530_22065C.1
ccgcgagctccccgtgaccacgtgtntgctcacgtcgtgtgcacgccacgcgtgnacacntggtagatggttatgtgntaccgttaaaggtntggtgggtggtggtggtgtttggtgatgtcgnattgcgaagggagagtgtgtangtagacgtgtaagttaagtgtgtcgtggtcntggtctagtcagtcgtgtggcgtgtcgtgttggacgtcgnagatgttaagtggtaagcccgccacggcccgccagtccacacaggatgagtcgaaattaatgatgtatcgttattataggatcccaaaaaaaaaaaaaaaaaaaa

SEQ ID NO: 16305 - DNA, 306 bp, Oryza sativa
  unsure (1)..(306): unsure at all n locations
  Clone ID: PAT_MRT4530_22066C.1
gttctngttaattctttttctttttctctttntttggctttttatcgttttncacctatcggtnttttgacttagttttgttttgctantatttggantcttttttgcgctttgtggtgccgagacttaaaaaaaaaaagaatgatcctttttgagctacctgttgcttaaaaattcgtagtatagactaataggacgttttaacttttaccacttaccactggtatttgaaagagggaactgtattttttgtttcatatttgataaatattgtaggctttatccaaaaaaaaaaaaaaaaaaaaa

SEQ ID NO: 16306 - DNA, 252 bp, Oryza sativa
  Clone ID: PAT_MRT4530_22067C.1
atggcggcggagaagcggcgcgcgggcggctggggagcagctgggcagctggcgcgggcggcgtcggcgtccgtggaggagggcatcaaggcgctgcagctctactccaaggaggtcagcagccgcctcctcgacttcgtcaagtcccgctctgccgccgccaaggccgccgccgccgcggcgccgtccgagggagatgcccccgctgcttcttccgagagcgaggtggtggatccgcagcccgctgaatga

SEQ ID NO: 16307 - DNA, 192 bp, Oryza sativa
  Clone ID: PAT_MRT4530_22068C.1
atggggcttcgaagggaaggaaccgacatagggcggtcaagggtgcgagctggcggtcgcgctagctcggctggcgctcacgggcgcaagcggccaggcggtggcagaggaggatgcggcatggagcatcggggccgggcgatgacgctgtgggcggtgcggcgtggagcggcaatgcgcgccagggtttga

SEQ ID NO: 16308 - DNA, 477 bp, Oryza sativa
  Clone ID: PAT_MRT4530_22069C.1
ctcgagagtgagttggctgacagagatcgtcgaatccaatactggcggacgaagttcgaggtggccgaactcgagaggaccatggtggaagtgaaaaaagaccaagccgtggaagcgctccgaggtcgcgaggtgtggttcaactcgtacctcaggagctgctatatggcaatggctggagtctgccgggaactccaggtacctcgcaggaatcccgaggagtcggcggccagatatatctcgtggttgaatggggcctgcgcccagctcgaaggcatcggcaagcgtagcgacgaggccctgaagcaggagtgtcgtcggtcgagccggtttgtcggagggcacgtgctggcctgtatccgagatcaccgcccacagctgcatctcgagttcctccacgaagggttttcatgttctcggagggctgccgcagagatagacggtctggcgaagtcgatggcgccactcgccgagaag

SEQ ID NO: 16309 - DNA, 633 bp, Oryza sativa
  Clone ID: PAT_MRT4530_2206C.1
atggggcggccgccgtgctgcgacaaggcaaacgtgaagaaggggccatggacggcggaggaggacgcacgccaagctgctagcgtacacctccacccatggcaccggaaactggacctccgttcctcagcgagcagatcagatcaaaatatggtgtttttgtttatctcttcttttgctctttcggtgatgcggcgtcaagggaggttcggcggccagcgacgccgcggcgaccccccgtccgacctcctcgccagcgtcgagtcggtcgcctccgccacctcccgcagcatccacgtctccaagttctccgtcggcttccccgacgacgacccggactccgacttctcgcccgacgacccagacctcctgcgcaaccgccccgtccccgaccggctactcgtcgtctccgccggtgtcgccgccaacctcctcttcgccttcctcatcgtctacacccaggcgctcatcgtcggcgtccctgtccaggcgcagctccccggcatcctcgtctccgaggtcatccctggctccgccgccgccggccggccgcgttgccgaaccgccggatgctggagagaggagagaggagatggggagagagaggaggaagaagatgaggggagtgaatga

SEQ ID NO: 16310 - DNA, 529 bp, Oryza sativa
  Clone ID: PAT_MRT4530_22070C.1
atggccctgggcccggaggcggggaaaggggaagtcactgaacggctcgcggcggtggaggccgaggtcgcggagcgcgaggcgtactgctacgcgcgggggaggggcggcgtggcgggtgcgccgctgtggacggtgcccgaggtggcttcgccgcgggaggacgaagaggaggaggaggaggaggaggccgcggcggtggagttggaaatgccggcggcccgtcaggcggaggcagcggcggcggcggcggcggtgaaaggggttaccttcaagtgccagatatctcactggagacaaggccataaagatgaatgccatccaccaagagttgatgccaggcctgacaatataacagtagtttctagtgttaaaaagggtgttggaatgtacaattcatttgaacaaagtgtgaaatccagcgtagaaccagcggttgaagtcaacaagtcagttgctgctgtgcctgaattgtctgaggcaaaccttgtctccgatggtgtagataatgaaagaaagaagatgagag

SEQ ID NO: 16311 - DNA, 3113 bp, Oryza sativa
  Clone ID: PAT_MRT4530_22071C.1
gagaatgcatacattacactaaggtgagagtgaaataaagagccttggcggctgctgccttccggagtgttccgctgctggcgttaccactcgcggtggacgacaaaagggagggggggtggtggtggagcggagcgggggtggagcgaaccctaaatctccgggctgtgtgggggcggtggcttgttgggggggaacccggtgcatgcgagcggcgacggcttcggcggcgggggtgagatctatgcgctgggccggaggcgggggaaggggagtcgactgagcggtagaggagggagatggcgtcggcggcgttgtcgctcgcggtggcggtggtggccgtggcggtcgccgcggtggtggcggtggcgcgtggggcgctgcggcgcgccgcggcgcggagggaggaggtgcggcgcctcgccaggctcgcggcggtggaggccgaggtcgcggagcgcgaggcgtactgctacgcgcgggggaggggcggcgtggcgggtgcgccgctgtggacggtgcccgaggtggcttcgccgcgggaggacgaagaggaggaggaggaggaggaggccgcggcggtggagttggaaatgccggcggcccgtcaggcggaggcagcggcggcggcggcggcggtgaaaggggtgtgcgtggtaagctataatttcctctgtatgaggatattattgtttgattctgataccttcaagtgccagatatctcactggagacaaggccataaagatgaatgccatccaccaagagttgatgccaggcctgacaatataacagtagtttctagtgttaaaaagggtgttggaatgtacaattcatttgaacaaagtgtgaaatccagcgtagaaccagcggttgaagtcaacaagtcagttgctgctgtgcctgaattgtctgaggcaaaccttgtctccgatggtgtagataatgaaagaaagaagatgagaggtcagaaggcatctattactgcaaaggtttctgaggatgtccttgacaacaataggattagatctgttgatagttctagcctcccaacttctggtaaagcttgcaatattcaggatgctactgttaatgagaatttctctaagacttcagcaggcagctccagttctcgagttgaacggtctaccacgtcggaacctgaactgaaccattctaacaaacaggcttctggcacagacaaccttaaaagttcgagaggtttgccatctgtgtcaactgttggcacaatttcttctattcatggatcagagaaagaagctgctatgccaaataatcggtcattggtaaagaatattcccaggcaacaagcagctgcaaaagttgtgaggcattatccatcggaaatgacactttttccgtatgaacattttgtcaagctctacaattttgacaaggtggagctgcgcccttttggtcttgtgaaccttgggaatagttgttacgcaaatgctgttcttcagtgcttggcatttacgcggccacttacagcataccttacggaaggacttcattcaagaaattgtaacttaatactaagccagaattgtgttacataccatggttccaaaaaggaatggtgcttcatgtgtgagtttgaaaaactcattctggagggtaggcgaggaaaatctcacttgtcacctactggaatactatctcatttgcgtgacattggaagtagctttggccccggtagagaagaagatgctcatgaatttctcaggtatgcaattgatactatgcaatctgctagcatgaaggaagccaagaaaaacggtgtttatgggctgcctgaagaaacaacactggtgcagttaatatttgggggctatctacgatcgaagataaaatgcacaatgtgtcaaggcagttcagaacaatgtgaacgcattttggatcttactgttgaaatagatggggatatcaatacccttgaagaagcacttcatcggtttacatctacagaaattttagatggtgataatagatacaattgcagcagatgcaagtcatatgaacgtgccaaaaagaagttgacaatatcagaagcaccaaacatcctgactattgcgctgaaaagatatcagtctggtaattttggcaagatcaacaaggctgtcaggttcacggagtacttgaatttgtctaactacatgagtacagcagatgatatttcccccgtgtaccagctctatgctgtggttgtccatcatgatgttatgaatgcagccttttctggccattatgtgtgttatgtcaaagacacacaagggaagtggcacaagatggatgacagccaggtgaaacctgtttctctggaaaaagtcttgtcaaagtgtgcatacatgctattttacgcaaggtgttcaccacgggcaccaaactctgtaaggaaaatgattcttgctcaagactcatcgtgcacaaagaaagccaagcagatggtggatccaggaccaccatctttggaaggaggaagttacttaagcagacaccaaggtgggcagtcatgtagagatcatatagtctatgacctcacctacacattcggtggctcatcttatacagtagtggagtccccgagtccaagtgacagctcctcgctgttcagcaactctgatgcagggtcaaccagcactttcagtagtgatagcactgacagcacaaggaattcgaccagcatggaggagtatgattacatatttggaagctcggatcaaatgtaccctgtaagcacggtggttatacctgaggaacatgaacttagctattcgcggcagaggtctagcttgaaccccagcacttcaagtcaatatgtggatcaagcagctgaggttgagatgctgcaccagcaccagcatcaggccggcagagggggctgggatgagggtgatgtgatgccattcttctattccaaccaaggtaaacaccacgatagtagtagaagtagcaacattagtagtagtaataggaagttaacagaacagcgtaggacgattggggaggttgaccatggccctggagagggccatggcagcgttttacttagaagggcggctagggagaggattgcccaagcaatttattga

SEQ ID NO: 16312 - DNA, 306 bp, Oryza sativa
  Clone ID: PAT_MRT4530_22072C.1
atggtggagagatctgccgtttactttgatccgaaggtaaaaacacacacaagcttggcccaccactccaccacctgggtggtagccagtgttcgtctcggcccagaatcgatgcagccagcaagtgcaatgcaagctcccccacaattattgctccgatactccaatcgccatctgcgaaatgctgtcgctgttcctgcctacgagcgagagagagaatctcatctcgatgctgaacaagtaattttcccggttctgaatccgttcaatcatccaggaaaaatgtccggaattccagatttatag

SEQ ID NO: 16313 - DNA, 561 bp, Oryza sativa
  unsure (1)..(561): unsure at all n locations
  Clone ID: PAT_MRT4530_22073C.1
gaaatgaatccaaacagtgtccttccaaagttaggtaaacgtctttgtgcgacccaggtgatactgtagctcaagacgcatgatgaaataattagatggagaagtgaatacatacttaccatgaagtagaggaaggggaagaggcacgtgattggtaaagctgcatatttaaaggacagaggaagcaataaatcagaaacgagatgtgcagcttgcagcatgaagggaacaacacaagaatcctgttattcacgacaagaaagcatgtgcttgctcctgctgctgtttgtggttagttacgctattgatctccaatattaatatgatatgtatactgatagtacataattgcataggcgcatagtgctggaacagatctcagatagacagatactacttgctatcctgaacaaattttacatgcatgtttgagcttcaattcaagcggctccacaagtactcctatatatatagggttaattggatcatgccattatataaaaaaaaaaaaaaaaagaaaaaggaaaaagaaaaaanaagaaanganangaaanaanaaan

SEQ ID NO: 16314 - DNA, 564 bp, Oryza sativa
  Clone ID: PAT_MRT4530_22074C.1
ggcgagttgtgctctgcctccctctcccttcccacgccgtctcgccgcaatcgctcgctcggtcgcctcctcttccgccgcgagacacgaagagcagcagctcacaggtaggcctgcgcgtcggcggccatgggagacagccagtactccttctccctcaccaccttcagcccgtcggggaagctggtgcagatcgagcacgcgctcaccgcggtcggatccggccagacgtccctcgggatcaaagctgctaatggtgtagttatcgccactgagaagaaattgccttctattttagtcgatgaaacatctgtgcaaaagattcagtcattgactccgaacattggagttgtctacagtgggatgggtcccgatttccgtgttcttgtgagaaaaagtcggaaacaagcacagcagtattatcggttgtacaaggaaactatccctgttactcagcttgtccgagaaactgctgctgttatgcaggagttcacacagtctggtggtgtaagaccatttggagtatcattattgattgccggtacgatgacaatggcccacagc

SEQ ID NO: 16315 - DNA, 436 bp, Oryza sativa
  Clone ID: PAT_MRT4530_22075C.1
aaaattcctggtggaaacacgtccgtcgcccgtgacgaggtggaaacccaaaacctcgtcggcggcttccccaatcccctccctccgccgccgccgtctcggtctcgccggataaggaggaggaggagaggagatcgccggcgagtccctcccgaatgaacatactcgagaggatacgcggaggcggcgacagggcggccgtgggggaggggccgcgggagccggagccatgggtggagatttcggagtccatctctcggctctgcagcttcgacgccggcagagtctctgtaaaagttatccaagattcgagaccaatacatgataagatgatcgattctttcttgaacaaattttttccatcaggtatccatacagtgtgaattagggttacctaacttacaccaaattccgggggttcagaatttttttaggg

SEQ ID NO: 16316 - DNA, 1175 bp, Oryza sativa
  Clone ID: PAT_MRT4530_22076C.1
ggctttctctcccttcccacgccgtctcgccggaagggctcgctcggtcgcctcctcttccgccgcgagacacgaagagcagcagctcacaggtaggcctgcgcgtcggcggccatgggagacagccagtactccttctccctcaccaccttcagcccgtcggggaagctggtgcagatcgagcacgcgctcaccgcggtcggatccggccagacgtccctcgggatcaaaggtgcgtcccgtgaagcaatcccttctctatacttctattgcgttatgagaatcgagaaggggaggggagctgctaatggtgtagttatcgccactgagaagaaattgccttctattttagtcgatgaaacatctgtgcaaaagattcagtcattgactccgaacattggagttgtctacagtgggatgggtcccgatttccgtgttcttgtgagaaaaagtcggaaacaagcacagcagtattatcggttgtacaaggaaactatccctgttactcagcttgtccgagaaactgctgctgttatgcaggagttcacacagtctggtggtgtaagaccatttggagtatcattattgattgccgggtacgatgacaatggcccacagctgtatcaggttgatccctcaggatcatacttctcctggaaagcatcagctatggggaaaaatgtctccaatgcaaagacatttcttgaaaaaagatacacagaagacatggagcttgatgatgccatccatactgccattttgactctgaaagaaggatatgagggtcaaatctcagccaacaatattgaaattggagttattcgatctgaccgtgaattcaaagttctaaccccggcagagatcaaggatttcttggaagaggtggagtaaattgtctgttgacatttgatagtttactgttctaagtgacactcttgagccgtagtcatgaggcttcttgtctcttaccatttgtcacttaaacctattgtaaactgatttgcttcagtgatatgcatgagatgaagtggtggacctacttttgaatccccatcgtaaacaaaatattgttgggtgaaagttgtatttggttctcttttaaaaaggtatttggcgcaaaaaaaaaaaaaaaaaaaaaaaaaaaaaaaaaaaaaaaaaaaaaaaggagggaaggt

SEQ ID NO: 16317 - DNA, 3063 bp, Oryza sativa
  Clone ID: PAT_MRT4530_22077C.1
atgacaaaatttgctttctcactgatgcttgagatggatgatcttgaagtaaaaaatgatgaagagtaccagatggatcctattgaaatcaaggatggtgaagagcattcaatagagatgcttgttgagcagccacggtttctagagcccatatgtcctgaagaggttaatgaagatacacgagtgtacccacgtgtgggggatgagtaccaggtggaaattccaaatctagcaacagaagaggaacgcatgaaactaaggtcatgtccagttgatgacagtggaattttcggttttgattatcctgttggtgtgggactagctattccagtcacatggacccaaaaaacaagcgatcatgtaaaaaaagagcagacaggattctcaggacgcagttcatgttcttcacaagatgaatgtaatagccacgtcacagaagatattcctagaaatgttccaggctgtaaagttgaatgtgatgagcatgatgagaaacttctaaaatctgctgaacaagatattaactgcttacaaaatgggaaagccagtgattatattcctctgccaggaatgacacattattcctggactgatgaagaagcacaaacttttcttcttggtctatatatttttggcaaaaatcttgttcaggtgacaaaatttttgcaatgtaagacaatgggagaagttctatcctattactacggagagttcttcaggtctgattcatataatcgatgggctgcatgtagaaaagtctttaaaacattcaacgagggaacatctacctttgaggagtttattttgtccttaaggtccacagttggcgcacgagttcttgtagaggcagttggaattggcaagggaaaatatgacttgactggatttgcattagatcctagtagaaaccatggtatctcaacacgtgcagaaatccctatcggcaaggcttgctcatcgctttcatctggagacatcataaagtttttgactggtgatttcagactaagcaaggcaaaatctaatgatctattctgggaggctgtctggcctcgcctgcttgcaagagggtggcactcggagcagcctaaggattcttctctagttggcaagcatgctttagtgttcctcattccaggcgtaaagaaattttctagaaagaagcttgtcagaggaaatcattattttgattctgttagtgatgtgttaagcaaagttgcatcagaaccaagactgcttgaatttggagttgagggtagtaatggtgaaggtgggttcaagattgaaaatggatggatccatgatgctgaacttgagaaaagcacagttactgacaagaaatcttcttgttatacccggcccagtgaacctgggtgttcaccagagctaatgaaatttactgtggtggatactagtgttgttcaaggagaagaaccatgcaaggtgaggtccctaagaaatctacctacagatgccagtcatggttacatgtcttcaccacattcagaagattctgggagtgacagttcagaagaacactctgactcagaggacagctctcagtcttatgaacatataaatacaaatcaaaacaagacaggtgctaagtatgtcaatgagaagaaatgtaaaccaccaacaggtgataggatggatattgatgtacttcagaagaattctactttcgcaggcacaatgacatcaaccaatggtcacatgtcatttgatcaaggtttcagcttaatgaataatgcctgttcctcaactgcaactattcttcctgtcggtactcaaagggtccatgctactaattcttccactgaaataaactttcagtttgatcaaagggtaactcctgagccccagattttcttagcagcatctgttgcaaagagaaggaggttagtatcttgtaagaatgagagaactggacgcagaaatactgctgccaataaaagacagcatgggaagcaagttgacaccgcacaacatgatgtgtctaaatcaaatgaagcaagcgcaggggctaagcctttcatatggggttcaattccgaactcatcaactaccataaactttgacatgagtaacattcatttatgtcacaagcagtacaatgtgccccctaccgatgaaaaaatggtactcaaggaaaagtcccaagataagcatgttattgatctgaatattccacaagtgccttctgattatgagtcagctgtgagctacatcgtgccttcttctgacaagaatacacatacaatggatagatctatacattcttctgaaaccaacaggatggatgactgtcttccagacatcaatgcctcctgtaatgggctattgagtgagcagaggaggcagagtaccagaagccgcccaccaacaacccgagctctggaagctcttgcttgtggctttattgggacaaagcagaagggcgcggaaggaaacttcccatcttcaagcaggagcagcagacctgtccggcgaccacggagattaactgatggtgcagtgtcatttccttctgatggtgagggaagtagttctcattttaccgattcagccattattgtcaatgaatggcacatgactaaccgtcagtatcaagtccttgacaacacccccacagataagtccactgataacaggactcgtgaattgtttggggcagacaaatctgctgataaagggactcgtgaattttttggggcagacaaatctgctgataaagggactcgtgaattttttggggcagacaaatctgctgataaagggactcgtgaattttttggggcagacaaatctgctgataaaggtagtcatgaattatttggcataccttagatcacatgaaaatggaatcaatacttcgtcgaactttgagttgggctaaggaactaatggaggaagcctatacaactcattgccaatttcagctatagcttggtgcatatgcctcctactgttcaagcttatatcaagaacagatggacccaatgctctttccagattttatggatatttaccctcaggtcatccttctgtgtcttgttaagt

SEQ ID NO: 16318 - DNA, 1506 bp, Oryza sativa
  Clone ID: PAT_MRT4530_22078C.1
cgaagagcagcagctcaccggccggccgggaacgaggcgcgagtcggcggcgacaacaaatcgaaaatcgaacgggagaaattctctctgattctctctcgcgggcggcggaagcaatcgtagttagcagaggccggcgagcgagccgccaccggcgatgggcgacagccagtactccttctccctcaccaccttcagcccgtcggggaagctggtgcagatcgagcacgcgctgacggcggtcgggtccggccagacctccctcgggatcaaagctgctaatggagtagttattgccaccgagaagaagttgccttctattttagtggatgaaacatctgtgcaaaagattcagtcgttgactccaaatattggtgttgtctacagtggcatggggccagacttccgtgttttagtgaggaaaagtcgaaagcaagcacaacagtattatcgtctgtacaaggaaactatacctgttacacagctagtccgagaaactgctgctgtcatgcaggagtttacacaatctggtggtgtaagaccatttggtgtatctttgttgattgctgggtatgatgacaatggtccccaattgtaccaggttgatccatcagggtcatacttctcctggaaagcatcagctatggggaaaaatgtctcaaatgcaaagacatttcttgagaaaagatacacagaagatatggagcttgacgatgccattcatactgctattttaactctgaaagaaggatatgaaggacaaatctccgccaacaacattgaaattgggataatccgatctgaccgtgaattcaaggttctgagccctgcagagatcaaggatttcttggaagaggtggaataatttgtctcaacaatctcatgtttcaaaccagtggacacctgagcagctgcctcgaagttatatcccctttcattcatgaactgattggcaccagtgacacgagacaaatgtttattcagattctcatgaatgaaaatgtgtttttaggaacgtatttgatttggcacggtgtcttctgtatcctcttgtgcccatcctagtctcctcggccagtgctacaactatttggcgtctccttacttttgtagtctgttttacttcttgccaaatgaagcacatgccatcttttgctcttgcaaaagaaaaaaaaaaaaaaaaaaaagttgacatttgatagtttactgttctaagtgacactcttgagccgtagtcatgaggcttcttgtctcttaccatttgtcacttaaacctattgtaaactgatttgcttcagtgatatgcatgagatgaagtggtggacctacttttgaatccccatcgtaaacaagatattgttgggtgaatgttgtatttggttctcttctaaggaggtatttggcgcatatattgtgtctcctcccgacatatcatttgccctgacagtacttgtgaaacagtcaaaacagatcacgaaggaatatcttggttgagtttgcatccgt

SEQ ID NO: 16319 - DNA, 795 bp, Oryza sativa
  Clone ID: PAT_MRT4530_22079C.1
atggccagccgcagagcgatcggcttgcgaccggagatgctcatgctcccccggccgcatcgtccatcgatgatgacgaaccatatggcgcgcgtacgtaagacgtacggctcggtgatggagtcgattgggaaacggaagccaagccgcgcgcggacacggacacggacaggcggcatccgcgaggctggctcaggtcatggcttcgccgtcgccgtcgtcaccctgagccgccaccgttgtcacctgccctcaccaacccatgccagcccgcgccgccgccatcgactgcctgcgtcgccgcctgccgtcgttaattcgtcagaaaaaacgaatcgcagaacgtacggattcaacgaacttgatgaggcactcgagtacccggacggaccgattcggtgtaaagtgtacacactgatttcaccacgtgatcggatggacggtcttgatcaccccatcgtgccgctgggaccacccccctacttaccaaataaccctcggttattccccccgcaacaaaaacaccctcatgcggggatgccaccatcactgacagctgcacggcgcacatggcggcacgagcacgacggcgtgggcgggccgcgcaaccggacggacccgaccgtgtttgctgtgcggccgcatcgccgtctgatccatccacccatccatccttgtgcggcttccgatctgtgcgccgtacaacgcacacacaccagtgaaggcgcgacaagcgagcgagacatggacatggacggccacggcaagctacaccacagtcgcctactagtacta

SEQ ID NO: 16320 - DNA, 1274 bp, Oryza sativa
  Clone ID: PAT_MRT4530_2207C.1
gcggtggacctacaattacaatggaactaacaagtggcttagaagtttcgatcagcgtgtgcgtgagagcattgactatgcaatttgcttgaacagcgttggttcctgggacaatgaactctggatgcatgtgtcaaagccaccagaaaacccctacattaaacaaatctttgaagatttctctgatgtctctaaagagatgggtgtttcagttggaatcaagcacaagaagattaatgtctcaaatcctagggttgcgtgggaacatgagcagttctcaagatttagggtgactgcactaacactttcggaattgtcctctcctcctgactttttagaaagcaccggtggcctttatgacactagagaatcagcagatgctgagtcagtaattagaactgtcagattagtttctgaaagtcttgcgagacacatctatggactaaaaggaaagaatattgatgtttttgcggagaacagcagtttagccatcaaccctcactacatccagtcctggttggatcttttatcacgaacaccacgggttgcaccgtttcttcagaagaacgatccctttatagcagccctaaagaaggaactatctgagcacactgctgatgtccacgttcaaagcgatgttcttgatggcatgttcactttctatgatgcaacaaaggcaactctaaatgtatatcaggttgcaagtgttacttttgatttactgttccttctggtgattggctcctacctaattattctcttcagtttcctagtaatcactacacggggtcttgatgatctcatcaacatattccggcgaccaccatcacgcaaggtcaagggggcataatagaatagattgtgctttgtgtattagtatccaggaacgcgctgctagttagaagagctagacaccaggacgacaggcgagacgacccagctctccacagcaaacagacttgtaatttcaaaattttcatgttcgatagccaatgtgagtggcttcagatactgcaaggcagaaacatcacgaattttgactgatgaagctgcattttgttttatgttatttttgctggtgctcgccattttggctaccatggaatcaaagggcctcttttgcagaattatcgatcctgtcagcaggggcgggctcaagatttagaggttgggtattcgaaataggtaaggggtaaaacaaatttacacccaaaagtctaataattggtttgtgtaatatcatatacaagtaatatattatatgcatgtagccc

SEQ ID NO: 16321 - DNA, 168 bp, Oryza sativa
  Clone ID: PAT_MRT4530_22080C.1
aatgcagtgcagctcaactccacattcaattgcgttgctgctccacatgacctgctttcccagtacgtggcaacacatgtctgttgcccagcatgccattcaattgcaatctgtgcccacactgctgctggtggcagcaggctggtatttgcgttcatttgtgtgctg

SEQ ID NO: 16322 - DNA, 1336 bp, Oryza sativa
  Clone ID: PAT_MRT4530_22081C.1
ataatggaagataggagtgtgttgatggaacggtatgaaattgggagacaattagggcaagggacctttggaaaggtttactatgctcgtaatcttagttctggtcactccgttgcaataaagatgattgataaggagataattatgaaagttagcctcgtggagcagataaagagggagatctccataatgagattagtgaggcatccaaatattctccagctctttgaggtaatggctaccaagagcaagatttacttttctttggagtatgccaagagtggcaagcttttccacaaaatggctagggcaaagctcaatgaggagtcggcgagaaagtattttcaacagttgatctctgcagtgaactattgccacaactgaggtgtttatcatcgtgacttgaagacggaaaacttactgctagatgaaaatgaaactcttaaagtctcaactttgaattaagtgcattacccgaatcaaggaggcaagatggtcttctccacaccgcatgtggaactccagcttatgttgcagtggctcaaaggcagatgtatggtcttgtggagtgattttgtttgtgcttgtggccaattatcttcctgaaatttcatagaaatgtataggaagatcgcaaaggctgagtacagatgccctcgtcatttttcgactgatttgaaggagctcctttatggaatccttgatcctgatcctagtactaggatgtctatttaaggataaagataagtgcttggtacaagaaacccatcgccatatctgcactgaacagcgaaacaagaaagaagagttgtataagtgaggctcctttctctggcccaacaacccgcattagttctgagagaaatcaagagccaccaaacctgcacaacttgaatgcatttgacatcatttctctctctactggattcgatctatcaggtttatttggtgaaaggtatggcggagagaggcacggttttcatccagaaagctagctgcagctgtacttgtgaagctgaaggaaccacccaaatccttgaatcttaaagttacaaaaactgacaatggagtgcttaaattagccacgactaaggaatgaaggaagggcagacttaagcttgatgcagaggtttctgaggttgctccttcttttctcttagttgagttgaagaagaccaatggtgacacattggagtatcacaggctgatgaaagaggacattaggccatcactcaaggatattatttggacatggcaaggtgatcaacagtagtcacagtatgctggatcatgcacctctgtcaccatgttaccatctccacacagaaaagacagg

SEQ ID NO: 16323 - DNA, 1811 bp, Oryza sativa
  Clone ID: PAT_MRT4530_22082C.1
ccgggctgcaggaattcggcacgaggctctctcccagccattccccacctctctctcccctcccctcccctcccttcgcgcctcctggtgcgcctctctctctcctccccctccgatggcgacgcggccgcggtcctccccgtcgttcttcggcggcctccgggcacgcgagctcggcggcggcagggtgccactgccacgcgcctccgcggcgcggctcccctacctcgcggacctctcctcctaccccggcggccgcgggagcggggtcatcgccgtcgagcacgccggcgaccccgccatacctttcgccatctccttctgcaaggcggagcagatctctcaccttctggcggtagctgatgaggacgggtatgttggcatctacgacacccgccggcgcctcccatccagctcatcgtcattggggaaatcagctgaaacgaagatgtccgattgggttgcccacaacaatgccatctttgatgtgtgctggatcaaggacggttcccaattactgactgcatcaggcgatcagactgtgaaaatatggtctgtggaaaacaagaaatgccttggtgttctgtcagggcacaccgggagtgtgaagtcgctgtcatgccattcttcaaacccagagctcattgttactggatcaagggatggttcttttgctctttgggatctaagaatcgacccaaaaacccctaatggtcaccgtgaagcttgtctcatgtcttcccttgttgtcaaacaagcacacagtcccacacaaagaaatcgaacaaggtctagagcaaaggctgcttcgacgagtatcacatctgttctttatttgaaggatgatatctccattgctacttctggggctgcagacaacattgtgaagatatgggatacgcgaaatatcaaattgtctctctccaacagaagctctcaagcagcaatgcaacctttggagggtgtgaaacatgggatctcttgcttgtctcaagactcgtatggtgcctatattgctgcgtcatgcatggataacagtgctcttcatatggataaaggcccaattaaggcttacactggcagcaaaattgaatctttttttgtcaagtctgctatcagccctgatggaactcacattcttggtggttcgagtgatggcaacgtgtacttatggcaggtggatcagcctgaaagaggtcctataattttggaaggccatgaaggtgaagctacttcagttgactggtgtgcatcagaggtcgggaagatcgcaacgtcatctgacgattccaaggttcgcgtatggaatactgagagaagggtgttcccaaacacaagttccccaacggtcatccgcaagagaataaccgcaccaaacactggaagccggtctgctagccatgagctagctactacctcaagagatgtaggagtagcagcctgcaccagtgcagatggtgaattgccaactggttcacgctctccccttcagcccagagtactggagtttggcacaccggagtcagcgaagaagagagcctttaggttgtttcaggaggactcattggacataaggaaaagcccagaggctcaaatgaacagcccttcttcggttctaagccccccacattcactgaagaggagaacaattcgggactactttgctagtagctcatcttgtgagcacaccaagcatgtccatgaccttgcactcttggctcactcgtcaactgtgaagaacctcaaaaatgctcaatatagctacaggtgcctgaaaaaataactttaaagttttgaacatcgatttcact

SEQ ID NO: 16324 - DNA, 508 bp, Oryza sativa
  Clone ID: PAT_MRT4530_22083C.1
gtgaagagagagagagcgcgtggccggcgctgagcaggagcgctggtatggtcggaggcggacacggcggatgcacgacgtacaaggggtacagccatcccccacaccaagcgctggcacaccgcaggcggcaagggcctctgcagccgacatgtggttgtgggttatatacagggctaagcaacacggtgctggtctcttggtcatgcgctatccttggtgatgggcatgatgattcactcacatggatatgggcatgatcctgagggaacatcataaacatcgatgactcactaaatcaactggttgttgacgcctgacggaaactcgctgatttggttgttgcgatgaaatcctccaacataataaagcgtcacactattaatcatattaaaatggcttcatgtggaggtaaactgagtaaggcaaactggttatggagttgggtttcgtaatagcctgcctcagaggaaaacccatgtatggcgttgctcattacgctgtgaac

SEQ ID NO: 16325 - DNA, 223 bp, Oryza sativa
  Clone ID: PAT_MRT4530_22084C.1
gtgcgacaccacgcgtacgagtgacgatggcatccttgacgattacctagaagaagtcacaaaggatgtggtgcgaatacatacgatgatgcaccaacgttatcatggggacgaccacgacgctgatgctgaacgcgaggaggttcgggctgtcgacctcggcgaacaggaagtcgaccgtgggactcgagatggaggcgcgcgaattctggctgaaaacctg

SEQ ID NO: 16326 - DNA, 448 bp, Oryza sativa
  Clone ID: PAT_MRT4530_22085C.1
atggaggggtggccgggcttcacttcgcggctgcgaatccaatggaggcggcggcgaagcttggcgatgacgggaggagctgcagagcctcgccggagatcaaaacacgacggcgagcttcgggttgatggcgacgatgggcttcccggggtcttcggcgcaagggaaccggctgccgggcttgctcttgaccttgcggagccgagagaggtggcggcacaggagggcgacggccgaggcggcggcaaacggcggctggagcggctgcgggcggcggagagagaagacgaacgcggcgacggcgctacaagcgacgggggagagagggagagcccgactgaaggagggacctgaaatggacttgagccaagagaaagaaggagagtgggctactgcggctaaggaaaggagagcgaagagggaatggtctgaaaagggcccaagctga

SEQ ID NO: 16327 - DNA, 537 bp, Oryza sativa
  Clone ID: PAT_MRT4530_22086C.1
atggatcggcaatggatgtacgctgaccggcggtccaaagagtttattgacggcgtgcactattttttgagagtggccgaagctaacaggcaaaggggttttatttgttgtccatgcaataagtgtaagaatcagaaggagtattctgcatccaggactattcatttccacttgtttgagtcggggttcatgccaagctataattgttggacatcccacggagagcaaggtgttgaaatggaagaagatgaagtggaagacgacaatattccggactttgctcagtacgttggatttgaaggaaatcaaacgggcgaggaggaaatagctgctgatgtttattcgcattactatattcgcatgagggataacctgaccacacacaaggaatttatcacggcggttcaagaacaactcatgggattcatcaacgaagaaatccttgatcccaagggtgaattctactacgacggaaacacaatttaccggtccttagcttctgagctagcagcgagtactactacgtcgaaatcgtag

SEQ ID NO: 16328 - DNA, 820 bp, Oryza sativa
  Clone ID: PAT_MRT4530_22087C.1
gagttggaggagaggggatgaggaagagagttagagaggatagatctgaggagagggggagagattcgatctgcctaagttgtaactgtaatggagattcaaagggcccgacggcgaggggttttcgatactggattcatcgaccctcggaaagtaaacgtcgcaatgctcgaccaatatccgcaagccacagaggacaatctcgtccatctcctgaaggcgcagcattacaagacgttcatactgttgccgtacaacacagagttagtttaattttactgtcttcctataccaaatttcattcccgtacgaacttgctaagtgttttatatgtaatgcatcccacgcacattgcagattccactgggtgcttttactcttcgacctgtcagccgactcaatggataaaaaagagtctacgtttgacaaggttttcaaacttatagacagggcttggtatcggttccgtcatttggtccgcgacaaatggagagaaaaacttaggcggaagtttaaatttccttgcgcaaagcaaaagcagggaactaacttgtgcggctattacgtgtgagagtattgccactgccttgcagaccaaatcatcaccacaagagagctcgattttattcgcataagggataaccagaccacacacaaggaatttatcgcggcggttcaagaacaactcatgggattcatcaacgaacaaatccttgatcccagcggtgaattctactgcgacggacacacaattcataggtccttagcttctgagctagcgactactactacgtcgaaatcgtagctagctaggacatat

SEQ ID NO: 16329 - DNA, 1014 bp, Oryza sativa
  Clone ID: PAT_MRT4530_22088C.1
atggcaaagcatggtgttgcttccattttaacactggcactggtccttggagtacttgcggtcactcctaaagtcgctgatgccgccgcaacgccctctgatgccaccgctgatgtcgctgcggcgcccgccgatgtcgtcgccgcactcgctgatgccgccgccgatgcagccacgacgcccgccaatgctgccgccgccatcgatgccataaccggctcaaacatcgccctcaccatgggcgtcgccaacgagaacctctccgcgttcgcctccgacccctccgccgtggccaattgggtcaagcagaacgtccaggtctacccgggcgtcaacttccgctacatcgccgtcggcaacgaggttgagagcggcaacacgcagaacgtcctcccggccatgcagaacatgaacagcgcgctctccgctgccggcctcagcaacatcaaggtgtccgtgtcggtgtcccagaagggcgtgctcgccgggtacccgccgtccaatggcatgttctcccccgaagcgacctcgtacatgacgcccatcgcgaagtacctggcgagcaccggcgcgccgctgatggccaacgtctacccctacttcgcctacgtgggcaacctgcgggcccagatcgacgacatcaactacgcgctcttcacgtcgccgggcacggtggtgccggacggcagcaaggcttaccagaaccagttcgacgccatcgtcgacacgttctactccgcgctggagagcgccggcgccgggagcgtcccgatcgtggtgtcggagagcgggtggccgtcggccggcggcacggcggcgagcgccagcaacgcgcagacgtacaaccagaacctgatcaaacacgtcgggcaggggacgcccaagagggccgggagaatcgagatctacattttcgcaatgttcaacgagtacgacaagaaaggcgccgacaccgagaagcacttcggcctcttcaacccggatcagtcgccggcctacaccattaatttctaa

SEQ ID NO: 16330 - DNA, 1359 bp, Oryza sativa
  Clone ID: PAT_MRT4530_22089C.1
atggatcggcaatggatgtacgctgaccggcggtccaaagagtttatcgatggcgtgcattattttttgagagtggccgaagctaacaagcgtaactgttttatttgttgtccatgcaataagtgtaagaaccagaaggagtattctgcatccaggactattcatttgcacttgtttgagtcggggttcatgccaagctataattattggacatcccacggtgagcaaggggttgaaaaggaagaagatgaagcggaggacgagaacattcctgactgggctcagtacgctggatttgaaggaaatcaaacgggtgaggtggacagggttgctggcgataacaacgctgcggatgatcttggtcagatgttgcaggacgcaaacgaggactgtgaaagtgaaaaggaggcccataaattggagcggatattagaggaccacagaacgtcgttgtacccaggttacgagaaggggcacaaaaagttggataccactctggagttcttacaatggaaggcaaaaaatagtgttagtgacaaggcatttggcgatttattgaaacttgtcaagaacattcttccggaggaaaacaaattgcccgagacaacaaacaagaggaatgctagaatgatgcgttggcacgctgaagaacgtcaacaggacaggatgctgagacatcccgccgatggtttgcagtggcgaaacatcgacagaaaatttaaagactttggaaaggacgcacgaaacataaggtttggtttaagtatggatggcatgaatccttttggagagatgagcagcggccatagcacttggcctgttacgatgtatatctacaacctcccctcttggctatgcatgaagaggaagtacataatgatgccgattattattcaaggccccaagcaaccttgtaacgacatcgatgtgtacctaagaccactggtcgaagatctaaaactgttgtggaaaaaggaaggtgtatatggaaagtcgaaagatacactggaagcatgtaatgatctgaagcatatggaacaacgtgatgaccttcacccggaaccaaaggagaaaggaagccattacttgagttcagccagctacattcttagcaaggcagagaaggaaagtatgtttgaatacttggagagcataaaggtaccgtctggatactccacgaatataaaacgaataataagcacgaaggagaagaagttcacaaacctaaagtctcatgactgtcacgtgttgatgacacaactgctactagttgtaacaaggggtatccttccagacaatgtccgggcaacaataacaaagctatgtgctttcatgaacgctgttggcggtatggcatga

SEQ ID NO: 16331 - DNA, 418 bp, Oryza sativa
  Clone ID: PAT_MRT4530_2208C.1
gattaaggcatctgtcataattttttaggaactccacaaagtaggtcattagtagtggggagtatagaacaaagcaaggttcccataaaattttccatgaattccagacaagtcctaacatgaaactgaaggcctagcttgcaaatgcccaggaaattgaaccaaattactcaccccatgggatagaccaggattttggacgtgccaaactaggccacagttgacaccgtcagaaggcatatttgcagcatcagataacatcattgctactttagtactccctccgtttcatataaatcgtttgactttttacttggtcaaagttctttaggtttgggccaagtttataaaaaaaaactagcaacattaacaacacccaaataagttcaataaaattaaccattgatatattttaaaa

SEQ ID NO: 16332 - DNA, 2958 bp, Oryza sativa
  Clone ID: PAT_MRT4530_22090C.1
atgccgccgccggcacaccacgccgccgccttcaccgccgcgcgcgcaacgccgccgccgccatgccacgccgccaccttcgccgccgcgcaacgccgccaccgcatgcaacgccacgccgccgccgccgtcgccacgccgccgccaccgcgccaagcgctggcccgatgccgccacaccgctgttaacgaacacgtgaacgagaacgaacacgtcaacgtacgttgccgcgagaacgtgaacgagaacgagaacgatcgaacgaacgagagcgagaacaaacacgtcaacaaaagacgtgttgtcggagtcgtccctcaagccggagtggaagagctagccctagaagacatgtctagcaaaggaaagaagggcaaagggcctgacgagcctaagcgtcaagtagttctctcaggcaaaagaaaaatcgtcggagttgaggacaagactgacgaggattacgatcagttggataggcaaccccctttcatggtgatgattgaccctagcatcctcctatcaaatgaagacaccccttactcacgcagcgatcacaaggagggaacaatagtgaggagaaaaaacacatatatggctgaccgcgatgaggaacagatattgtacgatacaatcgcggagggaagcagccagtactggaatgaagaagaggggaacgaggatccaaaccagtacttgaacaaggaagggaacgtggagagggatgcggaggggaaccagcaggggcacgtggaaagggatgtggaggggaaccaggaggaggaggctagtggtagtcaaccctccgttggacagaagagggcacacgggcaacgaggtgcagcgaagaagcttgagggtcggcacatcataatggaagtggaagaagatggacgtcctagtgccccggccgaagccgccaagaactatgtacatcacagcggttgggttgtgcaggataacgtgcctgtcagtacggtgtactggcgaacaacaagggcacgcggagatcatgagagctttgtcccagattcggagaaagagatgttgtggaccacaatgctcaagacattcacccttcctgctggtacagaggacaaagtgaaaaggtggactctgaagaaaatggcagaacagtttcagagcttcaagagagatctgtaccagaagtatatcccgaaggggcagacaccgaacttcgacacattcccaaagctaagggatcactgggacgagttcgttgcatataagacaggaggctatagcgtcgcgatgccgaagtgggaggagatggaggctagctttattgagcggggtatcgaaccggcaaccgccaattggccggaacgatcgaagttctggtactatgctcacggtggaacgctcaaaccagttgatggctcactggtctttggcgatcagatacgagaggctgtgcgacgactaacagatgcagtggaagcctcctctcagggcacgttccgaccgaacagagatagggacgagctgacactcaccctgcagactccagagcatccaggacgaacacgagggaaaggggtgattccttggaagattggtttcaaggaggacatccacacgtacaggagtcggatgaggagcaagagagataccgaggcgaagattgcagatctagagttccgggtatcgagctacgaactcagaatgcaagaggaggtggcaaggaaggttgatgaacgcatggccgcacatcggtcccatgatccccagccgaccattcctcctgcaatggtggcgtcgggcatggccatcccaacggacccttcaggtacttaccactacaggccgattccagcaggatactcgaaggtcgaagttgagttggtcgaaggcgcgtacgaggacctcgagctggattaccctggaggagacgtccaaaccagtcctcagcttggagagcaaccaaaccaggagatcgagccgttggtgaccggggaagacatgacgatagaagaatttattattgacaccggtctaactacggatcaattgctaggagttgaaccaatagaaaaggcggaattgaaatacatgtacgaactcggtaaaccgcttgtcaagcccgagctggtgcagtccctacccacacaaatgtacaagttccatcagctgtacatggagatgagcgccaccggtagagagatgatcggagcgaggatcagggacccggacttcttgcaaggagatgatattctctggatcaatttcaagggaatctacgaagtataccagctggatgcccgcgacgtctctattatgagttgctggattttaatggagattcaaagggcccgacggcggagggttttcgatactggattcatcgaccctcggagagtaaacgtcgcaatgctcgaccaatatccacaagaaacagaggacaatctcgtccatctcctgaaggcgcagcattacatgacgttcatactgttgccgtacaacacagaattccactgggtgcttttactcttcgacctgtcggcctgcatcgtcaacgtatatgactcaatggataaaaaagagtctacgtttgacaaggttttcgaacttatagacagggcttggtatcggttccgtcatttggtccgcggcaactggagagaaagacttaggcggaggttcaaatttcctagcgcaaagcaaaagcagggaactaacttgtgcggctactacgtgtgcgagtattgccactgccttgcagaccaaatcatcaccacaagagagctcgattttattcgcatgagggataacctgaccacacacaaggaatttatcgtggcggttcaagaacaactcatgggattcatcaacgaagaaatccttgatcccaaaggtgaattctactacgacggaaacacaattcaccggtccttagcttctgagctagcagcgagtactactactacgtcgaaatcgtag

SEQ ID NO: 16333 - DNA, 306 bp, Oryza sativa
  Clone ID: PAT_MRT4530_22091C.1
atggctgtcacaccaaccatgaaccaaattattcagagagcattagggttcaaggcgagcggcagccttcttccgcttcctagagccgccggcagccttgagcctacaaggctagcaaacgcaaaacacttagatgtgatatgtgaaccaggcaccgtagatcggacggcgagggatcgacgacgactttatggtgacacgatggagaatggcaggcggggaatgacgctgcttcaccttcaaggacgggagggcgaaggggcggcgctgttggcaaccgctatcaagattcaggagaaggggtga

SEQ ID NO: 16334 - DNA, 1344 bp, Oryza sativa
  Clone ID: PAT_MRT4530_22092C.1
atggaagaagatgaagtggaagacgacaatattccggacttttctcagtacgttggatttgaaggaaatcaaacgggcgaggaggaaagggatgctgatgttaacgatgttgcggatgatcttggtcagattttgcaggacgccaaagagaactgcgaaagtgaaaaggggacccataaattagacaagatgttagaggaccatagaacttcgttgttcccaggttgcgagcaggggtacaaaaagttggataccactctggagttcttgcaatggaaggcaaaaaatggggttagtgacaaggcatttggcgatttattgaaactcgtcaagaacattcttccggagggaaacaaattgcccgagacaacgtacgagactaggaagatagtctgcccgctaggactggaagttcagaagattcacgcatgtccgaatgattgtatcctgtatcgcggtgaggagtatgagaacctagaagcatgccctgtttgcaaagcactacgatacaagattagacgagacgatccaggagaagttgacgggcagctaacaaagaagagaattcctgctaaggtgatgtggtatttccctataataccacggtccaacaaggggtacaaggcttgcacttactgtatggatgaaacaaaaagtacgtatcttaagcactgtaggaaggttgtatacatgggtcatcgtcgattccttgcagcaaaccacccaatacggaagaaaggcaagcactttgaacataaggctgaccaccgtatgaagcctaaacatcgcaacgggaaaacagtgtttgctatggttaaagatcttaatgtagtgttcggaaaggggcctggaagccagcctatagagagcgaagatggtcacgcagcgatgcggaaaaagaactctatattttgggagttaccctattgggaattcttggacgtacgccacgcaatcgacgtgatgcacctcactaagaacctttgcgtaaaccttcttggcttcctaggtgtatacggaaagtcgaaagatacactggaagcacgtaatgatctgaagcatatggaacaacacggcgaccttcacccggaaccaaaggagaaaggaagccattacttgagtccagccagctacactcttagtaaggcagagaaggaaagtatgtttgaatgcttggagagcataaagaagaggcacttagtcctcacaccgaaacaaaagcagcagcagcggaaaaaggcgatcctagcggggcttcagctccactccacaggcaaaactcaactggggtctgagccttggtcctctaactccatcttcagctcagaagcactacacttctga

SEQ ID NO: 16335 - DNA, 482 bp, Oryza sativa
  unsure (1)..(482): unsure at all n locations
  Clone ID: PAT_MRT4530_22093C.1
ttaaaanggtttaaaangaaggnttccaaaanaaaccgggncgggcnttgacccattgtttccccccatggctggggtttntttcaattccaggcctangttnnccggccagggccccgttnnnanaccttancccanncccntnaacnncccctttggcnannanctngttcccgttattttcggggccccccaaangnnnnccnanccnntaacnttttnncnncngncancntnggtggcccccanntnantttnattnttccccggaaaaaaaaaggaagaantttaaaaagggtgaaanantntgttaaaggnnngnntaantnntcnncaanttggaaantaattttaaaaccntntncattngnttcttntatnagaangncccaanttttngantttgggnttaaaaacncttngctancttaagtaaatttcctaaaaagtggttttcantnaaaaaaaaaaaaaaaaaaaaa

SEQ ID NO: 16336 - DNA, 5802 bp, Oryza sativa
  Clone ID: PAT_MRT4530_22094C.1
atggaagaagatgaagtggaagacgacaatattccggactttgctcagtatgttggatttgaaggaaatcaaacgggcgaggaggaaatagctgctgatggtaacgacgttgcggatgatcttggtcagatgttgcaggacgccagggaagactgcgaaagtgaaaaggaggcccataaattggacaagatgttggaggaccacagaacttcgttgtacccaggttgcgagcaggggcacaaaaagttggataccactctggagttgttgcaatggaaggcaaaaaatgggaggaagtacataatgatgccgattattattcaaggccccaagcaacctggtaacgacatcgacgtgtacctaagaccactggtcgaagatcttaaacagttgtggaagaaggaaggtgtccccgtgtgggacgaggacaaacaggaggagtttaacctacgagcgctgctattcgtaaccatcaacgattggcctgcacttagcaacctatccggacagtccaacaaggggtacaaggcttgcactcactcaaaccacccggtacggaagaaaggcaagcacttcgaacataaggccgaccaccgtacgaagcctaaacatcgcagtgggaaaacagtgtttgctatggttaaagatcttaaagtagtgttcggaaaggggcctggaagccagcatatagagagcgaagatggtcacgcggcgatgtggaaaaagaactctatattttgggagttaccatattgggaattcttggacgtacgccacgcaatcgacgtgatgcacctcactaagaacctttgcgtaaaccttcttggcttcctaggtgtatacggaaagtcgaaagatacactggaagcatgtaatgatctgaagcatatggaacaacgcggcgaccttcacccggaaccaaaggaaaaaggaagccattacttgagtccagccagctacactcttagcaaggcagagaaggaaagtatgtttgaatgcttggagagcataaaggtaccgtctggatactccacgaatatcaagcgaataataagcacgaaggagaagaagttcacaaacctaaagtctcatgactgtcacgtgttgatgacacaactgctaccagttgtaataagggctatccatccagacaatgtccgggcaacaataacaaagatatgtgcattcatgaacgcaatttcgcagaaggtcatcgatccggatagattagaagcccttcagaatgaagtggtgcaatgtctcgtcagttttgagttgatatttccaccttcatttttcaatataatgacgcatatgctttgtcaccttgtgaaagagatccgtattctcgggcctatgtacctacacaacatgtttcctttcgagaggtacatgggcgttctgaagaagtatgttcgtaaccgtgctcgtccagaggcaagcatcgccaatggttatggaacagaggaggtcatcgaattttgcgtagaatttatcgaagaccttcgcccaatcggggtacctgaatcacgccatgaagggagactacggggaaagggaactctcggaaggaaagcaataacgacggtagacaacaatttattccgtaaagcccatttcactgttctgcaacactcttcattggtagctccttacatcgaggagcacttggctctagttcgcgccaggaacatcggtaagtccgatgcatggattacacggcatcatattgatactttccccgcgtggctacgacaacatctcatgggtaacgagtcgatcaaccaacaacttgccttcctggcgaggggaccgtctgggtcgatcgcgacattccagggatatgagatcaatgggtacacattctacacgagagcccaagacatgaagagcacgaaccaaaacagcgttgttcgtgtcgatgccatgggacacgatggaacaactgccacgtattacggtgccatcgaggacatatgggaacttgactatggtcctctcaaggttcctctgttccggtgccaatgggttaggttgactggtggaggcgtaatgattgatgacagtgggatgacaactgttgaccttaacaaggttggatactcggacgaaccttttgtccttgccaatgatgtaacgcaagtctttttcgtgaaggacatgtctagcaaaggaaagaagggcagagggcctgatgagcctaagcgtcaagtggttctcccaggcaaaagaaaaatcgtcggagttgaggacatgactgacgaggattacgatcagttggatgggcaaccccctttcacggtgacgattgaccctagcatcctcctatcaaatgaagacaccccttactcacgcagcgatcaccaggagggaacaataggcaaatccccgcgccgacgccgccgtatctcgccgtcgtctcgagctcgtcgtcctcgccgccgcctccgcctcctccgctgccgccgcatctctgggacaagtcacgcggccgctgccaaggcctcgcaacgccacgccgccgccgccgtcgccacgccgccgccgccgccgccacgccgccgcgccaaccgcggccccgatgccgccacaccgccgttaatgaacgagaacgagaacgatcgaacgaacgagagcgagaacaaacacgtcaacgtacgttgccgcgacaacgtgaacgagaacgagaacgatcgaacgaacgagagcgagaacgaacacgtcaacgtacgttgccgcgagaacgtgaacgagaacgagaacgatcgaacgaacgagagcgagaacgagaacgatcgaacgaagacaagcgagaacgagggaacgaacgtgaatgagaacaagcgaacgaacgtgaatgagaacgagcgaacgaacgtgaacgagctagggaacatggctgaccgcgatgaggaacagatattgtacgatacaatcgcggagggaagcagccagtactggaatgaagaagaggggaacgaggatccaaaccagtacttgaacgaggaagggaacgtggagagggatgcggaggggaaccagcaggggcacgtggaaagggatgtggaggggaaccaggaggaggaggctagtggtagtcaaccctccgttggacagaagagggcacgcgggcaacgaggtgcagcgaagaagcttgagggtcggcacatcataacggaagtggaagaagatggacgtcctagtgccccggccgaagccgccaagaactatgtacgtcacagcggttgggttgtgcgggataacgtgcctgtcagtacggtgtactggcgaagaacaagggcacgcggagatcatgagagctttgtcccagattcggagaaagagatgctgtggaccacaatgctcgagacattcacccttcctgcgggtacagaggacaaagtgaaaaggtggactctgaagaaaatggcagaacagtttcagagcttcaagggagatctgtaccagaagtatatactgaaggggaagacaccaaactttgacacattcccaaagctaagggatcactgggacgagttcgttgcatataagacaggtgaacaagggcaggcgatgatggaaagaaacaaagaaaatgccgccaagaagaagtaccatcaccacttggggtcaggaggctatagcgtcgcgatgccgaagtgggagcagatggaggctagcttgattgagaggggtatcgaaccggcaacagccaattggccggaacgatcgaagttctggtactatgctcacggtggaacgctcaacccagctgatggctcactggtcttcggcgatcagatacgagaggctgcgcgacgactaacagatgcagtggaagcctcctctcagggcacgttccgaccagacagagatagggacgagctgacactcgccctgcagactccagagcatccaggacgaacacgagggaaaggggtgattccttggaagattggtttcaaggaggacatccacacgtacaagagtcggatgaggagcaagagagataccggggcgaagattgcagacctagagttccgagtatcgagctacgaactcaacatgcaagaggaggtggcaagaaaggttgatgaacgcatggccgcacatcggtcccatgatccccagccaaccattcctcctgcaatggtgagcccgtcaggaaaccgtagcagctgcgcctcaacggggcaggtaggatcacagagcatggacgccatgcaaacacaggacgaatcgacctgtcccgttgatgacatcactcagcggacaccatgtgagctgcatattcctttcaagaacttatcaataaaggtggcgtcgggcatggccattccaacggacccttcaggtacttaccactgcaggccgattccagcaggatactcgaaggtcgaagttgagttggtcgaaggcgcgtacgaggaacttgagctggattaccctggaggagacgcaccgtctccacctcaggctccagcatcgactcctcctcaggatcctgcaccgactcctcctcgtgctcctacacctactcccccgcaagcttctcttccgacaccttcaaagtcaagggcccccccagctccaccgcctacccacacaagggcaacgaagaaggcgaaagttgacgccgccaagaacaaggacccggggtacgattgcacgcaagaggagcttgacgcttacgttgcatcagaagtcaagagacaattcaagcctcgaagtccagaaaagaagattcctatagaccccagtgtcaggaacttcttcagggatatgtctgcatctgtcaaggaggccatcaagctatcggactatgagcgaacgctgaagaaagcatcttctggaaagtccaaaccagtccctcagcttggagagcaaccaaaccaggagatcgagccgttggtgaccggtaaagaaatgacgatagaacaatttattactgacaccggtctaactacggatcaattgctaggagtcgcaccaatcgaaaaggcggaagtaaaatacatgtacgaactcggtaaaccgcttgtcaagcctgagctgctgcagtccctacccacacaaatgtacaagttccatcagctgtacatggagatgagcgccaccggtagagagatgatcggagcgaggatcagggacacggacttcttgcaaggagatgacattctctggatcaatttcaggggaatctacgaactataccagctggacgccctcgacgtctctattatgagttgctggattttaatggagattcaaagggcccgacggcggagggttttcgatactggattcatcgaccctcggaaagtaaacgtcgcaatgctcgaccaatatccacaagaaacagaggacaatctcgtccatctcctgaaggcgcagcattacaagacgttcatactgttgccatacaacacagaattccactgggtgcttttactcttcgacctggaggcctgcaccgtcaacgtatatgactcaatggataaaaaagagtctacgtttgacaaggttttcgaacttatagacagggcttggtatcggttccgtcatttggtccgcggcaaatggagagaaagacttaggcggaagttcaaatttccttttattcgcatgagggataacctgaccacacacaaggaatttatcgcggcggttcaagaacaactcatgggattcatcaacgaagaaatccttgatcccaagggtgaattctactacgacggaaacacaattcaccggtccttagcttctgagctagcagcgagtactactacgtcgaaatcgtag

SEQ ID NO: 16337 - DNA, 162 bp, Oryza sativa
  Clone ID: PAT_MRT4530_22095C.1
atggcgtccatgctctgtgatcctacctgccccgttgaggcgcagctgctatggtttcctgacgggctcaccattgcaggaggaatgggcgagtgtcagctcgtccctatctctgtctggtcggaacgtgccctgagaggaggcttccactgcatctgttag

SEQ ID NO: 16338 - DNA, 2874 bp, Oryza sativa
  Clone ID: PAT_MRT4530_22096C.1
atgccaagctataactgttggacatcccacggagagcaaggtgttgaaatggaagaagatgaagtggaagacgacaatattccgaactttgctcagtacgttggatttgaaggaaatcaaacgggcgaggaggaaagggatgctgatggtaacgacgttgcggatgattttggtcagatgttgcaggacgccaaggaggactgcgaaagtgaaaagggggcccataaattggacaagatgttagaggaccacagaacttcgttgtacccaggttgcgagcaggggcacaaaaagttggataccactctggagttcttgcaatggaaggcaaaaaatggggttagtgacaaggcattttgcgatttattgaaactcgtcaagaacattcttccgaagggaaacaaattgcccgagacaacgtacgaggctaagaagatagtctgcccgctaggactggaagttcagaagattcacgcatgtccgaatgattgtatcctatatcgtggtgaggagtatgagaacctagaagcatgccctgtttgcaaagcactacgatacaagattagacgagacgatccaggagaagttgacgggcagctaacaaagaagacaattcctgctaaggtgatgtggtatttccctataataccacggctaaggcgtttgttcaggaacaaggggaatgctagaatgatgcgatggcacgctgaagagcgtcaacaggacgggatgctgagacaccccgccgatggttcgcaatggcgaaacatcgacagaaaatttaaagaatttggaaaggacgcacgaaacatacggtttggtttgagccccaagcaacctggtaacgacatcgatgtgtacctaagaccactggtcgaagatcttaagctgttgtggaagaaggaaggtgtccccgtatgggacgaggacaaacaggaggagtttaacatacgagcgctgctgttcgtaaccatcaatgattggcctgcacttagcaacctatccggacagtccaacaaggggtacaaggcttgcacacactgtatggatgaaacagaaagtacgtatcttaagcactgtaggaaggttgtatacatgggtcatcgtcgattcctcgcagcaaaccacccggtacggaagaaaggcaagcacttcgaacataaggctaaccaccgtatgaagcctaaacatcgcagcgggaaaacaatgtttgctatggttaaagatcttaaagaattcttggacgtacgccacgcacatcggtcccatgatccccagccgaccattcctcctgcaatggtgagcccgtcaggaaaccgtagcagctgcgcctcaacggggcaggtaggatcacagagcatggacgccatacaaacccaggacgaatccacctgccctgttgatgacatcactcagcggacaccatgtgagctgcatattcctttcaagaacttatcaataaaggatcctgcaccgtctcctcctcatgctccaacaccgtctccacctcagactcctgcaccgactcctcctcaggctcctgcaccgactcctcctcgggctcctacaccgactcctccgcaagctcctcttccggcaccttcaaagtcaagggccccccaagctccaccgcctgcccacacaagggcaacgaagaaggcgaaagttgacgccgccaagaacaaggacccagggtacgattgcacgcaagaggagcttgacgcttacgtggcatcagaagtcaagagacaattcaagcctcgaagtccagaaaagaagattcctatagacccgagtgtcaggaagttctttaggggtatgtctgcacctgccaaggaggccattaagctatcggactatgagcgaacgctgaagaaagcatcttctggaaagtccaaaccagtccctcagcttggagagcaaccaaaccaggagatcgagccgttggtgaccggtgaagaaatgacgatagaagaatttattactgacaccagtctaactacggatcaattgctaggagtcgcaccaatcgaaaaggcggaagtgaaatacatgtacgaactcggtaaaccgcttgtcaagcctgagctgctgcagtccctacccacacaaatgtacaagttccatcagctgtacatggagatgagcgccaccggtagagagatgatcggagcgaggatcagggacacggacttcttgcaaggagatgacattctctggatcaatttcaagggaatctacgaactataccagctggacgctctcgacaatggagattcaaagggcccgacggcggggggttttcgatactggattcatcgaccctcggaaagtaaacatcgcaatgctcgaccaatatccgcaagccacagaggacaatctcgtccatctcctgaaggcgcagcattacaagacgttcatactgttgccgtacaacacagagttagtttaattttactgtcttcctataccaaatttcattcccgtacgaacttgctaagtgtttcatatgtaatgcatcccacgcacattgcagattccactgggtgcttttactcttcgacctgtcggcctacaccgtcaacgtatatgactcaatggataaaaaaagagtctacgtttgacaaggttttcgaacttatggacagggcttggtatcggttccgtcatttggtccgcggcaaatggagagaaagacttaggcggaagtttaaatttccttgcggaaagcaaaagcagggaactaacttgtgctgctattacgtgtgtgagtattgccactgccttgcagaccaaatcatcaccacaagagagctcgatgtacgtacaaataaattcaaaatttcattacgtatcgatttcttgtttaattac

SEQ ID NO: 16339 - DNA, 5491 bp, Oryza sativa
  Clone ID: PAT_MRT4530_22097C.1
atggatcggcaatggatgtacgctgaccgacggtccaaagagtttattgacggcgtgcattattttttgagagtggccgaagctaacaggcataagggttttatttgttgtccatgaaataagtgtaagaatcagaaggagtattctgcatccaggactattcatttccacttgtttgagtcgggcttcatgccaagctataactgttggacatcccacggagagcaaggggttgaaatggaagaagatgaagtggaagatgacaatattccggactttgctcagtacgctggatttgaaggaaatcaaacgggcgaggaggaaagggatgctgatggtaacgacgttccggatgatcttgttcagatgttgcaagacgccaaggaggactgtgaaagtgaaaagggggcccataaattggacaagatgttagaggaccacagaatgtcattatatccaggttgcgagcaggggcacaaaaagttggataccactctggagttcttgcaatggaaggcaaaaaatggtgttagtgacaagacatttggcgattaattgagactcgtcaagaacattcttccggagggaaacaaattgcccgagacaacatatgaggctaagaagatagtctgccctctaggactggaagttcagaagattcacgcatgtccgaatgattgtatcctatatcgcggtgagtagtacgagaacctagaagcatgccctgtttgcaaagcactacgatacaagattagacgagacgatccaggagaagttgacgggcagctaacaaagaagagaattcctgctaaggtgatgtggtatttccctataataccacggctaaggcgtttgttcaggaacaaggggaatgctagaatgatgcgatggcacgctgaagagcgtcaacaggacgggatgctgagacaccccgccgatggttcgcagtggcgaaacatcgacaggaaatttaaagactttggaaaggacgcacgaaacatatggtttggtttaagtacggatggcatgaatctttttggagagatgagcagcggccatagcacttggcccattacgatatgtatctacaatctccccccttggctatgcatgaagaggaagtacataatgatgccgattattattcaaggccccaagcaacctggtaatgacatcgatgtgtacctaagaccactggtcgaagatcttaaactgttgtggaaaaaggaaggtgtccccatgtgggacgaggataaacaggaggagtttaacctacgagcgctgctgttcgtaaccatcaacgattggcctgcagttagcaacctttccggtcagtccaacaaggtgtacaaggcttgtactcactgtatggatgaaatagaaagtacgtattttaagcactataggaaggttgtgtacatgggtcatcgtcgattccatgctacaaaccactcggtacagaagaaaggcaagcactatgaacataaggcggaccaccgtacgaagcctaaacatcgcagcgggaaaacagtgtttgctatggttaaagatcttaaagtagtgttcggaaagggcctggaagccagcctatagagagcgaagatggttacgcggcgatgtggaaaaagaactctatattttgggagttaccctattgggaattcttggacgtccgccacgcaatcaacgtgatgcacctcactaagtacctttgcgtaaaccttcttggcttcctaggtgtatatggaaagtcgaaagatacactggaagcacgtaatgatctgaagcatatggaacaacgcggcgaccttcacctggaaccaaaggagaaaggaagccattacttgagtccagccagctacactcttagcaaggcagagaaggaaagtatgtttgaatgcttggagagcataaaggtaccgtctggatactccacgaatatcaagcgaataataagcacgaaggagaagaagttcacaaacctaaagtctcatgactgtcacgtgttgatgacacaactgctaccagttgtaataaggggtatccttccagacaatgtccgggcaacaataacaaagctatatgctttcatgaacgcaatttcgcagaaggtcatcgatccggatagattagaagccctttagaatgatgtggtgaaatgtcttgtcagttttgagttgatatttccaccttcatttttcaatatagtgacgcatctgctttgttaccttgtcaaagagatcagtattctcaggcctgtgtacctacacaacatgcttcctttcgagaggtacatgggcgttctgaagaagtatgttcgtaaccgtgctcgtctagaggcaagcatcaccaaggtgtatggaacagaggaggtcatcgaattttgtgtagaatttattgaagaccttcgcccaatcggggtacctgaatcacgccatgaagggagactacggggaaagggaactctcggaaggaaagcaataatgatggtagacaacaatttattccgtaaagcccatttcacggttctgcaacaatcttcattggtagctccttacatcgaggagcacttggctctagttcgtgccagaaacatcggtaagtcagatgcatggattacacggcatcacattgatactttccccgcatggctacggcaacatctcattggtaacgagacgatcaaccaacaactggccttcctggtgaggggaccatctggctcgatcgcgacagtccagggatatgagatcaatggatacacattctacacgagagcccaagacatgaagagcacgaaccaaaacaacgctattcgtatcgatgccatgggacacgatcgaacaactggcacgtcttacggttccatcgaggacatatgggaacttgactatggtcctctcaaggtccctctgttccggtgccaatgggttaggttgactggtggaggcgcaacgattaatgacagtgggatgacaacggttgaccttaacaatgttggatactcggacaaaccttttgtccttgccaatgatgtaacgcaagtcttatacgtgaaggacatgtctagcaaaggaaagaagggcagagggcctgacgagccgaagcgtcacgtggttctcccagcgcattctcgtcttctccaccaacacttagaagttttttccccgatcgatctctctcggcttctccttcgccgccactgcctagggcatccccgcgccaacgccgccgtcgtatctcgccgtcgtctcgcgggcgtcgtcgtcgccgcctccaccgcctccgctgccgccgcatctctggggtgtttcttctatgaacagatggctgatcgtgatgaggaacagatactgtacgatacaatcgcggagggaagcagccagtactggaacgaagaagaggggaacgaggatccaaaccagaacttgaacgaggaagggaacgtggagagggatgcggaggggaaccaggaggggaacggggaggaggaggctagtggaagtcaaccctccgctggacagaagagggcacgcgggcaacgaggtgccgcgaagaagctagagggttggcacatcataacggaagtggacgaagacggccgacctagtgccccggcagaagcagccaagaactacgttcgacacaacggttgggttgtgtgggataacgtgcctgtcagtactggcgcagaacaagggcacgcggagataatgagagctttgtcccagattcagagaaagagatgctgtggaccacaatgctcgagatattcaccttttccgcgggtacagagaacaaagtgaaaaggtggactttaaagaaaatggcagaacagtttcagagcttcaagggagatttgtaccacaaatatatcctgaaggggcagacactgaactttgacacattcccaaagctaagggatcactgggacgagttcgttgcataaaagacaggtcaacaagggcaggcgatgatggaaagaaacaaagaaaatgccgccaagaagaagtaccatcactacttggggtcaggcgactatagcatcgcgctgccgaagtgggaggagatggagcaagcttgcttaagaggggtatcgaaccggccaccgctaaatggccggatcgatcgaagttctggtactatgctcatggtggaacgctaaacccagttgatggctccctggtcttcagcgatcagatacgcgaggctgtgcgtcgactaacggacgcagtggaagcctcttctcagggcacgttccgacccgacagagagaaggacgagctgtcactcgccctgcagactccagagcatccaggacgaacacgagggaaaggggtgattccttggaagactggattcaaggaggacatccacacgtacaggagtcggatgaggagcaagagagataccgaggcgaagattgcagatcttgagtacagggtatcgagctacgagctcagcatgcaagaggaggtggcaaggaaggttgatgaacgcatggccgcacatcggtcccatgatccctagccgaccattccccctgcaatggtgagcccttcaggcaatcgtagcagctgcgcctcaacggggcaggtaggatcacagagcatggacgcctgtcaagcctgagcagctgcagtccctacccacacaaatgtacaaattccatcaactgtacatggagatgagcgccaccggtagagagatgatcggagcgaggatcagggacatagacttcttgcaaggagatgatattctctggatcaatttcaagggtgtctatgaactataccagctggacgccctcgacgtctctattatgagttgctggattttaatggagattcaaagggcccgacggcggggggttttcgatactggattcatcgaccctcagaaagtaaacgtcgcaatgctcgaccagtatccgcaagccacagaggacaatctcgtccatctcctgaaggcgcagcattacaagacgttcatactattgccgtacaacacagaattccactgggtccttttactcttcgacttggaggcctgcaccgtcaatgtatatggctcaatggataaaaaagagtctacgtttgacaaggttttcgaacttatagacagggcttggtatcggttccgtcatttggtccgcggcaaatggagagaaagacttaggcagaagtttaattttccatttattcgcatgagggataacctgatcacacacaagaaatttatcgtggcggttcaagaacaactcatgggattcatcaatgaacaaatccttgatcccaagggtgaattctactacgacgaaaatacaattcataggttcttagcttctaagataacgactactactacgcaaaaggtaaatttatctgttggcaaagatagctatcatagccttcagggtatgtgttggcaaatgttaaaactgtcaacaaacttttgccagctgctgcaacgccgactatggtgaaaattg

SEQ ID NO: 16340 - DNA, 255 bp, Oryza sativa
  Clone ID: PAT_MRT4530_22098C.1
gagaactagtctcgagttttttttttttttttttttaaatctgaaggtatgtcttattattatatagccgcaagcattgtagtgctaagcacaacagttctaaggggctgaagtgctcaacagacactaaacagcactacgatatgcttaccgtatcagtatcgcacaaaaagtaaatagacaacataatgaggaatagattctgtaacgccaagtgaaggggtagagcttttcctcccttttctcaaaatttct

SEQ ID NO: 16341 - DNA, 4797 bp, Oryza sativa
  Clone ID: PAT_MRT4530_22099C.1
atggatcggcaatggatgtacgctgaccggcggtccaaagagtttatcgagggcgtgcattattttttgagagtggccgaagctaacaagcgtaacggttttatttgttgtccatgcaataagtgtaagaatcagaaggagtattctgcatccaggactattcatttccacatgtttgagtcggggtttatgccaagctataattgttggacatcccacggtgagcaaggggttgaaatggaagaagatgaagcggaggacgagaacattcccgactgggctcagtacgctggatttgaaggaaatcaaacgggcgaggtggacagggatgctggcgataacaacgctgcggatgatcttggtcatatgttacaggacacaaaggaggactgtgaaagttgtgagcaggggcacaaaaagttggacacaactctggagttcttgcaatggaaggcaaaaaatggtgttagtgacaaggcatttggagatttattgaaactcgtcaagaacattcttccggagggaaacaaattgcccgagacaacgtacgaggctaagaagatagtctgccctctaggactggaagttcaaaagattcacgcatgtccgaatgattgtatcctatatcgcagtgaggagtacgagaacctagaagcatgccctgtttacaaagcactacgatacaagattagacgagaggatccaggtgaagtcgacgggcagccaacaaagaagagaattcctgctaaggtgatgtggtatttccttataataccatggctaaggcgtttgttcaggaacaagaggaatgctagaatgatgcgatggcacgctgaagaacgtcaacaggacgggatgctgagacaccccgccgatgaaagtacgtatcttaagcactgtaggaatgttgtgtacatgggtcatcgtcgattcctggttgcaaaccacccggagttaccctattgggaattcttggacgtccgccacgcaatcgacgtgatgcacctcactaagaacctttgcgtaaaccttcttggcttcctaggtatatatggaaagtcgaaagatacattggaagcacgtaatgatctgaagtatatggaacaacgcggcgaccttcacctggaaccaaaggagaaaggaagccattacttgagtccagccagctacactcttagcaagacagagaaggaaagtatgtttaaatgcttggagagcataaaggtaccgtctggatactccatgaatataaagcgaataataagcacgaaggagaagaagttcacaaacctaaagtctcatgactgtcacgtgttgatgacacaactgctaccagttgtaataaggggtatcctttcaggcaatttccgggcaacaataacaaagctatgtgctttcatgaacgcaatttcgcagaaggtcatcgatccggatagattagaagcccttcagaatgatgtggtgcaatgtcttgtcagttttgagttgatatttccaccttcatttttcaatataatgacgcatctgctttgtcaccttgtcaaagagatcagtattctcgggcctgtgtacctacacaacatgtttcctttcgagaggtacatgggcgttctgaagaagtatgttcataaccatgctcatacagaggcaagcatcgccaaggggtatggaacagaggaggtcatcgaattctgcatagaatttattgaagaccttcgcccaatcggggtacctaaatcacgccatgaagggagactacggggaaaggggactctcggaagaaaagcaataatgacggagcacttagctctatttcgcgccagaaacatcggtaagtccgatgcatggattacacggcatcacatcgatactttccctgcgtggctacgacaatatctcatgggtaacgagatgattaaccaacaactggccttcctggtgaggggacgatctggctcgatcgcgacatttcagggatatgagatcaatgggtacacattctacacgagagcccaagacatgaagagcacaaaccaaaacagcgttgttcgtatcgatgccatgggacatgatggaacaactggcacgtattatggtgccatcgaggacatatgggaacttgactatggtcctctcaagatccctctgttccggtaccaatgggataggttgactggtggaggcgtaacgattgctgacagtgggatgacaacggttgaccttaacaaggttggatacttggacgaatattttgtccttgccaatgatgtaacacaagtattttacgtgaaggacatgtctagcaaaggaaagaagggcaacaagcctgacgagccgaagcaccacgtggttctcccaggcaaaagaaaaatcgtcggagtagaggacaagactgacgaggattacgatcagttggatgggcaaccccctttcacggtgacgattgaccctagcatcctcctatcaaatgaagacaccccttactcacgtagtgatcacaaggagggaacaatagtgaggagaaaaaaagacgtcgtcgtcgttgtccctcaagccggagtgatagctgatcgcgatgaggaacatatactgtacgatacaatcgcagagggaagcagccagtactggaacgaagaagaggggaacgaggatccaaaccagtacttgaacgaggaagggaacgtggagagggatgcggaggggaaccaggaggggaacgtggagagggatgcggaggggaacgaggaggaggctagtggaagtcaaccctccgctggacagaagagggcccgcgaacaacgagaaacagccaagaactatgtacgacacagcggttgggttatgcgggataacgtgcctgtcagtacggtgtactggcgcaaaacaagggcacgcggagatcatgagagctttgtcccagattcggagaaagagatgctgtggaccacaatactcgagacattcacccttcccgcgggtacagagaacatagtgaaaaggagtcggatgaggagcaagagagataccgaggcgaagattgtagatcttgagtacagggtatcgagctacgagctcagcatgcaagaggaggtggcaaggaaggtggatgaacacatggtcgcacatcggtcccaggatccccagccgtacattcctcctgcaatggtcagcccttcaggcaatcgtagcagttgtgccttaacgaggcaagtaggatcacagagcatggacgccatgcaaacccaggacgaaaccacctgccccgttgatgacatcactcagcggacaccatgtgagctgcatattcccctcaagaacttgtcaataaaggtggcgtcgggcatggccatcccaacggacccttcagggacttaccactgcaggccgattccagcaggatactccaaggtcgaagttgagttggtggaagccgcgtacgaggacctcgagttggactaccctggaggagacgctcctggtttggaatggtatattcttggtgtggagatagaactgtgcagccgggatggttgttcagaatggttgggcctatgcaacagggctcctacaccgactcatccgcaagctcctcatccggcaccttccaagtcaagggccccccaagctccaccgcctacccccacaagggccacgaagaaggcgaaagttgacgccgccaaaaacaaggacccggggtacgattgcacgcaagaggagcttgacgcttatgtggcatcagaagtcaggaaacaattgaagcctcgaagtccagaaaagaagattcctatagacccaagtgtcaggaacttctttaggggtatgtttgcacctgccaaggaggccataaagctatcggactatgagcgaacacttaagaaagcatcttctagaaagtccaaaccagtccctcagcttggagagcaaccaaaccaggagattgagccgttggtgaccggtgaagaatttggaatacaagattttattaatgacaccgggctaactacggatcaattgctacgaggcgcatcaatcgaaaaggcggaagtgaaatacatgtacgaactcggtaaaccgcttgccaagcctgagcagctgcagtccctaccgacacaaatgtataaattccatcaactgtacatggagatgagcgccaccggtagagagatgatcggagcgagtatcagggacacggacttcttgcaaggagaagatattctctggatcaatttcaagggtatctacgaactataccagctggacgctctcgacgtctctattatgagttgttggactttaatggagattcaaagggcccgacggcggggggtttttgatactggattcatcgaccctcggaaagtaaacgtcgcaatgctcgaccagtatccgcaagccacagaggacaatctcgtccatatcctgaaggcgcaatattacaagacagaggcttggtatcggttccatcatttggtccgcggcaaatggagagaaagacttaggcggaagtttaactttcattgcgcaaagcaagaccagggaactaacttgtgcggctactatgtgagcgagtattgccactgccttgcagaccaaatcatcaacacaagagagctcgatgatattcgcttgagggataacctcacacacaaggaatttatcgcggcggttcaagaacaactcatgggattcatcaacgaacaaatccttgatcccgagcgtgaattctactacgacggaaatacaattcataggtcgttagcttctgagataacgactactactacgtcgaagtcgtag

SEQ ID NO: 16342 - DNA, 379 bp, Oryza sativa
  unsure (1)..(379): unsure at all n locations
  Clone ID: PAT_MRT4530_2209C.1
cctgaatgttgcaatcagtgttgaaccctgattgatttactcatgtaaccctgatctcnactattccagtactacttgagattgagagtactagttgttacccgtgtaggcaaagtgttatgatccgtagctgttgtgtggtagggtagcagtactagtatggagtatgttctactggagctgcagctgatgcattggggaagataactcggtcatcaatcgatgcagatattgtgaacaatcgcaaatgagttagtaagtatactacttcagagttcagaggtattcagacatctataggctgtgttcagttggatccaaagtttggattttggttgaaattggagatgatgtgactgaaaagttgtgtaaaaaaaaa

SEQ ID NO: 16343 - DNA, 331 bp, Oryza sativa
  Clone ID: PAT_MRT4530_220C.1
gatcaaatcagttggcacgcccttgacgcactcgaggctagctttggacctgagcagatctcccaagctgccgtgttttcacatcaacaagtgggtagagactcgatggactaggaagttctcgtggggcgacaccccagtcatgacgtgctcgtggataatgagtgccaagacttgtactactcttgactatgtgaccttgcttaagattagagatggaacaaactatctgaccttgcccactgtgcgggaaggtcgatatgatgaaagaggatataaaacagaatgcgagggtaaacctgacctagcgaggcttggggaaggtggatga

SEQ ID NO: 16344 - DNA, 1579 bp, Oryza sativa
  Clone ID: PAT_MRT4530_22100C.1
cgaagtatagtatttttttttcacagaaagcattctatatagtctacaagaaaactacggtacaaaacattaggacaatcatcttgaacaaatcctgaaaatttgtcctagttacagttgcaacatgtgccaacgaacagctatacccatgaagatggatgcatggaacaaatcacaaaagaatgaaattctgtacaataaatgaagagatcgatctggacaaagagacgaaacaagccaagaccatccggaggagcagttcaagggtgtcgccgccgccgcagctaagcgagttgcctagacgcgtcctccggtgagagcttgcccggcggcaaagcacatccgcgtcctggccattgagggcagccagctgctccgagtgctcgccgatgatgctcgcggcgcggctgtcctcggcgagtatgatctcgtacccgtccctgaggctgtccatgccagcgacgatgtcaccgtcgagcagcagctgccagaacgcgccgccgacgagcgggccaccgcgcgatgccgaggcgtagatggcgtcgagcaccaagtcgaggaagtagttcctctgcgccttgttggcgccgacctccttccagaggaacttgccgtactcggtgacgagaagcggcatgccgaggtacgccgccgtggcgtcaatgtgggagcgcgtccagttccggaagaaggcggcctgctcgtcggcggtggagccccatagccagacgtccgggtagaggtggatggtggcgaagtcgacgccggcggcgcggtgcgtggccacgtagttggtgccgtagtagatgccccacgggttgagctccttgctctcgtgctcgccgtcgccgtagaacccctccagcccggccgtcaccaggtggcggccgccgtcgacgcgcttcacgtacggcgccatctcctccacccacgcctgcaccatgccgcccgtcgggtcggcgtcgcaccgcggctcgttcatgagctcccacgcgaagatcgtcggatcatccttgtacgccacccccgtcaccgtgttcaccctcgtcagcaccgccttgacgtggttcttgtagtaggatttgacgacggagctggtgaagaagtcgtcgccggcggtgaggttgtggccggcgtcggccgcccaccggacgtactgacgcttgccgccgaaatcgtcgaagttgttggtgaggcagaggagaaggtatatgccatgtcgtctcgcctcggcgatcacaaagtccagcccctggaacatggcctcgtcgtagacgcccggcgacgactgcagcggctggtcgccgccgtcgctgaaggcccaggtccgggcgaggttgaggccgcgcgatgacgcctgggcgaacgcggcgacgacggcggcgcggcgcgccgggtcggacgccatcatcatcagccagtacgcgttgaacccgctgaagtagatcgtcctgccgccctccaccacgaactgcgtcccgtccacgcccaccatgccgccgcccgccgccgccgcggcggcgccgaagacggcggcgatgatgatcgcggcggcggccggccgtggcctcaccgtcat

SEQ ID NO: 16345 - DNA, 584 bp, Oryza sativa
  unsure (1)..(584): unsure at all n locations
  Clone ID: PAT_MRT4530_22101C.1
cgagctctcgggctgctcccacacgagctcggcatgctcaccaaggncgcggtgatcgacgccggcatgaacaagctcaccggcccgatccctcctccttctcatgcctcaccagcgtcgaacanctcaacctggggggnaacgcctctacnganaaatncccgacgcgctctgcaagctcgccgccgggccaacgggcgcctcgccaacctcacgctgtcgaacaactacttcacntctgtcggccngcgtgcttgtctctgatcaaaganngggtcctcaacntcnanaacaactgcattccgggcttccccaaccaaccgcgggcggcggaatncgcntctttcctcaaccagcccaaaaaatttccggcggggancgccaccacgccgcgttccccccncgggggngcccgtggacaaggtggcaaaagantactccnactacnttacntagccaccctgcncnantgaagcacngcgttccttcatgcatgcantaagggganagctaaaaactacgtctccggtgggtatttggcnccctgttattcctgtgttcntttgggtgtttctcctgaattc

SEQ ID NO: 16346 - DNA, 351 bp, Oryza sativa
  Clone ID: PAT_MRT4530_22102C.1
atggggacggccgcgacgtgcagcgccctctccaggctgggcaacatcatgctggtggtcgagcacctcgcggcggagctgacggccgtgcacgccgcgctccgggacgacctcgccgacgtgcccccggcgcaggtcgacgagcagaccaaggcctggtccggccacgccagggagctcgcgcacgacaaaagccgcagtcgcctccgcttggccatcgccgcgacgccgcggtctaccgtaccgcccgcccccatgcgccgcgcccgcagccgcctccgtttggccgtcaccgcgacgctgccatccgccgcccgcccccatgcacgcctgcagacaaagagagattga

SEQ ID NO: 16347 - DNA, 782 bp, Oryza sativa
  unsure (1)..(782): unsure at all n locations
  Clone ID: PAT_MRT4530_22103C.1
cccgcgtccgattcctcggaagccacggtcgaggcgactccagaaagcttcccctccgcggtccgctcgcctcctcacggcgccaaagcaggcgtcaagaagaagaaccacgctgtttctaggacgattcctggaacagccaacttctgaacctctatctgcaagactgcagacagtataatacttcttcctggttgcagccgcctcagcggaaaaaccaaattcagcttcattcatgggttccccaagcaaaacacgtcggatgaagccattggggattcagctatatgagtgtgcccgggggagtcctatctccttcagatcatgccaggctcttgtattgatactgacgttcttatcctatgctagctatcatgccactaggaagactacaagcattgtcaagaagtgttcttgatcctaagacagaaaacctaggtatgttgcattggccgagccatctgtatcttcaggatttaagagatgcacagggcaacatgacggctctctatagcggctgggctccgtttaatgccgacgatggtactgcattgctcgggngagatcgacttggcatttctcggagtatatgcaatcggcatgttcttcgctggccatttgggtgatcgggtggatctcaggatacttctgaccatcggaatgataggcactgggatttttcactgctgcctttnggtgccggcaactggctcaaatacacaacttctactactttctggggtgttcagatgatggctggcctggtttcagtcatccggctg

SEQ ID NO: 16348 - DNA, 2527 bp, Oryza sativa
  unsure (1)..(2527): unsure at all n locations
  Clone ID: PAT_MRT4530_22104C.1
gctcttttcctccgcggtccgctcgcctcctcacggcgccaaagcagccaggaagaagaagaaccacgctgtttctaggacgattcctggaacagccaacttctgaacctctatctgcaagactgcagacagtataatacttcttcctgatggccctacagttgtggggctcaaaagaagatccggtagagagcataatattagagcacagggaatatccttgttcagaagaatatcctatatctatatctccccattctctgtccctggcatttgaactggccattagcaaaatccacctaaccggcaaagccgcctcagcggaaaaaccaaattcagcttcattcatgggttccccaagcaaaacacgtcggatgaagccattggggattcagctatatgagtgtgcccgggggagtcctatctccttcagatcatgccaggctcttgtattgatactgacgttcttatcctatgctagctatcatgccactaggaagactacaagcattgtcaagagtgttcttgatcctaagacagaaaacctaggtatgttgcattggccgagccatctgtatcttcaggatttaagagatgcacagggcaacatgacggctctctatagcggctgggctccgtttaatgccgacgatggtactgcattgctcggggagatcgacttggcatttctcggagtatatgcaatcggcatgttcttcgctggccatttgggtgatcgggtggatctcaggatacttctgaccatcggaatgataggcactggatttttcactgctgcctttggtgccggcaactggctcaacatacacaacttctactactttctgggtgttcagatgatggctggcctgtttcagtcatccggctggccatctgtggttgcagttgttggtaattggtttggaaagagcaaaagagggctgataatgggaatctggaatgctcatacatctgtgggaaacatatctggttccttaattgcagctgcaatgttgaagtttggatggtcatggtcgtttgcagtccctggagtgatgatcgcagtcgttgggcttgcagtgtttctgttcttgcctgtcggtccggagatgattggaatcgaggaggatatccatgagaaggatgctgagaaggatgacatgagtgcacctctgttggaagaacgatcggcatcaaaagaaaaggcagtcgggttcattcaggcttggagaattcctggtgtagcgccatttgctctctgccttttcttctgcaagcttgtggcttacacattcctgtattggcttccgttttatatcagccacacagcaatcggtggagtgtacttgtcagacaccgcagccggtgtactgtcaactctgttcgacgtgggtggcgttgtcggcggcatccttgccggccacatctccgaccgcctcgacgcacgggcgctgacggcggcgagcttcacgttctcggcgatcccggcgctcttcttctaccgcatatacggcagcttctcgctgtactcgaacatcgccctcatgttcgtcaccgggatgctcgtcaacgggccgtacgccctcatcaccaccgccgtctccgccgacctcggcacgcacagctccctgaacggcaactccagggcgctcgccaccgtcacggcgatcatcgacgggacggggtcgatcggcgccgcggtcggcccgctgctgacggggtacatctctgccaagagctggagcggcgtgttcacgatgctcatggcgtccgctttcgtcgcggggctgctcctgtcgaggctggtcatggcggagatctccgcgaagatggagtcccggaggcctgacgctgctgctagtgatctgccagtgtcctccatggaacaatcttaggctccattagacactttggaaattgtgtccctggtgaaatgctgagaaattttacaagcgaaaaagcctgaaaatggagacttgagaggtgtggcaggaagagcaaacccctcacaaattcccttttttttttgacacctgaggagcaaggtgctctctccagccccaggattgcatcatggctatgagcgatttctgtcgggtctggttcctttttgagactggtcccgtcggaggatctcattggtcatggagtcccggaggcctaacgctgctgctagtgatctgccagtgtcctccatggaacaatcttaggctccattagacactttggaaactgtgtcccatggtgaaatgctgagaaattttacaagcgaaaaagcctgaaaatggagacttgagaggtgtggcaggaagagcaaacccctcacaaattcccttttttttttttaacacctgaggagcaaggtgctctctccagccccaggattgcatcttggctatgagcgatttctgttgcttgtgatgtgtaaaaaaaaaaaaaaaaaaaagaagtgttggttctcatcatctagctgtttccccggtgaaaaaaaaaaaaaaaaaaaaaaaaaaaaaaaaaaaaaanaaag

SEQ ID NO: 16349 - DNA, 688 bp, Oryza sativa
  Clone ID: PAT_MRT4530_22105C.1
tgagccggtacctatgatgccagtctctatgtggtgttatgtaggctaggagccctcagattgatatctgtggttcgaataagaccttgggctggcaccctagtgttaggtgatcatttggacagagagctgttcgcggtagcgtagcgaccaccataaccataggcgatgggaagacaacaggcttctagagcactcgcattgattgcgccggcaatctacacagcctccataagcaagaatagatctgtctgtgaggccctcctctccaacaagtgggtcagagagacatccagttgtaccatatcacgacgagagagcatctttgctgatacgtcgagctttggaccttgatatgcaatgctctcctgctagctagggcaacaacgcgacaacatcgtctggaaactcaccacaaatagggaatacaaggcaaaatcagcttaccagctcctattcctgggggcggcaaggtcaactttcaatgagacaatatggaaatgatgggcatcgccgaagtgcaagttcttcacatggctggtcatacaaagcagagtctggacagcaaacaggctaaaaaaagttggacaaatcagcaaatatgcccctctactacaccacacaggaaatggcattgcacctctttgcacgttatagactctcctgccgaatctgggtagtgattcag

SEQ ID NO: 16350 - DNA, 282 bp, Oryza sativa
  Clone ID: PAT_MRT4530_22106C.1
atgcccccacctcctccaccccctcgtcggaccaccgccgccgccaccgccgccgccgacaacgacaacgacaacgtcgactacgctgcggagatggaggctgacgccgccgggaacggctcggcaaggtcggcggcggcggcggcgtatgtggcgcgggccgtcgtctacgacggcgttgacccatttgaggggatggagttcgacaacgaggagccgttaacgcgcacgtcatggtgcagacacagccgcagccatcgggggtggacgcggcgccgttga

SEQ ID NO: 16351 - DNA, 399 bp, Oryza sativa
  Clone ID: PAT_MRT4530_22108C.1
atggtggtcctggagcctggaggagcgtcctcctctctcctccacagcaatgttctgcaactagcgcggtatgaacctctgaaggtagcgacgacctcctcatccctgaccgtcggatccatgctcccccacgtcaagcctaaaatgtactaccaccaccggcgagggagcagcctccaccaccgggaagcacgaggtagggggctggccggcatggcaccaaggctgatgctcttcttcctcctgctcatggaagttccatggcacgctcctagggagcgacatccaacaacgccagcgctcgccgccacgcccctcagcaccgggatccatatgcatggcaccctcagcatgcccgaccatgcatgtacgcgcaactgctgcacagatccaagatga

SEQ ID NO: 16352 - DNA, 464 bp, Oryza sativa
  unsure (1)..(464): unsure at all n locations
  Clone ID: PAT_MRT4530_22109C.1
cgaggatcattggtgtggacctgaaccctgcgaaattcgaacaagctaagaagtttggctgcactgacttcgtaaaccccaaggaccacagcaagccagtgcacgaggtgctgattgagatgaccaacggtggactcgacagggccgttgaatgcacgggcaacatcaacgccatgatatcctgcttcgaatgtgtccatgatgtcagtctctttcttacaaacatgaaacatgatagtaacaaattgaagatgatcatttcagcaatgcctccagttctgctgtaaactgtatcctgaaaactaagagtggcaatctgaaacctgaatccagggatggggcgttgcggggctggtcggcgtgccgaccaaggatgatgtgttcaagacccacccgatgaacttcctcaacgagaagacgctcaaggngacgttcttcggtaactacaagccgngcaccgacct

SEQ ID NO: 16353 - DNA, 353 bp, Oryza sativa
  Clone ID: PAT_MRT4530_2210C.1
ccccaaaaatggaacctttgcccccccttttttattattattaaccccttgggcaaacaagcgtgcaaaaagttggggctcggggataataatgaacaaaatgggggggttttacataggggatgaaacctttaaacaattaatttggcccaaaccggggaaattccttggagttgcaggttttaaacccggggtttattccatggaaacagttttccccgagctgaaattacctgcccaattttttgccgtcccctggccaaaaagaagtttccggatctccggaaattttttggggaaaaaaaatttcaacctggaataaaaggggttttaacaccaaatttttccatttt

SEQ ID NO: 16354 - DNA, 175 bp, Oryza sativa
  Clone ID: PAT_MRT4530_22110C.1
caaaaatcttgcttcgtgattggacagccgttccattgacaccacaaattttgttatagcgacccagtttattatacttgctaggggaacaaattaaattgactcgaaactactcaaatctcaccaaaattcacattaaagcctactacccaaatattgaccgtcagtgacctct

SEQ ID NO: 16355 - DNA, 1083 bp, Oryza sativa
  Clone ID: PAT_MRT4530_22111C.1
atggcgccgtcgctagccaccgtcgttgcgatcttcctcgccgccatcctcctctcgtcgccaccaccctgcgccgccgcttcgtccgcgccagcgccggctgcggccgggcatggcgtcccggcggtgttcgcgttcggcgactcgacgctggacccgggcaacaacaaccgcctcgccacgctggtgcgcgccgaccacgcgccctacggccgcgacttccccggcggcgcggccacgggccggttcaccgacggcaagctcatcaccgactacatcgtctcgtcgctcggcatcaaggacctcctcccggcgtaccactccagcggcctcgccgtcgccgacgcctccaccggcgtcagcttcgcgtcgggcggctccggcctcgacgacctgaccgcgaacaacgccctggtgtccacgttcggctcgcagctcaacgacttccaggagctcctcggacacattggctcgcccaagtccgacgagatcgccggcaagtccctgtacgtgatctccgccggcaccaacgacgtcaccatgtactacctcctgccgttccgcgccacgaacttccccaccgtcgaccagtacggcgactacctcatcggccttctccagtccaacctcaacagcctgtacaagatgggggctcggaagatgatggtggccgggttgccgccgttgggctgcctcccggtgcagaagagcctccgcggggcgggttccggaggctgcgtcacggagcagaacgaggcggcggagcggtacaacgccgcgctccagaaggcactctccaagctggaggccgactcacccggcgccaagatcgcctacgtcgacatctacacccctctcaaggacatggccgagaaccccaagaaatacggtttcacccaggcgagcctcggctgctgcgggacggggatgatggagatgggggcgctctgcaccagcgcgctgccgcagtgccagtcgccgtcgcagtacatgttcttcgactccgtgcacccgacgcaggccacctacaaggctctcgccgatgagatcgtcaagtcgcacgtgccgcagctcatgcagtaa

SEQ ID NO: 16356 - DNA, 489 bp, Oryza sativa
  Clone ID: PAT_MRT4530_22112C.1
cggaatgccgctgcggcgaatcgcgatcaaccagcgcgatcgagcaggacgacggtttcccgagcgatcagagcgcacgcacctctccctcccggatggatcgccgcgcactcgagcgaggacgcggagcaactggcgagagaggaaggcgaggagagcagagagcagagagagaggcgaggaagagattttgattttcgaatgggggcgccgtttgcctcgaactcgctcgccgaccagggtcttattgcaccgggtggtggtgacgtggccgggtcggcgcgggcgaggaggtcggaagcttcgatcggacgcgccgggttccgagtttccgacccgacccgggcggaggcggcggcgttggcgacggttgcgttggcctgtccgcgcctactggaatcttccgggatgccgagtgacttgctcgtgaagtttaggaccaggattagagatttcttaggcctgaggcattttgcgattgatcgatga

SEQ ID NO: 16357 - DNA, 2915 bp, Oryza sativa
  Clone ID: PAT_MRT4530_22113C.1
atggcggagtccggcgggtccgaggaattcctcaagctctacatccatggcgtcctcgccgacggcaccaccacctcggattaccgtctccttccagcatgggagttttcctcttccgagcgcgtggtggcggcatccacttcaacaacctcccggccatcgccggccgatgaaggcgagcccactggatgggaagggcctacgttggaggtggagaagctggcatcgtccaccgatgttgatgcaggttcagagaaacagtgggtatctactagcatctattatttggccttgaattcacttgaggatgatttgggagaagacccaattgaattggattctcccgaggatgctttggggaaagacccgattgaattacatggtcagatatctatggagatacacatgccacctttgatgatgaaattccaaaaggactaccgctgtgaaaagcaaatagtgatgtcagcactcttgcacttctggatcatgaggaaaaagcaggaatacgatcagcttgatatagaatttgatttggatagtgctctggagggaactgacgtgcttacggactggaagggcgattacaacctgctaaagaaaatgacaagtccaaatgcatgggagcgactttcagcggtagaaattaagtgggtgccgacgtcgtgctgcttccgccgcatcctcgccggcagttacatgcacacgtaccggcaaggcgaggaaatatgggcaaaggtgaactcactcacttccattgagactgaactgccattcagctactacagtctcccatactgccatccccaaggtgggataaagaagagtgctgagaatctaggggagctcctgatgggtgaccagattgacaattccccataccggtttcgtgtgaatgtcaatgaatcactgtatctgtgtaccacaaacccacttgacgaggctgatgtgaagctcctcaagcagcgaagccgagacctctaccaggtgaacatgattctcgacaatcttcctgtgaggagatttactgaacagaatggagtgaccattcagtggacaggctatccagttggttataccccggaaggaagcaatgaggtctacatcattaatcacctgaaatttaaggtcttggtccataggtacgaaggaggtaaagtcaaggtagttggaactggggaaggaatggaagtgatctcagagacagagacagatgccaagtctggctatgagattgtgggatttgaggttgtcccatgcagcatgaagcgtgatcttgaagctatgtcaaagcttaagatgtatgaaaaagttgatcctacaagctgccctgtggagatggagaaatctcaattgattagggaaaaagagcagattacttttacgtatgaggttgaatttgtaaacagtgatatcagatggccatcacggtgggatgcatacctgaagatggagggtgctaaaattcactggttctcaatcatgaactcattgatggtaatactatttttggctggaattgtgtttgtcatattcttgcggacggtgaggagagacttgactagatatgaggaattggataaggaggcccaagctcagatgaatgaggagctctccgggtggaagcttgttgttggtgatgtcttcagagaaccaacatcatcaaagcttctctgcgtcatgattggtgatggggttcaaattctgggtatggcaattgttaccatcttctttgctgcctttgggttcatgtctcctgcatcaagaggaatgcttctcacagggatgatatttctttatatgttgcttggaattgtggctggatatgctgccggctgactctggaggactttaaaaggaacttctgagggatggagatctgtctcctggccaacagcctgtttcttccctggtattgtctttgttgtcctcactgtgttaaatttcatgctgtggtcaaggaatagtacaggagctcttcccatctcactcttcttcacacttctgtccttgtggttctgcatctctgtgccacttaccctcctcggtggtttctttggcacaagggctgagccaatagaattcccagttcgaaccaatcaaataccaagagaaatccctgcaaaaaattactcttggctccttgtgcttggtgctgggactctgccttttggaacactattcattgagttgttctttattctttcaagtatttggctcggaaggttctactatgtgtttgggttcctccttgttgtcctcctcttgctggttgtggtctgtgctgaggtatctgttgttcttacctacatgcatctttgtgcggaagattggcgttggtggtggaaagctttctttgcctctggagcagtagcgctttatgtgttcctgtactctatcaactacttggtgtttgatctcagaagcttgagtggcccagtttctgctacgctctacattggatatgctttcgttgtctctcttgcaattatgctggctactgggactgttgggttcctgacatcattctctttcgtccactaccttttctcatcagttaagattgattgaagaccataccttacaaatctccaaggatgactgtacactgaatcactctaaagcggcaatgatttgatcatggcatgaaggccctttacacaattgtgatgtcttccttatgtagctaattaccgggactattgtaccacgatgaatatggtgatagtaatgtaccagcatatatgcttttaagcttgcattcatcatcttttatttgttaaaattttgttgattgtgcaaatgctttctgaaaagaccatgaattttacttagcatatcagtggtacattatggagtgattgctttgttatgtaagttgactttgcaatcaaccagttattatcttgaggtat

SEQ ID NO: 16358 - DNA, 206 bp, Oryza sativa
  unsure (1)..(206): unsure at all n locations
  Clone ID: PAT_MRT4530_22114C.1
gggaactgtgcgtttcgagatccganccgccagtgctcagttggagggtggtgtcaacatggagtcttacgagaagaagctttacgcttgagtggcggtacganaaaaagatgagatgcctgaatncncatatcacatncctgcacatatagtttcctttcaatgtgataccaaactattgcagttaaaaaaaaaaaaaaaaaaaa

SEQ ID NO: 16359 - DNA, 555 bp, Oryza sativa
  Clone ID: PAT_MRT4530_22115C.1
atgacggcggcaacggagacggctctcccctcccaggtctcccccttgtctccctccctcttagatccggttggaggaggggagggtggtggtggcggcgtggctccctccctcccaaatccagccggaggcaagggctatgacaacgagatgaccctggccaacatcgtggaccatctcgttgtccttggccctgaagtttccaaggatatgttgttgttcttgagaacatgttgtgtcatgtcattgggaacggacttcaccgctatcacggtccatgtagttattgtcgtgaccgaagtaatcaagttcaaaggcaacaaaaatcgccactgcgaccaaaattatcgctgggatggccgtctggtgacgcccgcgatcgcgcacaccctgctccaggcgattgatggcgacatggtgtgcttgatgggagattgggaggatgaggccaataataacctcgccgcctgggagccgtgccctcgagttcccaaggagtcgttcgtgtcatccgccaccaacgacctcatcaccatgctcctcttcaaggactag

SEQ ID NO: 16360 - DNA, 225 bp, Oryza sativa
  Clone ID: PAT_MRT4530_22116C.1
atgtggttcttcgatgaacatcaagtcaaaatccaaagtgagaatagtcttaatagtgaaatggcgttgacgttgagaaccctcaaggtgaagcaagaagatgacattcctagtggtgtattagtcccagagagtcccacccggaggttctgtccagaacttcctggcgctgaggcccggaacctcctggcaaccctccagttcaaatatgtgagtaacggctag

SEQ ID NO: 16361 - DNA, 2100 bp, Oryza sativa
  Clone ID: PAT_MRT4530_22117C.1
atggagcagctccggcaggtcggcgaggccatcggcggcgtcaacgccctcatggccttccacgacgacctccgctgcatcaaccctcgccaatgcgccctcctcgcccacgcctacgccctcgccttccgcgccgtcgccggcgagctccgcgcccgcctccgcttccacgaccgcctcaccaaatggaagcccctcgacgatcccctccgcgagctccaccgcgtcgtccgcgacggcgaggcctacatccgccactgcctcctcctcgacccggcccactggtgggcgcgcgccgcctccgccacgcacggcacggaatgcgtcgagcaccacctccacaacctcctttggtgcgtctccgtcgtcgtcgaggcggtcgagaacgtcagcgaggtcaccggctccgaccccgacgagctcgcccggcggcggctggcgctggccagggactacgacaaggtcctgctcgatccaaagctcttccaggagaggcccggcgagacgttcctcgccacgcgtgagctcgccgcccggatggacatggcgtggaaggaggacaggtggctgctgtcccagcttctcgacgagaggaagggcccgacatcgtcgccggagccgccattgacgcggcaggagcaccggctcgccgacctcctcgccgcgccgcgcgggaagctgcacccggcgagcgtgctcctgatgagcgacttccacatgcggaggcgcctcggggggaacgggaacctcaaggaggtgcagtggttgggggaggcgttcgctgtgaagcacgtcgtcggcgtcgacgccgaggcggcggccgcggaggtggcggcgctggcgtcggtgtcgccgcacccgaacgtggcgcactgccgctactgcttccacgacgaggagaagagggagctgtacatggtgatggaccagctgatgagcaaggacctcggcagctacgtcaaggaggtgaactccgccaagcgccgggcgccgctcccgctcgtcgtcgtcgtcgacaccatgctgcagatcgcgtgcggcatggcgcacctgcactccaacaagatgtaccacggcaacctcaacccatccaacgtgatcgtcaagccgcgccatggcgacgcctacctgcatgtcaaggtcgccggcttcgtctccggctccggcacggcgaacgcggccaacccatgcatctggtgcgcgccggaggtggtggggaacgaggcggcggcgacggagaagggcgacgtgtacagcttcgggatgatctgcttcgagctgatcaccgggaagatcccgttcgaggacaaccacctgcagggggagaacatgagcaagaacatccgcgccggcgagcggccgctgttcccgttccagtcgcccaagtacctgaccagcctgacgcggcggtgctggcacggcgaggcggcgcagcggccgccgttccactccatctgccgcgtgctccgctacgtgaagcgcttcctggtgatgaataacccggagcaggcggcggcggacgcggctggagccgggccggcggtggactacctggacatggaggcgcagctgctgaggaggttcccggagtgggaggggaacggtgtcgccgacgtgccgttcgagatgtacgcgtacagggtgatggagagggacaagatgagcaacgcgtgcagggacaggagctccgactccggcagcgacggcaactcgctgtggggagatgacagcgccagcggcgggtccagcacgacggcgacggacgcgtcggcgtcgagccggccgctgcttgaccggagcggcagcacgaggtcgtcgccgccgcgcaaggtggccatcgccgccgccaaggcaggcaagtgtcgcagcggcattgttactcgtctaaagccttcctccaagattacagctagctccatgtccgtgacgtgtgcagggccgccgcagaagtcgaggtcgatgggcacggtgaggccgccgccggtcgtggcccgccgaacgccgaggattaagtccgacggccacctcaatagggcggcaattccgcctacccgacggcgtaaatccggcgggaacgcttcagactcggagttagcttag

SEQ ID NO: 16362 - DNA, 166 bp, Oryza sativa
  Clone ID: PAT_MRT4530_22118C.1
tttttttttggtttttgatgtttatagttgtactttataggtgtttttttcatattgatacattttgtactttaccagtttagttcttaagtttggcaccaatgaaggcacaaaacaaagtttcacattgaaaaaagtaagcgaacataaataaccagctccagcc

SEQ ID NO: 16363 - DNA, 1652 bp, Oryza sativa
  Clone ID: PAT_MRT4530_22119C.1
gaggtatcgaagccatagctctctcccgtctcctctcctctcctctcctcccctcctccgccgatggggaggattccttccattccatccgcgcatccgctgcctccgcggaatccgagttccgcgtactgcgctgatctccggcatcggatttcggagaggaagaagatgagacgggtggtggtggtggtaccgcgggggcccctcctctccatcgcccgacgcggcccgctgcggagaagaggagtttctgaggcttccaatcggattgtactcgacatgataagaaagtatggcaccagcaaccaaaacagagagcacagcagcgctggatgcggcagcatggatgttcaccgtcgagacatcagttggtatcttcatggtctacaattctagtctacacataaatgaagtatggcaccagcaaacaaagcagggagaaaagttgtgctggatgctggtagcatggttgttcatcgttgtgacatcaatttgtatcaccatgctctttacggctttcatggctacacatggttttttgttttgctaaaacattgactggattgcattttgcaaccacaaccttgatgacattagtaatgaaatggttgggacatattcagccatcctatttaccattgccagaactcgttaaattcgtcttttttgcaaacttatcaattgttgggatgaatgttagtttgatgtggaactctgttggattctatcagattgccaagttgtgtattattccagtcttgtgcattctggaaatcctgtttgacaaagtccgttactcaaggaatacaaaactcagtatagtgcttgttttagtaggagttgctgtatgtactgtgactgatgttagtgtgaattcaaaagggctgctagcagctgtaattgcagtttggagcacagcactacagcagcattacgttcatcaccttcaaaagaagtactcgcttggctcattcaacctattgggtcatactgctccagctcaggcagcatccctgttaatactggggccttttgtggacttctggctgaccaatagaagagttgatactttcaattacacaacaatagttacgctatttcggcattataaactgtacatagctgtagatgaatccgttttgaggtacatatgcattggaagattcacagctgtctcatttcaagttctaggccatatgaagacgattcttgtattgaccttgggttttcttttctttggaaaagagggccttaattttcacgtagtccttggcatgatgcttgctgtgattggcatgatttggtacgggaatgcttcgtcaaaaccgggaggcaaagagcggcaggtttactcggtgcccagcgagaaaactcagaagtcatcacaatcagagcttgaccagaaggtctgaaacaaagttgtttcactatttttacagctccattgcttagcgagcattgagaagaccacgatctgatttattcttttttttttctggtaagtttaaagatgtttctgtacaactgaaattcatagcagacaaacagaatatggcaggaactaagcgcgacgataatttaatttgtaatattccattgagtaactgcatatatgatggaaagatattttcagctgtgatgttccgtttaac

SEQ ID NO: 16364 - DNA, 541 bp, Oryza sativa
  Clone ID: PAT_MRT4530_2211C.1
gttcattatcaaatgctactcagttttggtgcaataatgatcatcagctttcttcaatagttcaggtagaaaataaaataagtatcatattcattagtttgaatactttaaatgaaaagaagtcgcattcattaggccatgtatatcttgctgtcatattgaaaatcctttaattgaacaatgcttgtatcagcaatttatcttcgtaaggttggtgctgagtacatatcaggcttttactagacccaagcaggatttcttgctggaattgttagtatgttttatttcatgatattgtttccagttcctgtgtaaaattatttatgaaaatagtttttcttttggtccatttgtgttttcttattgccctttgtgtatagatttgtcaagcttgcattatgagaagaaatggtgcagcatacagagatccatgtaccactatttattgtgatcgcagcatctggatatattaaagatctgtccacattacaacagtacacgtttacatcaatttcggatgctggtagcaacatgagctgta

SEQ ID NO: 16365 - DNA, 745 bp, Oryza sativa
  Clone ID: PAT_MRT4530_22120C.1
cccacgcgtccggggaggaggaggaggaagagaaggggcccatccattccatcgcccgacgcggcccgctgcggagaagaggagatcggattgtactctacatgataagaaagtatggcaccagcaaacaaagcagagagaaaagcagtgctggatgctggagcatggatgttcaacgttgtgacatcagttggtatcatcatggtcaacaaggcattaatggccacacatggttttagttttgctacaacattgactggattgcattttgcaaccacaaccttgatgacattagtaatgaaatggttgggacatattcagccatcctatttaccattgccagaactcgttaaattcgtcttttttgcaaacttatcaattgttgggatgaatgttagtttgatgtggaactctgttggattctatcaggtgggaagagtaattttaaatccttctatattcaatgttagaatggagggcacatactaattttcgtttcatgcctcttcagattgccaagttgtgtattattccagtcttgtgcattctggaaatcctgtttgacaaagtccgttactcaaggaatacaaaactcagtatagtgcttgttttagtaggagttgctgtatgtactgtgactgatgttagtgtgaattcaaaagggctgctagcagctgtaattgcagtttggagcacagcactacagcagcatgtgagtatttgatgtgcacattttgacgtattc

SEQ ID NO: 16366 - DNA, 2994 bp, Oryza sativa
  Clone ID: PAT_MRT4530_22121C.1
atggatcggcaatggatgtacgctgaccggcggtccaaagagtttattgacggcgtgcactattttttgagagtggccgaagctaacaggcaaaggggttttatttgttgtccatgcaataagtgtaagaatcagaaggagtattctgcatccaggactattcatttccacttgtttgagtcggggttcatgccaagctataattgttggacatcccacggagagcaaggtgttgaaatggaagaagatgaagtggaagacgacaatattccggactttgctcagtatgttggatttgaaggaaatcaaacgggcgaggaggaaatagctgctgatggtaacgacgttgcggatgatcttggtcagatgttgcaggacgccagggaagactgcgaaagtgaaaaggaggcccataaattggacaagatgttggaggaccacagaacttcgttgtacccaggttgcgagcaggggcacaaaaagttggataccactctggagttgttgcaatggaaggcaaaaaatggggttagtgacaaggcatttggcgatttattgaaactcgtcaagaacattcttccggggggaaacaaattgcccgagacaacgtacgaggctaagaagatagtctgcccgttaggactggaagttcataagattcacgcatgtccgaacgattgtatcctatatcgcggtgaggagtatgagaacctagaagcatgccttgtttgcaaagcactacgatacaagattagacgggacgatccaggagaagttgacgggcagctaacaaagaagagaattcctgctaaggtgatgtggtatttccctataataccacggctaaggcgtttgttcaggaacaaggggaatgctagaatgttgcgatggcacgctgaagagcgtcaacaggacgggatgctgagacaccccgccgatggttcgcagtggcgaaacatcgacagaaaatttaaagaatttggaaaggacgcacgaaacatacggtttggtttgagtacggatggcatgaatccttttggagagatgagcagcggccatagcacttggcccgttacgatgtgtatctacaacctccccccctggctatgcatgaagaggaagtacataatgatgccgattattattcaaggccccaagcaacctggtaacgacatcgacgtgtacctaagaccactggtcgaagatcttaaacagttgtggaagaaggaaggtgtccccgtgtgggacgaggacaaacaggaggagtttaacctacgagcgctgctgttcgtaaccatcaacgattggcctgcacttagcaacctatccggacagtccaacaaggggtacaaggattgcactcactgtatggatgaaacagaaagtacgtatcttaagcactgtaggaaggttgtatacatgggtcatcgtcgattccttgcagcaaaccacccggtacggaagaaaggcaagcacttcgaacataaggccgaccaccgtacgaagcctaaacatcgcagcgggaaaacagtgtttgctatggttaaagatcttaaagtagtgttcggaaaggggcctggaagccagcatatagagagcgaagatggtcacgcggcgatgtggaaaaagaactctatattttgggagttaccatattgggaattcttggacgtacgccacgcaatcgacgtgatgcacctcactaagaacctttgcgtaaaccttcttggcttcctaggtgtatacggaaagtcgaaagatacactggaagcacgtaatgatctgaagcatatggaacaacgcggcgaccttcacccggaaccaaaggagaaaggaagccattacttgagtccagccagctacactcttagcaaggcagagaaggaaagtatgtttgaatgcttggagagcataaaggtaccgtctggatactccacgaatatcaagcgaataataagcacgaaggagaagaagttcacaaacctaaagtctcatgactgtcacgtgttgatgacacaactgctaccagttgtaataaggggtatccttccagacaatgtccgggcaacaataacaaagctatgtgcattcatgaacgcaatttcgcagaaggtcatcgatccggatagattagaagcccttcagaatgaagtggtgcaatgtctcgtcagttttgagttgatatttccaccttcatttttcaatataatgacgcatctgctttgtcaccttgtgaaagagatccgtattctcgggcctatgtacctacacaacatgtttcctttcgagaggtacatgggcgttctaaagaagtatgttcgtaaccgtgctcgtccagaggcaagcatcgccaagggttatggaacagaggaggtcatcgaattttgcgatactggattcatcgaccctcggaaagtaaacgtcgcaatgctcgaccaatatccacaagaaacagaggacaatctcgtccatctcctgaaggcgcagcattacaagacgttcatactgttgccatacaacacagaattccactgggtgcttttactcatcgacctggaggcctgcaccgtcaacgtatatgactcaatggataaaaaagagtctacgtttgacaaggttttcgaacttatagacagggcttggtatcggttccgtcatttggtccgcggcaaatggagagaaagacttaggcggaagttcaaatttccttgcgcaaagcaaaagcagggaactaacttgtgcggctattacgtgtgcgagtattgccactgccttgcagaccaaatcatcaccacaagagagctcgattttattcgcatgagggataacctgaccacacacaaggaatttatcgcggcggttcaagaacaactcatgggattcatcaacgaagaaatccttgatcccaagggtgaattctactacgacggaaacacaattcaccggtccttagcttctgagttagcagcgagtactactacgtcgaaatcgtag

SEQ ID NO: 16367 - DNA, 2626 bp, Oryza sativa
  Clone ID: PAT_MRT4530_22122C.1
agagcaaggtgttgaaatggaagaagatgaagtggaagacgacaatattccggactttgctcagtacgttggatttgaaggaaatcaaacgggcgaggaggaaagggatgctgatggtaacgacgttgcggatgatcttggtcagatgttgcaggacgccaaggaggactgcgaaagtgaaaagggggcccataaattggacaagatgttagaggaccacagaacttcgttgtacccaggttgcgagcaggggcacaaaaagttggataccaccctggagttcttgcaatggaaggcaaaaaatggagttagtgacaaggcatttggcgatttattgaaactcgtcaagaacattcttccggagggaaacaaattgcccgagacaacgaacaaagggaatgctagaatgatgcgatggcacgctgaagagcgtcaacaggacaggatgctgagacaccccgccgatggccccaagcaacctggtaatgacatcgatgtgtacctaagaccactggtcgaagatcttaagctgttgtggaagaaggaaggtgtccccgtgaaggttgtatacatgggtcatcgtcgattccttgcagcaaaccacccggtacagaagaaaggcaagcacttcgaacataagactgaccaccgtacgaagcttaaacatcgcaacgggaaaacagtgtttgctatggttaaagatcttaaagtagtgttcggaaaggggcctggaagccaacctatagagagcgaagatggtcacgcggcgatgtggaaaaagaactctatattttgggagttaccctattgggaattcttggacgtacgccacgcaatcgatgtgatgcacctcactaagaacctttgcgtaaacctttttggcttcctaggtgtatacggaaagtcgaaagatacactggaagcacgtaatgatctgaagcatatggaacaacgcgaaaaccttcacccagaaccaaaggagaaaggaagccattacttgagttcagccagctacactcttagcaaggcagagaaggaaagtatgtttgaatgcttggagagtataaagataccgtctggatactccacgaatatcaagaaaataataagcacgaaggagaagaagttcacaaacctaaagtctcatgactgtcacgtgttgatggcacaactgctaccagttgtaataaggggtatccttccagacaatgtccgggcaacaataacaaagctatgtgcattcatgaacgcaatttcgcagaaggtcatcgatccggatagattagaagcccttcagaatgatgtggtgcaatgtctcgtcagttttgagttgatatttccaccttcatttttcaatataaagacgcatctgctttgtcaccttgtgaaagagatcagtattctcgggcctgtgtacctacacaacatgtttcctttcgagaggtacatgggcattctgaagaagtatgttcgtaaccgtgcttgtccagaggcaagcattgccaagggttatggaacagaggaggtcatcgaattttgcgtagaatttatcgaagatattcgcccaatcggggtacctgaatcacgccatgaaggtggactacggggaaaggaaactctcggaagaaaagcaataatgacgggatatgagatcaatgggtacacattctacacgagagcccaagacatgatgagcacgaaccaaaacagcgctgttcgtgtcgatgccatgggacacgatggaacaactggcacatattacggtgccatcgaggacatatgggaacttgactatggtcctctcaaggtccctctgttccggtgccaatgggttaggttgactggtggaggcgtaatgattaatgacagtgggatgacaacggttgaccttaacaaggttggatactcggacgaaccttttgtccttgccaatgatgtaacgcaagtctttttcgtgaaggacatgtctagcaaaggaaagaagggcagagggcctgacgagcctaagcgtcacgtggttctcccaggcaaaagaaaaatcgtcggagttgaggacaagactgacgaggattacgatcagttggatgggcaacctcctttcacggtgacgattgaccctagcatcctcctatcaaatgaagacaccccttactcacgtagcgatcacaaggagggaacaatagtgaggagaaagtacgtgcggtcaaccgtcaccgccgatggcatccccgcgccgacgccgccgccgtatctcgccgtcatctcacgctcgtcgtcgtcgccgccgcctccgcctcctccgccgtcgccgcatctctgggacgcctacgccgacctcgtcacgacacgatgctgcgccacgaggacgccacgccacgagacgccacgacgccgcacgccgccgccgcgccacgccgatgccgcgtgcggcaccacaccgccgcaccacgagctggcccgatgccgcgcgcggcgcaacgccgccgccgcgctgccccgccgccgctccgctgccgccacaccgccgtcccgctgccgccacaccgagaacgtgaacgagcgaacgaacgtgaacgagaacaaggtgaatgaacgtgaacgagaacgagccaacgaacgtgaatga

SEQ ID NO: 16368 - DNA, 620 bp, Oryza sativa
  Clone ID: PAT_MRT4530_22123C.1
cggatgattaggtgacactatagaagagctatgacgtcgcatgcacgcgtacgtaagcttggatcctctagagcggccgccttccgccccttcttcttgcgcggcttctgcttcggcgcggcggccaccacctcctccggcgatggcatggcctccttgtcgtccatcacgatccccttctcgtccatggccttcttgacacggtcacccacgtcgatcgcggtgaggttgttgggctcgacggcgagcaccttggcgacgtcgcggtaggcgaggtcgagcctgccgagcgcctcgaagcagcgcgcccgcttgagcagcgccttgctgtacctgggcgaggcgtcgagggcgaggttgcactcgttgatggcgcggtagtggtcgggggggctcatctgcatgtagcaggcggcgaggttgctgtggaggtaggcgacgtcggggtgcccccgggggaggagcttgatggccttctcgtagttgaggagcgcgcgctcgtgctcccgccgctggaacagcttgttcccctcctccttgagctcctgcgccatgtccgtgaagatggtctcgtcgccgtcgagcaccttggacccggaccggtccagcgccggcttgcc

SEQ ID NO: 16369 - DNA, 1572 bp, Oryza sativa
  Clone ID: PAT_MRT4530_22124C.1
atgggcgttctgaagaagcatgttcgtaaccgtgctcatctagaggcaagcatcgccaaggggtatggaacagaggaggtcatcgaattttgcgtagaatttattgaagaccttcgcccaatcggggtacctgaatcacgccatgaagggagactacagggaaagggaactctcggaaggaaagcaataatgacggtagacaacaatttattccgtaaagcccatttcacggttctgcaacaatcttcattggtagctccttacgtcgaggagcacttggctctagttcgcgccagaaacatcagtaagtccgatgcatggattacacggcatcacattgatactttccctgcttggctacaacaacatctgatgggtaacgagacgatcaaccaacagctaaccttcctggcgaggggtccatctggctcgttcgcgacattccagggatatgagatcaatgggcacacattctacacgagagcccaagacatgaagagcacgaaccaaaacagcgctgttcgtatcgatgccatgggacacgatggaacaactggcacgtattacggtgccatcgaggacatatgggaacttgactatggtcctctcaaggagaggaacgtggagagggatgcggaggggaatgaggaggaggaggctagtggaagtcaaccctccgctggacagaagagggcacgcgggcaacgaggtgccgcgaagaagctagagggtcggcacatcataacggaagtagacgaagacggccgacctagtgccccggcagaagcagccaagaactacgtacgacacagtggttgggttgtgcgggataacgtgcctgttagtgcggtgtactggcgcagaacaagggcacacggagatcatgagagctttgtcccagattcggagaaagagatgctgtggaccacaatgctcgagacattcacccttcccgcgggtacagaggacaaaacaccgtacttcgacacattcccgaagctaagggatcactgggacaagttcgttgcatataagacaggtcaacaagggcaggcgatgacggaaagaaacaaagaaaatgccgccaagaagaagtaccatcaccacttggggtcaggcggctatagcgtcgcgatgccgaagggggaggagatggaggcaagcttgtttgagaggggtatcgaaccggccaccgctaaatggtcggatcgatcgaagttctggtactatgctcacggtggaacgctcaacccagttgatggctccctggtcttcagcgatcagatacgcgaggctgcgcgtcgactaacagacgcagtggaagcctcttctcatggcacattccgacccgacagagagatggacaagctgtcactcgtcctgcagaatcccgagcatccaggacgaacacgagggaaaggggtgattccttggaagattggattcaaggaggacatccacacgtacaggagtcggataaggagcaagagagataccgaggcgaagattgcagatcttgagtacagggtatcgagctacgagctcaacatgcaaggggaggtggcaaggaag

SEQ ID NO: 16370 - DNA, 700 bp, Oryza sativa
  Clone ID: PAT_MRT4530_22125C.1
atgagtagtgtgggactaatcacgaaaaacattgttaacccacccataaccgcgggcacggctattcgaatagttttactctggccagagatgtaccactgtacccacaagacacagctccacgatatgtcaccatgcgcctcaataccaccacggtacctcggaaaggaactgtgacaatactcctcgcacaacacaactcaccacagtgcaccgttcctggatcataatctccccctcaaaaccagaggcatggactccctagcgacccccacggacttctcgccgcttttcagtctggcaccccataatgaatcatgctatacaaaagctctgaaccatgaggtcgccggagctagaggactcggctgggtcttccgaggacacccatgcgaagaggacggcgacgtgaactcaccggtgcgaaaaacaacgacggacgacgacgaacgaaggccggcgacgaactccaacggcggctcgacttgacttgacagcgacgacggctctccgatggtcttcagcggctgcaaaggggcggccgaggtgctcctcctccgcgcgaacccaacggcgacgacgctaagcggcgacggcgaccacaaccacggcccggcgcggctggaacgacgacaatgacagcgacggcgctacgggcaacggtagagcttggaacttgaggcaaacggaagaggacgac

SEQ ID NO: 16371 - DNA, 3045 bp, Oryza sativa
  Clone ID: PAT_MRT4530_22126C.1
atgtcatggcacagggccggtgtcctgctgctaggggttcagtcctgcctgcctgtcccgggggttccggccgtaggtgggattgggtcggtactcttgtctatggctaggatgggttggaaactatgtcacgtctttcgtctgtataccgtggtggacttcgaagatgtttttcccgatgagataccagctggacttcctccactccgtggaattgagcatcaaattgatttggtaccaggtgcttctcttccaaatcgtccagcctaccgcaccaatcctgcagagacaaaggaaattcagcgacaggtaaaagagcttttggacaaagggtatgttcgtgaatccttatcaccatgtgctgttcccgttcttttagttccaaagaaagatggctcttggcgcatgtgtgttgattgtcgtgctctcaatgctataactgttcgatatcgccatcccattccacgacttgatgacatgttagatgaattgagtggttccatcattttcaccaagattgatttgcgtagtggctatcatcaaatccgcatgaaacttggtgatgaatggaaaacagcgtttaaaactaaaattggtctctatgaatggcttgtgatgccatttggcttgacaaatgctccttcaacttttatgcgcttaatgaaccatgttttacgagctttcattggcaagtttgtagttgtttattttgatgatattctgatctatagcaaatcatttgatgaacatcttgatcatatccgtcaagtacttgctgttttgagggaagagaaattgtatggcaacattgctaagtgcaccttttgcacagaccgtgttgttttccttggctttgttgtttccgcagatggtattcaggttgatgaagagaaggttaaagcaataaaggattggcctacaccggtaaatgtgagccaagttcgaagctttcatggtcttgcaagtttctataggcgttttgtcaaaaatttcagcaccctcgctgcaccccttaacaatctcacaaagaaggatgttccattcacgtggggccatgaccaagaccaagcatttcacacactgaaaacaaagctttgtgaagcaccgctgctacaacttcctgattttggtaagacatttgagatcgaatgtgatgcaagtggtattggcataggaggtgtactgctgcaagaaggtaaacctgttgcctacttttctgaaaagctaaatggtccacatctgaattactcggtttatgacaaagagctttatgccttagttcgcgttttggaagtttggcaacattacttgttccctaaagaatttgtaattcattctgatcatgaagctttgaaatatcttaaaagccaaggcaagctgaaccgtcgacatgctaaatggattgaattcattgaaacatttccctatgttgtccaacataagcgtggtaaagataacattgttgccgatgccttgtctagaagatgtgcattgattacacaactagatacgaaagtgcttggtttggaatccattaaaacactttatgctgttgatgctgattttaacgaacctttctctcgttgcattgatggaaaaggttgggataaatattatgtgcatgatggcttcttgtttcggactaacaaaatatgcattccagcttgttcgattcgtcaagtccttttgcaggaagcacatgccggtggactggctggtcattttggtgtcaaaaagacattggacatgccctctgatcatttcttttggccacatatgcgacgtgatgtccagcggcacgttgggtgctgcatcgtttgcttgaaagctaagtcccgcctcaatccccatggtttatatactccattacctattccacatgtaccttgggaagatatatctatggactttgttctggggttacctcggtctcagagggggagggattctatttttgttgttgtagatcgcttttctaaaatggcacattttatcccatgtcataagagcgatgatgcttcacacgttgctgatttgtttttcagggagatcgttcgtttacatggagttccaaagactattgtttcagaccgggatacaaaatttctcagctacttttggaagacattgtgggctaagcttggcacaaagttgttattttcaaccacttgtcatccacaaacggatggacaaacagaagttgtcaaccgtaccttgtcaaccatgttgcgtgctgtgttgaaaaagaatttgaagctatgggaagactgccttccacatgttgaatttgcttataacagggcagtccattctacaacaaactcttgtccatttgaaattgtttatgggtttataccgcatactcccatggatcttttgcctttaccattacaggaacaagttaacttggatgctacgaaaagatcagactttatcaagcggttacatgcggagacaagaaagaatattgagaagaaatcagcacaatatgcaaagcaagcaaacaaaggtaagaagaaggttacattccagccaggagatcttgtatggttgcatctatgcaaggatcgctttccccaacagtgtaagagtaagttatcccctaggggtgatggtccgttcaaggttctccaacagataaatgataatgcttacaaacttgagctgccacctgaatattccaatgtgagtaccacattcaatgtcaaggacttgcttccatttcctggtgagcctgagtcgaggacgactccttcccaagagggggaggctaatgaagacattcctagcattcactcatctccaaatgaagctacacttgatatagctggtccaattacaaggagtagagctaaacaattggagaaggaaattcattctcaggtgaacgctaaccttatgcttaataatcagattacattgaatgaacctatgcttttgagtacttgtttcaatgttcttaggaatgatggagtgcacgaacaagcatgggatgatgatggattctgcccgccaaatatatgcaaggaacctggacgtgcatga

SEQ ID NO: 16372 - DNA, 5442 bp, Oryza sativa
  Clone ID: PAT_MRT4530_22127C.1
atggatcggcaatggatgtacgctgaccggcggtccaaagagtttattgacggcgtgcactattttttgagagtggccgaagctaacaggcaaaggggttttatttgttgtccatgcaataagtgtaagaatcagaaggagtattctgcatccaggactattcatttccacttgtttgagtcggggttcatgccaagccataattgttggacatcccacgaagagcaaggtgttgaaatggaagaagatgaagtggaagacgacaatattccggactttgctcagtacgttgtatttgaaggaaatcaaacgggcgaggaggaaagggatgctgatggtaacgacgttgcggatgatcttggtcagatgttgcaggacgccaaggaggactgcgaaagtgaaaagggagcccataaattggacaagatgttagaggaccacagaacttcattgtacccaggttgcgagcaggggcacaaaaagttggataccactatggagttcttgcaatggaaggcaaaaaatggggttagtgacaaggcatttggcgatttattgaaactcgtcaagaacattcttccggagggaaacaaattgcccgagacaacgtacgaggctaagaaaatagtctgcccgctaggactggaagttcagaagattcacgtatgtccgaatgattgtatcctatatcgcggtgaggagtatgagaacctagaagcatgccctatttgcaaagcactacgatacaagattagacgagatgatccaggagaagttgacgggaacaaggggaatgctaggatgatgcgatggcacgctgaagagcgtcaacaggacgggatgctgagacacctcgccgatggttcgcagtggcgaaacatagatagaaaatttaaagaatttggaaaggacgcacgaaacatacggtttggtttgagtacggatggcatgaatccttttggagagatgagcagtggccgtagcacttggcccgttacgatgtgtatctacaacctcccgccctggctatgcatgaagaggaagtacataatgatgccgattattattcaaggccccaagcaacctggtaacgacatcgatgtgtacctaagaccactggtcgaagatcttaagctgttgtggaagaaggaaggtgtccccatgtgggacgaggacaaacaggaggagtttaacatacgagcgctgctgttcgtaaccatcaacgattggcctgcacttagcaacctatccggacagtccaacaaggggtacaaggcttgcactcactgtatggatgaaacagaaagtacgtatcttaagaactgtaggaaggttgtatacatgggtcattgtcgattccttgcagcaaaccacccggtacggaagaaaggcaagcacttcgaacataaggctgaccaccgtacgaagcctaaacatcgcaacgggaaaacagtgtttgctatggttaaagatctaaaagtagtgttcggaaaggggcctggaagccagcctatagagagcgaagatggtcacgcggcgatgtggaaaaagaactctatattttgggagttaccctattgggaattcttggtcgtacgccacgcaatcgacgtgatgcacctcactaagaacctttgcgtaaaccttcttggcttcctaggtgtatacggaaagttgaaagatacactggaagcacttgtaataaggggtatccttccagacaatgtccgggcaacaataacaaagctatatgcattcatgaacgcaatttcgcagaaggtcatcgatccggatagattagaagcccttcagaatgatgtggtgcaatgtctcgtcagttttgagttgatatttccaccttcatttttcaatataatgacgcatctactttgtcaccttgtgaaagagatcagtattctcgggcctgtgtacctacacaacatgtttcctttcgagaggtacatgggcgttctgaagaaggatatgagatcaatgggtacacattctacacgagaggcccaagacatgaagagcacgaaccaaaacaacgctgtttgtgtcgatgccatgggacacgatggaacaactggcacgtattacggtgccatcgaggccatatgggaacttgactatggtcctctcaaggtccctctgttccggtgccaatgggttaggttgactggtggaggcgtaatgattgatgatagtgggatgacaacggttgaccttaacaaggttggatactcggacgaaccttttgtccttgccaatgatgtaacgcaagtcttttacgtgaaggacatgtctagcaaaggaaagaagggcagagggcttgacgagtctaagcgtcacgtggttctcccaggcaaaagaaaaatcgtcggagttgaggacaagactgacgaggattacgatcagttggatgggcaaccccctttcacggtgacgattgaccctagcatcctcttatcaaatgaagacaccccttactcatgtagcgatcacaaggagagaacaataatggctgatcacgatgaggaacagatattgtacgatataatcgcggagggaagcagccagtactggaacgaagaagaggggaatgaggatctaaaccagtatttgaacgaggaagggaacgtgcagagggatgcggaggggaaccaggaggggcacgttgaaagggatgtggaggggaaccaggaggaggaggatagtgcaagtcaaccctccgctggacagaagagggcacgcgggcaacgaggtgccacgaagaagcttgagggtcggcacatcataatggaagtggacgaagacggccgacctagtgccccggcagaagccaccaagaactatgtacgtcatagcggttgggttgtgcgggataacgtgcctgtcagtacggtgtactggcgcagaacaagggcacgcggagatcatgagagctttgtcccagattcggagaaagagatgctgtggaccacaatgctcgagacattcacccttcccgcgggtacagaggacaaagtgaaaaggtggactctgaagaaaatggcagaacagtttcagagcttcaagggagagttgtacaagaaatatatcttgaaggggcagacaccgaactttgacacattcccaaagctaagggatcactgggacgagttcgttgcatataagacaggtgaacaagggcaggcgatgatggaaagaaacaaagaaaatgccgccaagaagaagtaccatcaccacttggggtcaggcggctatagcgtcgcgatgccgaagtgggaggagatggaggctaggttgcttgagagggatatcgaaccggccaccgctaattggccggaacgatcgaagttctggtactatgctcacggtggaacgctcaacccagctgatggctcactgattgggttcaaggaggacatccacacgtacaggagtcggatgaggagcaagagagataccgaggcgaagattgcagatcttgagttcagggtatcgagctacaagctcagcatgcaagaggaggtggcaaggaaggttgatgaacgcatggccgcacatcagtccaatgatccccaaccgaccattcctcctgcaatggtgagcccgtcaggaaaccgtagcagctgcgcctcaacggggcaggtaggatcacagagcatggacgccatgcaaacccaggacgaatccacctgccccgttgatgacatcactcagcggacaccatgtgagctgcatattcctttcaagaacttatcaataaaggtggcgtcgggcatggccatcccaacggactcttcaggtacttatcactgcaggctgattccagcaggatactccaaggtcgaagttgagttggttgaaggcgcgtacgaggacctcgagctggattaccctggaggagacagtgagacgcatctacgagacacaagccatgcaattattctatggcgcaagcggtacatcatcctccctaggcgacaagcggcgtctcgtgcaccatctcctccggctccgccatctcctcctcaggatcctgcaccgtctcctcctcaggatcctgcaccgtctcctcctcatgctccagcaccgtctccacctcaggctcctgcaccgactcctcctcaggctcctgcaccgactcctcctcggtctcctacaccgactcctccgcaagctcctcttccggcaccttcaaagtcaagggccccccaagctccaccacctacccacagaagggcaacgaagaaggcgaaaattgatgccgccaagaacaaggacccggggtacgattgcacgcaagaggagcttgacgcttacgtggcatcagaagtcaagagacaattcaagcctcgaagtccagaaaagaagattcctatagacctgagtgtcatgaacttcttcaagggtatgtctgcacctgccaaggaggccattaagctatcggactatgagcgaacgctgaagaaagcatcttctggaaagtccaaaccagtccctcagcttggagagcaaccaaaccaggagatcgagccgttggtgaccggtaaagaaatgacgatagaagaatttattactgacaccggtctaactacggatcaattgctaggagtcgcaccaatcgaaaaggcggaagtgaaatacatgtacgaactcagtaaaccgcttgtcaagcctgagctgctgcagtccctacccacacaaatgtacaagttccatcagctgtacatggagatgagcgccaccggtagagagatgatcggagcgaggattagggacacggacttcttgcaaggagatgaaattctctggatcaatttcaagggaatctacgaactataccagctggacaccctcgacgtctctattatgagttgctggattttaatggagattcaaagggcccgacggcggggggttttcgatactggattcatcgaccctcggaaagtaaacgtcacaatgctcgaccaatatccgcaagccacagaggacaatctcgtccatctcctgaaggcgcagcattacaagacgttcatactgttgccgtacaacacagaattccactgggtgcttttactcttcgacctgtcggcctgcaccgtcaacgtatatgactcaatggataaaaaagagtctatgtttgacaagtgcgcaaagcaaaagaagggaactaacttgtgcggctattacgtgtacgagtattgccactgccttgcagaccaaatcattaccacaagagagctcaattttattcgcatgagggataacctgaccacgcacaaggaatttatcgcggcggttcaagaacaactcatgggattcatcaacgaacaaatccttgatcccaagggtgaattctactatgacggaaacacaatttataggttcttagcttctgagctagcgactactactacgtcgaaatcgtag

SEQ ID NO: 16373 - DNA, 331 bp, Oryza sativa
  Clone ID: PAT_MRT4530_22128C.1
cttttgtatagcatagttcattatggggtgccagactgagaagcggcgagaagtccgtgagtgttgctggggagtccatgcctctggttgtagagggggtgattatgatccaggtatggtgcactgtggtgagttgtgttgtgcgaggggtattgtcacagttcctttccgaggtaccgtggtggtattgaggcgcatggtaacatgttgtggaactgtcttgtgggtacagtggtacatctctggccagagtaaaactattcgaatagccgtgcctgcggttatgggtgggtctaacaatgtttttcgtgattagtctcacattactcat

SEQ ID NO: 16374 - DNA, 1740 bp, Oryza sativa
  Clone ID: PAT_MRT4530_22129C.1
atggatgacgccaaggaggactgcgaaagtgaaaagggggcccataaattggacaagatgttagaggaccacagaacgtcgttgtacccaggttgcgagcaggggcacaaaaagttcgataccactctggagttattgcaatggaaggcaaaaaatgatgacgaggacaaacagcaggagtttaacctacgagcgctgctgttcgtaaccatcaacgattggcctgcacttagcaacctatccggacagtccaacaaggggtacaaggcttgcactcactgtatggatgaaacagaaagtacgtatcttaagcactgtaggaaggttgtgtacatgggtcatcgtcgattccttgcagcaaaccacccggtacagaagaaaggcaagcactttgaacataaggcggaccaccgtacgaagcctaaacatcgcagcgggaaaacagtgtttgctatggttaaagatcttaaagtagtgttcggaaaagggcctggaagccagcctatagagagcgaagatggtcacacggcaatgtggaaaaagaactctatattttgggagttaccctattgggaattcttggacgtccgccacgcaatcgacgtgaagcacctcactaagaacctttgcgtaaaccttcttggcttcctaggtgtatatggaaagtcgaaagatacactggaagcacgtaatgatctgaagcatatggaacaacgcggcgaccttcacccggaaccaaaggacaaaggaagccattacttgagtccagccagctacactcttagcaaggcagagaaggaaaccgctcggtgcgcccggaggcggccacgccggcgcagcggcgtgaggctgcgcgcccgcgcccctatggtcgccggcggcggccataggcacggcggagcggcggccgagagaggggagggaaagggggaaacgaagcggcggtccacggctcaccccgggtcgacggcgacgacggaaacggcgaccggagcggaggaaggcggcggcgcggctcgggtggacagggtcgacggtgctccggcggtcggcgaccgaaacggagaggtggacgaggtcggcgaggatgcggcgaaggcgaaggaggcggcgccgaggtgggaggtggtccggggcgacgacggcggcggaccggagctcggcgggttgggagtgagagagggcggccggaagagggggaaatgggcgcgggagacccggccgccattaatggcgccggcgagtattctcgggcctgtgtacctacacaacatgtttcctttcaagaggtacatgggcgttctgaagaagtatgttcgtaatcgtgctcgtccagaggcaagcatcgccaaggggtatggaacagaggaggtcatcgaattttgcgtagaatttattgaagaccttcgcccaatcggggtacctgaatcacgccatgaagggagactacggggaaagggaactctcggaaggaaagcaataatgacggtagacaacaatttattccataaagcccatttcacggttctgcaacaatcttcattggtagctccttacatcgaggagcacttggctctagttcgcgccagaaacattggtaagtccgatgcatggattacacggcatcacattgatactttccccgcgtggctacgacaacatctcatgggtaacgagacgatcaaccaacaactggccttcctggcgaggggaccatctgggtcgatcgtgacactctag

SEQ ID NO: 16375 - DNA, 140 bp, Oryza sativa
  unsure (1)..(140): unsure at all n locations
  Clone ID: PAT_MRT4530_2212C.1
ctgtcctgctacancaccaggttttttttccatataaagagttcnttaggggggggttttttataaaagagagacaactgggccgccccttctaaaggtcccaagttaaccaacccgttcttgcaacatcttactttttt

SEQ ID NO: 16376 - DNA, 446 bp, Oryza sativa
  Clone ID: PAT_MRT4530_22130C.1
aaggtgggttgtcagcacatggttttgatggtcgtgctcatgacaattaaggaccggttcgcgagctactattgtgaaacatttaccatgccaaccacaagccagcgtgggctacggctttatcttttgtatagcatggttcattacagtgtgccagactgagaagcggtgagaagtccgtgggggtcgctggggagtccatgcctctggttgtagagggggtgattgtgatccaggtatggtgcactgtggtgagttgtgttgtgcgaggggtattgtcacagttcctttccgaggtaccgtggtggtgctgaggcgcatggtgacatgttgtgggattgtatcttgtgggtacagtgttgcatatttgctgtgtggcttgttgagtatgtcatatgctcattcttgcaatattcattcatcagaggaggagtacttcagtgaag

SEQ ID NO: 16377 - DNA, 5271 bp, Oryza sativa
  Clone ID: PAT_MRT4530_22131C.1
atggatcggcaatggatgtacgctgaccggcggtccaaagagtttattgacggtgtgcactattttttgagagtggcagaagctaacaggaaaaggggttttatttgttgtccatgcaataagtgtaagaatcagaaggagtattctgcatccaggactattcatttccacttgtttgagtcggggttcatgccaagctataattgttggacatcccacggagagcaaggggttgaaatggaagaagatgaagtggaagacgacaatattccaaactttgctcagtacgctggatttgaaggaaatcaaacgggcgaggaggaaatagctgctgatggtaacgacgttgcggatgatcttggtcagatgttgcaggacgccagggaggactgcgaaagtgaaaaggaggcccataaattggacaagatgttggaggaccacagaacttcgttgtacccaggttgcgagcaggggcacaaaaagttggataccactctggagttattgcaatggaaggcaaaaaatggggttagtgacaaggcatttggcgatttattgaaactcgtcaagaacattcttccggggggaaacaaattgcccgagacaacgtacgaggctaagaagatagtctgcccattaggactggaagttcataagattcatgcatgtccgaacgattgtatcctatatcgcggtgaggagtatgagaacctggaagcatgccctgtttgcaaagcactacgatacaagattagacgggacgatccaggagaagttgacgggcagctaacaaagaagagaattcctgctaaggtgatgtggtatttccctataataccacggctaaggcgtttgttcaggaacaaggggaatgctagaatgttgcgatggcacgctgaagagcgtcaacaggacgggatgctgagacaccccgccgatggttcgcagtggcgaaacatcgacagaaaatttaaagaatttggaaaggacgcacgaaacatacggtttggtttgagtacggatggcatgaatccttttggagagatgagcagcggccatagcacttggcccgttacgatgtgtatctacaacctcccccactggctatgcatgaagaggaagtacataatgatgccgattattattcaaggccccaagcaacctggtaacgacatcgacgtgtacctaagaccactggtcgaagatcttaaacagttgtggaagaaggaaggtgtccccgtgtgggacgaggacaaacaggaggagtttaacctacgagcgctgctgttcgtaaccatcaacgattggcctgcacttagcaacctatccggacagtccaacaaggggtacaaggcttgcactcactgtatggaggaaacagaaagtacgtatcttaagcactgtaggaaagttgtatacatgggtcatcgtcgattccttgcagcaaccacccgcgggaaaacggtgtttgctatgggtaaagatcttaaagtagtgttcggaaaggggcttggaagccagcatatagagagcgaagatggtcacgcggcgatgtggaaaaagaactctatattttgggagttaccatattgggaattcttggacgtacgccacgcaatcgacgtgatgcacctcactaagaacctttgcgtaaaccttcttggcttcctaggcgcatacggaaagtcgaaagatacactggaagcacgcaatgatctgaagcatatggaacaacgcggcgaccttcacccggaaccaaaggagaaaggaagccattacttgagtccacccagctacactcttagcaaggcagacaacgaaagtatgctagaatgcttggagagcataaaggtaccgtctggatactccacgaacatcaagcgaataataagcacgaaggagaagaagttcacaaacctaaagtctcatgactgtcacgtgttgatgacacaactgctaccagttgtaataaggggtatccttccacacaatgtccgggcaacaataacaaagctatgtgcattcatgaacgcaatttctcagaagaggtacatgggcgttctgaagaagtatgttcgtaaccgtgctcgtccagaggcaagcatcgccaagggttatggaacagaggagatggctgaccgcgatgaggaacagatattgtacgatacaatcgcggagggaagcagccagtactggaatgaagaagaggggaacgaggatccaaaccagtacttgaacgaggaagggaacgtggagagggatgcggaggggaaccagcaggggcacgtggaaagggatgtggaggggaaccaggaggaggaggctagtggtagtcaaccctccgttggacagaagagggcacgcgggcaacgaggtgcagcgaagaagcttgagggtcggcacatcataacggaagtggaagaagatggatgtcctagtgccccggccgaagccgccaagaactatgtacgtcacagcggttgggttgtgcgggataacgtgcctgtcagtagggtgtactggcgaagaacaagggcacgcggagatcatgagagctttgtcccagattcggagaaagagatgctgtggaccacaatgctcgagacattcacccttcctgcgggtacagaggacaaagtgaaaaggtggactctgaagaaaatggcagaacagtttcagagcttcaagggagatctgtaccagaagtatatactgaaggggcagacaccgaacttcgacacattcccaaagctaagggatcactgggacgagttcgttgcatataagacaggtgaacaagggcaggcgatgatggaaagaaacaaagaaaatgccgccaagaagaagtaccatcaccacttggggtcaggaggctatagcgtcgcgatgccgaagtgggaggagatggaggctagcttgattgagaggggtatcgaaccagcaacagccaattggccggaacgatcgaagttctggtactatgctcacggtggaacgctcaacccagctgatggctcactggtcttcggcgttcagatacgagaggctgcgcgacgactaacagatgcagtggaagcctcctctcagggcacgttccgacccgacagagatagggacgagctgacactcgccctgcagactccagagcatccaggacgaacacgagggaaaggggtgattccttggaagattggtttcaaggaggacatccacacgtacaggagtcggatgaggagcaagagagataccgaggcgaagattgcagacctagagttccgggtatcgagctacgaactcaacatgcaagaggaggtggcaaggaaggttgatgaacgcatggccgcacatcggtcccaggatccccagccgaccattcctcctgcaatggtgagcccgtcaggaaaccgtagcagctgcgcctcaacggggcaggtaggatcacagagcatggacgccatgcaaacacaggacgaatcgacctgtcccgttgatgacatcactcagcggacaccatgtgagctgcatattcctttgaagaacttatcaataaaggtggcgtcgggcatggccatcccaacggacccttcaggtacttaccactgcaggccgattccagcaggatactcgaaggtcaaagttgagttggtcgaaggcgcgtacgaggacctcgagctggattaccctggaggagacggtgagacgcatctacgagacacaagccatgccattattctatggcgcaggcggtacatcatcctccctgggcgacaagcggcgtctcgtgcaccatctcctccggctccgccatctcctcctcaggatcctgcaccgtctcctcctcatgctccgccagcaccgactcctcctcaggatcctgcaccgactcctcctcgggctcctacacctactcctccgcaagctcctcttccggcaccttcaaagtcaagggcccccccagctccatcgcctgcccacacaagggcaacgaagaaggcgaaagttgacgccgccaagaacaaggacccggggtacgattgcacgcaagaggagcttgacgcttacgttgcatcagaagtcaagagacaattcaagcctcgaagtccagaaaagaagattcctatagaccccagtgtcaggaacttcttcaggggtatgtctgcatctgtcaaggaggccatcaagctatcggactatgagcgaacgctgaagaaagcatcttctggaaagtccaaaccagtccctcagcttggagagcaaccaaaccaggagatcgagccattggttaccggtaaagaaatgacgatagaacaatttattactgacaccagtctaactacggatcaattgctaggagtcgcaccaatcgaaatggcggaagtgaaatacatgtacgaactcggtaaaccgcttgtcaagcctgagctgctgcagtccctacccacacaaatgtacaagttccatcagctgtacatggagatgagcgccaccggtagagagatgatcggagcgaggatcagggacacagacttcttgcaaggagatgacattctctggatcaatttcaggggaatctacgaactataccagctggacgccctcgacgtctctattatgagttgctggattttaatggagattcaaagggcccgacggcggagggttttcgatactggattcatcgaccctcggaaagtaaacgtcgcaatgctcgaccaatatccacaagaaacagaggacaatgtcgtccatctcctgaaggcgcagcattacaagacgttcatactgttgccgtacaacacagaattccactgggtgcttttactcttcgacctgtcggcctgcaccgtcaatgtatatgactcaatggataaaaaagagtctacgtttgacaaggttttcgaacttatagacagggcttggcatcggttccgtcatttggtccgcggcaactggagagaaagacttaggcggaggtttaaatttccttgcgcaaagcaaaagcagggaactaacttgtgcggctactacgtgtgtgagtattgccactgccttgcagaccaaatcatcaccacaagagagctcgattttattcgcatgagggataacctgaccacacacaaggaatttatcgcggcggttcaagaacaactcatgggattcatcaatgaagaaatccttgatcccaagggtgaattctactacgacggaaacacaattcaccggtccttagcttctgagctagcagcgagtactactacgtcgaaatcgtag

SEQ ID NO: 16378 - DNA, 710 bp, Oryza sativa
  Clone ID: PAT_MRT4530_22132C.1
gtcgtcctctttcgtttgccccaagtcccgagccccgccgtcgcttgtagcgcagccgccgcgacgccctagccgccgccgttgccatcgtcgttccagccgccccgcgccgtcgctgtggtggtcgtcgccggtcgccgtcgctatctccgggttcgcgaggagaagccgcgcaccgtccgccccttcgctgccgttgcaagcagccggagcgccgccgtcggcgaggtcgccatccgagccggccgccattgatgacgtcatgctgacgtcatcatctctggtcgtgctcatgacaattaaggaccggttcacgagctactgttgtgaaacatttaccgtgccaaccacaagccagcgtgggcaacggctttaccttttgtatagcatggttcattatggggtgccagactgagaagcggcgagaagtccgtggggggtcgctggggagtccatgcctctggttgtagagggggtgattatgatccaggtatggtgcactgtggtgagttgtgttgtgcgaggggtattgtcacagttcctttccgaggtaccgtggtggtattgaggcgcatggtaacatgttgtggaactgtgtcttgtgggtacagtggtacatctctggccagagtaaaactattcgaatagccgtgcccgcggttatgggcgggtctaacaatgtttttcgtaattagtctcacattattcat

SEQ ID NO: 16379 - DNA, 154 bp, Oryza sativa
  Clone ID: PAT_MRT4530_22133C.1
cccacgcgtccgcccacgcgtccgcccacgcgtccggccacgcgttcgtccacgcgtgcgctggatctcgtatattctctctcggaggactcgatcgtgatggccgttgaagtcgcgaacgctgtagtggtgccagaactcctgctgcataagc

SEQ ID NO: 16380 - DNA, 6400 bp, Oryza sativa
  Clone ID: PAT_MRT4530_22134C.1
atggatcggcaatggatgtacgctgaccggcggtccaaagagtttattgacggcgtgcactattttttgagagtggccaaagctaacaggcaaaggggttttatttgttgtccatgcaataagtgtaagaatcagaaggagtattctgcatccaggactattcatttccacttgtttgagtcggggttcatgccaagctataattgttggacatcccacggagagcaaggtgttgaaatggaagaagatgaagtggaagacgacaatattccggactttgctcagtacgttggatttgaaggaaatcaaacgggcgaggaggaaagggatgctgatggtaacgacgttgcggatgatcttggtcagatgttgtaggacgccaaggaggactgcgaaagtgaaaaggaagcccataaattggacaagatgttagaggaccacagaacttcgttgtacccaggttgcgagcaggggcacaaaaagttggataccactctggagttcttgcaatggaaggcaaaaaatggggttagtgacaaggcatttggcaatttattgaactcgtcaagaacattcttccggagggaaacaaattgcccgagacaacgtacgaggctaagaagatagtctgcctgctaggactggaagttcagaagattcatgcatgtccgaatgattgtatcctatatcgcggtgaggagtaagagaacctagaagcatgccttgtttgcaaagcactacgatacaagattagacgagacgatccaggagaagttgacgggcagctaacaaagaagagaatttctgctaaggtgatgtggtatttccctataataccatggataaggcgtttgttcaggaacaaggggaatgctagaatgatgcgatggcacgctgaagagcgtcaacaggacgggatgctgagacaccccgccgatggttcgcagtggcgaaacatagacagaaaatttaaagaatttggaaaggacgcacgaaacatacggtttggtttgagtacggatggcatgaatccttttggagagatgagcagcggccatagcacttggcccgttacgatgtgtatctacaacctcccccctggctatgcatgaagaggaagtacataatgatgccgattattattcaaggccccaagcaacctggtaacaacatcgatgtgtacctaagaccactggtcgaagatcttaggctgttgtggaagaaggaaggtgtccccgtgtgggacgaggataaacaggaggagtttaacatacgagcgctgctgttcgtaaccatcaacgattggcctgcacttagcaacctatccggacagtccaaaaaggggtacaaggcttgcactcactgtatggatgaaacagaaagtacgtatcttaaacactgtaggaaggttgtatacatgggtcatcgtcgattccttgcagcaaaccacccggtacggaagaaaggcaagcacttcgaacataaggctgaccaccgtacgaagcctaaacatcgcaacgggaaaacagtgtttgctatggttaaagatcttaaagtagtgttcggaaaggggcctggaagccagcctatagagagcgaaaatggtcacgcggcgatgtggaaaaagaactctatattttgggagttaccctattgggaattcttggacgtacgccacgcaatcgacatgatgcacctcactaagaacctttgcgtaaaccttcttggcttctaggtgtatacggaaagtcgaaagatacactggaagcacgtaatgatctaaagcatatggaacaacgcgacgaccttcacccggaaccaaaggagaaaggaagccattacttgagtccagccagctacactcttagcaaggcagagaaggaaagtatgtttgaatgcttggagagcataaaggtaccgtctggatactccacgaatatcaagcgaataataagcacgaaggagaagaagttcacaaacctaaagtctcatgactgtcacgtgttgatgacacaactgctaccagttgtaataagggctatccttccagacaatgtccgggcaacaataacaaagctatgtgcattcatgaacgcaattttgcagaaggtcatcgatccggatagattagcccttcagaatgatgtggtgcaatgtctcgtcagttttgagttgatatttccaccttcatttttcaatataatgacgcatctgctttgtcaccttgtgaaagagatcagtattctcgggcctgtgtacctacacaacatgtttccttttgagaggtacatgggcgttctgaagaagtatgttcgcaaccgtgctcgtccagaggcaagcatcgccaagggttatggaacagaggaggtcatcgaattttgcgtagaatttatcgaagatcttcgcccaatcggggtacctgaatcacgccatgaagggagactacggggaaagggaactctcggaaggaaagcaataatgacggtagacaacaatttattctgtaaagcccatttcacggttctgcaacaatcttcattggtagctccttacatcgaggagcacttggctctagttcacgccaggaacatcggtaagtccgatgcatggattacacggcatcacattgatactttccccgcgtggatacgacaacatctcatgggtaacgattcgatcaaccaacaacttgccttcctagcaaggggaccgtctgggttgattgcgacattccagggatatgagatcaatgggtacacattctacacgagagcccaagacatgatgagcacgaaccaaaacagcgctgttcgtgtcgatgccatgggacacgatggaacaactggcacgtattacggtgccatcgaggacatatgggaacttgactatggtcctctcaaggtccctctgttccggtgccaatgggttaggttgactggtggaggcgtaatgattgatgacagtgggatgacaacggttgaccttaacaaggttggatactcggacgaaccttttgtccttgccaatgatgtaacacaagtctttttcatgaaggacatgtctagcaaaggaaagaagggtagagggcctgacgagcctaagcgtcacgtggttctcccagcgcgccctcgtcttctccaccaacacttagaagtttttacccgatcgatctctctcggcttctccttcgccgccactgcctagggcatccccgcgccgacaccgccgccgtatctcgccgtcgtctcgcgctcgtcgtcgtcgccgccgcctctgcctccttctccgccgccgcatctctcagatgtttcctgtatgaacagatggctgatcgcaatgatgaacagatattgtacgattcaatcgcggagggaagaagccagtactggaacgaagaagagggaaacgaggatccaaaccagtatttgaacgaggaagggaacgtggagagagatgcggaggggaaccaggaggagcacgtggaaagggatgtggaggggaaccaggaggaggaggctagtggaagtcaaccctccgttggacagaggagggcacgtgggcaatgaggtgccgcgaagaagcttgagggtcggcacatcgtaatggaagtggaagaagatggacgacctagtgccccggcagaagccgccaagaactatgtacgtcacagcggttgggttgtgcgggataacgtgcctgtcagtacggtgtactggcgaagaacaagggcacgcggagatcatgagagctttgtcctagattcggagaaagagatgctgtggaccacaatgctcgagacattcacccttcccgcgggtacagaggacaaagtgaaaaagtggactctgaagaaaatgacagaacagtttcagagtttcaagggagagctgtacaagaaatatatcctgaaggggcagacaccgaacttcgacacattcccaaagctaagggatcactgggacgagttcgttgcatataagacagtgaacaagggcaggcgatgatggaaagaaacaaagaaaatgcagccaagaagaagtaccatcaccacttggggtcaggccgctatagcgtcgtgatgccgaagtgggaggagatggaggctagcttgcttgagaggggtatcgaaccggccaccgctaattggccggaacgatcgaagttctagtactatgcttacggtggaacgctcaacccagctgatggctcactggtcttcggcgatcagatacgagaggctgcgcgtcgactaacagacgcagtggaagcctcttctcagggcacgttccgaccagatagagagagggacgagctgtcactcgccctgcagactccagagcatccaggatgaacacgagggaaaggggtgattccttggaagattaggttcaaggaggacatccacacgtacaagagtcggatgaggagcaagagagataccgaggcgaagattgcagatcttgagttcagggtatcgagctacgagctcagcatgcaagaggaggtggcaaggaaggttgatgaacgcatggccgcacatcggtccaatgatccctagccgaccattcctcctgcaatggtgagcccgtcaggaaaccgtagcagctgcgcctcaacggggcaggtaggatcacagagcatggacgccatgcaaacccaggacgaatccacctgccccgttgatgacatcactcaacggacaccatgtgagctgcatattcctttcaagaacttatcaataaaggtggcgtcgggcatagccatcccaacggacccttcaggtacttaccactgcaggccgattccagcaggatactccaaggtcgaagttgagttggtcgaaggaacgtacgtggacctcaagctggattaccctggaggagacggtgagacgcatctacgagacacaagccatgccattattctatggcgcaggcggtacatcatcctccctgggcgacaagcggcgtctcgtgcaccatctcctccggctccgccatctcctcctcaggatcctgcaccgtctcctcctcatgctccagcaccgtctccacctcaggctcctgcaccgactcctcctcaggctcctgcaccgactcctcctcgagctcctacaccgactcctccgcaagctcctcttccggcaccttcaaagtcaagggccccccaagctccaccgcctgcccacacaagggcaacgaagaaggcgaaagctgacgccgccaagaacaaggacccggggtacgattgcacgcaagaggagcttgacgcttacatggcatcagaagtcaagagacaattcaagcctcgaagtccagaaaagaagattcctatagacccgagtgtcatgaacttcttcaggggtatgtctgcacctgccaaggaggccattaagctatcggactatgagcgaacgctgaagaaagcatcttctggaaagtccaaaccagtccctcagcttggagagcaaccaaaccaggagattgagccgttagtgaccggtaaagaaatgacgatagaagaatttattactgacaccggtctaactacggatcaattgctaggagtcgcaccaatcgaaaaggcggaagtgaaatacatgtacgaactcggtaaaccgcttgtcaagcctgagctgctgcagtccctacccacacaaatgtacaagttccatcagctgtacatggagatgagcgccactggtagagagatgatcggagcgaggatcagggacatggacttcttgcaaggagatgacattctctggatcaatttcaagggaatctacgaactataccaactggatgccctcgacgtctctattatgagttgctggattttaatggagattcaaaaggcccgacggcggggagttttcgatactggattcatcgaccctcggaaagtaaacgtcgcaatgctcgaccaatatccgcaagccacagaggacaatctcgtccatctcctgaaggtgcagcattacaagatgttcatactgttgccctacaacacagaattccactgggtgcttttactcttcgacctgtcggcctgcaccgtcaacgtatatgactcaatggataaaaaagagtctacgtttgacaaggttttcgaacttatagataggtaccgtcataagttcctctgttaattaagaaaatcttgttatgttaattgctactacgaatcatagctttaaactccatgtagggcttggtatcggttccgtcatttggattcatcaacgaacaaatctttgatcccaagggtgaattctactacgacggaaacacaattcataggtccttagcttgtgagctagcgactactacatcgaaatcgtagcctaagtacgccaccgatgaccatattaattttttcagttttctgacctggacca

SEQ ID NO: 16381 - DNA, 665 bp, Oryza sativa
  Clone ID: PAT_MRT4530_22135C.1
atgaatagtgtgagactaattacgaaaaacattgtccaactcgcccataaccgcgggcacggctattcaaatagttttactctgatcagaggtgtaccactgtaatcacaagacacagctccacaacatgtcaccatgcgcctcaataccaccacgatatctcggaaaggaactgtgacaatacccctcgcacaacacaactcaccacagtgcaccattcctggatcataatcaccccctctacaactagaggcatggactccccggcgatccccacggacttctcgccgcttctcagtcaggcaccccataatgagctatgctattcaaaagcactgaaccacaaggtcgccggagctagagggctcggttgggctttccgaggacaccaacgcgaagaggacgacgacacgaacacaccggtgcaaagaactatgacggacgacgacgaacgacgaccgacgacgagctcgacggcggctctccggcgggcttcggcggctgcgatggggtggacggggtgctcctccacctagcgaactcggcggtggcggcaaacggcggagacggcaacgctagcggtggtgcggcgcggctgaaacggcgacggcggcgctacgggtgacggcggggctcgggacttgaggggaaacgtagagggcgac

SEQ ID NO: 16382 - DNA, 468 bp, Oryza sativa
  Clone ID: PAT_MRT4530_22136C.1
atggtgggtgaagagtggcgacgcagctgggtggaggtgaagctttggttcggcactgccacgtcgaggccacgcgtcgacgccgtccagtgccgcgggcgactccattccacaggcatccttgacggcaacgacgaaaccaacttctttgagacatcttcagctgagaaggacttcaactctgggctgacgtcagcaatgggggcggcgccgataggcgggacccacgggtcagaggcacaagggagagggaggggggtactggcaggcggggcccaccgggcggcggctcattgggaggaggtggtaccggccgggctcggctcggctccaaagccggccagccggccatggctagcggcggcggcatgcggtcgccggcgatggcaatcggcggcgcgggaggcggcggcagccgaaggcgacggcgcacggccgaagcggcggctcggctcggctcagcgctag

SEQ ID NO: 16383 - DNA, 3423 bp, Oryza sativa
  Clone ID: PAT_MRT4530_22137C.1
atggatcggcaatggatgtacgctgaccggcggtccaaagagtttattaacggcgtgcactattttttgagagtggccgaagctaacaggcaaaggggttttatttgttgtccatgcaataagtgtaagaatcagaaggagtattctgcatccaggactattcatttccacttgtttgagtcggggttcatgccaagctataattgttggacatcccacggagagcaaggtgttgaaatggaagaagatgaagtggaagacgacaatattccggactttgctcagtatgttggatttgaaggaaatcaaacgggcgaggaggaaatagttgctgatggtaacgacgttgcggatgatcttggtcagatgttgcaggacgccagggaggactgcgaaagtgaaaaggaggcccataaattggacaagatgttggaggaccacagaacttcgttgtacccaggttgcgagcaggggcacaaaaagttggataccactctggagttgttgcaatggaaggcaaaaaatggggttagtgacaaggcatttggcgatttattgaaactcgtcaagaacattcttccggggggaaacaaattgcccgagacaacgtacgaggctaagaagatagtctgcccgttaggactggaagttcataagattcacgcatgtccgaacgattgtatcctatatcgcggtgaggagtatgagaacctagaagcatgccctgtttgcaaagcactacgatacaagattagacgggacgatccaggagaagttgacgggcagctaacaaagaagagaattcctgctaaggtgatgtggtatttccctataataccacggctaaggcgtttgttcaggaacaaggggaatgctagaatgttgcgatggcacgctgaagagcgtcaacaggacgggatgctgagacaccccgccgatggttcgcagtggcgaaacatcgacagaaaatttaaagaatttggaaaggacgcacgaaacatacggtttggccccaagcaacctggtaacgacatcgacgtgtacctaagaccactggtcgaagatcttaaacagttgtggaagaaggaaggtgtccccgtgtgggacgaggacaaacaggaggagtttaacctacgagcgctgctgttcgtaaccatcaacgattggcctgcacttagcaacctatccggacagtccaacaaggggtacaaggcttgcactcactgtatggatgaaacaaaaaatacgtatcttaagcactgtaggaaggttgtatacatgggtcatcgtcgatttcttgcagcaaaccacccggtacggaagaaaggcaagcactttgaacataaggcggaccaccgtacgaagcctaaatatcgcagcgggaaaacaatgtttgctatggttaaagatgttaaagtagtgttcggaaaggggcctggaagccagcatatagagagcgaagatggtcacgcggctatgtggaaaaagaactctatattttgggagttaccctattgggaattcttggacgtccgctatgcaatcgacgtgatacacctcactaagaacctttgcgtaaaccttcttggcttcctaggtgtatatggaaagtcgaaagatacactggaagcacgtaatgatctgaagcatatggaacaacgcggcgaccttcacccggaaacaaaagagaaaggaagctattacttgattccaaccagctacactcttagcaaggcagagaaggaaagtatgtttgaatgcttggagagcataaaggtaccgtctggatactccacgaatatcaagcgaataataagcacgaaggagaagaagttcacaaacctaaagtctcatgactgtcacgtgttgatgacacaactgctaccagttgtaataaggggtatccttccagacaatgtccgggcaacaataacaaatctatgtgctttcatgaacgcaatttcgcagaaggtcatcgatccggatagattagaagcccttcagaatgatgtggtgcaatgtcttgtcagttttgagttgatatttccaccttcatttttcaatattatgacgcatatgctttgtcaccttgtgaaagagatcagtattctcgggcctatgtacctacacaatatgtttcctttcgagaggtacatgggcgttctgaagaagtatgttcgtaaccgtgctcgtccagaggcatgcatcgccaagggttatggaacagaggaggtcatcgaattttgcgtagaatttatcgaagaccttcgcccaatcggggtacttgaatcacgccatgaagggagactacggggaaagggaactctcggaaggaaagcaataatgacggtagacaacaatttattccgtaaagcccatttcactgttctgcaacactcttcattagtagctccttacatcgaggagcacttggctctagttcgcgccaggaacatcggtaagtccgatgcatggattacacggcatcacatcgatactttccccgcgtggctacgacaacatctcatgggtaacgagacgatcaaccaacaactggccttcctagcgaggggaccatttgggtcgatcgcgacattccagggatatgagatcaatgggtacacattctacacgagagcccaagacataaagagcacgaaccaaaacagcgctgttcgtatcgatgccatgggacacgatggaacaactggcacgtttacggtgccatcgaggacatatgggaacttgactatggttctctcaagtgggataacaacggttgaccttaataaggttggatactcagacgaaccttttgtccttgccaatgatgtaacgcaagtcttttacgtgaaggacatatctagcaaaggaaagaagggcagagggcctgatgagccgaagtgtcacgtggttctcccaggcaaaagaaaaatcgtcggagttgaggacaagactgacgaggattacgatcagttggatgggcaaccccctttcacggtgacgattgaccctagcatcctcctatcaaatgaagacaccccttactcacgcaacgatcacaaggagggaacaataggcacgttccgaccagacagagatagggacgaggtgacactcgccctgcagactccagagcatccaggacgaactcgagggaaaggggtgattccttggaagattggtttcaaggaggacatccacacgtacaggagtcggatgaggagcaagagagataccgaggcgaagattgcagacctagagttccgggtatcgagctacgaactcaacatgcaagaggaggtggcaaggaaggttgatgaacgcatggccgcacatcggtcccatgatccccagccgaccattcctcctgcaatggtgagcccgtcaggaaaccgtagcagctgcgcctcaacggggcag

SEQ ID NO: 16384 - DNA, 711 bp, Oryza sativa
  Clone ID: PAT_MRT4530_22138C.1
atgaatagtgcgagactaatcacgaaaaacattgctcaactcacccataactgcgggcacggctattcaaatagttttactctgatcagaggtgtaccactgtacccacaagacacaatcccacaacatgtcaccatgcgccttagtacccccacggtaccttggaaaggaactgtgacaatacccctcgcacaatacaactcaccacagtgcaccgttcttggatcataatctccccctcaaaactagaggcaatggactccccagcgacccccatggacttctcgccgcttcacagtctggcacactataatgaatcatgctatacaaaaggcacggatgacgacctagccggagctaggagggtcggcctggcctttggaggacacctacgcgtagaggacaatgatacgaacccaaaggtgctcacctacgcgacaaccgacaaaggacggcggccggcgacgaggggcgcgatggcgacggctcagaccacagcggcggcgacgctacggcaaccggcgacggcggagagggggcggccgagctagccctcagtcacgtgcacccgacagcggcgagaggaggcagcggcgacggctagggcgacggcgcggcgcggctggtggttggcctacggcggcggcgcgcggcggcgaggctacggagcacgagagaactcggggaagggggcaaacgaaagaggaaaac

SEQ ID NO: 16385 - DNA, 3528 bp, Oryza sativa
  Clone ID: PAT_MRT4530_22139C.1
atggccgaagctaacaggtataagggttttatttgttgtccatgcaataagtgtaagaatcagaaggggtattctgcatccaggactattcatttccacttgtttgagtcggggttcatgccaagctataactgttggacttgccacggagagcaaggggttgaaatggaagaagatgaagtggaagacgacaatattccggactttggtcagtacgctggatttgaaggaaatcaaacgggcgaggaggaaagggatgctgatggtaacgacgttgcggatgatcttgatcagatgttgcaggacgccaaggaggactgcgaaagtgaaaagggggcccataaattggacaagatgttagaggaccacagaacgtcgttgtacccaggttgcgagcaggggcacgaaaatttggataccactctgcagttcttgcaatggaaggcaaaaaatggtgttagtgacaagtcatttggcgatttattgaaactcgtcaagaacattcttccggagggaaacaaattgcccgagacaacgtacgagactaagaagatagtctgccctctaggactagaagttcagaagattcacgcatgtccgaatgattatatcctatatcatggtgaggagtacgagaacctagaagcatgccctgtttgcaaagaactacgatacaagattagacgagacgatccaggagaagttgacgggcagctaacaaagaagagaattcctgctaaggtgatgtggtatttccctataataccacggctaaggcgtttgttcaggaacaaggggaatgctagaatgatgcgatggcacgctgaagagcgtcaacaggacgagatgcttagacaccccgctgatggttcgcagtggcgaaacatcgacagaaaatttaaagactttggaaaagacgcacgaaacatacagtttggtttaagccccaagcaacctggtaatgacatcgatgtgtacctaagaccactggtcaaagatcttaaactgttgtggaaaaaggaaggtgtccccatgtgggacgaggacaaacaggaggagtttaacctacgagcgttgctgttcgtaaccatcaatgattggcctgcacttagcaacctttccggtcagtccaacaaggggtacaaggcttgcactcactgtatggatgaaacagaaagtacgtatcttaagcactgtaggaaggttgtgtacatgggtcatcgtcaattccttgctgcaaaccacctggtacggaagaaaggcaagcactttgaacataaggcggaccactgtacgaagcctaaacatcacagcgggaaaacagtgtttgctatggttaaagatcttaaagtagtgttcggaaaggggcttggaagccagcctatagagagcgaagatggtcacgcggcgatgtggaaaaggaactctatattttgggagttacactattgggaattcttggacgtccgccacacaatcgacgtgatgcacctcactaagaacctttgcgtaaaccttcttggcttcctaggtgtatatggaaagtcgaaagatacactggaagcacgtaatgatctgaagcatatggaacaacgcggcgaccttcacccggaaccaaacgagaaaggaagccattacttgagtccagccagctacactcttagcaaggcagagaaggaaattgtaataaggggtatccttccagacaatgtccgagcaacaataacaaagctatgtgctttcatgaacgcaatttcgcagaaggtcatcgatccggatagattagaagcccttcagaatgatgtggtgcaatgtcttgtcagttttgagttgatatttccaccttcatttttcaatataatgacgcatctgctttgtcaccttgtcaaagagatcagtattctcgggcctgtgtacctacacaacatgtttcctttcgagatgtacataggcgttctgaagaagtacgttcgtaaccgtgctcgtccagaggcaagcatcgccaaggggtatggaacagaggaggtcatcgaattttgcgtagaatttattgaagaccttcgcccaatcggggtacctgaatcacgccatgaagggagactacggggaaagggaactctcggaaggaaagcaataatgacggtagacaacaatttattccctccttacatcgaggagcacttggctctagttcgcgccaaaaacatcggtaagtccgatgcatggattacacggcattacattgatactttccccgcgtggctacgacaacatctcatgggtaacgagacgatcaaccaacaactggccttcctggcgaggggaccatctgggtcgatcgcaacattccagggatatgagatcaatgggtacacattctacacaagagcccaagacatgaagagcacgaaccaaaacagcgttgttcgtatcgatgccatgggacacgatggaacaactggcacgtattacggtgccatcgaggacatatgggaacttgactatggtcctctcaaggttggatactcggacaaaccttttgtccttgccaatgatgtaacgcaagtcttttacgtgaaggacatgtctagcaaaggaaagaagggcagagggcctgacgagccgaagcgtcacgtggttctcccaggcaaaagaaaaatcgtcggagttgaggacaagactgatgaggattattatcagttggatgggcaaccccctttcacggtgacgattgaccctagcatcctcctatcaaatgaagacaccccttactcacgtagcgatcagaaggagggaacaatagtgaggagaaaaaaagacgttgtcgtcatcgtccctcaagccggagtggtagatagccctcgaaggaattcgcgcaggcaagtgataatggagattcaaagggcccgacagcgaggggttttcgatactagattcatcgaccctcggaaagtaaacgtcgcaatactcgaccagtatccgcaagccacagaggacaatctcgtccatctcctgaaggcgcagcattacaagacattcatactattgccgtacaacacagaattccactgggtccttttactcttcgacctggaggcctgcaccgtcaacgtatatgactcaatggataaaaaagagtctatgtttgacaaggtttttgaacttatagacagggcttggtataggttccgccatttggtccgtggcaaatggagagaaagacttagacggaagttcaattttccttgcgcaaagcaaaagcagggaactaacttgtgcggctactacgtgtgcgagtattgccactgccttgcagaccaaatcatcaccacaagagagctcgattttattcgcatgagggataacctgatcacacacaaggaatttatcgcggcagttcaagaacaactcatgggattcatcaacgaacaaatccttgatcccaagggtgaattctactacgatggaaatacaattcataggtccttagcttctgagataacgactactactacgtcgaaattgtag

SEQ ID NO: 16386 - DNA, 224 bp, Oryza sativa
  Clone ID: PAT_MRT4530_2213C.1
acgaccacgcttccgtacaggcgtacgatcaaagacaatggccatacactactgatggaggacggagttactgtcttatcagacataaaaggagtaaatactgtaccgacgtggcagacatcgggatcctgtgacagatcacattacgacgacattgagtgagttcaagaaaacttgcgctgaagatcacagattgcctcacctagcgttgagcaccagtcatg

SEQ ID NO: 16387 - DNA, 464 bp, Oryza sativa
  Clone ID: PAT_MRT4530_22140C.1
aaggtggattgtgagcatatggttttgatggttgtgctcatgacaattaaggaccggttcgcgagctactgttgtgaaacatttaccgtgccaaccacaagccagcgtgggcaacggctttatcttttgtatagcatgattcattatagtgtgccagactgtgaagcggcgagaagtccgtgggggtcgctggggagtccattgcctctgattttgagggggagattatgatccaggaacggtgcactgtggtgagttgtgttgtgcgaggggtaatgtcacagttcctttccgaggtaccaccgtgcacgccgaaggacgtggtttacacagtggaatagtaaagcaatatgtattaatgatggaatttttggggatcctcccattacatgcccctaggagggccatttatagctttagtataagctcatgcaccctagagttaatgagtacatgggaattta

SEQ ID NO: 16388 - DNA, 126 bp, Oryza sativa
  Clone ID: PAT_MRT4530_22141C.1
atggcgattgccttcgtggttgccttgcctccaccgctgacgtgtggggccccccgtgccagagccactgcctcgccaaatatggctataggagccttcaatggtgcactgccagcatatcaataa

SEQ ID NO: 16389 - DNA, 1926 bp, Oryza sativa
  Clone ID: PAT_MRT4530_22142C.1
atgtcggcggcggcggcggcggcgggggcagcatgcaggagagcgtcgtacacgctcctcggccctccggtggagcgcctccgcgcggcggtatcggcgacggcggccgcggcgtccaccggggatccgttcgtcgacctgctcgactccaactacaacaagcccaagccgacgccgccggcgaagcggctcacggagaattactccccgacgttcgcctcgtcgggtgacccctgccttgacttcttcttcaacgtcgtccccgacacccacgcctccaccgtcaccagcctcctctccgccgcctggaccgccgagcccaacaccgcgctccgcctcgcctgcaacctccgcggcgtgcgcggcaccggcaagtccgaccacgagggcttctacgccaccgccctctggatgcacgaccaccaccccaaaaccctcgccctcaacgcccccagcgtcgccgagttcggctacctcaaggacctccccgagctcctccaccgcatcatccatggcggcgtctccacgaggacgccaccccccgcccgcaccagatcctactattcaagccgtcgcccgaggaaggtgcgccgcgaccccgccacgagggcggcgcgcatcgccgccagccaggagaaacaccgcaagatctcggatcaggccgccgtggagcgcaggaagaagcgcgcggaggcggcggcgagggccgtcgagatgtacgcccgcgaccccaagtaccgcttcctccacgacaggacggcggatctgttcgccgacctcatcgccgacgacatgcgcaagctcgaggacggcaaggtgaacaacctctcgctcgccagcaaatggtgcccttcgctgtacaagtgctacgaccgctccaccctcctctgcgagtccatcggccgccgcctcttccccaagggctcggacgccgagctcccggaggacttgcccgacgagtactacgcctaccgcgtccgcgagcgtctccgcaagatggcgctcgtgccgctccgccgcgcgctccatctccccgaggtgtacatctcggcgcggcggtggggggacgtggtgtactcgcgcgtggcctccgtggccatgaagaactacacggacctcttcctcgagcacgaccacgagcgcttcaacctcttcctcgccaacgtcaagaccggcaaggcgaagatcgccgcgggcgccctgctcccgcacgacatcctggcctccgtcgactcgcacgacaaggaaggcaacgaggtcgccaacctgcagtggaagcgcatggtcgacgacctgctggagctcggcaagctcaacaactgcctcgccgtgtgcgacgtgtcgggcagcatgaacggccgccccatggacgtctgcgtcgcgctcggcctcctcctctcggagctctgcgacgagccgtggcaccaccgtgtcatcaccttcagcgaacgcccccagctgcaccacatcaaaggcgagaccctgtacgagaaggaggagttcatccgcgagatggagtggggcttcaacaccgacctccaggcggtgttcgaccagctgctccacgtcgccgtctccggcaacctgccaccggagcggatggtgaagaaggtgttcgtgttcagcgacatggagttcgaccaggcgtcgtcaagggcatgggagaccgactacgaggcgatcacgaggaagttcaacgaggccggctacggcggcgcgatcccggaggtggtgttctggaacctgagggactcgtgctccgtcccggtgaccgggaacaagaagggggtggcgctggtgagcggcttctccaagaacatgctcaagctgttcctcagcggcggctacgagaagatgacgccgcgggccgtcatggagagggccatttccggccgggagtacgagaagctcgtcatgttcgactga

SEQ ID NO: 16390 - DNA, 2535 bp, Oryza sativa
  Clone ID: PAT_MRT4530_22143C.1
gatgggattattaagaccgagttgtggggtggcaatggaactagccatgacatcactgagactccgaaggaccttatctccgtccagattaagagcaaggacacaatcgaccacctcacgttcacctacaaggacacgaaagggaaccagcagacagtgtcttggggcggcaccatgggagacgatcacctggcggacgccagggaggactgcgaaagtgaaaaggaggcccataaattggacaagatgttggaggaccacggaacttcgttgtacccaggttgcgagcaggggcacaaaaagttggataccactctggagttgttgcaatggaaggcaaaaaatgggggccccaagcaacctggtaacgacatcgacgtgtacctaagaccactggtcgaagatcttaaacagttgtggaagaaggaaggtgtccccgtgtgggacgaggacaaacaggaggagtttaacctacgagcgctgctgttcgtaaccatcaacgattggcctgcacttagcaacctatccggacagtccaacaaggggaaggttgtatacatgggtcatcgtcgattccttgcagcaaaccacccggtacggaagaaaggcaagcacttcgaacataaggccgaccaccgtacgaagcctaaacatcgcagcgggaaaacagtgtttgctatggttaaagatcttaaagtagtgttcggaaaggggcctggaagccagcatatagagagcgaagatggtcacgcggcgatgtggaaaaagaactctatattttgggagttaccatattgggaattcttggacgtacgccacgcaatcgacgtgatgcacctcactaagaacctttgcgtaaaccttcttggcttcctaggtgtatacggaaagtcgaaagatacactggaagcacgtaatgatctgaagcatatggaacaacgcggcgaccttcacccggaaccaaaggagaaaggaagccattacttgagtccagccagctacactcttagcaaggcagagaaggaaagtatgtttgaatgcttggagagcataaaggtaccgtctggatactccacgaatatcaagcgaataataagcacgaaggagaagaagttcacaaacctaaagtctcatgactgtcacgtgttgatgacacaactgctaccagttgtaataaggggtatccttccagacaatgtccgggcaacaataacaaagatatgtgcattcatgaacgcaatttcgcagaaggtcatcgatccggatagattagaagcccttcagaatgaagtggtgcaatgtctcgtcagttttgagttgatatttccaccttcatttttcaatataatgacgcatctgctttgtcaccttgtgaaagagatccgtattctcgggcctatgtacctacacaacatgtttcctttcgagaggtacatgggcgttctgaagaagtatgttcgtaaccgtgctcgtccagaggcaagcatcgccaagggttatggaacagaggaggtcatcgaattttgcatagaatttatcgaagaccttcgcccaatcggggtacctgaatcacgccatgaagggagactacggggaaagggaactgtcggaaggaaagcaataacgacggtagacaacaatttattccgtaaagcccatttcactgttctgcaacactcttcattggtagctccttacatcgaggagcacttggctctagttcgcgccaggaacatcggtaagtccgatgcatggattacacggcatcacattgatactttccccgcgtggctacgacaacatctcatgggtaacgagtcgatcaaccaacaacttgccttcctggcgaggggaccgtctgggtcgatcgcgacattccagggatatgagatcaatgggtacacattctacacgagagcccaagacatgaagagcacgaaccaaaacagcgctgttcgtgtcgatgccatgggacacgatggaacaactgccacgtattacggtgccatcgaggacatatgggaacttgactatggtcctctcaaggttcctctattccggtgccaatgggttaggttgactggtggaggtataatgattgatgacagtgggatgacaactgttgaccttaacaaggttggatactcggacgaaccttttgtccttgccaatgatgtaacgcaagtctttttcgtgaaggacatgtctagcaaaggaaagaagggcagagggcctgatgagcctaagcgtcaagtggttctcctaggcaaaagaaaaatcgtcggagttgaggacaagactgacgaggattacgatcagttggatgggcaaccccctttcacggtgacgattgaccctagcatcctcctatcaaatgaagacaccccttactcacgcagcgatcacaaggagggaacaatagtgaggagaaaggcaaatccccgcgccgacgccgccgtatctcgccgtcgtctcgagctcgtcgtcctcgccgccgccgccgcctcctccgctaccgccgcatctctggggtga

SEQ ID NO: 16391 - DNA, 286 bp, Oryza sativa
  Clone ID: PAT_MRT4530_22144C.1
gcgttcgtttggtctaagtaactctagagcgcctgcaagggggtggcgtgatttgagcccttgagcgacaacagttacatatcgacgcctggtgcctctgggcatcgttgataggaggacatgcatcatcacgatggttcaacccactgtgctatcataagtgtgacggcaacatccacttttgtctgaccctgttgatgctgctaacgggcgccctacatcggcacatctcgcattgtaggatgacacgtgctggaccacaaggagctacatgacccacggcctt

SEQ ID NO: 16392 - DNA, 308 bp, Oryza sativa
  Clone ID: PAT_MRT4530_22145C.1
ggacaattaattaattcatttcaaacataaaaaaacaactttggggaaggagtttattcattctgtcatacgtgcatggatactagcttgatgttaacgtaactaaagcatatacacctttaattttcaaaactgaatgcatacgatcactcgctggatatgacaactgatatatctatgagctcacaaatttaactgatgatacttaagaaataaattaggcggagaattttttggttaattaagggaggacaaaatgagatcaacaaagacacttagatccatcgattatgatgtgaacttcgatc

SEQ ID NO: 16393 - DNA, 152 bp, Oryza sativa
  unsure (1)..(152): unsure at all n locations
  Clone ID: PAT_MRT4530_22146C.1
aaacgtgcaggcgcatgccacgccataaaccgtgatgatccgacacctaaattgacacnactaggcatggacgcctacaccgcgaagagcgggaaaatcgagacgctgcccaacttaatgccttgggagctcatggcggttgggtcagaggc

SEQ ID NO: 16394 - DNA, 939 bp, Oryza sativa
  Clone ID: PAT_MRT4530_22147C.1
tactacagctcccccggcggcaccgggagatgagaggaaagcggggaggcgctcagctgcatcacctgcaacctgcgccccccggcggcaggtttttcctccgtggggcagagaggacggtagcggagtgcggtgctcgctccctcccggttcccccacgacctgagcgactgatgcgacctccttcccactcgttcagatccctcccctgcaacttggtttggacggattgcatctctctctctctctcccctattcctcttttccccaaatctctcgctattttctaccttcctgagattcataccggagcatcctgtcagcggcacccacgaccttgcccagccgccgctgcatcaaacacttccggctccagcgcagccgcgcctccaacgtgtgtgctgacttcctcggagacaagagctttactctttattattattattattattattattattattattattattattattattattattattgttcgttcctttacagattttgcaagttttccctttcatcgcacaatcagttgatctcagtcagtaacatgcttgttggttgtccacacagtttgtcaatataagccttcttaaattttttgaaagttcactggtcagaggcttttcactgactaattaggttaggaacagcaaggtacagaaattactaaatggagttagattcagccagtgcccactgcctagtgtttattgatcaattaatctaccacctcctctttgtgacctcttgtttgctattcacattcacccatatggtcacttactcacaaatctgccagcagctgatctcccaaaataactggtgcatactatactagctagttaaagaagaatacttttgttggcattgaccactctgatgatctcattagtacattccttgttgaggatctcgattcatatatga

SEQ ID NO: 16395 - DNA, 339 bp, Oryza sativa
  Clone ID: PAT_MRT4530_22148C.1
ttaggtggcaacaggcggcctgtcacacgcctcgccccatcccgtcggaatgatgagagcctctaggcactcgtccctaaccggagccggcgtgctaactcctggagttaacacgtcagtcccggctagattcataccaggtggtctgacgccggtcacgtcatcagcaaacaaccgtgctcccacgttgcacctgcttccggtggagtggaggttggtatgacctagcgtccccggccgaaccggcaaaggggggcccgcgcggtctcccggtgaggagccccacgctccgtcaaagtgcgttgcttcattgttatagctagtgtggcacttgatcat

SEQ ID NO: 16396 - DNA, 4189 bp, Oryza sativa
  Clone ID: PAT_MRT4530_22149C.1
atggctgagaagctgccaccttcaccatcctcggctagcccaggggctgttaaggaaaaaatccagaggctaggcttgggggaaatcaatgaaggaaatgtagtggctgttgatccagaaaagttcacacctgatcataagaaggattttgaagcaatgatgcaacaagcgcgggatcaattcttaaattcattcatgcagactcgcaagggaacatttgttcagaaatacaaggtaaagatagttcctgatgagcctgagactagtacttctaaggaaggagaagggaagaaagcctcagaatcggctcaaccaggcgacaaaaaggtactaccgatgactcggcttacaagactcagggtgacaactctcaagggtccaacaacagccgatttatcaaacgccgccaagacgctaggtcgcacaaccgactcaacagacaccatcaggacagcaaactatccagccgattccacagcaaggcttgatgaatcaatcggctggacacgccctgaatcaaattgttccagagcatttggctcaccatgtgcagccagatggtacggtgatgcctcagattgtgcccgagcatttggtgcaaaatattcagccgaattaccagaattaccaagggggcaatttgagttatcagtatcgaccttcttccccacaagtccatataatcagttcgagccgacgcagcaacaatcgcaaggagcagctcagcaacgaccatgggccgatgtgattgctgacgtgatgagggaacagtttgggcttaaaccaaaggacactggaaacttgtatcggcaaccttaccctgagtggtttaaaagagttcctcttcctaaccgatttaaagttcccgatttctccaagttttcgggacaagatggtgtgtcaacttatgaacacattagccgatttttagctcagtgtggtgaggcatcggctgtagacgctctgagagttaggctattccggttgtccttgcctggatcggcttttacttggttttcttccttgccatatgggtcaataaacagctgggtcgacttggagaaacaatttcacagctatttctatagcggagttcatgagatgaaattatccgacttgaccgcgattaagcagaggcataacgagcccgtgcatgagtatattcagagattcagggaaatgaggaataagtgcttcagcttaagtttgactgattctcaattagccgatttagcctttcaggacatgattggtccgattaaggagaaattctcatctgaagactttgatagtttgtcacatcttatacataaggtaaaattgcatgaacagagatttgcggaagctaggaagaactctaagaaggttaatcatgtgtgtccttatgtgtatgggtcggatgatgacgatgatgactctgagatagctgcagctgaatgggtaaggagtaaaaaagttataccatgccagtgggtgaagaactctgggaaagaagagaggtatgattttgatattaccaaggctgacaaaatttttgatctgctccttcgagaaaagcaaatccagcttcctcctggtcatacgattccatcggctgaggaattgggcaagaagagatattgcaaatggcataattctggatctcattctactaacgattgtaaggttttcagacaacagattcaggtggctattgagggaggcaagattaagtttgatgattccaagcggtcgatgaaggttgatggtaatccttttccaattaacatggtgcacacaactggccgaacagccgatgcaagacgtacgaaaggttttcagatgaattcggccagggttataaataagtatcaaagaaaattcgacaagcaacaagaaaggtgttatgaagaggatgatggtagtttcgatcctcattggggttgtgaattctttaggttctgctggaatgagggtatgaggttaccaactgttgaggattgtcctggatgcggtgatgttgcggaaagtttgagccgatcatacaatggaagcaatctgctgaagcaaacaagagtccctattcatcaaaggttgggcccggtaaatcagcatagttacttggaggatggcaaggatgggaaaattcagtggtgtccttctggtatttttacaaagaatcagaagagaagggtgcggagattgaggaacagggaacgctttcaggaggttgagcaagaaattgatcatcggctgaggaaggcgaaaccgaggcaggagtggcgtatcaagggtcaggcttctggagccgatgatgtcatagctgatgaagcagagaggttggcgaaagggaagtgtgccgaatttgggattgatcaggccgatgttgatgaagtggaagaggaatcagctaagttagttctatcaccagaacaggctgtttttgaaaagcctgaggggacagagaatcggcaccttaagccattgtatataaatggttatgtcaatgggaaaccgatgtctaagataatggtcgacggtggggctgcggtaaatttgatgccttacgctacattcaggaaattgggtagaaatgccgaggatctcatcaggacaaacatggtgcttaaagattttggtggcaatccatcagaaacaaagggtgttttgaatgtggaaatgaccgtcggtagtaaaactattcctaccacattttttgtcatcgatgggaaaggttcttacagcttgttgcttggaagggattggattcatgccaattgttgtgttccttcgaccatgcagcaatgcttgattcaatggcaaggcgacaaagttgagattgtgccagctgacagtcgattgaagatggagagcccaagctgttactttgagggcgtcgtggagggttcaaacgtctacaataaggacgcagtagatgatcttgatgacaagcaaggtcaaggtttcatgtcggctgatgatttagaggaggtggatataggtccaggcgatcgaccgaggccgacatttattagcaagaatttatcttcagagtttaagaccaagctgatagagcttttgaaagaatttagagattgcttcgcttgggaatattatgagatgccaggactcagccgatcaatcgttgagcatcggctacctctcaaaccagggattaaaccataccagcagcctccgaggagatgcaaggccgatatgcttgaacctgtcaaggctgaaatcaaacgtttgtatgatgcgggttttattcgtccttgccgatatgctgaatgggtttctagtatagttcctgttgtcaagaaaaacgtctatattgatgatgtggttgttaaatctaaagaaatagaggaccatatagctgatttgaggaaagttttcgaaagaaccaggaaatatggcttgaagatgaatccgacaaagtgtgcttttggcatatcagctggccagttcttgggatttcttgttcatgaaagggggattgagattgctcagaggagtattaatgctattcaaaagattcaacctccagaggacaagaagaagttacagaagttgatcggcaagataaatttcgtcaggagatttatttctaatttatctggaagattaaagccctttacaccgttattaaagttgaaggccgatcagcaatttacttggggggcagagcaacagaaagctttggataatatcaaggaatatcttagttccccaccagttttaattcctccacaaaagggggtacctttcaagttatacttatcagctggtgacaagtcgattggttcggtgttgattcaagagcttgaaggaaaagaaagggcagtgttctatttaagtcgtcggctcttggatgcagaaacaaggtactctcctgttgaaaaattgtgcttgtgcttatatttctcttgcactaagttaagacattacctattgtccaatgaatgcactgtggtatgcaaagccgatgtaatcaagtacatgctatcggctccgattttgaaagggagaatcggcaagtggatattttccttaacggagtttgatcttcggtatgagtcaccaaaggcgattaagggacaggctgtagctgattttattgtggatcaccgtgatgactcaatcggtttggttgacattatgccttggacattgttctttgatggatctgtatgcgctcatggttgtg

SEQ ID NO: 16397 - DNA, 381 bp, Oryza sativa
  unsure (1)..(381): unsure at all n locations
  Clone ID: PAT_MRT4530_2214C.1
tggtggttgcagataagcttttgtcaagttgccaacaggctacactgttcttggcaacactagctcacgcgtggtgggcgacagcttttcatnccnaggggaaaaaaaaatctgaggacatgttgctgaaatgattttttgtgcccncctnaaatggtttgagtgatgaggtgggctctcctagtaccataggtcatgtngacatgtctcacaactcacaagatntgacaaaaaaaaattctcaggtttggtaaaaacatatgcttaaaatgaattatcgatctgaaaaacaagtttatgtacagtaacttaaactgttattttacataataaactggtttcttcaatanctttttnannaaaaaanaaaannnnnaaaaa

SEQ ID NO: 16398 - DNA, 4593 bp, Oryza sativa
  Clone ID: PAT_MRT4530_22150C.1
atggccgagaagctgccgctgtcgccatcctcggctagtccaggttctgttaaggagaaaatccagatgctgggcctcagatacatcaatgaagggaacgttgtgactgttgatccggaaaagttcacacctgatcaaaagaaggacttcgaagcaatgatgcaacaagcgcgggatcaattcttaaaatcattcacgcagactcgcaaaggaacattggttcagaagtataagataaagggaagagaggctcagaatcggctcaaccaagtgacaaaggtgctaccgacggctcggctcaagagaatcagggtgaaaactctcaaggggtacatggagttcaagcaacagccgattcaacaaacgccgtctagacagcaaactatccagccgattcaccagcaaggcttgatgaatcaatcggccggacaattggctagacacgtcctgaatcaggttgttccagagggtttggttcaccatatgcagccagatcatacggtaatgccccagattgtacctgagcacttggtgcaaaatattcaaccgaattaccagaactaccaagggggcaatttgaattatcaatatcgacctccttccccgcaagcccaatatcagcaaggggggctaactcaacctcagttcactcctcagtgtaatcagttcgagccaatgcagcaacaatcgcaaggagcagctcagcaacgaccatgggccgatgtgattgctgacgtgatgagggaacagttcgggcttaaaccaaaagatactggaaacttatatcggcaaccttaccctgagtggtttgaaagagttcctcttcctatccgatttaaagttccagatttctccaagttttcgggacaagatgctcaatgtggtgaagcatcggctgtagacgctctgagagttaggttgttccggttgtccttgtctggatcggcttttacttggttttcttctttgccgtatgggtcaatcaacagttgggtcgacttggagaaacaatttcacagctatttctacagcggagttcatgagatgaaattatccgatttgacagtgattaagcaaaggcataatgaacctgtgcatgagtatattcagagattcaaggagatgaggaataagtgcttcagcttaagtttgactgatgcccaattagccgatttagcctttcagggcatgattggtctgattagggagaaattctcatctgaagactttgatagcttgtcacatcttatacagaaggtaacattgcacgaacagaggtttgcggaagctaggaagagctctaagagggttaatcatgtgtgtccttacatgtatgggtcggatgacgatgatgatgactctgaaatagctgcagccgaatgggtaaggagtaaaaaggttataccgtgccaatgggtaaagaattctgggaaagaagagaggtatgattttgatattaccaaggctgacaaaatttttgatctgctgcttcgagaaaagcaaatccatcttcctcctggtcatacgattccatcggctgaggagttaggcaaaaagaggtattgcaaatggcataattctggatctcattctactaacgattgcaaagttttcagacagcagattcaggtggctattgagggaggcaagattaagtttgatgattccaagcggccgatgaaggttgatggccgaacagccgatgctagacgtacgagaggttttcagatgaattcggccaaggttataaataagtatcagaggaaatatgacaagcaacaagagagatgttataaagaggatgatggtagttttgatcctcattggggctataggaagactcagtggtgtccttctggtatttttacaaagaatcagaagagaagggttcaaaggttggggaatagggaacgctttcaggaggtcgagcaagaaattaatcatcggctgaggaaggcaaaaccgaagcaggagtggcatgttaagggtcaagctcctggggccaatgatgtcgcagccgatgatgcaaagaggttggcaaaagggaagagtgtggtaacagcgtcaattaacatggtttttaccttgccggccgaattttggatcgatcaagccgatgtcgacgaggtggaagaggaatcggctaagttggttctattgccagaacaggcagtctttgaaaagcctagggggacagagaatcgacaccttaaaccattatatataaatggctatgtcaatgggaagctgatgtctaagatgatggtcgatggtggggctgcggtaaatttgatgccttatactacgttcaggaaattgggtagaaatgccgaggatctcatcaagacaaacatggtgctcaaagattttggtggcaatccattagaaacaaagggtgttctaaacatggaactgacagtcagcagtaaaacaattcctaccacattttttgtcatcgatgggaaatgttcttacagcttgttgcttggaagggattggattcatgccaattgttgcattccttcgaccatgcatccatgcttgattcaatggcaaggcgacaagattgagattgtgccagccgacaggtcagttaatgttgccagtgctgatttagctctttgggagatggatggccttgattgtttatctggaaagatggagaacccaacctattactttgagggcgtcgtggagggttcaaacgtctacaccaaggatacagtagatgatctcaatgacaagcaaggtcaaggtttcatgtcggctgatgatttagaagaaatagatataggtccgggtgatcgaccaagaaccaagctgatagagtttttgaaagagtttaaagactgcttcgtttgggaatattatgagatgctaggactcagccgatcaatcgttgaacatcggctacctctcaaaccaggggctgaaatcaaacgtttgtatgatgctggttttattcgtccttgccgatatgctgagtgggtttctagtatagtttctgttatcaagaaaaatggtaaggtgagggtatgcattgattttagagatttgaataaagctaccccaaaggacgaatatccaatgctagtggccgatcagttggttgatgctgcttcaggacataagatattaagttttatggatggaaacgcggggtataatcagattttcatggctgaagaagatatccataagacagctttcaggtgtcctggtgcgatcggcttgtttgaatgggttgtaatgactttcggcttgaagagtgctggagctacgtaccaaagggccatgaattatatatatcatgatttgatcggctggttggttgaagtctacattgatgatgtggttgttaaatctaaagaaatagaggatcacatagccgatttgagaaaagttttcgagaggaccaggaaatacggcttgaagatgaatccgacaaagtgtgcttttggtgtatcggctggccagttcttgggatttcttgttcataagagggggattgagattgctcagaggagtattaatgctattcaaaagattcaacctccagaggacaagaagttacaggagttgatcggcaagataaatttcgtcaggaggtttatttctaatttatttggaagattagagccttttacaccattattaagattgaaggccaatcagcaatttacttggggggcagaacaacagaaagctttggataatatcaaggaatatcttagttccccaccagttttaattcctccacaaaaagggatacctttcaggttatacttatcggttggtgacaagtcaattggttcggtgttgattcaagagcttgaaggaaaagagagggcagtgttctatttaagttgtcggctcttggatgcagaaacaaggcattacctattgtccaatgaatgcactgtggtatgtaaagccgatgtgatcaagtacatgctatcggctccgattttaaaagggagagttggttggggaattgatatgatcggcatgattaatccaccatcgagcaaaggtcacaagtttatattggtggcaacagattattttaccaagtgggtagaggcgattcctttaaagaaagttgattctggggatgctatacagtttgttgaagagcatataatctatcgatttggtatccctcaaactattacgaccgaccagggttcgattttcgtatctgatgagtttgttcagtttgccgatagcatgggaattaaattgttgaattcttcaccatattatgcacaagctaatgggcaagccgaggcatctaataagagcttgatcaagttgattaagaggaaaatttctgattttcctcggcaatggcatactcggttagctgaggcgttatggtcttatcggatggcttgtcatggatcgatacaggtttctccttataaacttgtttatggtcatgaggccgttttgccatgggaggttagaatcggctcaagaagaacggagctgcaagttactttaacagccgatgagtattataaccttatggccgatgaaagggaggatctggttcaatcacggttacgagctcttgcaaaagttacttag

SEQ ID NO: 16399 - DNA, 3429 bp, Oryza sativa
  Clone ID: PAT_MRT4530_22151C.1
atggcgtccgatctatcccaatcacttgacttaagtatatatcgatatagggagtatatatcattaatatctacagccgatcaagatcaaatcaactggcatgctcatacacccgaaggcgagttttggacctgcactggagttaagcagatctcccaggccgccgtgttcgatttttacgtcaacacgcttttggcacgcccagtgggaccgattagaagtcagaagacaatttccctcgtggctgagaagctgccaccttcaccatcctcggctagcccagggattgttaaggaaaagatccagaggcaaggcttgggggacatcaacgaaggaaacattgtgactgttgacccagaaaagttcacacctgatcaaaagaaggattttgaagcaatgatgcaacaagcgcgagaccaattcttaaactcattcatgcagactcgcaagggaacatttgttcagaaatacaaggtgaaagtagttcctgatgaacctgagaccagtacttctaaggaaggagaagggaagaaagtctcagaatcggctcaaccaagtgacaaaggtgctaccgacggctcggctcaagagaatcagggtgacaactctcagggggtacatggagttcaaggtgatggtgttcatgggctgcaaggaggaaatcttaatcaagacggcgagacaacacaggatttcttcaacaactttcaagatcgagtggattatgccgtgcacaatgctttgatcaatcagtctggagtattagttaacaccttgtcaaacatgatgaagtcaatagccgacggatcaatagccgagcatcaggctgtaggcccgatttatttacaaggaggtgtctttccaaactatcggcctttgatcaccggcgctcaaccgtctgtacaaccagttcctcctattgcaccttcagctcagccgacagcaccaccgttgactcctttacctgctccagcagcatcggcaccaggacagccgattaatcctcgactattgatgagggagcagccacagcatagtgggcaggcgacaaatcagctgacacaagacaaggttgctgctatgtttttacgtcctcaacctactattgatccagtccagcaacagctgattcaacagacgccgccaagacaccagttcgaaccgacgcagcaacaatcgcaaggagcagctcagcaacgaccatgggccgatgtgattgctgacgtgatgagggagcagtttgggcttaaaccgaaggatactggaaacttgtatcggcaaccttaccctgagtggtttgaaagagttcctcttcctaacctatttaaagttccagatttctccaagttttcgggacaagatggtgtatcaacttatgaacacattagacgattcttagctcaatgtggtgaggcatcggctgtggacgctctgagagttaggttgttccggttgtccttgtcttgttcggctttcacttggttttcttctttgccgtatgggtcaataaacagttgggtcgacttggagaaacaatttcacagctatttctacagcggagttcatgagatgaaattatccaatttgacagcgattaagcaaagacataatgaacctgtggatgagtatattcaaagattcagggagatgaggaataagtgcttcagcttgagtttgactgatgcccaattagccgatttagcctttcagggcatgattggtccgattaaggagaaattctcatctgaggactttgatagcttgtcacatcttatacagaaggtaacattgcatgaacagaggtttgcggaagctaggaagaactctaagaaggttaatcatgtgtgtcctttcatgtacggatcggatgatgatgatgatgactctgagatagctgcagccgaatgggtaaggagtaaaaaggatataccgtgccaatgggtgaagaattctgggaaagaagagaggcagcagattcaggtggccattgagggaggcaagatcaagtttgatgattccaagcgactgatgaaggttgatggtaatccttttccagttaacatggtgcacacagctggccgaacagccgatgctagacgtacgagaggttttcagatgaattcgaccagagttataaataagtatcagagaaaatacgacaagcagcaagagaggtgttatgaagaggatgatggtagtttcgatcctcattggggctgtgagttctttaggttctgctggaatgagggtatgaggttaccaactattgaggattgtcctggatgcggtgatgttgcggaaagttcgagccgatcatacaatagaaataatcggctgaagcaaacaagagtccctgttcatcaaaggttgggcccggtaaaccaacatagtttcttggaggatgacgaagataggaagattcagtggtgtccttctggtatttttacaaagaatcagaagagaagggtgcaaagcttgaggaacagggaacgctttcaggaggtcgagcaagaaattaatcatcggctaaggaaggcaaaaccgaagcaggagtggcgtgttaagggtcaagcttttggggccgatgatgtcgtagccgatgaggcagagatgttggcaaaagggaaaagtgtggtaacagcatcaattaacatggtttttaccttgccagtcgaatttgggatcgatcaggctgatgtcgatgaagtggaagaggaatcggctaagttggttctatcgtcagaacaggcagtctttgagaagcctaaagggacagagaatcggcaccttaaaccattgtatataaatggttatgtcaatgggaagccaatgtctaagataatggtcgatggtggggctgcgatggaggacccaagctattactttgagggcgtcgtggagggtccaaacgtctacaacaaggacacagtagatgatctcgatgacaagcaaggtcaaggtttcatgtcggctgatgatttagaagaggtggatataggtccaggtgatcgaccaaggctgatattcattagcaagaagttatcttcggagtttaggaccaagctgatagagcttttgaaagagtttagagattgcttcgcttgggaatattatgagatgccaggactcagccgatcaatcgttgaacatcggctacctctcaaaccagggattaaaccacaccagcagcctccgaggagatgcaaagtcgatatgcttgaacctgtcaaggctgaaatcaaacgtttgtatgatgcgggttttattcgtccttgccaatatgctgaatgggtttctagtatagttcctgttgtcaagaaaaacggcaaggtgagtgtcgcgaccgagaaaatttgcattttcccgaacgctagtgtattaatccccgtcccaggaaaagccggggtacaccacacaaacatgatataa

SEQ ID NO: 16400 - DNA, 387 bp, Oryza sativa
  Clone ID: PAT_MRT4530_22152C.1
atggtcgttgctgagctgctccttgcgattgttgctgcgtcggctcgaactgattatactgaggagcgaactgaggttgagctagccctccttgctaatactggacttgtggggaagaaggtcgatactgataactcaaattgcccccttggtaattctggtaattcggctgaatattttgcaccaaatgctcgggcacaatctgaggcatcaccgtaccatctggctgcacatggtgagccaaatgctctggaacaatttgattcagggcgtgtccagccgattgattcatcaagccttgctgtaaaggagtcaatggcagtactgtcggctgagctaatggtgcaatgggaggaactgcttgagcagatggctgagtgccggtaa

SEQ ID NO: 16401 - DNA, 1953 bp, Oryza sativa
  Clone ID: PAT_MRT4530_22153C.1
atgtctaagatgatggttgatggtggggctgcagtaaatttgatgccttatactacattcaggaagttgggtagaaatgctgaagatctcatcaggatgaatatggtgctcaaagattttggtggcaattcgtcagaaacaaagggtgttctcaatgtggaactgacagtcggcagtaaaactattcctacttcattttttgtcatcgatgggaaaggttcttatagcttgttgcttggaagggattggattcatgttaattgttgtattccttcaaccatgcatcagtgcttgattcaatggcaaggcgacaaggttgagattgtgccagccgatagccgattgaagatggagaacccaagctattactttgagggcgtcgtggagggttcaaacgtctacaccaaggacatagtagatgatctcgatgacaagcaaggacaaggtttcatgtcgactgatgatttagaagaaatagacataggtccaggtgatcgaccaaggccgacatttattagcaagaatttatcttcagaatttaggaccaagttgatagagcttttgaaagagtttagagattgcttcgcttgggagtatcatgagatgccaggactcagccgatcgattgttgaacatcggctacctctcaaaccagggtttaaaccgtaccagcagcctctgaggagatgcaaagccgatatgcttgaacctgtcaaggctgaaatcaaacgtttatatgatgctggttttattcgtccttgccgatatgctgaatgggtgtctagtatagttcctgttatcaagaaaaacggtaaggtgagggtgtgcattgattttagagatttgaataaagctaccccaaaggacgaatatccgatgccagtagccgatcagttggttgatgcagcttcaggacataaaatattgagttttatggatgggaacgcaggatataatcagattttcatggctgaagaggatatccataagacagctttcaggtgtcctggtgcgatcggcttgtttgagtgggttgtaatgactttcggcttgaaaagtgctggagccacgtaccaaagggctatgaattacatataccatgatttgattggctggttggttgaagtctatattgatgatgtggttgttaaatctaaagagataggggaccatatagccgatttaaggaaagttttcgagagaaaaaggaaatatggtttgaagatgaatccgacaaaatgtgcttttggtgtatcggctggccagttcttggggtttcttgttcatgagaggggaatcgagattgctcaaaggagtattaatgctattcagaagattaaacctccggagaacaagaagaagttacaggagctgatcggcaaaataaatttcatcaggagatttatttctaatttgtctggaagattggagccttttacacctttattaagattgaaagccgatcagcaatttacttggggggcagaacagcagaaagctttggataatattaaggaatatcttagttccccaccggttttaattcctccacaaaagggatacctttcagattatatttatcggctggctaaatatgaggtagttttaaaagggttacaattgcttcaggaggttgaagccgatgctattgaaattgtgggtgattcgttgttggtgatcaccgatggtgcagcatatgggttggttgatggcgcagcggatggactggcggaggtcaacatcgccgcggatcgggatctggccgagggagatcgcctgagaatcgccttgcgcgtcggggaaatcgccggagagagaggagacggactttgcttgagcggtgaaaacggaggtcacggtgtgaagattctcgagggcaacggttggtatttaaagcgaagcgataacggtcgggaagacggcaagtgcgatatttactcgtactcggcgtaa

SEQ ID NO: 16402 - DNA, 1397 bp, Oryza sativa
  Clone ID: PAT_MRT4530_22154C.1
tgtgctggaaagggctagtgactttgcaagcacatatctcgagaacagaatatggaagctaatgacttggctcaaggggcgtcgggatacaagccgatgacaaaagatattgagatagagattgctacggttacagccgatgattggagatacgatgtgtttcaatacttacaaaatccatttcaatcggcttcgcggagattgcgttacaaggctttgaaatacaccttattggatgatgatctttattatcggacgatcgatggggtattgcttaaatgtttgagtgctgatcaggcaaaagttgcaatcggcgaagttcatgaagggatttgtggcactcatcagtcggctcataaaatgaagtggttgcttcgacgtgccgggtatttttggccgacgatgttggaggattgtctcagatattataaaggttgtcaagattgtcagaagtttggagcgatccaaagagcgccggtatcggctatgaatcctattattaaaccatggccttttagaggctggggaattgatatgatcggcatggttagcccaccatcgagtaaaggacacaagtttatattggtggcaacagattattttaccaagtgggttgaggcgattcctttaaagaaagttgattctggggatgctatacaatttgttcaagagcatataatctatcgatttggtatccctcaaactattacaaccgaccagggttcaattttcgtatctgatgagtttgttcagtttgccgatagtatgggagttaaattattgaattcttcaccatattatgcacaagctaatgggcaagccgaggcgtctaataagagcttgatcaagttgattaagaggaagatttccgattatcctcggcaatggcatactcggttagctgaagcgttgtggtcatatcggatggcatgtcatgggtcgatacaggttcctccttataaactcgtttatggtcatgaagccgttttgccatgggagattagaatcggctcaagaagaatggagctgcaagatactttaacagccgataaatattataaccttatggccgatgaaagggaggatctggttcaatcacggttacgagctcttgcaaaagttactcgggataaggagcgaattgcctggcttataataagaaagtagtgcctaaagatttttcggagggtgaacttgtctggaagttgattttgccgattgggacccgagatagcaaatttggcaagtggtcaccgaattgggaaggaccgttccaaattcataaggtggtatctaagggagcttacacgttgcaaggactcgacgaagaggtttatggcagagcactaaatggcaagtacttgaagaaatattactctagtgtttgggtcaacgca

SEQ ID NO: 16403 - DNA, 570 bp, Oryza sativa
  Clone ID: PAT_MRT4530_22155C.1
atggcttgcctccccggcgggcgctcctcgtcgccgcgactccctcctcaccgagcatcgtcgctgcggtgccccgcttcttgccactgccgctccggccgctgccgctctgcccacggcccgccgccgccctgctccgctcccgccggccgccccgacaatcgcccgctctggtcgctgccgccccactccaccggaggggagaccacggcgtcctccggtgatggcggtggcggcgcccaaaccctcccctccgccagatccggcgggaggaaaggtggcagacctcgctcccgcacgagtgacgacggccatttctcggccgttcacatgctcctcgatggacgacgacgacgatggacgtcgtggctagtgacgtacgtgcgcccttgccgcgacagcctcacagtcacagccatgcttggggacggcggcgcaagtagcagcagcagcgagcaacggcggagcaagcggccggcggcgtccagatccggcgcggagacccagctcagcgacggcgtggggccgggcctgggcgcctggcatggtcccgcgacgatcttcgtgtaa

SEQ ID NO: 16404 - DNA, 1248 bp, Oryza sativa
  Clone ID: PAT_MRT4530_22156C.1
atgccgctccaccaccgccgggcgctgcactccaacgactgcgacgacggcggctacggctgctcctcgtggccgctgtcccctcctcctccgagcgtcatccttactcccttcgcttccccttcgccggcgccctgggcttgcccgcccgcttttcctgccccgtcgccgtctcctctccatggcgccgcggggggcaggagggatcagggaggataccacggctccccaccaggcggtggcggtgatgcggacgagcaccgccgacgcatcatcaaccttatcgtcgtcggcgccgcggcgctcgcgttcctctccatgatcctcctcgtcgtgatcgtcgccgtccggcggcggaggctgcggcggcggcggcagaggcagcaggcgctcctcgcccccgcggcgccggccgacgcggtggcggtgaacgtcgaggacggcggggatgacgatgcggagggagggggaggaggaggaggaggaggaggagtggtgcaccacatctggtacatccggaccgtcgggctcgacgaggcggcgatcgattcgatcgccgcgacgcggtaccgcgcgggcgctgggctcctcggcgccgccgactgctccgtctgcctcggcgagttccaggacggcgagctggtgcgccttctccccaagtgcggccacgcgttccacgtcccctgcatcgacacgtggctccgcgcccacgtcaactgcccgctctgccgctccgacgtgctaggccccgccgccacggccacggagtccggtggcggcgacaccggctccatgccacaagctgatccagtcgcaaacaccatagccgcagcccagcaagcggctgcgccgggcgatgcaatcttggaacgccaagaagaagaagaggaagcagaacaggaggaccaaggagcgccgccgcacatggaggaaaaccggcaagagcaatccagctcaccggatccattgccgccgccgcgcaacgtgcggcgcgcggcttccatggacgcggcgatcgtgtcgaccgccgcagaggtcgcggcgctagagcggctgccggaggcggctcctgaagaggagcagagcggcggcggcggcggcggcgacaagcgcggcggggctcctggcgcgtcttgcctgaaggtctcgagctccggccgcctgagcaacctcggcgccgccgagaggctcccgaggtcgttcttctcgcggcattgccgtgcccggagctcggtgctcccgctgtga

SEQ ID NO: 16405 - DNA, 3110 bp, Oryza sativa
  Clone ID: PAT_MRT4530_22157C.1
atggcaatcaagaggacatggcaactttggttgctctctcttctcacacatgccatcctattgttcacagccagctctcagtccatcaatggagatgacctctcagcactcctgtcattcaaatccctcataaggaacgacccaagagaggtgctgtcctcgtgggacaccagcagcaacactaccaacatgacagcacctgtcttctgccgatggaccggcatttcctgcaacgatcgccggcatccaggtcgtgttaccaccctcaatctgagcgatgccggcctagtcggcaccatatcccagcagcttggaaacctgacccacctccgtgtccttgatctgtcaaccaacagtcttgatggagatatcccaatcagccttggcggttgcccaaagcttcatgccatgaacttgagcatgaaccatctgtcagtgtcggccacaacaatcttaccggtgatattccccaagtcactctccaacgtcaagaggaacttcatccatggccaagatttgagttggatgggcaacctcacatcattgagagactttattcttgaaggcaacattttcactggtaacatccctgaaacttttggtaagatacttaaccttacttacttcagtgtccaaaataatcaattggaaggccatgttcctctatcaatcttcaatatttcttccataagaatcttggatcttggcttcaatagactgtcaggatcacatccactcgatatcggcattaaacttcctaggataagtcgttttaacacaattaataaccgtttcgagggtataataccacccaccttgtcaaatgcatctgcacttgaagtattgcttcttcatggaaacaactaccatggcattattcctagggaaattggcatccatggtaacctgaaggtatttgtgttaggatacaacgcgctccaagccacacgatctagtgattgggaatttatgacatcactgaccaactgtagcagcttaacaaggctagatgttgcacacaaaaacctcgttggtgaaatgccaattaacattgccaacctgagcaaagagctcatagggatttacctaagtgaaaaccaaataactgggaccatacctgaagatttatggaagctcaataaacttacttctctcaacctgtcctgcaacctcttcacaggaaccttacctcctgatattggccgccttccaataatcaattctatctttatgtcacataatagaatcactgggcagattccacaaccattaggcaatatctcacagttgatctttctatctctgtctaataatcttctggatggcagcattccaattagccttgggaacctcacaaaacttaatctcttggatctttccagtaatgccttgatgggccaaatcccacaagagatacttacaataccttcccttaccttacttctcagcctctccaacaatgctctaagtggctccattccaacacagattgggcacttgaacaacctcatcaaaatggacctctcaatgaataagctatctggtgaaatcccaaaagctattggcagctgtgtccaattgagtttcctaaatttttatagaaaccttctccaaggacaaatcccagaaagcctgaacaatttgaggagccttgaaacccttgatctgtctaacaacaacttggcaggtcctgtacctttatttcttgcaaacttcacgctcctaactaatctaaacctctccttcaacaaactgtcaggtcctgttccaaatatagggattttttgtaatgccactatagtgtcaatctcagtgcatcgactacatgtcttaatcttttgcattgctggaacgttgattttctctttgttttgtatgactgcatattgcttcattaagacaaggatgaaacctaacatcgttgataatgaaaacccatttctttatgagacgaatgagaggatatcttatgccgaactacaagcagcaaccgagtcattctcaccggcaaatttgattggttctggaagcttcggcaatgtatacattggaaatctaattattgatcagaatctagtgcctgttgcaatcaaagttcttaatcttgaccaaagaggagccagcagaagtttcctgagcgagtgtgatgctcttaggagaattcgacaccggaaacttgtcaaggtgatcactgtctgcagtggcttagaccaaaatggtgatgaattcaaggcacttgtcctagaattcatttgcaatggaagtttggatgagtggctgcatgcaacaagtacaacaaccagcacaagctacagaaagctaaatatggtggaaaggctgcatattgctgttgatgttgcagaggcattggaatatcttcaccatcatattgtgccgccgatagttcactgtgatattaaaccaggcaacattcttctagatgacgacatggtggcacatgttaccgactttggtctagcaaagataatgcattctgaaccacgcatacaaagcagctcattagtaattaaaggaacaattggatatgtcccaccagaatatggagcgggatctcaagtatccatggatggtgacatatatagctacggggtgttgttactggaaatatttactggaagaagaccaactgacaattttatcaatggtataacaagtcttgttgactatgttaagatggcctatcctaacaatctactggaaatattggatgctagcgcaacctacaatggaaacactcaagaattggtagaactagttatttatcctatatttcgacttggtctaggatgctgcaaggaatcaccaagggaaagaatgaagatggatgatgtagtcaaagaattgattgctataaagaaggcatgcacagctatgcctaaatgaaattcgagcaaccaagtaatctgggtaagcaattatatgtaactaaatttggttatgtctgctcaaaaagttgtcacagaagtatgcttttggtgtatctgaagtccattatattgttgtcactactgtttatttcattttcatcttgtatttctttgtatcccttttgtttctgtattttgggggtgctatctatatatggtttt

SEQ ID NO: 16406 - DNA, 580 bp, Oryza sativa
  Clone ID: PAT_MRT4530_22158C.1
cccacgcgtccgaaaaaaaaaaattaaaaaaaaaaaaaaaaaaaaaaaaaaaaaaaaaaaaaaaaaaaaaaaaaaaaaaaaaaaaaaaaaaaaaaaaaaaaaaaaaaaaaaaaaaaaaaaaaaaaaaaaagggggggccgcataaaaagaaaccaagtttccgtccctttccatgcaacccaatatcttttttatggggcccccaaatttaaattcttttggccgtgtttttaaaaaatcgaaatgggaaaaaccctgggtttcccaaattaaaaacctttgaagaacacccccttttccccattggggaaaataccaaaaagccccggccagatggcctttccaaaagttgggccacttctaattggcaaatggaaccccccttgaaagggccaataaaccccgccggtaggggggataacccccagggagtctgttacttttgccagcgccttaagccccaactttttctttttctaccattctttttttgggagtttttccgtttttccctggaaagctttaaatgggggttccctttaaggaatacaaatatggggttttatggacctttgacccc

SEQ ID NO: 16407 - DNA, 1112 bp, Oryza sativa
  Clone ID: PAT_MRT4530_22159C.1
gtcaccaatcagtcatcaatgcataattaaggggttgaacaaccaatgacatatacatttgaatgagcccttatccagttttttggagatattcacacgggatgattatgttatccagtattccatcttagtcagttagcaaatttgagaaaaaacaaattaatgtctcacccatattctccattatgccttggctacttaaagaagcactccaacggctagtttcacttgttagggttgtagcaggaccacgacaccctcacatccactgttatgctcgcaggtgtgcagtaaaatcgacgatgcagggatccggtggtggcggcggcggcggttgaggcggaaaccgaggataccggtcgctgaagcagcttgtcgaggggattttaccttttggcggcgttgacgctcgaggtggatgcgggggcagtgcgtcgttgcagatcggcgaggcttgtcgatgcagttatggcgtcgcagatcggcgaggcttgtcgatgcagttatggcggcgcggcacgagtgacgcaaatgcagtccctggcgagctacaccatttgtctttaaaatactctgcaaaaggcgaggagaggcgcccggcgaagcgttcctcctcgcaggcggaggcgagggaccagggtggaggatgcgcgtaggggagggatgcggaggaggcacggcgatgcggcggggaggcgcctgacgcgcactcgcggcgatgcagaggaggcgcgtcgatcgcgcgcggctccgaccggcagatgacggcgatgcggaggaggcggagggcggagaccggatcggcgcggaggggaggcgcggcgatgcggaggaggcggagggcggagaaggcgcggaggggagacgcggcgatgcggaggaggcggagggcggagacggcgcggaggggaggcgcggcgccgtgacggggaggcgcggcgatttctgcggaggaggcgcggcgattgcggcgatcgagagaaagaaagggcggggggtgtgggaggggatgaggaggaggcgcggcgtgggtgagggaggggatgaggagcgcgcgatgattgcggcgagctgcgaacgcgaaaaacatagggggggtgtgggcgcatctg

SEQ ID NO: 16408 - DNA, 894 bp, Oryza sativa
  Clone ID: PAT_MRT4530_2215C.1
atgggcagcggcggcgaaggaggtggtggagcagcgagcgtacgggatcagccgccgcatgacttcgccaacgtcgcgtccttctccgagttgccgttcctgcggccggctccggcgcccagggagagccccaacaactccgccatccgcctcttcggcatcgacgtcccgcacgcgtcgtcgtcgcctgacggcaaagcctccaaggaatccgtcgtcgtctccaccgccgccgccgcggcgtccacgcatggcgctgccgctgccgccattgccgcggccgccgacagcagccgcaagttcgagtgccactactgctgcaggcacttcccgacgtcgcaggcgctcgggggccaccagaacgcgcacaagcgggagcggcagcacgcgaagcgggtgcagatgcagaccgcgatggccgctgccgccgcggcggccagcggcgcgcaccaccaccaccaccaccaccagctgctcggctacccgcagcatcatcaccgcttcggcttggcaggccccacggtggcggcattgtatcaacacccgtcgtggccgacgatgagcggcggcggcggcggtatctcctcaattggccctcagttctatagcgggatcggatcggtcacccagccgatcaacgggagcccgctgccggcggggctctggaggccgggcccgatggcggcgccgccgctgctggccggagagcggcggccggtcgcggtgtcgacgtcgtccgtgttccgaggagacgagccaagagcttcagcttctcttgtggcgtcccagacagcttcttcctctttgctgctgtctccgcaaggtcagttcgcttgtgagcagccgccggcgaccaccgcagctgagggcgtgagcttagatttgcacctataa

SEQ ID NO: 16409 - DNA, 219 bp, Oryza sativa
  Clone ID: PAT_MRT4530_22160C.1
gacatcaaacttttcatttcatttcatgacgaacactgggtacctttggacaattttgtatccagtttgttgaagaaatggacaaaaagcactaggacaagcaaaatattttttttttgtttcgaaccttattgctcaagagttagaatagtagcacattgcagtggcatctacagcatactccagcttttgccctaaattcctaatttgcacaatcta

SEQ ID NO: 16410 - DNA, 567 bp, Oryza sativa
  Clone ID: PAT_MRT4530_22161C.1
atggcgaagcaggagaagaggaaaacggattgggatttgggggagaatggattcaggtcgcccgagcaggctgggaagtgggaatggtgcaaactaggtccctcagcagttttaaatccgattttgtccgacatgacggctgagtcagcgagggacccacgtgggccctacatgtcaggatgccacgtcggcagaccagcctccccctccaccggcgccgtcgacgagccatgccgctgcggaaacgcccaccgcctccggccaaggctccagaagccccatcagaaaccaagcccaagatctcgtagcccactagacccagcgccgcggcggtggcgccgcctccgccgatggttctcccggacagtgtcctcgccgccatatgaagttccggatcaagaccggatgctgatgagcaccctcaccaagcacctacgaggcctcacctccaagggtgtcctcaaggtggtcaacagagtccacaagcgtgccgagaagatctacatggacgcccgcatcgacccgtcgccggagatcactagggaacctgggattaccctagcctag

SEQ ID NO: 16411 - DNA, 552 bp, Oryza sativa
  Clone ID: PAT_MRT4530_22162C.1
atgacggttagcatggatggtgcaccatatctgaggacggtggacctcaaaacttacaagaactacaaggacatgtctttgggtctcgagaaaatgttcattggcttcagcaccggtgaggatttaccctattgggaaatcttggatgtccgccatgcaatcgacgtgatgcacctcactaagaacctttgcgtaaacctactgggcttcctaggtgtatatgggaagtcaaaagatacactggaagcacataatctgaagcatatggaacaacgcggcgaccttcacccggaaccaaaggagaaaggaagccattacttgagtccagccaactacactcttagcaaggcagagaaggaaagtatgtttgaatgcttagagagcatcaagatcggtattttcaggcctgtgtacctacacaacatgtttcctttcgagaggtacatgggcgttctaaagaagtatgttcatatccgtgctcgtccggaggcaagcatcgccaagaggtttggaacagaggaggtcattgaattatgtgtagaatttatttaa

SEQ ID NO: 16412 - DNA, 1752 bp, Oryza sativa
  Clone ID: PAT_MRT4530_22163C.1
atggagaggagtgacaaaaacactggcgctgccatccgtcaagaccatcacttcgagagacgtattgccgttgctttaagcgacattcatggtgctgaattcaacagctccagcctccatgatgtcgcgcttcgattccgtttgcttcggcagcatgggctatgggtttctccagatgagttcaacaagtttaaaggcccagatgggagattcaacgctgaagtaatagatgatcccatgggcatgttgagcttatacaatgcagctcacctattaattcatggcgaggtggaattggaagacgctattttgctctcaaggcatcaactcgaaacaataatagcaagaaatctcaagtcgtcaccattatctcaacaagtaacacgggcccttcgaatacctttaccacggaccttgaagaggatagaggcgcttaattatatagcagaatacaatcaagagcaagcatgcaatccctctgtgctccaacttgcaaggctggattttaaccttctgcaacttcttcacttgagggagctcaaggaattttctcggattaatagaatactcataccaacaagttacaactacttttccggaagccgatctccaaagaactttggtgttaagcgtgcttggcctgaagcaattttaagatgggtaaccgatcaggaagttcttctcaggtggggaaataatctatacggtgcagtggaactaacctactctcgagatcgtatagttgaatgctacttttggtcctatacaatttactacgaacagaaatatgcgcaagcacgaatcatccttgccaagatattcgtgctagcaaccttactagatgacacttatgatatgcatgctatattggaagagggccaaaagctcaatgaagcaatacagagatgggatgagagtgccatttctgttttgccggagtacttgaagaattactatgccaagctaatgagtaccttcaaagagattgaggatgaactgaaatcagaggagaagtactacattacttatgctgtaaaagcgtatcaaaggttatgcaagtcttacctccaggaagctgtatggtttcatcagaattacataccaagctttcaagaacatttggatgtgtccatcatctcctcgggctcttcaatgctatctgttgtgtcatttgttagtgccggtgatttagcaacaaaagaagcccttgaatgggcctttggttgcaccgatgctgtcaaggcttgtggcgaaattggacgcttccaggatgacttggctgcattcaagcacgggaagggcaaactagatatggccacctctgttgagtcctacatgaaggagcacaatgtcactggtgaggaagccacggctgtgataagtaatctggtcgaagacgcatggaaaactatcaatcaagcacgctttgagcgttcctcgcttgtgccggctgtgaaccgagtcgccaacttagcgatgagcataatgttcttctaccaaggcagcgaagacgcctacaccttcaacaagctcagcatgaatatcatcaagcagctgttcgtcaagcctatccccataatctagatattatactacactccatgtgccagcagtgaattcctatagtaaacatgagatgcctagatgatctggtcatcatgcaacgtcttaattctttgtgagtgttgaaataattgtgtgcacgcatataattaggtgtttgtgtcctcgcaaaaaaaaaaaaaaaaaaaa

SEQ ID NO: 16413 - DNA, 5607 bp, Oryza sativa
  Clone ID: PAT_MRT4530_22164C.1
atggcggagaaatactcctggactattcatttccacttgtttgagtcggggttcatgccaagctataattgttggacatcccacggagagcaaggtgttgaaatggaagaagatgaagtggaagacgacaatattccggactttgctcagtatgttggatttgaaggaaatcaaacgggcgaggaggaaatagctgctgatggtaacgacgttgcggatgatcttggtcagatgttgcaggacgccagggaggactgcgaaagtgaaaaggaggcccataaattggacaagatgttggaggaccacagaacttcgttgtacccaggttgcgtgcaggggcacaaaaagttggataccactctggagttattgcaatggaaggcaaaaaatggggttagtgacaaggcatttggcgatttgttgaaactcgtcaagaacattcttccggggggaaacaaattgcccgagacaacgtacgaggctaagaagataatctgcccattaggactggaagttcataagattcacgcatgtccgaacgattgtatcctatatcgcggtgaggagtatgagaacctagaagcatgccctgtttgcaaagcactacgatacaagattagacgggacgatccaggagaagttgacgggcagctaacaaagaagagaattcctgctaaggtgatgtggtatttccctataataccacggctaaggcgtttgttcaggaacaaggggaatgctagaatgttgcgatggcacgttgaagagcgtcaacaggacgggatgctgagacaccccgcctatggttcgcagtggcgaaacatcgacagaaaatttaaagaatttggaaaggacgcacgaaacatacggtttggtttgagtacggatggcatgaatccttttggagagatgagcagcggccatagcacttggcccgttacgatgtgtatctacaacctccccccctggctatgcatgaagaggaagtacataatgatgccgattattattcaaggccccaagcaacctggtaacgacatcgacgtgtacctaagaccactggtcgaagatcttaaacagttgtggaagaaggaaggtgtccccgtgtgggacgaggacaaacaggaggagtttaacctacgagcgctgctgttcgtaaccatcaacgattggcctgcacttagcaacctatccggacagtccaacaaggggtacaaggcttgcactcactgtatggatgaaacagaaagtacgtatcttaagcactgtaggaaggttgtatacatgggtcatcgtcgattccttgcagcaaaccacccggtacggaagaaaggcaagcacttcgaacataaggccgaccaccgtacgaagcctaaacatcacagcgggaaaacagtgtttgctatggttaaagatcttaaagtagtgttcggaaaggggcctagaagccagcatatagagagcgaagatggtcacgcggcgatgtggaaaaagaactctatattttgggagttaccatattgggaattcttggacgtacgccacgcaatcgacgtgatgcacctcactaagaacctttgcgtaaaccttcttggcttcctaggtgtatacggaaagtcgaaagatacactggaagcacgtaatgatctgaagcatatggaacaacgcggcgaccttcaaccggaaccaaaggagaaaggaagccattacttgagtccagccagctacactcttagcaaggcagagaaggaaagtatgtttgaatgcttggagagcataaaggtaccgtctggatactccacgaatatcaagcgaataataagcacgaaggagaagaagttcacaaacctaaagtctcatgactgtcacgtgttgatgacacaactgctaccagttgtaataaagggtatccttccagacaatgtccgggcaacaataacaaagctatgtgcattcatgaacgcaatttcgcagaaggtcatcgatccggatagattagaagcccttcagaatgaagtggtgcaatgtctcgtcagttttgagttgatatttccaccttcatttttcaatataatgacgcatctgctttgtcaccttgtgaaagagatccgtattctcgggcctatgtacctacacaacatgtttcctttcgagaggtacatgggcgttctgaagaagtatgttcgtaaccgtgctcgtccagaggcaagcatcgccaagggttatggaacagaggaggtcatcgaattttgcgtagaatttatcgaagaccttcgcccaatcggggtacctgaatcacgccatgaagggagactacggggaaagggaactctcggaaggaaagcaataacgacggtagacaacaatttattccgtaaagcccatttcactgttctgcaacactcttcattggtagctccttacatcgaggagcacttggctctagttcgcgccaggaacatcggtaagtccgatgcatggattacacggcatcacattgatactttccccgcgtggctacgacaacatctcatgggtaacgagtcgatcaaccaacaacttgccttcctggcgaggggaccgtctgggtcgatcgcgacattccagggatatgagatcaatgggtacacattctacacgagagcccaagacatgaagagcacgaaccaaaacagcgctgttcgtgtcgatgccatgggacacgatggaacaactgccacgtattgcggtgccatcgaggacatatgggaacttgactatggtcctctcaaggttcctctgttccggtgccaatgggttaggttgactggtggaggcgtaatgattgatgacagtgggatgacaactgttgaccttaacaaggttggatactcggacgaaccttttatccttgccaatgatgtaacgcaagtctttttcgtgaaggacatgtctagcaaaggaaagaagggcagagggcctgatgagcctaagcgtcaagtggttctcccaggcaaaagaaaaatcgtcggagttgaggacaagactgacgaggattacgatcagttgactattatggctgaccgcgatgaggaacagatattgtacgatacaatcgcggagggaagcagccagtactggaatgaagaagaggggaacgaggatccaaaccagtacttgaaagaggaagggaacgtggagagggatgcggaggggaaccagcaggggcacgtggaaagggatgtggaggggaaccaggaggaggaggctagtggtagtcaaccctccgttggacagaagagggcacgcgggcaacgaggtgcagcgaagaagcttgagggtcggcacatcataacggaagtggaagaagatggacgtcctagtgccccggccgaagccaccaagaactatgtacgtcacagcggttgggttgtgcgggataacgtgcctgtcagtactgtgtactggcgaagaacaagggcacgcggagatcatgagagctttgtcccagattcggagaaagagatgctgtggaccacaatgctcgagacattcacccttcctgcgggtacagaggacaaagtgaaaaggtggactctgaagaaaatggcagaacagtttcagagcttcaagggagatctgtaccagaagtatatactgaaggggcagacaccgaacttcgacacattcccaaagctaagggatcactgggacgagttcgttgcatataagacaggtgaacaagggcaggtgatgatggaaagaaacaaagaaaatgccgccaagaagaagtaccatcaccacttggggtcaggaggctatagcgtcgcgatgccgaagtgggagcagatggaggctagcttgattgagaggggtatcgaaccggcaacagccaattggccggaacgatcgaagttctggtactatgctcacggtggaactctcaacccagctgatggctcactgggcacgttccgaccagacagagatagggacgagctgacactcgccctgcagactccagagcatccaggacgaactcgagggaaaggggtgattccttggaagattggtttcaaggaggacatccacacgtacaggagtcggatgaggagcaagagagataccgaggcgaagattgcagacctagagttccgggtatcgagctacgaactcaacatgcaagaggaggtggcaaggaaggttgatgaacgcatggccgcacatcggtcccatgatccccagccgaccattcctcctgcaatggtgagcccgtcaggaaaccgtagcagctgcgcctcaacggggcaggtggcgtcgggcatagccatcccaacggacccttcaggtacttaccactgcaggccgattccagcaggatactcgaaggtcaaagttgagttggtcgaaggcgcgtacgaggacctcgagctggattaccctggaggagacggcggtacatcatcctccctgggcgacaagcggcgtctcgtgcaccatctcctccggctccgccatctcctcctcaggatcctgcaccgtctcctcctcatgctccgccagcaccgtctccacctcaggctccagcatcgactcctcctcaggatcctgcaccgactcctcctcgtgctcctacacctactcccccgcaagctcctcttccagcaccttaagtcaagggccccccagctccaccgcctacccacacaagggcaacgaagaaggcgaaagttgacgccgccaagaacaaggacccgggaagtcaagagacaattcaagcctcgaagtccagaaaagaagattcctatagaccctagtgtcaggaacttcttcaggggtatgtctgcatctgtcaaggaggccatcaagctatcggactatgagcgaacgctgaagaaagcatcttctggaaagtccaaaccagtccctcagcttggagagcaaccaaaccaggagatcaagccgttggtgaccggtccttgtataatggagattcaaagggcccgacggcggagggttttcgatactggattcatcgaccctcgtaaagtaaacgtcgcaatgctcgaccaatatccacaagaaacagaggacaatctcgtccatctcctgaaggcgcagcattacaagacgttcatactgttgccatacaacacagaattccactgggtgcttttactcatcgacctggaggcctgcaccgtcaacgtatatgactcaatggataaaaaagagtctacgtttgacaaggttttcgaacttatagacagggcttggtatcggttccgtcatttggtccgcggcaaatggagagaaagacttaggcggaagttcaaatttccttgcacaaagcaaaagcagggaactaacttgtgcggctattacgtgtgcgagtattgccactgccttgcagaccaaatcatcaccacaagagagctcgattttattcgcatgagggataacctgaccacacacaaggaatttatcgcggcggttcaagaacaactcatgggattcatcaacgaagaaatccttgatcccaagggtgaattctactacgacggaaacacaattcaccggtccttagcttctgagctagcagcgagtactactacgtcgaaatcgtag

SEQ ID NO: 16414 - DNA, 5228 bp, Oryza sativa
  Clone ID: PAT_MRT4530_22165C.1
aacagcgggtggaggtgcacgaaccgccgatggattggcaatggatgtacgctgaccggcggtccaaagagtttattgacgacgtgcattatttttgagagtgaccgaagctaacaggcataaggcttttatttgttgtccatgcaataagtgtaagaatcagaaggactattctgcatccaggactattcatttccacttgtttgagttggggttcatgccaagctataattgttggacatcccacggagagcaaggtgttgaaatgcaagaagatgaagtggaagacgacaatattccggactttgctcagtacgttggatttaaaggaaatcaaacgggcgaggaggaaagggatgctgatggtaacgacgttgcggatgatcttggtcagatgttgcaggacgccaaggaggactgcgaaagtgaaaaaggggcccataaattggacaagatgttagaggaccacagaacgtcgttgtacccaggttgcgagcaggggcacaaaaagttggataccactctggagttcttgcaatggaaggcaaaaaatggtgttagtgacaaggcatttggcgatttattgaaactcgtcaagaacattcttccggagggaaacaaattgcccaagacaacgtacaaggctaagaagatagtctgccctctaggactggaagttcagaagattcacgcatgtccgaatgattgtatcctatatcgcggtgaggagtacgagaacctagaagcataccctgtttgcaaagcactacgatacaagattagacgagacgatccaggagaagttgacgggcagctaataaagaagagaattcctgctaaggtgatgtggtatttccctataataccacggctaaggcatttgttcaggaacaaggggaatgctagaatgatgtgatggcacgctgaagagcgtcaacaggacgggatgctgagacaccccgccgatggttcgcagtggcgaaacatcgacaggaaatttaaagactttggaaaggacgcacgaaacatacggtttggtttaagtacggatggcatgaatccttttggagagatgagcagcggccatagcacttggcccgttacgatgtgtatctacaacctcccccctggctatgcatgaagaggaagtacataatgatgtcgattattattcaaggccccaagcaacctggtaacgacattgatgtatacctaagaccactggtcgaagatcttaaactgttgtggaaaaaggaaggtgtccccgtgtgggacgaggacaaacaggaggagtttaacctacgagcgctgctgtttgtaaccatcaacgattggcctgcacttagcaacctttccggtcagtccaacaagaggtacaaggcttgcactcactgtatggatgaaacagaaagtgtatatggaaagtcgaaagatacagtggaagcacgtaatgatctgaagcatatggaacaacgcggcgaccttcacctggaaccaaaggagaaaggaagccattacttgagtctagccagctacactcttagcaaggcagagaaggaaagtatgtttgaatgcttggagagcataaaggaaagtatctgataatccacgaatatcaagcgaataataagcacgaaggagaagaagttcacaaacctaaagtctcatgactgtcacgttttgatgacacaactgctaccagttataataaggggtatccttccagacaatgtccgggcaacaataacaaagctatgtgcattcatgaacgcaatttcgcagaaggtcatcgatccggatagattagaagcccttcagaatgatgtgaggtacatgggcgttctgaagaagtatgttcgtaaccgtgctcgtccagaggcaagcatcgccaaggggtgtggaacagaggaggtcatcgaattttgcatagaatttattgaagaccttcgcccaattggggtacctgaatcatgccatgaagggagactacatctcatgggtaacgagacgaacaaccaacaactggccttcctggcaaggggacaatctgggtcgatcacgacattccagggatatgagatcaatgggtacacattctacacgagagcccaagacatgaagagcacgaaccaaaacagcgttgttcatatcgatgacatgggtcacgatggaacaactggcacgtattacagtgccatcgaggacatatgggaacttgactatggtcctctcaaggtccctctattccggtgccaatgggttaggttgactggtggaggcgtaatgattgatgacagtgggatgacaacggttgaccttaacaaggttggatactcggacgaaccttttgtccttgccaatgatgtaacgcaagtcttttacgtgaaggacatgtctagcataggaaagaagggcagaggacctgacgagccgaagcgtcacgtggttctcccaggcaaaagaaaaatcgtcggagttgaggacaagactgacgaggattacgattagttggatgggcaaccccctttcacggtgacgattgaccctagcatcctcctatcaaatgaagacaccccttactcacgtagcgatcacaaggagggaacaatatacttgaacaaggaagggaacgtggagagggatgcggaggggaaccaggaggggaacgtggtgaaggatgtggaggggaaccaggaagaggaggctagtggaaatcaaccctccgctggacagaagagggcacgcgggcaacaaggtgccgcgaagaagctagagggtcggcacatcataacggaagtggacgaagacggctgacctagtgccccggcggaagcagccaagaactacgtacgacacagcggttgggttgtgtgggataacgtgcctgtcagtacggtgtactggcgcagaacaagggcacgcggagatcatgagagctttgtcccagattcggagaaagagatgctgtggaccacaatgctcgagacattcacccttcccgcgggtacagaggacaaagtgaaaaggtggactctaaagaaaatggcagaacagtttctgagcttcaagggagatctgtaccagaaatatatcctgaaggggcagacaccgaactttgacacattcccaaagctaagggatcactgggacgagttcgttgcatataagacatgtcaacaagggcaggtgatgatggaaagaaacaaagaaaatgccgccaagaagaagtaccatcaccacttggggtcaggcagctatagcgtcgcgatgccgaagtgggaggagatggaggcaagcttgcttgagaggggtatcgaaccggccaccgctaaatggctggatcgatcgaagttctggtactatgctcacggtggaacgctcaacccagttgatggctccctggtcttcagcgatcagatacgcgaggctacgcatcgactaacagacgcagtggaagcctcttctcagggcacgttccgacccgacagagagaaggacgagctgagtcggatgaggagcaagagagataccagggcgaagattgcagatcttgagtacagggtaccgaactacgagctcagcatgtaagaggaggtggcaaggaaggttgatgaacgcatggccgcacatcgatcccatgatccccagccgaccattcctcctgcaatagtgagcccttcaggaaatcgtaacagctgcacctcaacggggcaggtggcgtcaggcatggccatcccaacgaacccttcaggtacttaccactgcaggccgattccagcaggatactccaaggtcgaagttgagttggtcgaaggcgcgtacgaggacctcgagttggattaccctggaggagacggtgagacgcatctacgagacacaagccacgccattatactatggcgcaagcgggacatcatcctccctgggcgacaagctgtgtctcgtgcaccatctcctccggctccgccacctcaggctcctgcaccgactcctcctcaggctcctataccgactcctccgcaagctccttatccagcacctttcaagtcaagggccccccaagctccaccgcctgcccccacaagggcaacgaagaaggcaaaaattgacgccgccaagaacaaggacccggggtacgattgcacgcaagaggagcttgacgcttatgtggcatcaaaagtcaggagacaattgaagcctcgaagtccaaaaaagaagattcctatagacccgagtgtcaggaacttcttcaggggtatgtctgcacctgccaaggaggccataaagctatcggactatgagcgaacactcaagaaagcatcttctgaaaagtccaaaccagtccctcagcttggagagcaaccaaaccaggagatcgagccgttggtgaccggtgaagattttggaatagaagaatttattactgacaccgggctaactacagatcaattactacgaggcgcaccaatcgaaaagacgaaagtgaaatacatgtacgaactcagtaaaccgcttgtcaagcctgagcagctgcagtccctacccacacaaatgtacaagttccatcaactgtacatggagatgagcgccaccggtagagagatgatcggagcgaggatcagggacacggacttcttgcaaggagatgacattctctggatcaatttcaagggtatctacgaactataccagctagacgctctcgacatctctattatgagttgctggattttaatggagattcaaagggcccgacggcgggggttttcgatactggattcatcgaccctcagaaagtaaacgtcgcaatgctcgaccagtatccacaagccacagaggacaatctcgtccatctcctgaaggcgcagcattacaagacgtttatactattgctgtacaacacaaacgtcaacgtatatgactcaatggataaaaaagaatctacgtttgacaaggttttcgaacttatagacagggctttgtatcggttccgtcatttggtccgcggcaaatggagagaaagacttacgcggaagttcaattttccttttattcgcatgagagataacctgatcacacacaaggaatttattgcggcggttcaagaacaactcatgggattcatcaacgaacaaatccttgatcccaagggtgaattctactacgacggaaatacaattcatatgtccttagcttctgagataacgactactactacgtcgaaatcg

SEQ ID NO: 16415 - DNA, 324 bp, Oryza sativa
  Clone ID: PAT_MRT4530_22166C.1
atggcagttaatgatcggttcacgggaaaccctgggagacttaccgtgcttaccacaagcgggagtggctgttttactgctttcaactactgctttgaaatgcctgctttatgcaaaagaacccctagcttcctttggttatatcctgcatcatacctcctcttccgcttagaaattctggttcgagaatttctgggtgtgacagccatcgctgccgagtcggtgcctatggcgcttgcgcgctacatgtgtgaggacggatccgagtttgttgaagctgagctgctgactgaacaaggcaagtcactacgctcccctccttga

SEQ ID NO: 16416 - DNA, 3237 bp, Oryza sativa
  Clone ID: PAT_MRT4530_22167C.1
atggatcggcaatggatgtacgctgatcggcggtccaaagagtttattgacggcgtgcactattttttgagagtggccgaagctaacaggcaaaggggttttatttgttgtccatgcaataagtgtaagaatcagaaggagtattctgcatccaggactattcatttccacttgtttgagtcggggttcatgccaagctataattgttggacatcccacggagagcaaggtgttgaaatggaagaagatgaagtggaagacgacaatattccggactttgctcagtatgttggatttgaaggaaatcaaacgggcgaggaggaaatagctgctgatggtaacgacgttgcggatgatcttggtcagatgttgcaggatgccagggaagactgcgaaagtgaaaaggaggcccataaattggacaagatgttggaggaccacagaacttcgttgtacccaggttgcgagcaggggcacaaaaagttggataccactctggagttgttgcaatggaaggcaaaaaatggggttagtgacaaggcatttggcgatttattgaaactcgtcaagaacattcttccggggggaaacaaattgcccgagacaacgtacgaggctaagaagatagtctgcccgttaggactggaagttcataagattcacgcatgtccgaacgattgtatcctatatcgcggtgaggagtatgagaacctagaagcatgccctgtttgcaaagcactacgatacaagattagacgggacgatccaggagaagttgacgggcagctaacaaagaagagaattcctgctaaggtgatgtggtattttcctataataccacggctaaggcgtttgttcaggaacaaggggaatgctagaatgttgcgatggcacgctgaagagcgtcaacaggacgggatgctgagacaccccgccgatggttcgcagtggcgaaacatcgacagaaaatttaaagaatttggaaaggacgcacgaaacatacggtttggtttgagtacggatggcatgaatccttttggagagatgagcagcggccatagcacttggcccgttatgatgtgtatctacaacctccccccctggctatgcatgaagaggaagtacataatgatgccgattattattcaaggccccaagcaaccttgtaacgacatcgacgtgtacctaagaccactggtcgaagatcttaaacagttgtggaagaaggaaggtgtccccgtgtgggacgaggacaaacaggaggagtttaacctacgagcgctgctgttcgtaaccatcaacgattggcctgcacttagcaacctatccggacagtccaacaaggggtacaaggcttgcactcactgtatggatgaaacagaaagtacgtatcttaagcattgtaggaaggttgtatacatgggtcatcgtcgattccttgcagcaaaccacccggtacggaagaaaggcaagcacttcgaacataaggccgaccaccgtacgaatcctaaacatcgcagcgggaaaacagtgtttgctatggttaaagatcttaaagtagtgttcggaaaggggcctggaagccagcatatagagagcgaagatggtcacgcggcgatgtggaaaaagaactctatattttgggagttaccatattgggaattcttggacgtacgccacgcaatcgacgtgatgcacctcactaagaacctttgcgtaaaccttcttggcttcctaggtgtatacggaaagtcgaaagatacactggaagcacgtaatgatctgaagcatatggaacaacgcggcgaccttcacccggaaccaaaggagaaaggaagccattacttgagtccagccagctacactcttagcaaggcagagaaggaaagtatgtttgaatgcttggagagcataaaggtaccgtctggatactccacgaatatcaagcgaataataagcacgaaggagaagaagttcataaacctaaagtctcatgactgtcacgtgttgatgacacaactgctaccagttgtaataaggggtatccttccagacaatgtcgatactggattcatcgaccctcggaaagtaaacgtcgcaatgctcgaccaatatccacaagaaacagaggacaatctcgtccatctcctgaaggcgcagcattacaagacgttcatactgttgccatacaacacagaattccactgggtgcttttactcatcgacctggaggcctgcaccgtcaacgtatatgactcaatggataaaaaagagtctacgtttgacaaggttttcgaacttgtagacagggcttggtatcggttccgtcatttggtccgcggcaaatggagagaaagacttaggcggaagttcaaatttccttgcgcaaagcaaaagcagggaactaacttgtgcggctattacgtgtgcgagtattgccactgccttacagaccaaatcatcaccacaagagagctcgattttattcgcatgagggataacctgaccacacacaaggaatttatcgcggcggttcaagaacaactcatgggattcatcaacgaagaaatccttgatcccaagggtgaattctactacgacggaaacacaattcaccggaaaagaaaaaaagtataccaccacccacacaccggcaacgccaacacacaggtccaggagaaggctagcaccgaaccggccgccgctaagcatgaccgaccgccgctaggccaacaacaaaacacagccgagatcgcccaaaacccaacccttacaatcaacacaaaccccgctctatccaagtcttcagaagaggggaatgacgcgtcgaacgtcatcgttgccggcctggtcgagactgggctgggttttcacccgccaatcaccacctgcgagtccacagctggcgctccgatgctccaccaccatcaaacttctgctggcacgtggaaccactgcatcagcgccccctgccggccagccttcgtgcgtcgtagaccgcaccgcacccaccggcagctcctccttgtcgcaccgtgcccgcctcctccaccaccagcagcacctcgccgtgtcgtaacaggcctacggcaccgccggccacgcctcaccgtgctaagccgacctccaccgccactggtcgcgccacctcgcgccgtgccggcctccgctacccccggcctccatagccgcggacgccacaagttgaccgttgtctgccactaccgccgtcactag

SEQ ID NO: 16417 - DNA, 876 bp, Oryza sativa
  Clone ID: PAT_MRT4530_22168C.1
atgccggccgcctcccccgccaccggcaccatctctctctggcacggcgcagcgacgacggggtgcgccggagacagcggcgacggttgtccctcccactccccctctccctctccccgtcggcctcgacggcgatggcgccctctcaacggcggcgtcgatagcgacgacggcgtcggcttcgtccgcggtgacccagacgtcaaggccgaccacaccctcgcctcctacggaagcgaagctaagtcactgcggtcgtcaccaatggcattcaaccgatttttcttgcaaaaagggataagaggtaagagtgttggcaccaatgtcattagcgtcaagacatttgtcagcgccaatgaccctaacgctgagaaaaggagcgacgaggcggcgacggtgccggagcggaggagggcgacgttgcggcggccgggggaggcggcggcggcagcggcagtgctggagcggaggagggcggcgttgcggcggtcggggaggaggtggcggcggcggcggcggagcatgtcgttggagctgaagttgcaggacttcgggttcaccttctccgaggacgacgtggacgccgagctcgtctccatcgtgagtgggcttcggcggcagcgctcggatgaggacgacgccagaaaggccccggccttcgcggtggcttccgccgaggaggaagcagccggtcgccggatcggctttgctccgaccggcgcctcctcgtcctcctcaacgctgaggaggccgcacctgtcggaggtgtgggacgaggaggaggaagagatgtttctcagtactgtggatgttgcatttgatttctttggatgtttcacatattgtgtttttgttgttgcaggcagtgttctttga

SEQ ID NO: 16418 - DNA, 5385 bp, Oryza sativa
  unsure (1)..(5385): unsure at all n locations
  Clone ID: PAT_MRT4530_22169C.1
atggctgaccgcgatgaggaacagatattgtacgatacaatcgcggagggaagcagccagtactggaatgaagaagaggggaacgaggatccaaaccagtacttgaacgaggaagggaacgtggagagggatgcggaggggaaccagcaggggcacgtggaaagggatgtggaggggaaccaggaggaggaggctagtggtagtcaaccctccgttggacagaagagggcacgcgggcaacgaggtgcagcgaagaagcttgagggtcggcacatcataacggaagtggaagaagatggacgtcctantgccccggccgaagccgccaagaactatgtacgtcacagcggttggattgtgcgggataacgtgcctgtcagtacggtgtactggcgaagaacaagggcacgtggagatcatgagagctttgtcccagattcggagaaagtgatgctgtggaccacaatgctcgagacattcacccttcctgtgggtacagaggacaaagtgaaaaggtggactctgaagaaaatggcagaacagtttcagagcttcaagggagatctgtaccagaagtatatactgaaggggcagacaccgaacttcgacacattcccaaagctaagggatcactgggacgagttcattgcatataagacaggtgaacaagggcaggcgatgatggaaagaaacaaagaaaatgccgccaagaagaagtaccatcaccacttggggtcaggaggctatagcgtcgcgatgccgaagtgggagcagatggaggctagcttgattgagaggggtatcgaaccggcaacagccaattggccggaacgatcgaagttctggtactatgctcacggtggaacgctcaacccagctgatggctcactggtcttcggctatcagatacaagaggctgcgcgacgactaacagatgcagtggaagcctcctctcagggcacgttccgaccagacagagatagggacgagctgacactcgccctgcagactccagagcatccaggacgaactcgagagaaaggggtgattccttggaagattggtttcaaggaggacatccacacgtacaggagtcggatgaggagcaagagagataccgaggcgaagattgcagacctagagttccgggtatcgagctacgaactcaacatgcaagaggaggtggcaaggaaggttgatgaacgcatggccgcacatcggtcccatgatccccagccgaccattcctcctgcaatggtgagcctgtcaggaaaccgtagcagctgcgcctcaacggggcaggtaggatcacatagcatggacgccatgcaaacacaggacgaatcgacctgtcccgttgatgacatcactcagcggacaccatgtgagctgcatattcctttgaagaacttatcaataaaggtggcgtcgggcatggccatcccaacggacccttcaggtacttaccactgcaggccgattccagcaggatactccaaggtcgaagttgagttggtcgaaggcgcgtacgaggacctcgagctggattaccctggaggagacggtgagacgcatctacgagacacatgccatgccattattctatggcgcaggcggtacatcatcctccctgggcgacaagcggcgtctcgtgcaccatctcctccggctccgccatctcctcctcaggatcctgcaccgtctcctcctcatgctccgccagcaccgtctccacctcaggctccagcatcgactcctcaggatcctgcaccgactcctcctcgtgcccctacacctactcccccgcaagctcctcttccggcaccttcaaagtcaagggcccccccagctccaccgcttgcccacacaagggcaacaaagaaggcgaaagttgacgccgccaagaacaaggacccggggtacgattgcacgcaagaggagcttgacgcttacgttgcatcagaagtcaagagacaattcaagcctcgaagtccagaaaagaagattcctatagaccccagtgtcaggaacttcttcaggggtatgtctgcatctgtcaaggaggccatcaagctatcggactatgagcgaacgctgaagaaagcatcttctggaaagtccaaaccagtccctcagcttggagagcaaccaaaccaggagatcgagccgttggtgaccggtaaagaaatgacgatagaacaatttattactgacaccggtctaactacggatcaattgctaggagtcgcaccaatcgaaaaggcggaagtgaaatacatgtacgaactcggtaaaccgcttgtcaagcctgagctgctgcagtccctacccacacaaatgtacaagttccatcagctgtacatggagatgagcgccaccggtagagagatgatcggagcgaggatcagggacacggacttcttgcaaggagatgacattctctggatcaatttcaggggaatctacgaactataccagctggacgccctcgacgtctctattatgagttgctggattttaatggagattcaaagggcccgatggcggagggttttcgatactggattcatcgaccctcggaaagtaaacgtcgcaatgctcgaccaatatccacaagaaacagaggacaatctcatccatctcctgaaggcgcagcattacaagacgttcatactgttgccatacaacacagaattccactgggtgcttttactcatcgacctggaggcctgcaccgtcaacgtatatgactcaatggataaaaaagagtctacgtttgacaaggttttcgaacttatagacagggcttggtatcggttccgtcatttggtccgcggcaaatggagagaaagacttaggcggaagttcaaatttccttgcgcaaagcaaaagcagggaactaacttgtgcggctattacgtgtgcgagtattgccactgccttgcagaccaaatcatcaccacaagagagctcgattttattcgcatgagggataacctgaccacacacaaggaatttatcgcggcggttcaagaacaactcatgggattcatcaacgaagaaatccttgatcccaagggtgacttcatcaatatgccgctagatgaggatcttccccctactggctcacagcctaatcctgctgctgatgatgatgaagatcctgatggtggccacatctggcaaatgggtcatccccaagtaggtccgggtgattgggatgatttagtccaacagcaagatgcagcaaatgggaaggtagaagatgcttggggccaagatcaccctatgggccagatcatggaagcaaaccctgatggacaaattgatttggctgctgctaaccctggacatgaaaatgtagtggtcccctttgttcctgctgcagacaaggggaaaaaggcccatgaagacatggaaattcttgaagtcttgcctttggcggttcacccaccctccagtccagtctgccaaacagctgctcctttgatgcttccaaaagccctagttaagaaaagggatggcaaaactcttttatataatccatacaggaggcagagtgcaagacttcagcatatcaaaggggattctgaactaaaggtagatcctagaatgggcattggtaagccaagaggaaagtttgcaagaaaactcaaagaattggcaggaatgaatgctgaatccaagttgctctctttgaggcagaaaattgaggatagtggttgtcaggtagtttggtctttagatcctggtttcaatgatcctgccaagtgcatttctttcaaattgaaagtgcttaggaaaaagctccttgcttggagtaagaatctgtctaagttgatgggattgctaaaaaactgcaacaaagtggtggactttctggatttagtcgaagaaaacagaatgctctcaatctatgagtggaattttagagaaacagttaaggaaatagatagtctcatgtccattattccagctgacaaagcaccagggccggatggtttcaatggctttttcatgaaaaagtgttggcatattatagctcaggactattatagactggtagctcattttcatgctggaaatgttgatttggaaatccttaatagctcttttataaccctggttccaaagaaaacttccctagagactgttaatgatttcagacccatttcccttatgggtataagtctaaaaatcgtaactaaattgctagctggcagacttcaaggggtaattcttaaactggtgagtgataatcattatggtttcatcaaaggaaaaaccatacaggattgtcctgcctggccttttgaatatattcaccagtgtcagcaatcaaaaagagaaatcgtcctcttgaagttagactttgaaaaagcctttgataccattgagcattctgcaattctttcagttatgcagcatatgggttttcctctaaaatggattgagtgggtacagatggttttctctactgcttcttctgctgtgctattgaatggggtgccagggaattctttcaaatgcagaagaggggtcagacaaggagttcctctctcacttctgctttttgtgttgggggcagagctgttgcaaagaataatcaacaaagcttttcatcaaggccttctgtcaaaaccaattaatgaaagcagtggggagggtttcccaatcatacagtatgctgatgacaccttgatcttgctaaaaacatctcagaaagaagtcttctgtttcaaggctattttgaatatgtttgctcaatccacaggcctcaagcatatggtcaagttctataatggtgctgatttaccatgggtgaaattaatctcacaatcatattatgattctaaagttccacacttgatgatgaataagggttctttttggtggagggacgtcacatctcttgtagacatattcagggggatagcaaaatgcgaaatcaggacaggaagaactgcccttttctggaatgatctatggaatgatgattttaaatgtatcagctaccccaatctctttgctgtgaccatgtataagtctgattcagtcaaggccatgtgttcaagacccttagaagattcttttgccttacccctctcagatgaggcttattctaaatttttgcagcttcaggaggttctggacagtttgaatttacaatcaaggatgggggatgcttggaattttatctggggttcagataagtacacagctaagaaattttataagctaaattattctgcattgcaaccccccaggcccatgatttggctatggaaaacaaaatgtgtcatgaagatcaaagtctttgcctggctaatgttctgtgataggctcaatacaagagatatgctggatagaagacattgtgcctaa

SEQ ID NO: 16419 - DNA, 1065 bp, Oryza sativa
  Clone ID: PAT_MRT4530_2216C.1
atgaatgattccctctgcaggaatttctctgatgaagaaatcgcagatgctttgtttcagattggtccacttaaggcgcctgggccagatggttttccggctcgcttctaccaacgaaattggggcctgatcaagagtgatgtggttagggctgtcaaggaattcttccacactgggatcatgccagatggtatcaatgcgactgcaattgtgcttattccgaagggtgatccgctttctccgttcttgtttctttttgttgctgatgggctatcactcctgctggatgaaaaggtacttcaaggggcaatcaccccggtgcaagtttgtcggcgggcgcctggaatctcccaccttctgtttgtggatgatactctactctttttcaaggctgataatggccaggctaatgtgatccgagaagtccttgacgactatgctgtaggaactagccagtttattaatccagcaaagtgctccatgctgattgatgatattactcccgctagtgtccaagttgaaatcagaagtacactccaaatcgtcggcaatggttttgaagataaatatttgggttttccaaccccggaggggagaatgaacaaaggcaagttccaaagtcttcaggagaagatttggaagagaataattatgatgaaatgggtgtccgagctcttgggacctgacggtgtgtgggacgttcagaaagttaatcgggttttccttccctgtggtgctgaagaaatactgaggattcggacttcaatgaggcaggatgaggattttttggcttggcatccggacaagatgggacgtttctctgtcaggagtgcttataaactggcaatgtctctggccaatatggatgaaagctccagctcgtcagatgacaagtccaggaagataccaagacagggcctgaaaattcatcaggattgttcagaggctctacccaggtgggagaaaccgcaggagcgatggatgaagctaaatgttgatggttcctttgactctgtaacaagcacaggaagtgtgggtgtggtgctcaggaataccagcggccag

SEQ ID NO: 16420 - DNA, 2019 bp, Oryza sativa
  Clone ID: PAT_MRT4530_22170C.1
atggagagggatgtggaggggaaccaggaggggcacatggagagggatgtggaggggaaccaggaggaggaggctagtggaagtcaaccctccgctggacagaagagggcacgcaggcaacgaggtgccgcgaagaagcttgagggtgaacaagggcaggcgatgatggaaagaaacaaagaaaatgccgccaagaagaagtaccatcaccacttggggtcaggcggctatagcgtcgcgatgccgaagtgggaggagatggaggctagcttgcttgagaggggtatcgaaccggtcaccgctaattggccggaacaatcgaagttctggtactatgctcatggtggaacgctcaacccagctgatggctccctgactccagagcatctaggacgaacacgagggaaaggggtgattccttggaagattgggttcaaggaggacatccacacgtacaggagtcggatgaggagcaagagagataccgaggcgaagattgcagatcttgagttcagggtatcgagctacgagctcggcatgcaagaggaggtggcaaggaaggttgatgaacgcatggccgcatatcagtcccatgatccccagccgaccattcctcctgcaatggtaggatcacagagcatggacgccatgcaaacccaggacgaaaccacctgccccgttgatgacatcactcagcggacaccatgtgagctgcatattcccttcaagaacttatcaataaaggtggcgtcgggcatggccatcctaacggacccttcaagtacttaccactacaggccgattccagcaggatactccaaagtcgaagttgagttggtcgaaggcgcgtacgaggacctcgagctggattaccctggaggagacggtgagacgcatctacgagacacaagccacgccattattctatggcgcaagcgggcaacaaagaaggcgaaagttgacgccgccaagaacaaggacccagggtacgattgcacgcaagaggagcttgacgcttacgtggcatcagaagtcaggagacaattgaagcctcgaagtccagaaaagaacattcctatagacccgagtgtcaagaacttcttcaggggtatgtctgcacctgccaaggaggccataaagctatcggactatgagcgaacattcaagaaagcatcttctagaaagtccaaaccagtccctcagcttggagagcaaccaaaccaggagatcgagccgttggtgaccggtgaagattttgaaatacaagactttattaatgacaccgggctaactacggatcaattgctacgagacgcaccaatcgaaaaggcggaagtgaaatacatgtacgaactcggtaaaccgcttgtcaagcctgagctgctgcagtccttacccacacaaatgtacaagttccatcagctgtacatggagatgagcgccaccggtagagagatgatcagagcgaggatcagggacacggacttcttgcaaggagatgacattctctggatcaatttcaagggaatctacgaaatataccagctggacgccctcgacgtctctattatgagttactggattttaatggagattcaaagggcccgacggcgggggttttcgatactggattcatcgaccctcgaaaaattccactgggtgcttttactcttcgacctggaggcctgcaccgtcaacgtatatgactcaatggataaaaaagagtctacgtttgacaaggttttcgaacttatagacagggcttggtatcggttccgtcatttggtccgtggcaaatggagagaaagacttaggcggaagttcaaatttccttgcgcaaagcaaaagcagggaactaacttgtgcgactactatgtgtgcgagtattgccactgccttgcacaccaaatcatcaccacaagagagctcgattttattcgcatgagggataacttgatcacacacaaggaatttatcgcggcggttcaagaacaactcatgggattcatcaacgaataa

SEQ ID NO: 16421 - DNA, 1090 bp, Oryza sativa
  Clone ID: PAT_MRT4530_22171C.1
atggagaatcaaacattgcataatttttacccacgaaggaatctaacaaatgagaacaacatgccgaggcatgttttagatcctagtgaaattgttgccgatccagcgtgtcgcaaacaaattgaagattatcctaaggagattatagatcaaatggatcggcaatggatgtacgctgacgggcggtccaaagagtttattgacggcgtgcattatttttttagagtggccgaagctaacaggcaaaagggttttatttgttgtctatgcaataagtgtaagaatcagaaggagtattctacatccaggactattcatttccacttgtttgagtcggggttcatgccaagctataattgttggacatcccatggagagcaaggtgttgaaatggaagaagatgaagtggaagacgacaatattccggactttgctcaatacgctggatttgaaggaaatcaaacaggcgaggaggaaagggatgctgatggtaacgacggactggaagttcagaagattcacgcatgtccgaatgattgtatcctatatcgcggtgaggagtacgagaacctagaagcatgccctgtttgcaaagcactacgatacaagattagacgagatgatccaggagaagttgacgggcaactaacaaagaagagaattcctgctaaggtgatgtggtatttccctataataccacggctaaggcgtttgttcaggaacaaggggaatgctagaatgatgcgatggcacgctgaagagcgtcaacaggacgggatgctgagacaccccgccgatggttcgcagtggcaaaacatcgacagaaaatttaaagactttggaaaggacgaacgaaacatacggtttggtttaagtacggatggcatgaatccttttggagagatgagcagcggccatagcacttggcccgttacgatgtgtatctacaacctccccccttggctatgcatgaagaggaagtacataatgatgccgattatttttcaaggccccaagcaacctggtaatgacatcgatgtgtacctaagaccactggtcgaagatcttaaactattgtggaagaaggaag

SEQ ID NO: 16422 - DNA, 1074 bp, Oryza sativa
  Clone ID: PAT_MRT4530_22172C.1
atggggcgttcaccatgctgtgagaagattggcctgaagaaaggtccatggacaccagaggaagaccagaagctgcttgcatacattgaggagcatggacatggcagctggcgagcattgccttcaaaagccggtttgcagaggtgcggcaagagttgcaggttgcgatggacaaactacctgagaccagacatcaagagaggaaaattcagcttacaagaagagcagaccatcatccaacttcatgctcttcttggaaacaggtggtctgccattgcaacacatctaccaaagcgcactgacaatgagatcaagaactattggaacacccacctgaaaaagaggttggccaagatgggaattgatcctgtcacccacaaagccatcaacggcactctgaacaacacggcgggagacaaatcagccaaagtcacagccagtctcagccacatggctcagtgggagagtgcccgcctcgaggccgaggcacggcttgctcgagaatccaagatgcgcatagcagcttctacaccaagcaaactccatgcacagtcaaccaacccacctgcttcaacaccttctccatgcttcgatgtgttgaatgcatggcagagtgcaaagatagacctggagtcacccacctccacactgacgttcgcagggagtaatgctagcatgctgccattctcaacaacaaccgccctagaattatccgaaagcaactccaatgtgtggcagcaaagaagcgatgaactggagggtgaagaaagtgagtggaagtttgtcagtaagcaacaactgcagggaatgcatggtaaagagacagaagaacacttcattggctgtgaggagtcatggttcccagggacagccaatatcggagcaggcttcacaggcatgctgcttgatggatccaatatgcatgatacatcagaatgctgggatgagtccagcaatggccaagatgagcaaagaagccaggtgtcagaagatgcagagaataagaactattggaatggcatcttcagtatggtgaattcagagcagccacccctgcagccacctttgctctag

SEQ ID NO: 16423 - DNA, 5481 bp, Oryza sativa
  Clone ID: PAT_MRT4530_22173C.1
atggaagaagatgaagtggaagacgacaatattccggactttgctcagtacttggatttgaaggaaatcaaacgggcgaggaggaaagggatgctgatggacgccaaggaggactgcgaaagtgaaaagggggcccataaattggacaagatgttagaggaccacagaacttcgttgtacccaggttgcgagcaggggcacaaaaagttagataccactctggagttcttgcagtgggaggcaaaaaatggggttagtgacaaggcatttggcgatttattgaaactcgtcaagaacattcttccggagggaaacaaattgcccgagacaacgtacgaggctaagaagatagtctgcccgctaggactggaagttcagaagattcacgcatgtccgaatgattgtatcttatatcgcggtgaggagtatgagaacctagaagcatgccctgtttgcaaagcactacgatacaagattatacgagacgatccaggagaagttgacgggcagctaacaaagaagagaattcctgctaaggtgatgtggtatttccctataataccacggctaaggcatttgttcaggaacaaggggaatgctagaatgatgcgatggcacgctgaagagcgtcaacaggacgggatgctgaaacaccccgccgatggccccaagcaacttggtaacgacatcgatgtgtacctaagaccactggtcgaagatcttaaactgttgtggaagaaggaaggtgtctccgtgtgggacgaggacaaacaggaggagtttaacctacgagtactgctgttcataaccatcaacgattggcctgcacttagcaacctatccggacagtccaacaaggggtacaaggcttgcactcactgtatggatgaaacagaaagtacgtatcttaagcactgtaggaaggttgtatacatgggtcatcgtcgattccttgtagcaaaccacccggtacggaagaaaggcaagcacttcgaacataaggctgaccaccgtacgaagcctaaacatcgcagcgggaaaacagtgtttgctatggttaaagatcttaaagtagtgttcggaaaggggcctggaagccagcctatagagagcaaagatggtcacgcggcgatgtggaaaaagaactctatattttgggagttaccctattgggaattcttggacgtacgcaacgcaatcgacgtgatgcacctcactaagaacctttgcgtaaaccttcttggcttcctaggtgtatacggaaagtcgaaagatacactggaaacacgtaatgatctgaagcatatggaacaacgcggcgaccttcacccggaaccaaaggagaaaggaagccattacttgagtccagccagttacactcttagcaaggcagagaaggaaagtatgtttgaatgcttggagagtataaagaaggtcatcgatccggatagattagaagcccttcagaatgatgtggtgcaatgtttcgtcagttttgagttgatatttccaccttcatttttcaatataatgacacatctgctttgtcaccttgtgaaagagatcagtattctcgggcctgtgtacctacacaacatgtttcctttcgagaggtacatgggcgttctgaagaagtatgttcgtaaccgtgctcgtccagaggcaagcatcgccaagggttatggaacagaggaggtcatcgaattttgcgtagaatttatcgaagatcttcgcccaatcggggtacctgaatcacgccatgaagggagactacggggaaagggaactctcggaaggaaagcaataatgacggtagacaacaatttattccgtaaagcccatttcatggttctgcaacaatcttcattggtagctccttacatcgaggagcacttggctctagttcgcgccaggaacatcggtaagtccgatgcatggattacacgacatcacattgatactttccccgcgtggctacgacaacatcttatgggtaacaagtcgatcaaccaacaacttaccttcctggcgaggggatcgtctgggtcgatcgcaacattccagggatatgagatcaatgggtacacattctacacgagagcccaagacatgaagagcacgaaccaaaacagcgctgttcgtgtcgatgccatgggacacgatggaacaactggcacgtattacggtgccatcgaggacatatgggaacttgactatggtcctctcaaggtccctctgttccggtgccaatggtttaggttgactggtggaggcgtaatgattggtgacagtgggatgacaacggttgaccttaacaaggttggatactcggacgaaccttttgtcattgccaatgatgtaacgcaagtctttttcgtgaaggacatatctagcaaaggaaagaagagcagagggcctgacgagcctaagcgtcacgtggttctcccaggcaaaagaaaaatcgtcggagttgaggacaagactgacgaggattacgatcagttggatgggcaacccactttcacggtgacgattgaccctagcatcctcctatcaaatgaagacaccccttactcacgtagcgatcacaaggagggaacaataatggctgatcgcgatgaggaacagatattgtacgatacaatcgcggagggaagcagccagtactggaacgaagaagaggggaacgaggatccaaaccagtatttgaacgaggaagggaacgtggagagggatgcggaggggaaccaggaggggcacgtggaaagggatgtggaggggaaccaggaggaggaggctagtggaagtcaaccctccgttggacagaagagggcacgcgggcaacgaggtgccgcgaagaagcttgagggtcggcacatcataacggaagtggaagaagatggacgacctagtgccccggcagaagccgccaagaactatcgaagaacaagggcacgcggagatcatgagagctttgtcccagatttggagaaagagatgctgtggaccacaatgctcgagacattcacccttcccgcgggtacagaggacaaagtgaaaaggtggactctgaagaaaatggcagaacagtttcagaacttcaagggagatctgtaccagatatatatcctgaaggggcagacaccgaacttcgacacattcccaaaactaagggatcaatgggacgagttcgttgcatataagacaggtgaacaagggcaggcgatgatggaaagaaacaaagaaaatgctgccaagaagaagtaccatcaccacttggggtcaggcggctatagcgtcgtgatgccgaagtgggaggagatggatgctagcttgcttgagagtggtatcgaaccggccaccgctaattggccggaacgatcgaagttctggtactatgctcacggtggaacgctcaacccagctgatggctcactggacttcggcgatcagatacgagatgctgcgcgtcgactaacagacgcagtggaagcctcttctcagggcacgttccgaccagacagagagagggacgagctgtcactcgccctgcagactccagagcatccaggacgaacacgagggaaaggggtgattccttggaagattgggttcaaggaggacatgcacatgtacaggagtcggatgaggagcaagagagataccgagtcgaagattgcagatctagagttcagggtatcgagctacgagcgcagcatgcaagaggaggtggcaaggaaggttgatgaacgcatggccgcacatcggtcccatgatccccagtcgaccattcctcctgcaatggtgagcccgtcaggaaaccgtagcagctgcgcctcaacggggcaggtaggatcacagagcatggatgccatgcaaacccaggacgaatccacctgccccgttgatgacatcactcagcggacaccatgtgagctgcatattcctttcaagaacttatcaataaaggtggcgtcgggcatggtcatcccaacggacccttcaggtacttaccactgcaggccgattctagcaagatactccaaggtcaaagttgagttggtcgaaggcgcgtacgaggacctcgagctggattaccctggaggagacggtgagacgcatctacgagacacaagccatgccattattctatggcgcaggcggtacatcatcctccctgggcgacaagcggcgtctcgtgcaccatctcctccggctccgccatctcctcctcaggatcttgcaccgactcctcctcaggctcttgcaccgactccttcgcaagctcctcttccggcaccttcaaagtcaagagccccccaagctccaccacctgcccacacaagggcaacgaaaaaggcgaaagttgaagccgccaagaacaaggacccggggtatgattgtaagcaagaggagcttgacgcttacgtgacatcagaagtcaagagacaattcaagcctcgaagtccagaaaagaagattcctatagacccgagtgtcaggaacttcttcaggggtatgtctacacctgccaaggagaccataaagctatcgaactatgagcaaacgctaaagaaagcatcttctggaaagtccaaaccagtccctcagcttggagagcaaccaaaccaagagattgagtcgttggtgaccggtgaagatattggaatagaagaatttattaatgataccagtctaactacggatcaattgctaggagtcgcaccaatcgaaaaggcggaagtgaaatacatgtacgaactcggtaaactgcttgtcaagcctgagctgctgcaatccctacccacacaaatgtacaagttccatcagctgtacatggagatgagtgccaccggtagagagatgatcggagcgaggatcagggacacaaacttcttgcaaggagatgacattctctggatcaatttcaacggaatctacgaaccataccagctggacgccctcgacggctctattatgagttgctggattttattccactgggtgcttttactcttcgacctggcggcctgcaccgtcaacgtatatgactcaatggataaaaaagagtctacgtttgacaaggttttcgaacttatagatagggcttggtatcggttccgtcatttggtccgcggcaactggagagaaagacttaggcggaagttcaaatttcctgtggttttgatggtaccaataggaaacagtgctgccattcatcttcttccggtggcttttcacgtgagtaacagagttgatatagatgaggcgccggaaaaactgaccacggtggtagccatggtggtggacaggagcacgatgggagctcgacccaagcaaggaaagaaggggagaaaggttggggatgttctcaccgatgagaggtgttcctgcggtgccgtggtgcagtggcagaagattgacgccggcgaaacggctgcacagccggacttggatctggcaggagaagttttgggatga

SEQ ID NO: 16424 - DNA, 909 bp, Oryza sativa
  Clone ID: PAT_MRT4530_22174C.1
atggctaccaaccagaacaagacggggaggacaagaagggctgacggacggttcgaaggcgacggggttgcgagccgtgctggtgcggcacggtcgccgggtggaggagtagcgctgcgggagggggaggtgcgaaggaaggcacgggcgaaagggaggtatggtggaaaggcgtgggtggccaggtggggaggtggcgggagcggcggtggaaggccgaaggtggatcttggcggtgtaaattgggtcggcgagctcctcggcggcagtgtggagtgggaggccacagtcgcctggcttgaggcggcgggggcggagattgatgtcagcggcgcaaatcgagtcgacgagctccccgctgcaaccgtcgtcgagctcatccgatggtcatggaggcctccgttgtcgagctcatgtgcagtggttttttacctacgggtcgggtacccgcagatacccgacccgatgggcatgggtgggggagcggcggcgcgcaggcggggcggcggcaggggaacggcggcggcggcgcacgtgcaggcaggggctgcggcaggggaacaagaggccgcggtgcgtgtgcaggtgggcgggcggcggcagtggaacaagcggcggctgcgcgcgtgcaggagggtgcggcggcgacggcgcgtgcagtgtggcggtagggggacaagcggcgacagcggcgcctgcaggtggtggcaacaacaagggaacaaacgggagcggcggtcaccatggtcatttttagggcaactcattggcttcgattttgggcacaactacaaaggtgtgatgaagatgaagagtttcatgtcgaaagttggagactacggccgggatgtttattccattataaaaagaacgtgtgtgaagagcccctcttacgcggtgaaaaagtag

SEQ ID NO: 16425 - DNA, 1956 bp, Oryza sativa
  Clone ID: PAT_MRT4530_22175C.1
atggctgatcgcgatgaggaacagatattgtactatacaatcgcggagggaagtagccagtactggaacgaagaagaggggaacgaggatccaaaccagtatttgaacgaggaagggaacatagagagggatgcggaggggaaccaggaggggcacgtggagagggatgtggaggggaaccaggaggaggaggctagtggaagtcaaccctccgctggacggaagagggcacgcgggcaacgaggtgccgcgaagaagcttgagggtcggcacatcataacggaagtggacgaagacggccgacctagtgccccggcggaagccgccaagaactactttcggagcttcaagggagatctgtaccagaaatatatcctgaaggggcagacaccgaacttcgacacattcccaaagctaagggatcactgggacgagttcgttgcatataagacagatcaacaagggcaggcgatgatggaaagaaacaaagaaaatgctgcaaagaagaagtaccatcaccacttggggtcaggcggctatagaatcgcgatgccgaagtgggaggagatggaggctagcttgattgagaggggtttcgaactggccaccaccaattggccggaacgatcaaagttctggagtcggatgaggagcaagagagataccgaggcgaagattgcagatcttgagttcagggtatcgagctacgagctcagcatgcaagaggaggtggcaaggaaggttgatgaacgcatagccgcacatcggtcccatgatccccagccgaccattcctcctgctatggtgagcccttcaggaaatcgtagcaaatgcgcctcaacgaggcaggtaggatcacagagcatggacgccatgcaaacccaggacgaaaccacctgccccgttgatgacatcactcagcggacaccatgtgagctgcatattcccttcaagaacttatcaataatggtggcgtcgggcatggccatcccaacagacccttcaggtacttaccactgcaggccgattccagcaggatactcgaaggtcgaagttgagttggtcgaaggcgcgtacgaggacctcgagctggattaccctagaggagacggtgagacgcatctacgagacacaagccacgccattattctatggcgcaagcggtatatcatcttccctgggcgacaagcggcgtctgatgcaccatctcctctggctccgccatctcctcctcaggctccttcatcgtctcctcctcatgatccagcaccgtctccacctcaggttcctgcaccgactcctcctcaggctcctgcaccgactcctccgcaagctcctcgtctggcaccttccaagtcaagagccccccaagctccaccgcctgcccccacaagggcaacgaagaaggcgaaagttgacgccgccaagaacaaggacccggggtacgattgcacgcaagaggagcttgacgcttatgtggcatcagaagtcaggagacaattgaagcctcgaagtccagaaaagaagattcctatagactcaagtgtcaggaacttctttaggggtatgtctgcacctgccaaggtggccataaagctatcgaactatgagcgaacactcaagaaagcatcttttggaaagtccaaaccagtccctcagcttggagagcaaccaaaccaggagatcgagccgttgggtatctacgaactataccagctggacgccctcgacgtttctattatgagttactggattttaatggagattcaaagggcccgacggcggggggttttcgatactggattcatcgaccctcgaaaagtaaacgtcgcaatgcttgaccggtatccgcaagaaacagaggacaatctcgtccaactcctgaagattccactgggtgcttttactcttcgacctggaggcctgcaccgtcaacgtatatggctcaatggataa

SEQ ID NO: 16426 - DNA, 5190 bp, Oryza sativa
  Clone ID: PAT_MRT4530_22176C.1
atggatcggcaatggatatacgctgaccggcggtccaaagagtttattgacggcgtgcactattttttgagagtggccgaagctaacaggcaaaggggttttatttgttgtccatgcaataagtgtaagaatcagaagaagtattctgcatctaggactattcatttccacttatttgagtcggggttcatgccaagctataattgttggacatcccacggagagcaaggtgttgaaatggaagaagatgaagtggaagacgacaatattccggactttgctcagtatgttggatttgaaggaaatcaaacgggcgaggaggaaatagctgctgatggtaacgacgttgcggatgatcttggtcagatgttgcaggacgccagggaagactgcgaaagtgaaaaggaggcccataaattggacaagatgttggaggaccacagaacttcgttgtacccaggttgcgagcaggggcacaaaaagttggataccactctggagttgttgcaatggaaggcaaaaaatggggttagtgacaagacatttggcgatttattgaaactcgtcaagaacattcttccggggggaaacaaattgcccgagacaacgtacgaggctaagaagatagtctgcccgttaggactggaagttcataagattcacgcatgtccgaacgattgtatcctatatcgcggtgaggagtatgagaacctagaagcatgccctgtttgcaaagcactacgatacaagattagacgggacgatccaggagaagttgacgggcagctaacaaagaagagaattcctgctaaggtgatgtggtatttccctataataccacggctaaggcatttgttcaggaacaaggggaatgctagaatgttacgatggcacgctgaagagcgtcaacaggacgggatgctgagacaccccgccgatggttcgcagtggcgaaacatcgacagaaaatttaaagaatttggaaaggacgcacgaaacatacggtttggccccaagcaacctggtaacgacatcgacgtgtacctaagaccactggtcgaagatcttaaacagttgtggaagaaggaaggtgtccccgtgtgggacgaggacaaacaggaggagtttaacctacgagcgctgctgttcgtaaccatcaacgattggcctgcacttagcaacctatccggacagtccaacaaggggtacaaggcttgcactcactgtatggatgaaacagaaagtacgtatcttaaccactgtaggaaggttgtatacatgggtcatcgtcgattccttgcagcaaaccacccgcccacatataaagagcgaaaatgtcacgccgcgatgtggaaaaagaactctatatttgggagttacccatattgggaatctttggacgtacgccacgcaatcgacgtgatgcacctcactaagaacctttgcgtaaaccttcttggcttcctaggtgtatacggaaagtcgaaagatacactggaagcacgtaatgatctgaagcatatggaacaacgcggcgaccttcacccggaaccaaaggagaaaggaagccattacttgagtccagccagctacactcttagcaaggcagagaaggaaagtatgtttgaatgcttggagagcataaaggtaccgtctggatactccacgaatatcaagcgaataataagcacgaaggagaagaagttcacaaacctaaagtctcatgactgtcacgtgttgatgacacaactgctaccagttgtaataaggggtatccttccagacaatgtccgggcaacaataacaaagatatgtgcattcatgaatggaatttcgcagaaggtcatcgatccggatagattagaagcccttcagaatgaagtggtgcaatgtctcgtcagttttgagttgatatttccaccttcatttttcaatataatgacacatctgctttgtcaccttgtgaaagagatccgtattctcgggcctatgtacctacacaacatgtttcctttcgagaggtacatgggcgttctgaagaagtatgttcgtaaccgtgctcgtccagaggcaagcatcgccaagggttatggaacagaggaggtcatcgaattttgcgtagaatttatcgaagaccttcgcccaatcggggtacctgaatcacgccatgaagggagactacggggaaagggaactctcggaaggaaagcaataacgacggtagacaacaatttattccgtaaagcccatttcactgttctgcaacacacttcattggtagctccttacatcgaggagcacttggctctagttcacgccaggaacatcggtaagtccgatgtatggattacacggcatcacattgatactttccccgcgtggctacgacaacatctcatgggtaacgagtcgatcaaccaacaacttgccttcctggcgaggggaccgtctgggtcgatcgcgacattccagggatatgagatcaatgggtacacattctacacgagagcccaagacatgaagagcacgaaccacaacagcgctgttcgtgtcgatgccatgggacacgatggaacaactgccacgtattacggtgccatcgaggacatatgggaacttgactatggtcctctcaaggttcctctgttccggtgccaatgggttaggttgactggtggaggcgtaatgattgatgacagtgggatgacaactgttgaccttaacaaggttggatactcggacgaaccttttgtccttgccaatgatgtaacgcaagtctttttcgtgaaggacatgtctagcaaaggaaagaagggcagagggcctgatgagcctaagcgtcaagtggttctcccaggcaaaataaaaatcgtcggagttgaggacaagaccgacgaggattacgatcagttggatgggcaaccccctttcacggtgacgattgaccctagcatcctcctatcaaatgaagacaccccttactcacgcagcgatcacaaggagggaacaatagtgaggagaaaatatatggctgaccgcgatgaggaacagatattgtacgatacaatcgcggagggaagcagccagtactggaatgaagaagaggggaacgaggatccaaaccagtacttgaacgaggaagggaacgtggagagggatgcggaggggaaccagcaggggcacgtggaaaaggatgtggaggggaaccaggaggaggaggctagtggtagtcaaccctccgttggacaaaagagggcacgcgggcaacgaggtgcagcgaagaagcttgagggtcggcacatcataacggaagtggaagaagatggacgtcctagtgccccggccgaagccgccaagaactatgtacgtcacaacgatcatgagagctttgtcccagattcggagaaagagatgctgtggaccacaatgctcgagacattcacccttcctgcgggtacagaggacaaagtgaaaaggtggactctgaagaaaatggcagaacagtttcagagcttcaagggagatctgtaccagaagtatatactgaaggggcagacaccgaacttcgacacattcccaaagctaagggatcactgggacgagttcgttgcatataagacaggtgaacaagggcaggcgatgatggaaagaaacaaagaaaatgccgccaagaagaagtaccatcaccacttggggagtcggatgtggagcaagagagataccgaggcgaagattgcagacctagagttccgggtatcgagctacgaactcaacatgcaagaggaggtggcaaggaaggttgatgaacgcatggccgcacatcggtcccatgatccccagccgaccattcctcctgcaatggtggcgtcgggcatggccatcccaacggacccttcaggtacttaccactgcaggccgattccagcaggatactcgaaggtcgaagttgagttggtcgaaggcgcgtacgaggacctcgagctggattaccctggaggagacggtgagacgcatctacgagacacatgccatgccattattctatggcgcaggcggtacatcatcctccctgggcgacaagcggcgtctcgtgcaccatctcctccggctccgccatctcctcctcaggatcctgcaccgtctcctcctcatgctccgccagcaccgtctccacctcaggctccagcatctactcctcctcaggatcctgcaccgactcctcctcgtgctcctacacctactcccccgcaagctcctcttccggcaccttcaaagtcaagggcccccccagctccaccgcctgcccacacaagggcaacgaagaaggcgaaagttgacgccgccaagaacaaggacccggggtacgattgcacgcaagaggagcttgacgcttacgttgcatcagaagtcaagagacaattcaagcctcgaagtccagaaaagaagattcctatagacccccagtgtcaggaacttcttcaggggggaatctacgaactataccagctggacgccctcgacgtctctattatgagttgctggattttaatggagattcaaagggcccgacggcggagggttttcgatactggattcatcgaccctcgaaaagtaaacgtcgcaatgctcgaccaatatccacaagaaacagaggacaatctcgtccatctcctgaaggcgcagcattacaagacgttcatactgttgccatacaacatagaattccactgggtgcttttactcatcgacctggaggcctgcaccgtcaacgtatatgactcaatggataaaaaagagtctacgtttgacaaggttttcgaacttatagacagggcttggtatcggttccgtcatttggtccgcggcaaatggagagaaagacttaggcggaagttcaaattttcttgcgcaaagcaaaagcagggaactaacttgtgcggctattacgtgtgcgagtattgccactgccttgcagaccaaatcatcaccacaagagagctcgattttattcgcatgagggataacctgaccacacacaaggaatttatcgcggcggttcaagaacaactcatgggattcatcaacgaagaaatccttgatcccaagggtgaattctactacgacggaaacacaattcaccggtccttagcttctgagctagcagcgagtactactacgtcaaaatcgtag

SEQ ID NO: 16427 - DNA, 643 bp, Oryza sativa
  Clone ID: PAT_MRT4530_22177C.1
ccggccgggaggtcgagtaccatgcggcaggaccagctgcgccgccgcatcgcgcctcaccctccgccgccgccgcatcgcgctggggcgctccgcccctcctccgcatcgcgctgtggagctctgcctctccaccgttgctgtctaccatggaagagcgagatgcgcaccctcaagatcgccgcttggatgctccgtttctcctccctgcagcgccatgcgcacccccaagatcgccgcgtagccgccaccagcagacctcccaaccggccatagaagaaggggatggatcagaggggcggatgctccacctttcagtgccacacccaccatcactctcgccgcgccgccgccaacgacggacctcaacatgtgttgatgctgcagtgcttcctggtgtggaccatgtcgtgtcattgcacctatttatgctgagatgtcaaagacttatcctcaactcatgttcttgacaatagatatgttgatgacctaatgataattgtaacccgtttgtttggtcaaatctgctattgaaaaatgattaagtttcagttttttatgaaccaaaaaaccccttatgcatttgacggcgatgattttatcaatagtatcatttactgaaaaaaaaaaaaaaaaagcggcc

SEQ ID NO: 16428 - DNA, 657 bp, Oryza sativa
  Clone ID: PAT_MRT4530_22178C.1
ggcggtggccggcccggagctcagcggggcgaggcgggagaggaggagggcggcgccgcgacgacggccggcgacggctgcggctgtggtggccacggccggacgcaccgcctcgtcgccacgttgggaacttggaagcggcggcgtgttggacgagtagtcctcgtcgatctagaggcggagcgcgtgtggaggcggcgcggagaggtggagcaggagtggatggaggcaagacggcgttggggcccgcccatcgtcgcggacctctccaagctccaccgcgtggctcccgagctcgtcgccgaggtcctcagcactcgcccgccgccgctcgccctcccgttgttcctgtgggtggcgcggcagaagtcctcaccttcttgcgacgatggccggcggggagccagcgtggtaggcgtggctagcagctggaggggaaggagcgctgcggtggctgccagctgctcctaccctcgtgagatcaacgaggtcgacctcgaatgcggcctacctccatcgccgcgtcgacccactcctgtgccaacacagctcgcgccgatggccgcgaaggcgaggctggctcaggcatccccgattccccagtggctacatcgactccgaaggcgtcggcatggcctcaggctgcgtataagatag

SEQ ID NO: 16429 - DNA, 498 bp, Oryza sativa
  Clone ID: PAT_MRT4530_22179C.1
agggcccgataagccctattcttggatattggttaaccgttgttgttctcagtcccaaggacgcacagatggtttttcgttatctttggccacagattcgtatgtcatgtcatatgaaatggataaaagggaagtgtgttttataccataaatttggatgtggttacgagaaacgttatctgtcctttccgtcccttgttcatgaagtcattagcagatggtccctgataatctgcacagtagctaccgtactggactgtgcagctctagttgtcaccttgatcttttctgatgatatgggaactagataatcaattgctaggagggtgagccacctggacacatcttttagtttgctttgtaatccttggactgccacaacagtgtatcatatatattattttgtttgtttatgtgataactggtaaatttctaattctttctgaaatagtaattctgttcttggaaaaaaaaaaaaaaaaaaactcgacctcgtgc

SEQ ID NO: 16430 - DNA, 2604 bp, Oryza sativa
  Clone ID: PAT_MRT4530_2217C.1
atgacctctccatgctcgaatcattgtcccattcttgtcaggtttaccagggatacttctcatgcgaatcgcaagaagtgtctgcattatgaaatatgttgggaacatgaacctgcatcaacggaagtgattggtgattcatggctagaagctggggagaaacaacatttgggtgatatgaattgtgctttgaggaaggtaatgtcggccttgcaaacttggagtagaacaaaattcagaaatgttggtagatgtctagagaaggccagaaagaagcttgctgaattagtagaaagggatgcagaccgcagagaaattcgcattgcgaatttctctgatgaagaaatcgcagatgctttgtttcagattggtccacttaaggcgcctgggccagatggttttccggctcgcttctaccaacgaaattggggcctgatcaagagtgatgtggttagggctgtcaaggaattcttccacactgggatcatgccagatggtatcaatgcgactgcaattgtgcttattccgaaggttaatcaaccaatggagttgaaagagttcaggcctataagcctatgtaacgtgatttacaagattgtctccaaatgcttagtaaataggcttaggcctatcctggatgatttgatttctcagaatcaaagtgctttcgtgccaggaaggatgattacagacaatgccctattagcttttgaatgctttcattccatccaaaggaacaagagccctggaaaagctgcttgtgcctacaagcttgatctctctaaagcgtatgatcgggttgactggtcgtttttggagcaagcaatgtataagttaggtttcactcatcggtggggtgatccgctttctccgttcttgtttctttttgttgctgatgggctatcactcctgctggatgaaaaggtacttcaaggggcaatcaccccggtgcaagtttgtcggcgggcgcctggaatctcccaccttctgtttgtggatgatactctactctttttcaaggctgataatggccaggctaatgtgatccgagaagtccttgacgactatgctggaaaaaggaaaacacattggagggcatggaagtatttgacgaaggccaaacagtatggaggcttgggattcaaggattttaaattgttcaatcaagcactgctagctagacaagcctggcgccttattgtgaacccggatagtttgtgtgcgagagtgctgaaagcaaagtactttccaaatggaactctagttgatacttgctttagtgggaatgcttcacctggctggagagcaatcgaatacggtttggaattgattaagaagggttgtatatggagagttggaaatggtcagtcagtttgcatatggcgtgatccctggattccaagggaccattctcgacggccaataacaaggaaaggtaattgcaggatgaaatgggtgtccgagctcttgggacttgacggtgtgtgggacgttcagaaagataatcgggttttccttccctgtggtgctgaagaaatactgaggattcggacttcaatgaggcaggatgaggattttttagcttggcatccggacaagatgggacgtttctctgtcagaagtgcttataaattggcaatgtctctggccaatatggatgaaagctccagctcgtcagatgacaagtccaggaagatgtgggatttaatctggaagtgtgaagtgccacaaaaggttaaaatcttcatgtggaaagctgctacaaacagcctagccactatggagaataaaaagagaaggaaactagaacaatcagaaatatgttgcatttgtggtactgtaagagaagatgttggccatgcactgggaaggtgcccacatgcaaagcgactatggtctgccttgttgtattcaggcaacttgtcagtcggcattgtcggaaattctacaggatcctcctggctatttgaacaagttgagctaacaccaaaagaggaaagacatatgctgtttatgttgttatggcacatttggtttgtgcgtaatgagattgttcacgacaaagtgccgcctccagtggatgtatcgcaaaggtttctacagagctatatcacctcgctcttagagatcaaacaatatccgcaagcaaacgttgttacagggaaacatgtggttcaatgcagaccaagacagggcctgaaaattcatcaggattgttcagaggctctacccaggtgggagaaaccgcaggagcgatggatgaagctaaatgttgatggttcctttgactctataacaggcacaggaggtgtgggtgtggtgctcaggaataccagcggccaggttattttctctgtctgtggttttattgagcgttgtaccagccccctggagtctgaacttctggcctgcaaagaggggctcaatatggtgcttcaatggaccttactgccgataattgtagagactaattgcctgacgactgttaatatgattcaagatgcgcagaaggaaatgtcggcgcttgctcacgttgttaaagacatcgggattctgatgtctggagaccgggagattgtcctcaagaaaattcagcgttcttag

SEQ ID NO: 16431 - DNA, 621 bp, Oryza sativa
  Clone ID: PAT_MRT4530_22180C.1
atggaggaacaacgggagggcgagcggcggcgggcgagtgctgaggacctcggcgacgagctcgggagccacgcggtggagcttggagaggtccgcgacgatgggcgggccccaacgctggtggcggcggaacgcgtcgaggaggaaccgcgcgagcagggaaaggcggcgggcggccgcggtggcggaaggcgaaggcggggaggaggaggaggggggaaggccgcaacggcctcggttgggaggagtcggcgaagacgccgcctcggttgggaggaggcggcggtggcgcggtggccgtcacccccaacgggtctctcattgcctcgctctcccacccgtcttgcctccatccactcctgctccacctctccgcgccgcctccacacgcgctccgcctctagatcgacgaggactactcgtccaacacgccgccgcttccaagttcccaacgtggcgacgaggcggtgcgtccggccgctgacaagggaaaagcacagtggcggcgctcggctcctcgctgtcgcctcccgctcggctcctcactggccaccacagccgcagccgtcgccggccgtcgtcgcggcgccgccctcctcctctcccgcctcgccccgctga

SEQ ID NO: 16432 - DNA, 903 bp, Oryza sativa
  Clone ID: PAT_MRT4530_22181C.1
atgtcaggtctccacgtcgccctctctttcccctcttatctcccttcctcctctctctctctcgctctcgctctctcgcgcgcatgtggaacgccgggaaccttctgccgcgccgcccacaggaagaacgggaacacgagcggcggcggcagtggcgggcgagtgcggtggacctcggcgacgagcttgggagccacgtggcggagcttggagaggtccgtgacgacgggcggaccccaacgctggtggcggcggaacgtgtcaaggaggaaccgcatgagcagggagaggcagcgggcgcccgcggtggcggaaggtgaaggcggggaggaggaggaggaggggggcgcgacggcctcggttgggaggagtcggcggtggcgcggaggtcggcgaagacgccgcctcggttgggaggaggcggcggtggcacggtggccgtcacccccgacgggtcactcaccgcctcgctctcccacccgtcccgcctccatccgctcctgctccgcctctccgcgctgcccccgcacgcgctccgcctccggatcgatgaggactactcgtccaacatgccggcgcttccaggttcccgacgtggcgatgaggcggcgcgtccggccgctgagaaggaagaagcgcagtggcggcgctcggctcctcgctgtcacctccccagtcccatctttggctgccgtggagccggccactgcggccgccaccgccgcagccgtcgccagctgtcgtcgcggcgctgccctcctcctctcccgcctcgcccgccgagctctgggccggccaccgcccttcaccgccagagtcgcgaccaccgttgcctcgccggctcgccgcgccgagcaacgggaggaagagagagacaagaaaagagggaaacagagaagatga

SEQ ID NO: 16433 - DNA, 555 bp, Oryza sativa
  Clone ID: PAT_MRT4530_22182C.1
atgtcgacgaccatcacggtagaaggtcgccggcatgccgaggcccaggtgggtgacgtagttgcctacggctaccgacgcacccagcgtcagcggcacggacgacaacgacgcctcgttggtgtggcggcaaggggtggcgccgaggacgggctgtgggaggcgatctgggcgacgagcacgcgcaagtacccgctcagccttggccacttccgtcttctgcggtggctcggctacggcaacatatcggcagcgtgtaccctcctcgagctccgtggcggcggcggcggcgccctcttcaccctcgtcgagtttgtgcggaggcacggccgaccgacggggaggagaagaaacaaagagaaggaagaaggagaggagaagaagagaaggaacaagacggaagggatggaaaacgtgacggcgatggcacagtttcaattttgcaaaatttcaatagcacctaaggatatcatgaatagtaatggtatttttctaaactggcaaagttgcaatggcatggataaaattaagagacaatccattatacgccactga

SEQ ID NO: 16434 - DNA, 214 bp, Oryza sativa
  Clone ID: PAT_MRT4530_22183C.1
agaaagagaagcaacaacacgatcacaacaatccgcacgactcattcaccgtgggcgagatgtggcagcccctggcgacggcgagtgcaatggacagaaaaaccacggcctaatagacccagacgccatgttatcagagacgagcgacatccgccaagcagacaagggtgggagtgaaaagagaactagtgaatcaactactataaagcagcag

SEQ ID NO: 16435 - DNA, 1146 bp, Oryza sativa
  Clone ID: PAT_MRT4530_22184C.1
atgtggtcgatgcggaaactacaggaaccgtcgcgtcgcgtgtgcgcgcttgatgcggaaagcaccggagaaaaccgtgctttgctttcttggatcgcgatacttaaccagcgtgtgctgccgcaccgtgacaactttggctacaaagcctaccggaggcaacgcgcgctctgcctaacgaacccacggatcatcatgactcatgaggctttgcagcgcgtggtccaagttaagtgcgagttgtttcggggaggcaaagcaactgggctgtcaattgagttttggcggcgggtgaataagattttctcaaatggccaccactgccaaaggaaaaagtacaccgaagctcagtcagcgtgggacccacatatcagtatgacactctctcttcctccccttcactcgcgccgagcaacgcgaggcgacggtggtcgcgactccggcggtgaagggcggtggctggcccggagctcggcggggcgaggcggaagaggaggagggcggcgccgtgacgacggccggcgacggctgcggcgcggccgaacgcgtcgcctcgtcgccacgtcgggaacctggaagcggcggcgtgttggacgagtagtcctcgtcaatccggaggcggagcgcgtgcaggggcagcgcggagaggcggagcaggagcggatggaggcgggacgggtgggagagcgaggcagtgagcgacccgtcgggggtgacggccaccgcgccacgaccgcctcctcccaaccgaggcggcgtcttcgccgacctccgcgccaccgcctactcctcccaaccgaggccgtcgcggcctccccctcctcctcctcctcctcctcctcctcctcctccccgccttcgccttccgccaccgcggccgccagccgcctctccccgctcgcgcggttcctcctcgacgcgttccgccgccaccagcgttggggcccgcccgtcgtcgcggacctctccaagctccgtcgtgtggctcccaagctcgtcgccgaggtcctcagcactcgcccgccaccgccgccgccgctcgcgttcccgttcttcctgtgggcggcgcggcagaaggttcccggtgttccacgtgcacgcgagagagagaggaggaagggagataagaggggaaagagagggtga

SEQ ID NO: 16436 - DNA, 1121 bp, Oryza sativa
  Clone ID: PAT_MRT4530_22185C.1
ctcttgttatttcctgaatcatggtacacgcatgaatggcagcttatagtttagtatacttttttttttgggtgcaaccacagatcgactcatcatttcatcaagcatgttcagctgaatataatgccagctccacttgacatgacgaaggttcaagtcgaacagacacacatattccctgtttagaatattaatcaacagtttaagtgacaactgatgtcactgacgaagtgaggatgaactttcatcagtgtatagacagacactcattcaaggtgaattgatactttggtacagctatgtcttatggtgcttccaatgctggagtagtttcatccatgcaaagtctatttctacatcagcagcaccaagaatagtcaccctcaaggtacaaactacatctcaccacactcgcttatgacacatgcgagcttcggtcggttgtttggtccagttgcaacattctcgatcttccgcacagcaagcataccatcccctagcaccctcccaaaaaccacatgcttgttgtccagccattcacattttgcacaagttataaagaactgagatccattagagttcaccccactatttgccatagaaagtaggccaggaccagtatgctttgcaatgaagttttcatcatcaaatttggtaccatagattgacgtgcatccagtaccatcccccttcatatagtcacctccctgaatcatgaaatctttgatcactcgatggaactgacaacccttatatccctgtggtaaacctgatttcctgtgctctccggtgcagaactgccggaagttctccgccgtcttggggacgatgtcggcgaagagctccatcttgatgcggccggcggggatggacccgatggtcacgtcgaagaacaccaccgggttcttcgggttcggcggccgcaggtgccagtccaccgacgacgccgccgccgccgacggcggcgtgggccccgccgagatcgccgctccccccgaggacgccatgcccgtgctcgaactctccaagcttcgcacgccgccggaggaggcggcgacggcggcggcgcgcggtcgagaggcgggaggaagaagatgcccctcgtgccgaattcctgcagc

SEQ ID NO: 16437 - DNA, 264 bp, Oryza sativa
  Clone ID: PAT_MRT4530_22186C.1
cggacgcgtgggaaaacacaaaaaacaatcaaattgtgaaataatatcaaaaggcaaggacgggataaagtgtgaccttgaggcagctagtcatgcgccccccctattggaaaagaccagatgtgttgagcgttgaagtaagaagcatctacaatccatgctcagatgacaaccaagcctgacataaactctccagagaatgtactactccacactggggtaaacattgccacgcaacggctttatcaacaacttacgcccact

SEQ ID NO: 16438 - DNA, 681 bp, Oryza sativa
  Clone ID: PAT_MRT4530_22187C.1
atgggggtcaagccgtctcccggagttctggatgggctctacggggtgcagcttggccgtcggccgtcgccgggcgacggcggcggcggcgaggaggaggaggaggctgtcaggacgaccgtcgtggagtactcggcaatctctgattctgaagccaagttcggggacggcacaacgctgcagagattgccgattaggacgaacttaaacacggcgctctatgcgaattcgctagtcggagtagggatagcttcaagcttgtaccattcctccaagggagaaatcagaaaactcctgcggtgggcagactatactatgatagccaccactacattgtgtttatcaagagcacttcggaatgagaacccgcgattactaatggcagcatcagcattgctcctaccatttcagcctttgatggtttcagttgttcacactggaatgatggaggcaaacttctctaaagatctagcattttctatgtgccaggtttcctttgcaaaaagagcatcaattgaaccagagctcagaatggcacataacctgcacaagatgtcgtctctgttaggaggcgcgctgttcatcgctgatgattgcttcccagagactccctatatccatgctgcatggcatctcgccgctgcgcttggcatcggtacatgtaacaagcttcttgagtga

SEQ ID NO: 16439 - DNA, 312 bp, Oryza sativa
  Clone ID: PAT_MRT4530_22188C.1
aagggtggccactggcctaaacgtgcgggggattgtgtgaaaactatggcggtggccagaacaaggatctgtatgtgaagagtgggcagcgtactgatatctgtatgtgaaagaaacaacagacttttgagactgttcctggaggaacactgccttatggatgctgtggatcagtgtcatcacatagaatgctcaccctaacagatgaaacggaaggtgatgcctgctcaattagaacactactgttgtaagggtgctcagctgtgcatggagctgctcattgcaggggtgcatatgctcataccaaacttg

SEQ ID NO: 16440 - DNA, 1499 bp, Oryza sativa
  Clone ID: PAT_MRT4530_22189C.1
aaattgctgccacaaatccatttgaatcctcgcaacaatttatcttggcaaagctcaacattttacagctgcccttgccaaattccgcattgcaattcaactccacccaaataggtcgtcgttacagtcttacagatacaacagtaacaacaactgtttcaactccttgctacaggatgcatcatccatgatccatcatgaatccaaacgtccccagggcaaattaaaaaacaggaccagggcttagctctagtacatcaacctatttaaaagttttgtaaacttgtaaccctccacaaggggtctctcctcttcttcctgtatacagatcagtcactaaagtctgcagaccagcaaggcaactggatcgattattgcacaagctcagggatgagcctcagcaagaatgagatttcacactgcgagaaatgtggcgttgcggcgtcttttgctgccccattgctcaaattatcggcgttcaggtcaggctccgggacggtgatgagctcagagacggcctcggtgatctcctgcactaggtcgacgatcacaccgttcacccccatcagatgttgcatgtacaccgcctccggtacgttgttcagtgttccataagtcagtagggagaggttagcctctttgatctttggtacagcagcggggtgcctgaaaattcctcgtgcctccgacacgattccttgcatgccgctggcgaggcatagcttgatggcctcttccaatgagttcctcctaacgtcagcgtagatttctgtgcctccattagtcaaaaagtaaacagggtatgtgctttgcaattttcgcataacctgtgcagcgtcaggctggaagctagagaaaataataggccgatccttggcatactcaaaaacaaccttcaggatggcctggaggatacaagtgagctcttcctcctggtattcaagattgtcatcaaatttgagctcaatattgaagcccaatctaggattgaccttctcgaaagcttcttgaagtgtgcaaagagggtcatctgactgcacattccaattcactatccgaccatctttcagtttccgtagcaagggttttccaccctttccctgctcattttgtgggccatatagcaggaagtcttccaactgaaggtctgtgacacgcttatctaaaattttaccatcttctttagtaaagatgaagttatcatggaagatgactgggcacccatccttggtaacctggacgtcgaactcgacgtagtcgacggggaatcgggcggcctcgttgaacgacctgagcgagttctccttcacctcctgcatccgccggtcgggcgacgccagcgcgttcatccccttcccgcggtgcccgatcaccgcgaacctctgccccccgccgccgccgccgccgcccgccgcggcgctccgagcacccgccgcgtccacctctgcgaggatggcggaggtggcgggggcgccggcggcgaggacgtcgagcgccat

SEQ ID NO: 16441 - DNA, 3699 bp, Oryza sativa
  Clone ID: PAT_MRT4530_2218C.1
atggagttcgtctccgatctgttgttgctgagggcaggatttcctcctgcgttctgtgttggtcttggaaggatcgatatcgttcaggcaatgatggtagattaccatcggcagatgaaggtttcctggtggagtcaaggttccaatctagagttccgtcgacacttgatcgcaaggtgtttcatggctgccaacgccagtgggggtgataaagggatcatcggtgagatgattgcccacccgaagctgacggatggcgggatgatcaagctagcgattcaggagaagggggtgatggacacagtgccggatgccaatctgaaggcgatgtccgggagccagaagaaggatgataaagtggtgatgactgaggatatgggcactagctcttcccaaggccctgcggcctttcaaaaagggaaaattattaagaaaaaaaagaaaattattgaagtaacccttaagaagaagaagctgcgtgcagatatgagctacaaatccctgcgagagaatatgttcatcataactttcagctctgagggtgattataagtttgttcttcagggaggaccatggatccatcatggtgatgctctcctatggctgaatttgatgagaggagaattgtatggtagtagactaggtaaagtttgtgaagtggatgttggtgatgatggcagaaacatgcacgatttctttcatatccgggtggatctccctgttaaacgtccgctaaaagagaagattgcaatcatgatcctggtgcaaggcaaagaggagattaggaagtttgatctccgttatgaactagtcccacacttctgtttcatatgtggttatttggggcattctgataaggactatgggagaagagttgctaatgaagaccagcctttcaggttttcagcagaattgcgttgctctccgatgaaacctttcgagcggaaagttagcaaagtgaaagcgttctcctcctcaggtgttgctcggaaccttgtcttcagaggtgctggcagtgcaagttcatcaacttctcggcagaaacaaggtgagcagtggaatgaagcagttccgcctagggtggatgctcgtgacaactttgaggctgaggagatggagggagacggcaagatagatgaacaattagctcagcaggcacaacacatgcaaatggaaggagaagaaaaccgtattgtgcaggggtcggcaaaggaagcaactccaaactctgagatgatcctggctattgctaatctgcaccagcaagcttcttttggggaagtctcatcggatgagtttagtgctgggaatcggaaaagagtacaggaacaaactggtggcgtgaagccgggaatagtcaagcaagctttgttagagtaccaacaagcagtggctgatgatactacagggcagatggactcaaggaagctaaccagggcactaaagaggtctaggagggcggatggagagcaggaggtggacaatttggaggcaaccagccagggagccgctggtgacttcaatgaaacattatggcagtttgagcacttttctgagaaacgcagaagtgaatcccaaatgcacgcttttagggatatcctaagcacttgtgaattattcgatctaggcttttcaggggttccttatacctatgacaacagaagggagggtagaaacaatgtgaaagtgcgtttggatcgggtactagcagataacagttggcgagatatttttagcaattcacaggttgtccatatgacctctccatgctcggatcattgtcccattcttgtcaggtttaccagggatacttctcatgcgaatcgcaagaagtgtctgcattatgaaatatgttgggaacgtgaacctgcatcaacagaagtgattggtgattcatggctagaagttggggagaaacaacatttgggtgatatcaattgtgctttgaggaaggtaatgtcggccttgcaaacttggagtagaacaaaattcataaatgttggtagatgtctagagaaggccagaaagaagcttgctgaattagtagaaagggatgcagaccgcagagaaattcgcattgcgtcagaccatatgaatgaattgctgtatagagaggagatgctttggttacaacgctcgcgaattagctggctgaaagagggtgatcggaatactcgcttttttcataacagagcaagatggagagcgaagaaaaataaaatctccaagttaagaggcccggatggcactgtttacagtgcgacaaaagaccttgagaatcttgccacggattatttcaatgatatgttcacagcagaccctactgttgatcattctagagtcacaaggctgttccagcagaaagtaactgccgaaatgaatgattccctatgcaggaatttctctgatgaagaaatcgcagatgctttgtttcagattggtccacttaaggcgcatgggccagatggttttccggctcgcttctaccaacgaaattggggcctgatcaagagtgatgtggttagggttgtcaaggaattcttccacactgggatcatgccagatggtatcaatgagactgcaattgtgcttattccgaaggttaatcaaccaatggagttgaaagagttcaggcctataaacctatgtaacgtgatttacaagattgtctccaaatgcttagtaaataggctgaggcctatcctggatgatttgatttctcagaatcaaagtgctttcgtgccaggaaggatgattacagacaatgccctgttagcttttgaatgctttcattccatccaaaggaacaagagccctggaaaagctgcttgtgcctacaagcttgatctctctaaagcgtatgatcggggtgatccgctttctccgttcttgtttctttttgttgctgatgggctatcactcctgctggatgaaaaggtacttcaaggggcaatcaccccagtgcaagtttgtcggcgggcgcctggaatctcccaccttctgtttgcggatgatactctactctttttcaaggctgataatggccaggcaaatgtgatccgagaagtccttgacgactatgctgtaggaactggccagtttattaatctagcaaagtgctccatgctgattgatgatattactcccgctagtgtccatgctgaaatcagaagtacactccaaatcgtcggcaatggttttgaagataaatatttgggttttccaaccccggaggggagaatgaacaaaggcaagttccaaagtcttcaggagaagatttggaagagaataattatgtggggagaaaactatctctctagtggaggcaaagaaatcatgctaaaagcagtcatacaagctatcccggtgtatgttatgagtatcttcaagttaccggactcgacttgtgaagatttaaacaagttggctcggaatttctggtggggtgcggaacagggaaaaaggaaaacacattggagggcatggaagtatttgacgaaggccaaacagtatggaggcttgggattcaaggattttaaattgttcaatcaagcactgctagctagacaagcctggcgccttattgtgaacccggatagtttgtgtgcgagagtgctgaaagcaaagtactttccaaatggaactcttgttgatacttgctttagtgggaatgcttcacctggctggagagcaatctaa

SEQ ID NO: 16442 - DNA, 136 bp, Oryza sativa
  Clone ID: PAT_MRT4530_22190C.1
cacacagaatctcacacttaccccgcgcagcctgcggctttcatctacagaagcctatcaaccaatcattagattgggggaaacaggtggccgcttctcacctctccttcctctccgtgctcgcgctcctggccgt

SEQ ID NO: 16443 - DNA, 225 bp, Oryza sativa
  unsure (1)..(225): unsure at all n locations
  Clone ID: PAT_MRT4530_22191C.1
agcagcagaagcagcagcagcagctcagccgccgccgatgggtccacgatcattgncccaacctcccgcntcctcgccgccaagacccccttcctcggccatcccngnccctccaatgcccncgtccgngacatcgccgccgccgncaccggtcgtatcaccatgagcaaggagctntggtacgggccgnatagggtgaagtacctngggncattntcggcgcag

SEQ ID NO: 16444 - DNA, 825 bp, Oryza sativa
  Clone ID: PAT_MRT4530_22192C.1
atggcgtcgtcgagggtgatggcggcggcggcggcgtcgtcgtcgtcgtcgcccccgcccccgcccccggcggcggccgcggccggcggggccgccgatctcgcgcggttcaggagcaccagcagcggcatcggatccatgaacatggacgacatcctccgcaacatatacggcgaggccgcgccgccgcctggggccgccggctcggccccggccccgcccccggcgggggaggcggcgggggcccccgtgggggaggtcgacgcgccgcgaacggcggaggaggtgtggaaggagatctcgtcctcgggagggctatcggctcccgctccagctcccgcggccggcgctgcgggtaggggtggcgggcctgagatgacgctggaggatttcctggctagggaggatgaccctagggcaacggccgtggaggggaatatggttgtggggttccctaatgtaacggagggtgtgggtacagcaggaggaggaagaggcggcggcggcggcgggagggggaggaagcggacgctgatggatccagctgaccgcgcagcgatgcagcggcagaagcgaatgatcaagaaccgcgaatctgcggcgaggtccagggagaggaaacaggcgtatatcgcagagctggaggctcaggtcgcggagcttgaggaagaacatgcacagctgttaagagaacaggaggagaaaaatcaaaagaggcttaaggagaaatggcacgtgtttatgcagatcaaggaacaagccgttgcagttgtcataaggaaaaaaacacaagatctacgaagaaccaactcaatggaatggtag

SEQ ID NO: 16445 - DNA, 536 bp, Oryza sativa
  Clone ID: PAT_MRT4530_22193C.1
tttcttcttcctcttccttctcttttcttttcttcttttcccctttccttccttcccgagtctcgcagatgctgatggcgtgggaggcagcacgggaaagcagcaagcgacggcgacatcggcttgggaggggcggcggcggagctcaggatggggaaggcgacatcggcatggggggcggcggagctcgcgatggggaaggcgacatcggcatggggggcggtggcggagcttgggatgaggatggcaacggcggcgggcgagtgaggcgacggcgactggcgcgtggagctgctcctcggcggcctcccttgctctccctcgtcgccgtcgagccctccctctcttgccgtcgacggcactcgaagggtaggcggcggccggcaggggcgacggcggctggagaggaggcggcggctggccagggcgacgacggctggaggggaggcggcggccggctcgcgggcggccggaggaggaaactcggcgtcgatggggagaggcagatgagagattgcagcttctagccgttgatg

SEQ ID NO: 16446 - DNA, 298 bp, Oryza sativa
  Clone ID: PAT_MRT4530_22194C.1
cggacgcgtgggaaaaaaaaaaaaaaaaaaaaaaaaaaaaaaaaaaaaaaaaaaaaaaaaaaaaaaaaaaaaaaaaaaaaaaaaaacaagagcaagggtggtacatactcacccaccggtctcctcgcagtggagtgcctcttcgagaccctgcgctgcctccccggtggctcaaagttaactcaccggtatttgcaagttctatattttttttatggtggactaaaataaaattggggggcagggtgttaaaaagggaaggatgggaaaaccttgggtgatacaaacttaaaatcct

SEQ ID NO: 16447 - DNA, 628 bp, Oryza sativa
  Clone ID: PAT_MRT4530_22195C.1
aagtcgctgctgccggcccgccgccgcctccggctcgatccgcccaacaagctctacttcccatatcaaccaggacaacaggtgaggagcgcaatcaggataaagaacacaagcaagtctcatgtagcatttaagttccaaacaactgcacccaagagctgcttcatgcgtcctcctggagccatacttgcccctggggagaccatcatagcaactgttttcaagtttgtcgagcacccagagaacaatgagaatgttctacagaagtgcaaggttaaattcaagattttgagcttgaaggtcaaaggacccatggattacgcaccagaaatgtttgatgagcagagagatcaagccgtagttgagaagatcctgagggttgtttttttgaatgttgaaaatccaggcccacaactggaaaagctaaataatcagttggctgaggctgaggctgcacttgaggcaagaaagaaacctcctgaagagaatggcccaaagattgttggcgaagggcttgtcatcgatgaatggaaagaacgaagggaaagatatcttgcacaacaacaggttgaagtggttgactcagtgtaaattgtgcctttcttctgcttctaccgaagctatgcct

SEQ ID NO: 16448 - DNA, 273 bp, Oryza sativa
  Clone ID: PAT_MRT4530_22196C.1
tcgaaaactatcaggtgagaaagcagggttgaggtattcaatttcaggcacacacgacaacattgatgtattacacatgtctggccgacagacacaatgatgaatcacgaagctctcgtggcatgtgataatattgcagcatggtgcttacaacaggtataatatgagaactagatggaggcaggtgcatgttaagacaagggagacattatcataatggtacttctaaagcttctgattgacaaaaatatattgattatcatggatgctagt

SEQ ID NO: 16449 - DNA, 1342 bp, Oryza sativa
  Clone ID: PAT_MRT4530_22197C.1
aggaatgcggcacatggcgatctccggggaggacaggtacgcggcggccggcggtggcggcgactccggcggggggaagctctggaacctctgccgcatgcccttctggcagcccggcggcgcgccggcgacggcgtcggcgccgccgccgccgtcgtcgtcctcgtcgtcggccgggatccaccaccactccgccgggcggtacggccacgagggcggtggtggtggtgccgtggcaggggacggcgcgccggccgggtcgatctcgtcggtggccaagtcgctgctgccggcccgccgccgcctccggctcgatccgcccaacaagctctacttcccatatcaaccaggacaacaggtgaggagcgcaatcaggataaagaacacaagcaagtctcatgtagcatttaagttccaaacaactgcacccaagagctgcttcatgcgtcctcctggagccatacttgcccctggggagaccatcatagcaactggtaatacatctgatcaccttctttacatgaacaatattttcaagtttgtcgagcacccagagaacaatgagaatgttctacagaagtgcaaggttaaattcaagattttgagcttgaaggtcaaaggacccatggattacgcaccagaaatgtttgatgagcagagagatcaagccgtagttgagaagatcctgagggttgtttttttgaatgttgaaaatccaggcccacaactggaaaagctaaataatcagttggctgaggctgaggctgcacttgaggcaagaaagaaacctcctgaagagaatggcccaaagattgttggcgaagggcttgtcatcgatgaatggaaagaacgaagggaaagatatcttgcacaacaacaggttgaagtggttgactcagtgtaaattgtgcctttcttctgcttctaccgaagctatgcctataatatggcttcagaaatgtgctgtggcattcttgtaaactgctagattttgtggttggtagtctagtgtgtggtagtctagtgtgtgcttgcagaatcagtcgccaaagaacaatctaactcccgtattttcagtgcttgatgtgtaactaatagcacatatgttctattttttgtgttagtgctaaaatctgcttgtcaaaacaataaagttcacaagcacaccttcctctgtattgttggggaaggcacattctatcatcagcttctacctgttttgtattggtttgtcagtgatctgtgttcattttatagtgcctttccatgcccccatgtaatttagtcaatagctaaaaataattagctattcatcttatatagtcttattaccattgtgccc

SEQ ID NO: 16450 - DNA, 692 bp, Oryza sativa
  Clone ID: PAT_MRT4530_22198C.1
aaagctcataggcagtactttcaccatggctagtctataagttctcaaatatccctaagccaacacctgcatgagcataaggcttcagagcatccctcactgatgctgataccattgggttttttagcaggtggagcaattctttattgaatgggctggctttttttttcctttcactgaaagatttagcctccctgtctcttaccacaaaatgccaggagtgttctctactgagacaactaaatatacacatgttccctaacaccttttgaaccactgtgtgatgctcagacatgttcccatctcattaatcacttcttatttcctgctgattataattgataatttgggcacagtgctttttcacatgtaacttgtggtggcccttgtaaaccgaacaggatttcaccccattctcatatgcaatggttttcattttctcagatcttttaatttaaaaattacctttatttgtatttctactatagtcacatgctccttttcactaatttttctaatgttcttactacttttgcaaatactgtacataaggaggttaaaaacttttgtgtgttagaagaccttaaaagttaagcaaacacagcaaacacaatagtagactaagaccagtgtgatggttgaaactaatatgacttgtgctggtaacctgcacagtttttgcatgtgctctg

SEQ ID NO: 16451 - DNA, 5940 bp, Oryza sativa
  Clone ID: PAT_MRT4530_22199C.1
atggatcggcaatggatgtacgctgaccggcggtccaaagagtttattgacggcgtgcactattttttgagagtggccgaagctaacaggcaaaggggttttatttgttgtccatgcaataagtgtaagaatcagaaggagtattctgcatccaggactattcatttccagttgtttgagtcggggttcatgccaagctataattgttggacatcccacggagagcaaggtgttgaaatggaagaagatgaagtggaagacgacaatattccggactttgctcagtatgttggatttgaaggaaatcaaacgggcgaggaggaaatagctgctgatggtaacgacgttgcggatgatcttggtcagatgttgcaggacgccagggaagactgcgaaagtgaaaaggaggcccataaattggacaagatgttggaggaccacagaacttcgttgtacccaggttgcgagcaggggcacaaaaagttggataccactctggagttgttgcaatggaaggcaaaaaatgaggttagtgacaaggcatttggcgatttattgaaactcgtcaagaacattcttccggggggaaacaaattgcccgagacaacgtacgaggctaagaagatagtctgcccgttaggactggaagttcataagattcacgcatgtccgaacgattgtatcctatatcgcggtgaggagtatgagaacctagaagcatgccctgtttgcaaagcactacgatacaagattagacgggacgatccaggagaagttgacgggcagctaacaaagaagagaattcctgctaaggtgatgtggtatttccctataataccacggctaaggcgtttgttcaggaacaaggggaatgctagaatgttgcgatggcacgctgaagagcgtcaacaggacgggatgctgagacaccccgccgatggttcgcagtggcgaaacatcgacagaaaatttaaagaatttggaaaggacgcacgaaacatacggtttggccccaagcaacctggtaacgacatcgacgtgtacctaagaccactggtcgaagatcttaaacagttgtggaagaaggaaggtgtccccatgtgggacgaggacaaacaggagtttaacctacgagcgctgctgttcgtaaccatcaacgattggcctgcacttagcaacctatccggacagtccaacaaggggtacaaggcttgcactcactgtatggatgaaacagaaagtacgtatcttaagcactgtaggaaggttgtatacatgggtcatcgtcgattccttgcagcaaaccacccggtacggaagaaaggcaagcacttcgaacataaggccgaccaccgtacgaagcctaaacatcgcagcgggaaaacagtgtttgctatggttaaagatcttaaagtagtgttcggaaaggggcctggaagccagcatatagagagcgaagatggtcacgcggcgatgtggaaaaagaactctatattttgggagttaccatattgggaattcttggacgtacgccacgcaatcgacgtgatgcacctcactaagaacctttgcgtaaaccttcttggcttcctaggtgtatacggaaagtcgaaagatacactggaagcacgtaatgatctgaagcatatggaacaacgcggcgaccttcacccggaaccaaaggagaaaggaagccattacttgagtccagccagctacactcttagcaaggcagagaaggaaagtatgtttgaatgcttggagagcataaaggtaccatctggatactccacgaatatcaagcgaataataagcacgaaggagaagaagttcacaaacctaaagtctcatgactgtcacgtgttgatgacacaactgctaccagttgtaataaggggtatccttccagacaatgtccgggcaacaataacaaagctatgtgcattcatgaacgcaatttcgcagaaggtcttcgatccggatagattagaagcccttcagaatgaagtggtgcaatgtctcgtcagttttgagttgatatttccaccttcatttttcaatataatgacgcatctgctttgtcaccttttgaaagagatccgtattctcgggcctatgtacctacacaacatgtttcctttcgagaggtacatgggcgttctgaagaagtatgttcgtaaccgtgctcgtccagaggcaagcatcgccaagggttatggaacagaggaggtcatcgaattttgcgtagaatttatcgaagaccttcgcccaatcggggtacctgaatcacgccatgaagggagactacggggaaagggaactctcggaaggaaagcaataatgacggtagacaacaatttattccgtaaagcccatttcactgttctgcaacactcttcattggtagctccttacatcaaggagcacttggctctagttcgcgctaggaacattggtaagtccgatgcatggattacacggcatcacattgatactttccccgcgtggctacgacaacatctcatgggtaacgagtcgatcaaccaacaacttgccttcctggcgaggggaccgtctgggtcgatcgcgacattccagggatatgagatcaatgggtacacattctacacgagagcccaagacatgaagagcacgaaccaaaacagcgctgttcgtgtcgatgccatgggacacgatggaacaactgccacgtattacggtgccatcgaggacatatgggaacttgactatggtcctctcaaggttcctctgttccggtgccaatgggttaggttgactggtggaggcgtaatgattgatgacagtgggatgacaactgttgaccttaacaaggttggatactcggacgaaccttttgtccttgccaatgatgtaacgcaagtctttttcgtgaaggacatgtctagcaaaggaaagaagggcagagggcctgatgagcttaagcgtcaagtggttctcccaggcaaaagaaaaatcgtcggagttgaggacaagactgacgaggattacgatcagttggatgggcaaccccctttcacggtgacgattgaccctagcatcctcctatcaaatgaagacaccccttactcacgcagcgatcacaaggagggaacaatatacttgaacgaggaagggaacgtggagagggatgcggaggggaaccagcaggggcacgtggaaagggatgtggaggggaaccaggaggaggaggctagtggtagtcaaccctccgttggacagaagagggcacgcgggcaacgaggtgcagcgaagaagcttgagggtcggcacatcataacggaagtggaagaagatggacgtcctagtgccccggccgaagccgccaagaactatgtacgtcacagcggttgggttgtgcgggataacgtgcctgtcagtacggtgtactggcgaagaacaagggcacgcggagatcatgagagctttgtcccagattcggagaaagagatgctgtggaccacaatgctcgagacattcacccttcctgcgggtacagaggacaaagtgaaaaggtggactctgaagaaaatggcagaacagtttcagagcttcaagggagatctgtaccagaagtatatactgaaggggcagacaccgaacttcgacacattcccaaagctaagggatcactgggacgagttcgttgcatataagacaggtgaacaagggaaggcgatgatggaaagaaacaaagaaaatgccgccaagaagaagtaccatcaccacttggggtcaggaggctatagcgtcgcgatgccgaagtgggagcagatggaggctagcttgattgagaggggtatcgaaccggcaacagccaattggccggaacgatcgaagttctggtactatgctcacggtggaacgctcaacccagctgatggctcactggtcttcggctatcagatacaagaggctgcgcgacgactaacagatgcagtggaagcctcctctcagggcacgttccgaccagacagagatagggacgagctgacactcgccctgcagactccagagcatccaggacgtactcgagggaaaggggtgattccttggaagattggtttcaaggaggacatccacacgtacaggagtcggatgaggagcaagagagataccgaggcgaagattgcagacctagagttccgggtatcgagctacgaactcaacatgcaagaggaggtggcaaggaaggttgatgaacgcatggccgcacatcggtcccatgatccccagccgaccattcctcctgcaatggtgagcccgtcaggaaaccgtagcagctgcgcctcaacggggcaggtaggatcacagagcatggacgccatgcaaacacaggacgaatcgacctgtcccgttgatgacatcactcagcggacaccatgtgagctgcatattcctttgaagaacttatcaataaaggtggcatcgggcatggccatcccaacggacccttcaggtacttaccactgcaggccgattccagcaggatactccaaggtcgaagttgagttggtcgaaggcgcgtacgaggacctcgagctggattaccctggaggagacggtgagacgcatctacgagacacatgccatgccattattctatggcgggcaacaaagaaggcgaaagttgacgccgccaagaacaaggacccggggtacgattgcacgcaagaggagcttgacgcttacgttgcatcagaagtcaagagacaattcaagcctcgaagtccagaaaagaagattcctatagaccccagtgtcaggaacttcttcaggggtatgtctgcatctgtcaaggaggccatcaagctatcggactatgagcgaacgctgaagaaagcatcttctggaaagtccaaaccagtccctcagcttggagagcaaccaaaccaggagatcgagccgttggtgaccggtaaagaaatgacgatagaacaatttattactgacaccggtctaactacggatcaattgctaggagtcgcaccaatcgaaaaggcggaagtgaaatacatgtacgaactcggtaaaccgcttgtcaagcctgagctgctgcagtccctacccacacaaatgtacaagttccatcagctgtacatggagatgagcgccaccggtagagagatgatcggagcgaggatcagggacacggacttcttgcaaggagatgacattctctggatcaatttcaggggaatctacgaactataccagctggacgccctcgacgtctctattatgagttgctggattttaatgcagattcaaagggcccgacggcggagggttttcgttactggattcatcgaccctcggaaagtaaacgtcgcaatgctcgaccaatatccacaagaaacagaggacaatctcgtccatctcctgaaggcgcagcattacaagacgttcatactgttgccatacaacacagaattccactgggtgcttttactcatcgacctggaggcctgcaccgtcaacgtatatgactcaatggataaaaaagagtctacgtttgacaaggttttcgaacttatagacagggcttggtatcggttccgtcatttggtccgcggcaaatggagagaaagacttaggcggaagttcaaatttccttgcgcaaagcaaaagcagggaactaacttgtgcggctattacgtgtgcgagtattgctactgccttgcagaccaaatcatcaccacaagagagctcgattttattcgcatgagggataacctgaccacacacaaggaatttatcgcggcggttcaaaaacaactcatgggattcatcaacgaagaaatccttgatcccaagggtgaattctactacgacggaaacacaattcaccggtccttagcttctgagctagcagcgagtactactacgtcgaaaccgtag

SEQ ID NO: 16452 - DNA, 276 bp, Oryza sativa
  Clone ID: PAT_MRT4530_2219C.1
gcggccggcgaagcggagcggaggcgggcaagcacgcggcggccggcggatggggagcggtcgtcactcggctgccgcgtcgtcgccaccgacgtccccgacggcgtgcccaacctcgccggcctcgacgccgaccatctccctctcgacgtcggcgacgagcgtggagtccgggttgcagccccacggaggcgcaaatgagttgagctaagatatgcaggatgcttagctagcttgagatgattgagactggattttcaaaaaaaaaaaaaaaaa

SEQ ID NO: 16453 - DNA, 4950 bp, Oryza sativa
  Clone ID: PAT_MRT4530_221C.1
atggaaaagcagaatctggacttcggcaaaatcctcggcgacatccaggaatccctcgcatcgctcaacaccaagcaggcggagacacaagcagccgtggtgaagttggatgcgggagtgagtggatggagacctcaagtggaatcagcaattcaggggttgcgcgaggaagtcagcgaacttctcccatcgacgggtgaggaaaggaaggcgccgctgctgccgactccatcggaggcgaaggcggcgcggcttccgacgccgccgacttccacccaactcgccgcagccgaaggaggaagcaaatgggctgcaggccaccacgttcagatgaatttccggggaaggacaccggtggtcagttcgactcagggtccagccccgggcaagggtacgattgatttcaccccgaattttacttctaaatttgatgggggaggttgggagtctggggaatttgattctgagcatggtgatagacagtacaatcatcgggtgcctaagttagacttcccaaaatttgatggttcagactctcaggagtggaggatgaagtgtgagcactattttgatgttaacaatactttcccggggttatgggtgaggatagcaaccatttacttcctaggacgagcagcatcttggttgagatcttctagagctcatttgagatttccaatgtgggaagatttttgtgctgctgtttctgcaaaatttgatagggatcaacatgagaatttgattaggcaaatggatagcataaaacagaatggtacagtttgggagttttatgaacgctttgatgaattgatgaatcaactgttagtttatgacccaactcttagctcaaagtacttgactcatagatttactaaagggttaaggagggagattagaaatgcagttttgttacaacgtcccaaggacctcgagtctgcccttgctgttgccttgttgcaggaagaagtgatggaaaattctccacctaccactgtcagagagtttaagaaatcagatggaagctcttctctgaagattaatggaaaaggggcttggccattaccattaccaccaggaaaaggagggggagtgcctgtcagtaatcgtgcagatgagagacgcagttcagatactgttcgcagtccgacaagcctaactgaaaaagtgtctgctctgaaatcttatcggcgagctcaagggttgtgttatgtctgtgctgagaagtggtctccaaatcataagtgtgcttcatcagtgcaattgaatgtggtacaagagttactatgtctgttcttagaagaagacagtcatgttgaatcagagaatgctggacagaatggttctttgactagggaacttatggccatttccttacaagcagtacaagggactgaaccagatggaaccatgcgaatgttggggcaattacagggtaaggagttattggttttagtggattccggcagttctgtcagcttcattagttcacagatagctgaaggattgacaggaatacagcctctctctagaaggttgtcagtccgagtggcgaatggagagacattgtgttgtggagcaattattccaaactgtgaatggcaagtgcagggtcataaatttcagacaactctaagggttttacctataaccagctatgacatgatcttgggaatggattggctaatgaaacacagtccaatgtcagtggattggtctctgaaaactatcactttaagcttgcagggaactaccgtcacactgcaaggggtgcattcagaattggctcattgcaaaattctttcggcaaatgaaatgcaacagttccaacaacgcaaggctgtggcacatatggttcaactttgttcaatcacggatgatgttgagcctgagaccattccagttcctgtacaggaactaatgcaggagtttactacagtttttgctgaaccaaaagggttacctcccacaagaccctttgatcactctataccattgctacctggggcacaaccgatcaatgatgaaatagaagctcaggtcactgaaatgttgcaaaatggcatcatacaacacaacactagtccctttgcctctccagtcttactagtgaagaagaaagacggatcttggcatttttgtgtggattacagacacctaaacgccatcacagtgaagaacaaatgccctttgccaataattgatgagttgttggatgaactgtcaggtgcacaatggtttacaaagttagatttacgcgctgtatatcatcaaatcagaatgaaagtagaggatgagcataagactgccttccgtactcaccatgggcacttcgagtttagagtgctaccgttcggactgaccagtgcaccagcaacatttcagggaataatgaatagcatcctgtcaacattacttcgacgttgtgtgttggtttttgtcgatgacatattgatctacagcagaactctagaagatcatatccatcatcttcgggcagtttttcagattctgaacaaacatggtttgaaggttaaacagagtaaatgctcatttgcccaacaaaagttatcgtacttggggcatagcattggtccaaatggagtggccacagaaactgacaaaattgcagcagttagagattggcctacaccgcaatcggtcaaggagttgcgcagttttctgggcttggcagggtactaccgcaaatttgtcaagaatttcggcatcatcagtaagcctcttactaatcttttgcgtaaaggtcagttgtttgcttggacctcaatgactaatgaagctttcctcacccttaagcacacacttgtgtcggcaccggtccttgcactgccagatttctctattccttttgtggttgaaactgatgcatcggataagggaataggtgcagttttaatgcaaagaaatcatcctgtggctttccttagtaaggcgttgggtcctcgacatttgggattgtccacttatgagaaggaaagtttggcaattatgctagcaatcgatcattggagaccgtacttgcaacatgccgagttttcaattcgtactgaccaccgcagcttggctttcttagatgaacagcgtctcactacaccttggcaacacaaagcactcaccaaactgcttggtcttcagtacaaaattctctataagaaaggttctgaaaatagtgcagctgatgccttgtctcggtatcctgataaagaaactgtggtgctgtcagctctctcagtttgtattccagaatggactcaagaagtgattgaaggctatgcccaggactctgactctcttagtaaggttcaaaccttatgtatcaataattctgcaatcccagatttcactttgaaaaatggtcttctctattttaaggataaaatgtggataggaaataatcctattgtccagcgaaagattttagcaaacttgcatacagctgccattgggggacattctggcattactatgacttatcaaaggattaaacagttatttgcttggattggtctgcgatctgatgtagtgaagttcattcaacattgtaccatatgtcaacaggccaaaggagagcatgtgaagtatcctgggatgttgcagccattaccggttccagagcaatcttggcaaattgtctctttagacttcattgaaggtttgcctcggtcttctacctttaattgcatcttggtagtggtggataaattctcgaagtatgcacactttgtggctttggcacacccatttacaactttggaggttgctgaggcatatatgcaacacattcatcgattacatggattgcctgaggctatcatctctgatcaggaccgtatcttcactagtaacctgtggactactttgttcagacttgcaggcactcagttgagaatgagttcctcttaccatccacaatccgataggcaaactgaaaggatgaatcagtgtctcaaaacctttttgagatgctttgtgcatgctagtccttcacaatggagccgttggttagccctcgcggaatattggtataatacatctttccactcttcgctgggtactactccatttgaagttctttatggtcataaacctcgttattttgggttgacggcctctgctgcatgttctgcaccggaattatcagattggcttcatgagagagacaagatgcagactcttattcgtgagcatttactaagagcacaaatgcgcatgaagcatcaggcggataccaagcattccgagcgttcgtttgctgttggtgactgggtatatatgaaactccaaccttttgtgcagcagtctgtggtcacttgcaccaataggaagttgtcatttcgtttctatggaccattccaggtgcttgctaaggtgggatcagtggcctaccgtcttgatctacccccttcctgtcttattcatccggtgattcatgtctcacaactcaataaggcagtagctccatcagatcaagttcattccaaattgccaatcctggatgatgcagatgctgttactcctgttcctcagcaggtgatagatcgtcgatctgtgcataaaggtgctaagatggtggagcaggttctaatccgatggtcaggtccagactctgctgtggtgacatgggaaaatctacaagaactacaacaacgttttcctcagacaaaagcttgggaacagcttcgtttcaaggaagggggaatgtcatggcatgcactacttcaggaccatctcaggaaggcgaagagcaaggcgggagacaagattcaaagcaacccttgttgcggcgatcgacacgtgaaaagcggcccaacagcttgtaccaaccgagtgtgtggacctagtagaattgggctgggccacagtgagggagagaggtccatagctcatcgctataagagaccggcagggaagagaacgaatcgaacattgtag

SEQ ID NO: 16454 - DNA, 427 bp, Oryza sativa
  Clone ID: PAT_MRT4530_22200C.1
acagggaggaggacaacgggtcaacggcggtggcggtggctcgatgagaggaggaggcgacaacagtggcttagcgcggggaggtgatggtagcagctcgacgtgaggaggaggcgacggcggcggcggttcgtgagaggaggaggcaacaatgacagcttggcacataaatttttaagcaatttttttgttgatatttctatcaaaattattatattggtaaaagtatatcaaaattgcaaggttcatgtgctaaatgtggtgcaaattctcaatcatgaataaaaacaggggaagtttgcaacatgaaaacttccggacgaccttcttgacaactgttgcacgcacgcacacgagcgtttcacgctgcacgcgcgcaagcaggaacgagccgttccgcgaaaccgttcgagaagtactaattcgc

SEQ ID NO: 16455 - DNA, 6414 bp, Oryza sativa
  Clone ID: PAT_MRT4530_22201C.1
atggatcggcaatggatgtacgctgaccggcggtccaaagagtttattgacggcgtgcactattttttgagagtggccgaagctaacaggcaaagaggttttatttgttgtccatgcaataagtgtaagaatcagaaggagtattctgcatccaggactattcatttccacttgtttgagtcggggttcatgccaagctataattgttggacatcccacggagagcaaggtgttgaaatggaagaagatgaagtggaagacgacaatattccggactttgctcagtatgttggatttgaaggaaatcaaacggacgaggaggaaatagctgctgatggtaacgacgttgcggatgatcttggtcagatgttgcaggacgccagggaagactgcgaaagtgaaaaggaggcccataaattggacaagatgttggaggaccacagaacttcgttgtacccaggttgcgagcaggggcacaaaaagttggataccactctggagttgttgcaatggaaggcaaaaaatggggttagtgacaaggcatttggcgatttattgaaactcgtcaagaacattcttccggggggaaacaaattgcccgagacaacgtacgaggctaagaagatagtctgcccgttaggactggaagttcataagattcacgcatgtccgaacgattgtatcctatatcgcggtgaggagtatgagaacctagaagcatgccctgtttgcaaagcactacgatacaagattagacgggacgatcctggagaagttgacgggcagctaacaaagaagagaattcctgctaaggtgatgtggtatttccctataataccacggctaaggcgtttgttcaggaacaaggggaatgctagaatgttgcgatggcacgctgaagagcgtcaacaggacgggatgctgagacaccccgccgatggttcgcagtggcgaaacatcgacagaaaatttaaagaatttggaaaggacgcacgaaacatacggtttggtttgagtacggatggcatgaatccttttggagagatgagcagcggccatagcacttggcccgttacgatgtgtatctacaacctccccccctggctatgcatgaagaggatgtacataatgatgccgattattattcaaggccccaagcaacctggtaacgacatcgacgtgtacctaagaccactggtcgaagatcttaaacaattgtggaagaagaaaggtgtccccgtgtgggacgaggacaaacaggaggagtttaacctacgagcgctgctgttcgtaaccatcaacgattggcctgcacttagcaacctatccggacagtccaacaaggggtacaaggcttgcactcactgtatggatgaaacagaaagtacgtatcttaagcactgtaggaaggttgtatacatgggtcatcgtcgattccttgcagcaaaccacccggtacggaagaaaggcaagcacttcgaacataaggtcgaccaccgtacgaagcctaaacatcgcagcgggaaaacagtgtttgctatggttaaagatcttaaagtagtgttcggaaaggggcctggaagccagcatatagagagcgaagatggtcacgcggcgatgtggaaaaagaactctatattttgggagttaccatattgggaattcttggacgtacgccacgcaatcgacgtgatgcacctcactaagaacctttgcgtaaaccttcttgacttcctaggtgtatacggaaagtcgaaagatacactggaagcacgtaatgatctgaagcatatggaacaacgcggcgaccttcacccggaaccaaaggagaaaggaagccattacttgagtccagccagctacactcatagcaaggcagagaaggaaagtatgtttgaatgcttggagagcataaaggtaccgtctggatactccacgaatatcaagcgaataataagcacgaaggagaagaagttcacaaacctaaagtctcatgactgtcacgtgttgatgacacaactgctaccagttgtaataaggggtatccttccagacaatgtccgggcaacaataacaaagctatgtgcattcatgaacgcaatttcgcagaaggtcatcgatccggatagattagaagcccttcagaatgaagtggtgcaatgtctcgtcagttttgagttgatatttccaccttcatttttcaatataatgacgcatctgctttgtcaccttgtgaaagagatccgtattctcgggcctatgtacctacacaacatgtttcctttcgagaggtacatgggcgttctgaagaagtatgttcgtaaccgtgctcgtccagaggcaagcatcgccaagggttatggaacagaggaggtcatcgaattttgcgtagaatttatcgaagaccttcgcccaatcggggtacctgaatcacgccatgaagggagactacggggaaagggaactctcagaaggaaagcaataatgacggtagacaacaatttattctgtaaagcccatttcactgttctgcaacactcttcattggtagctccttacatcgaggagcacttggctctagttcgcgccaggaacatcggtaagtccgatgcatggattacacggcatcacattgatacttttcccgcgtggctacgacaacatctcatgggtaacgagtcgatcaaccaacaacttgccttcctagcgaggggaccgtctaggtcgatcgcgacattccagggatatgagatcaatgggtacacattctacacgagagtccaagacatgaagagcacgaaccaaaacagcgctgttcgtgtcgatgccatgggacacgatggaacaactgccacgtattacggtgccatcgaggacatatgggaacttgactatggtcctctcaaggttcctctgttccggtgccaatgggttaggttgactggtggaggcgtaatgattgatgacagtgggatgacaactgttgaccttaacaaggttggatactcggacgaaccttttgtccttgccaatgatgtaacgcaagtctttttcgtgaaggacatgtctagcaaaggaaagaagggcagagggcctgatgagcctaagcgtcaagtggttctcccaggcaaaagaaaaatcgtcggagttgaggacaagactgacgaggattacgatcagttggatgggcaaccccctttcacggtgacgattgaccctagcatcctcctatcaaatgaagacaccccttactcacgcagcgatcacaaggagggaacaataatggctgaccgcgatgaggaacagatattgtacgatacaatcgcggagggaagcaaccagtactggaatgaagaagaggggaacgaggatccaaaccagtacttgaacgaggaagggaacgggcacgtggaaagggatgtggaggggaaccaggaggaggaggctagtggtagtcaaccctccgttggacagaagagggcacgcgggcaacgaggtgcagcgaagaagcttgagggtcggcacatcataacggaagtggaagaagatggacgtcctagtgccccggccgaagccgccaagaactatgtacgtcacagcggttgggttgtgcgggataatgtgcctgtcagtacggtgtactggcgaagaataagggcacgcggagatcatgagagctttgtcccagattcggagaaagagatgctgtggaccacaatgctcgagacattcacccttcctgcgggtacagaggacaaagtgaaaaggtggactctgaagaaaatggcagaacagtttcagagcttcaagggagatctgtaccagaagtatatactgaaggggcagacaccgaacttcgacacattcccaaagctaagggatcactgggacgagttcgttgcatataagacaggtgaacaagggaaggcgatgatggaaagaaacaaagaaaatgccgccaagaagaagtaccatcaccacttggggtcaggaggctatagcgtcgcgatgccgaagtgggagcagatggaggctagcttgattgagaggggtatcgaaccggcaacagccaattggccggaacgatcgaagttctggtactatgctcacggtggaacgctcaacccagctgatggctcactggtcttcggctatcagatacaagaggctgcgcgacgactaacagatgcagtggaagcctcctctcagggcacgttccgaccagacagagatagggacgagctgacactcgccctgcagactccagagcatccaggacgaactcgagggaaaggggtgattccttggaagattggtttcaaggaggacatccacacgtacaggagtcggatgaggagcaagagagataccgaggcgaagattgcagacctagagttccgggtatcgagctacgaactcaacatgcaagaggaggtggcaaggaaggttgatgaacgcatggccgcacatcggtcccatgatccccagccgaccattcctcctgcaatggtgagcccgtcaggaaaccgtagcagctgcgcctcaacggggcaggtaggatcacagagcatggacgccatgcaaacacaggacgaatcgacctgtcccgttgatgacatcactcagcggacaccatgtgagctgcatattcctttgaagaacttatcaataaaggtggcgtcgggcatggccatcccaacggacccttcaggtacttaccactgcaggccgattccagcaggatactccaaggtcgaagttgagttggtcgagggcgcgtacgaggacctcgagctggattaccctggaggagacggtgagatgcatctacgagacacatgccatgccattattctatggcgcaggcggtacatcatcctccctgggcgacaagcggcgtctcgtgcaccatctcctccggctccgccatctcctcctcaggatcctgcaccgtctcctcctcatgctccgccagcaccgtctccacctcaggctccagcatctactcctcaggatcctgcaccgactcctcctcgtgctcctacacctactcccccgcaagctcctcttccggcaccttcaaagtcaagggcccccccagctccaccgcttgcccacataagggcaacaaagaaggcgaaagttgacgccgccaagaacaaggacccggggtacgattgcacgcaagaggagcttgacgcttacgttgcatcagaagtcaagagacaattcaagcctcgaagtccagaaaagaagattcctatagaccccagtgtcaggaacttcttcaggggtatgtctgcatctgtcaaggaggccatcaagctatcggactatgagcgaacgctgaagaaagcatcttctggaaagtccaaaccagtccctcagcttggagagcaaccaaaccaggagatcgagccgttggtgaccggtaaagaaatgacgatagaacaatttattactgacaccggtctaactacggatcaattgctaggagtcgcaccaatcgaaaaggcggaagtgaaatacatgtacgaactcggtaaaccgcttgtcaagcctgagctgctgcagtccctacccacacaaatgtacaagttccatcagctgtacatggagatgagcgccaccggtagagagatgatcggagcgaggatcagggacacggacttcttgcaaggagatgacattctctggatcaatttcaggggaatctacgaactataccagctggacgccctcgacgtctctattatgagttgctggattttaatggagattcaaagggcccgacggcggagggttttcgatactggattcatcgaccctcggaaagtaaacgtcgcaatgctcgaccaatatccacaagaaacagaggacaatctcatccatctcctgaaggcgcagcattacaagacgttcatactgttgccatacaacacagaattccactgggtgtttttactcatcgacctggaggcctgcaccgtcaacgtatatgactcaatggataaaaaagagtctacgtttgacaaggttttcgaacttatagacagggcttggtatcggttccgtcatttggtccgcggcaaatggagagaaagacttaggcggaagttcaaatttccttgcgcaaagcaaaagcagggaactaacttgtgcggctattacatgtgcgagtattgccactgccttgcagaccaaatcatcaccacaagagagctcgattttattcgcatgagggataacctgaccacacacaaggaatttatcgcggcggttcaagaacaactcatgggattcatcaacgaagaaatccttgatcccaagggtgaattctactacgacggaaacacaattcaccggtccttagcttctgagctagcagcgagtactactacgtcgaaatcgtag

SEQ ID NO: 16456 - DNA, 427 bp, Oryza sativa
  Clone ID: PAT_MRT4530_22202C.1
aagtttctttcttgtcctacaaagactagtatctacccatggctataaatatgtacacccgaggtcattgtaatttatctcacagatcaatacaactactctcggcgtatcgccacccccttttctgaggttttacttatcaatcggcggaatttggcacctgacgtggggctacatcggttcagttcgatctccggcgaaggggtaagtcctatgttccgtcggccctggtgaatctatcgactacattggtattcttcacggctgcatcgcttcgatctctttggatctctctggtttggttgatatatttgcctacctgatatctcaattctatctctaattgcattgtgtctagagacgtatcggtttagttgggactgtctcggttaggtcttatcttctgtcttagccgatatatctctac

SEQ ID NO: 16457 - DNA, 6457 bp, Oryza sativa
  Clone ID: PAT_MRT4530_22203C.1
atggatcggaaatggatgtacgctgaccggcggtccaaagagtttattgatggcgtgcattattttttgaaagtggccgaagctaacaggcaaaagggtttaatttgttgtctatgcaataagtgtaagaatcagaaaaagtattctgcatccaggactattcatttccacttgtttgagtcggggttcatgccaagctataattgttggacatcccacggagagcaaggtgttgaaatggaagaagatgaagtggaagacgacaatatttcggactttgctcagtacgctggatttgaaataaatcaaacgggcgaggaggaaagggatgctgatggtaacgacgttgcggatgatcttggtcagatgttgcaggacgtcaaggaggactgcgaaagtgaaaagggggcctataaattggacaagatgttagaggaccacagaacgtcattgtacccaggttgcgagcaggggcacaaaaagttggatatcactctggagttcttgcaatggaggacaaaaaatggtgttagcgagaaggcatttggcgatttattgaaactcgtcaagaacattcttccggagagaaacaaattgcccgagacaacgtacgaggctaagaagatagtctgccctctaggactggaagttcagaagattcacgcatgtccgaatgattgtatcctatatcgcggtgaggagtacgagaacctagaagcatgccctgtttgcaaagcactacgatacaagattagacgagatgatccaggagaagttgacgggcagctaacgaagaagagaattcctgctaaggtgatgtggtatttccctataatactacggctaaggcgtttgttcaggaacaaggggaatgctagaatgatgagatggcacgctgaagagcgttaacaggacgggatgctgagacaccccgccgatggttcgcagtggcgaaatatcgacagaaaatttaaagactttggaaaggacgcacgaaacatacggtttggtttaagtacggatggcatgaatccttttggagagatgagcagcggccatagcacttggcccgttacgatgtgtatctacaacctccccccttggctatgcatgaagaggaagtacataatgatgccgattattattcaaggccccaagcaacctggtaacgacatcgatgtgtacctaagaccactggtcaaagatcttaaactgttgtggaagaaggaaggtgtccccgtgtgggacgaggacaaacaagaggagtttaacctacgagcgctgctgttcgtaaccatcaacgattggcctgcacttagcaacctatccgggcagtccaacaagaggtacaaggcttgcactcgctgtatggatgaaacagaaagtacgtatcttaagcactataggaagattgtgtacatgggtcatcgtcgattccttgcagcaaaccacccggtacggaagaaaggcaagcactttgaacataaggcggaccaccgtacgaagcctaaacatcgcagcgggaaaacagtgtttgctatggttaaagatcttaaagtagtgtttggaaaggggcctggtaaccagcctatagagagcgaagatggtcacgcggcgatgtgcaaaaagaactctatattttgggagttaccctattgggaattcttggacgtccgccacgtaatcgacgtgatgcacctcactaagtacctttgcgtaaaccttcttggcttcctaggtgtatatggaaagtcgaaagatacactggaagcacgtaaggatctgaagcatatggaacaacgcggtgaccttcacccggaaccaaaggagaaaggaagccattacttgagtccagccagctacactcttagcaaggcagagaaggaaagtatgtttgaatgcttggagagcatcaaggtaccgtctggatactccatgaatataaagcgaataataagcacgaaggagaagaagttcacaaatctaaagtctcatgactgtcacgtgttaatgacacagctgctaccagttgtaataggggtatcctcccagacaatgtccgggcaacaataacaaagctatgtgctttcatgaacgcaatttcgcagaaggtcatcgatccgaatagattagaagccctgcagaatgatgtggtgcaatgtcttgtcagctttgagttgatatttccaccttcatttttcaatataatgacgcatctgctttgtcaccttgtcaaagagatcggtattctcagtcctgtgtacctacacaacatgtttcctttcgagaggtacatgggcgttctgaagaagtatgttcgtaaccgtgctcgtccagaggcaagcatcgccaaggggtatggaacagaggaagtcattgaattctgcgtaaaatttatcgaagacctttgcccaatcggggtacctgaatcacgccatgaagggagactacggggaaagggaactctcggaaggaaagcaataatgacggtagacaacaatttattccgtaaagcccatttcacggttctgcaacaatctgcattggtggctccctacatcgaggagcacttggctctagttcgcgccagaaacattggtaagtccgatgcatggattacacggtatcacattgatactttctccgcgtggctgcgacaacatctcatgagtaacgagacgattaaccaacaactggccttcttggcgaggggaccatctggctcgatcgcgacattccagggatatgaaatcaatgggtacacattctacacgagggcccaagacatgaagagcacgaaccagaacagtgatgttcgtatcgatgccataggtcacgatggtacaactggcacgtattacggtgccatcgaggacatatgggaacttgactatggacctctcaaggtccctctgttccggtgccaatgggttaggttgactggtggaggcgtaacgattgatgacagtgggatgacaacggttgaccttaacaaggttggatacttggacgaaccttttatccttgccaatgatgtaacgcaagttttttacgtcaaggacatgtctagcaaaggaaaaaagggcaaagggcctgacgagccgaagcgccaagtggttctcccagcaaaacctcgtcttctccaccaacacttagacgtttttccatcgagatcgatctcggcttctccttcgccaccactgcctagggcaaccccgcgccgacgccgccgtcgtctctcgccgtcgcttggcggtcctcgccgcctccgccacagacgccgccgccacatctcttgggtgttttttgtatgcacacatggctgatcgcgatgaggaacagatactatacgatacaaacgcagagggaagcagccagtactggaacgaagaagaggggaacgaggatccaaaccagtacttgaacgaggaggggaacgtggagagcgatgcggaggggaacgaggagggaaacgatgaggaggagtctactggaagtcatccctctgctggacagaagagggcacacggacaacgaggtgccgcaaagaagatagagggtcggcacatcgtaactgaggtggacgaagacggccgacctagtgccctagcagaagcagccaagaattttgtacaccacagcagttgggttgtgagggacaacgtgcctgtcagcacggtgtactggcgcagaacaagggcacgcagggataatgacagctttgtcccggactcagaaaaagagatgctgtggaccacaatgctcgagacgttcacgctacccgcaggtacgaagaacatagtgaaacagtggactctgaagaaaatagcagaacagttccagagcttcaagggagatctctacaagaaatacatcttgaagggactaacaccgaacttcgacgtattccaaaagctaagggatcattgggacgagttcgttgcttacaagacagggcaacaagggcaagcgatgatggccagaaacaaagaaaatgccgccaagaagaagtaccatcaccacttggggtcaggcggatatagcgtcgcaatgccgaagtgggaggagatggaggcaagtttgattgagaggggtatcgaaccggccaccgctaaatggccggatcgatcgaagttctggtactatgctcacggtggaacgcttaagccagttgatggctcccttgtcttcagtgatcagatacgcgacgctgccagtcgactaacggacgcggtggaagcctcttctcagggcacattccgacccgacagagagaaggaagagctgtcactcgccctacagattcccgagcatccaggacgaacacgagggaaaggcgtgattccgtggaagattggatttaaggaggacatccacacgtataggagtcggatgaggagcaagagagataccgaggcgaagattgcagatcttgagtacagggtatcgagctacgagctcagcatgcaagagaagatggcaaggaaggtggatgaacgtatggccgcacatcggtcccaggatcccagtcgtacattcctcctgcaatggtcagcccatcaggcaatcgtagcagctgcgcctcaacggggtaggtaggatcacagagcatggacgccatgcaaacccaggacgaaaccacctgccccgttgatgagatcacgcagcggacaccatgtgagctgcatattcccttcaagaacttatcaatcaaggtggcgtcgggaatggccatcccaacggacccttccgggacttaccactgcaggccgattccagcaggatactcgagggtcgaagttgagctggtagaagccgcgtacaaggacctcgagttggactacccaggaggagacggtgagacgcatctacgagacacaagacacgccattatactatggtgcaagcggtacatcatcctccctgggcgacaagcggcatctcatgcaccatctcctctggctccgccatctcctcctgcaccatctcctccggttcctccgccacgtcctcctgcaccatctcctccggctcctctgcctcctccgcctcctccacctccaccgtgtctgcctgcaccacccaagacaaggtctcgccaagctccaccgcctgcccgcacaagggcaacgaagaaggcgaaagttgatgccaccaaaaacaaggagccaccgtacgattgtagtcaagaggagcttgatgcttatgtggcaggagaagtgaagaggcaacttgagcctcggagtcctgaaaagaagatacctattgacccgagcgtgaagaactacttcaagggaatgtccgcaacaaacaaggaggccttatagatatcggactatgactgaacacttcagagagcctatcacaagaagtctaaaccagtccctcagcttggagaacaaccaaaccaagaggtcgagccgttggtgaccggcgaagattttggcataacggaattcatttcagacaccggtctaactgtggatcagctgattcgaggcgcaccaatcctgaaggcggaagtggcatacaagtttgaactcggtaaaccgcttgtcaagcctgagcagctgcagtccctaccgacatagatgtacaaattccatgaatggtacatggaaatgagcgccaagggtagagagatgttcggagcgaggatcagaaaccccgacttcttgcaaggagaagatattctctggatccatttcaaggatctcttcgatctgtaccatctggacgccctcgacgtctctcttctgagcgcatggattttaatggagattcaaagggcccgacggcggagggtctacgatactgggttcatcgaccctcggaaaatcaacaccaaaatgatcgacaagtaagagaaagacacagaggacaatctcgtccatctcctaacatagcagcatttcaagacgtacatactactgccgtacaacacagaattccactgggtcctgtcattcttcgacttggacgcatgcaaagtcactgtgtacaactcaatgaataaagaggagaagatttttgacaaggtcttccaactgatagacagggcttgggatcggttccgtcagttggtccgcgggacttagaaagaaaaacttggaaggaggtttcattttccacatattcacatgagggataatctcccacacaaggtttttatcatggctgttcaagaacaactgatgggattcatcaacgaagaagtccttaattccgatggtgaattctactacgacggatcgacaattcataacgtcggtcctccctctcttgggccctccgccgccacagcaaccgcccgagcagtggcgaggagcgggaggaggcgacggcaagagcggcggcgaggagcgggaagtacctcagttagtgagggtcctctaggagtgtctcagattgtggatgccctaaccagtaacttatccggactccactccattttcac

SEQ ID NO: 16458 - DNA, 1338 bp, Oryza sativa
  Clone ID: PAT_MRT4530_22204C.1
atgtggaaaaagaactctatattttgggagataccctattggatattcttggacgtctgccacgcaatcgacgtgatgcacctcactaagaacatttgcgtaaaccttcttggcttcctaggagtatatagaaagtcgaaagatacactggaagcacgtaatgatctgaagcatatggaacaacgcgacgaccttcacccagaaccaaaggagaaaggaagccattacttgagtccagccagctacactcttagcaaggcagagaaggaaagtatgtttgaatgcttggagagcataaaggtaccgtctggatactccacgaatataaagcgaataataaccacgaaggagaagaagttcacaaacctaaagtctcatgactgtcacgtgttgatgacacaactgctactagttgtaataaggggtatccttccagacaatgtccgggcaacaataacaaagctatgtgctttcatgaacacaatttcgcagaaggtcatcgatccagatagattagaagcccttcagaatgatgtgctgcaatgtcttgtcagttttgagttgatatttccaccgtcatttttcaatataatgacgcatctgctttgtcaccttgtcaaagagattggtattctcgggcctgtgtacctacacaatatgtttcctttcaagaggtacatgggcgttctcaagaagtatgttcgtaaccgtgctcgtccagaggcaagcatcgccaaggagtatggaacagaggaggtcatcgaattttgtgtagaatttattgaagaccttcgcccaatcggggtacctgaatcacgccatgaagggagactacggggaaagggaattctcggaagaaaagcaataatgacgggatatgagatcaatgggtacacattctacttgagagcccaagacatgaagagcacgaaccaaaacagcgttgttcgtatcgatgccatgggacacgatggaacaactggcacgtattacggtgccatcgaggatatatgggaacttgactacggtcctctcaaggtccctctgttccggtgccaatgggttaggttgattggtggaggcataacgattgatgacagtgcgatgacaacggttgaccttaacaaggttggatactcggacgaaccttttgtccttgccaatgatgtaacgcaagacttttacgtaaaggacatgtctagcaaaggaaagaagggcagagggcctgacgagccgaagcgtcacttggttctcccaggtaaaagaaaaatcgtcggagttgaggacaagactgacgaggattacgatcagttggatgggcaacccctttcacggtga

SEQ ID NO: 16459 - DNA, 5796 bp, Oryza sativa
  Clone ID: PAT_MRT4530_22205C.1
atggatcggcaatgtatgtacgctgaccggcggtccaaagagtttattgacggcgtgtactattttttgacagtggccgaagctaacaggcaaaggggttttatttgttgtccatgcaataagtgtaagaatcagggggagtattctgcatccaggactattcatttccacttgtttgagtcggggttcatgccaagctataattgttggacatcccacggagagcaaggtgttgaaatggaagaagatgaagtggaagacgacaatattccggactttgctcagtatgttggatttgaaggaaatcaaacgggcgaggaggaaatagctgctgatggtaacgacgttgcggatgatcttggtcagatgttgcaggatgccagggaggactgcgaaagtgaaaaggaggcccataaattggacaagatgttggaggaccacagaacttcgttgtacccaggttgcgagcaggggcacaaaaagttggataccactctggagttgttgcaatggaaggcaaaaaatggggttagtgacaaggcatttggcgatttattgaaactcgtcaagaacattcttccggggggaaacaaattgcccgagacaacgtacgaggctaagaagatagtctgcccgttaggactggaagttcataagattcacgcatgtccgaacgattgtatcctatatcgcggtgaggagtatgagaacctagaagcatgccctgtttgcaaagcactacgatacaagattagacgggatgatccaggagaagttgacgggcagctaacaaagaagagaattcctgctaaggtgatgtggtatttccctataataccacggctaaggcgtttgttcaggaacaaggggaatgctagaatgttgcgatggcacgctgaagagcgtcaacaggacgggatgctgagacaccccgccgatggttcgcagtggcgaaacatcgacagaaaatttaaagaatttggaaaggacgcacgaaacatacggtttggccccaagcaacctggtaacgacatcgacgtgtacctaagaccactggtagaagatcttaaacagttgtggaagaaggaaggtgtccccgtgtgggacgaggacaaacaggaggattttaacctacgagcgctgctgttggtaaccatcaacgatgggcctgcacttagcaacctatccggacagtccaacaaggggtacaaggcttgcactcactgtatggatgaaacagaaagtacgtatcttaagcactgtaggaaggttgtatacatgggtcatcgtcgattccttgcagcaaaccacccggtacggaagaaaggcaagcacttagaacataaggccgaccaccgtacgaagcctaaacatcgcagcgggaaaacagtgtttgctatggttaaagatcttaaatcgaaagatacactggaagcacgtaatgatctgaagcatatggaacaacgcggcgaccttcacccagaaccaaaggagaaaggaagccattacttgagtccagccagctacactcttagcaaggcagagaaggaaagtatgtttgaatgcttggagagcataaaggtaccgtctggatactccacgaatatcaagcgaataataagcacgaaggagaagaagttcacaaacctaaagtctcatgactgtcacgtgttgatgacacaactgctaccagttgtaataaggggtatccttccagacaatgtccgggcaacaataacaaagctatgtgcattcatgaacgcaatttcgcagaaggtcatcgatccggatagattagaagcccttcagaatgaagtggtgcaatgtctcatccgtattctcgggcctatgtacctacacaacatgtttcctttcgagaggtacatgggcgttctgaagaagtatgttcgtaaccgtgctcgtccagaggcaagcatcgccaagggttatggaacagaggaggtcatcgaattttgcgtagaatttatcgaagaccttcgcccaatcggggtacctgaatcacgccatgaagggagactacggggaaagggaactctcggaaggaaagcaataacgacggtagacaacaatttattccgtaaagcccatttcactgttctgcaacactcttcattggtagctccttacatcgaggagcacttggctctagttcgcgccaggaacatcggtaagtccgatgcatggattacacggcatcacattgatactttccccgcgtggctacgacaacatctcatgggtaacgagtcaatcaaccaacaacttgccttcctggcgaggggaccgtctgggtcgatcacgacattccagggatatgagatcaatgggtacacattctacacgagagcccaagacatgaagagcacgaaccaaaacagcgctgttcgtgtcgatgccatgggacacgatggaacaactgccacgtattacggtgccatcgaggacatatgggaacttgactatggtcctctcaaggttcctctgttccggtgccaatgggttaggttgactgatggaggcgtaatgattgatgacagtgggatgacaactgttgaccttaacaaggttggatactcggatgaaccttttgtccttgccaatgatgtaacgcaaatggctgaccgcgatgaggaacagatattgtacgatacaatcgcggagggaagcagccagtactggaatgaagaagaggggaacgaggatccaaaccagtacttgaacgaggaaggaaacgtggagagggatgcggaggggaaccagcaggggcacgtggaaagggatgtggaggggaaccaggaggaggaggctagtggtagtcaaccctccgttggacagaagagggcacgcgggcaacgaggtgcagcgaagaagcttgagggtcgacacatcataacggaagtgcaagaagatggacgtcctagtgccccggccgaagccgccaagaactatgtacgtcacagcggttgggttgtgcgggataacgtgcctgtcagtacggtgtactggcgaagaacaaggttacgcggagatcatgagagctttgtcccagattcggagaaagagatgctgtggaccacaatgctcgagacattcacccttcctgcgggtacagaggacaaagtgaaaaggtggactctgaagaaaatggcagaacagtttcagagcttcaagggagatctgtaccagaagtatatactgaaggggcagacaccgaacttcgacacattcccaaagttaagggatcactgggacgagttcgttgcatataagacaggtgaacaagggcaggcgatgatggaaagaaacaaagaaaatgccgccaagaagaagtaccatcaccacttggggtcaggaggctatagcgtcgcgatgccaaagtgggaggagatggaggctagcttgattgagaggggtatcgaaccggcaacagccaattggccggaacgatcgaagttctggtactatgctcacggtggaacgctcaacccagctgatggctcactggtcttcggcgatcagatacgagaggctgcgcgacgactaacagatgcagtggaagcctcctctcagggcacgttccgaccagacagagatagggacgaactgacactcgccctacagactccagagcatccaggacgaacacgagggaaaggggtgattccttggaagattggtttcaaggaggacatccacacgtacaggagtcggatgaggagcaagagagataccgaggcgaagattgcagacctagagttaagggtatcgagctacgaactcaacatgcaagaggaggtggcaaggaaggttgatgaacgcatgttcgcacatcggtcccatgatccccagccgaccattcctcctgcaatggtgagcccgtcaggaaaccgtagcagctgcgcctcaacgaggcaggtaggatcacagagcatggacgccatgcaaacacaggacgaatcgacatgtcccgttgatgacatcactcagcggacaccatgtgagctgcatattcctttcaagaacttatcaataaaggtggcgtcgggcatggccatcccaacggacccttcaggtacttaccactgcaggccgattccagcaggatactcgaaggtcgaagttgagttggtcgaaggcgcgtacgaggacctcgagctggattaccctggaggagacggtgagacgcatctacgagacacaagccatgccattattctatggcgcaggcggtacatcatcctccctgggcgacaagcggcgtctcgtgcaccatctcctccggctccgccatctcctcctcaggatcctgcaccgtctcctcctcatgctccgccagcaccgtctccacctcaggctccaacatcgactcctcctcaggatcctgcaccgactcctcctcgtgctcctacacctactcccccgcaagctcctcttccggcaccttcaaagtcaagggcccccccagctccaccgcctgcccacacaagggcaacgaagaaggcgaaagttgacgccgccaagaacaaggacccggggtacgattgcacgcaagaggagcttgacgcttacgttgcatcagaagtcaagagacaattcaagcctcgaagtccagaaaagaagattcctatagaccccagtgtcaggaacttcttcaggggtatgtctgcatctgtcaaggaggccatcaagctatcggactatgagcgaacgctgaagaaagcatcttctggaaagtccaaaccagtccctcagcttggagagcaaccaaaccaggagatcgagccgttggttaccggtaaagaaatgacgatagaacaatttattactgacaccggtctaactacggatcaattgctaggagtcgcaccaatcgaaaaggcggaagtgaaatacatgtacgaactcggtaaaccgcttgtcaagcctgagctgctgcagtccctacccacacaaatgtacaagttccatcagctgtacatggagatgagcgccgccggtagagagatgatcggagcgaggatcagggacacggacttcttgcaaggagatgacattctctggatcaatttcaagggaatctacgaactataccagctggacgccctcgacgtctctattatgagttgctggattttaatggagattcaaagggcccgacggcggagggttttcgatactggattcatcgaccctcggagagtaaacgtcgcaatgctcgaccaatatccacaagaaacagaggacaatctcgtccatctcctgaaggcgcagcattacaagacgttcatactgttgccatacaacacagaattccactgggtgcttttactcttcgacctggaggcctgcaccgtcaacgtatatgactcaatggataaaaaagagtctacgtttgacaaggttttcgaacttatagacagggcttggtatcggttccgtcatttggtccgcggcaaatggagagaaagacttaggcggaagttcaaatttccttgcgcaaagcaaaagcagggaaataacttgtgcggctattacgtgtgcgagtattgccactgccttgcaaaccaaatcatcaccacaagagagctcgattttattcgcatgagggataacctgaccacacacaaggaatttatcacggcggttcaagaacaactcatgggattcatcaacgaagaaatccttaatcccaagggtgaattctactacgacggaaacacaattcaccggtccttagcttctgagctagcagcgagtactactacgtcgaaatga

SEQ ID NO: 16460 - DNA, 515 bp, Oryza sativa
  unsure (1)..(515): unsure at all n locations
  Clone ID: PAT_MRT4530_22206C.1
cccgtgtangatgcacgcnggctatagacgcccttgtgttgagaatatgaaaggcggttctgagtaccctggtgtgagaagaggctggtgtggctcttagaggctttaggtacccactagtcgcgctccttgttagatgttgctggaaaggttggttcacgctatatgttctcactgtttccgttgaagcggcanaggctcgttgggtgtagccccctgggcacaggacctgggtgaactctggaaggccttctaataaccgtgtggcctcgtctgtattggtgcccgtgccgtgaatgtcttgaagatgtgtatgttttgcgtagtttatgtattttggtagagtacaccccacgaagggagaccccccaaatggggggatatctgtaatgcatcactaatgccctaaatanaggcccgttgatgttcacgagtgtatttcgtgtttgtatcttagaaaacctgtgcatttgccttaatgctgctttgcacttcaaaaaaaaaaaaaaaaaaaa

SEQ ID NO: 16461 - DNA, 6463 bp, Oryza sativa
  Clone ID: PAT_MRT4530_22207C.1
atggatcggcaatggatgtacgctgaccggcggtccaaagagtttattgacggcgtgcactattttttgagagtggccgaagctaacaggcaaaggggttttatttgttgtccatgcaataagtgtaagaatcagaaggagtattctgcatccaggactattcatttccacttgtttgagtcggggttcatgccaagctataattgttggacatcccacggagagcaaggtgttgaaatggaagaagatgaagtggaagacgacaatattccggactttgctcagtatgttggatttgaaggaaatcaaacgggcgaggaggaaatagctgctgatggtaacgacgttgcggatgatcttggtcagatgttgcaggacgccagggaggactgcgaaagtgaaaaggaggcccataaattggacaagatgttggaggaccacagaacttcgttgtacctaggttgcgagcaggggcacaaaaagttggataccactctggagttgttgcaatggaaggcaaaaaatggggttagtgacaaggcatttggcgatttattgaaactcgtcaagaacattcttccggggggaaacaaattgcccaagacaacgtacgaggctaagaagatagtctgcccgttaggactggaagttcataagattcacgcatgtccgaacgattgtatcctatatcgcggtgaggagtatgagaacctagaagcatgccctgtttgcaaagcactacgatacaagattagacgggacgatccaggagaagttgacgggcagctaacaaagaagagaattcctgctaaggtgatgtggtatttccctataataccacggctaaggcgtttgttcaggaacaaggggaatgctagaatgttgcgatggcacgcagaagagcgtcaacaggacgggatgctgagacaccccgccgatggttcgcagtggcgaaacatcgacagaaaatttaaagaatttggaaaggacacacgaaacatacggtttggtttgagtacggatggcatgaatccttttggagagatgagcagcggccatagcacttggcccgttacgatgtgtatctacaacctcccccctagctatgcatgaagaggaagtacataatgatgccgattattattcaaggccccaagcaacctggtaacgacatcgacgtgtacctaagaccactggtcgaagatcttaaacagttgtggaagaaggaaggtgtccccgtgtgggacgaggacaaacaggaggagtttaacctatgagcgctgctgttcgtaaccatcaacgattggcctgcacttagcaacctatccggacagtccaacaaggggtacaaggcttgcactcactgtatggatgaaacagaaagtacgtatcttaagcactataggaaggttgtatacatgggtcatcgtcgattccttgcagcaaaccacccggtacggaagaaaggcaagcacttcgaacataaggccgaccaccgtacgaagcctaaacatcgcagcgggaaaacagtgtttgctatggttaaagatcttaaagtagtgttcggaaaggggcctggaagccagcatatagagagcgaagatggtcacgcggcgatgtggaaaaaaactctatattttgggagttaccatattgggaattcttggacgtacgccacgcaatcgacgtgatgcacctcactaagaacctttgcgtaaaccttcttggcttcctaggtgtatacggaaagtcgaaagatacactggaagcacgtaatgatctgaagcatatggaacaacgcggcgaccttcacccggaaccaaaggagaaaggaagccattacttgagtccagccagctacactcttagcaaggcagagaaggaaagtatgtttgaatgcttggagagcataaaggtaccgtctggatactccacgaatatcaagcgaataataagcacgaaggagaagaagttcacaaacctaaagtctcatgactgtcacgtgttgatgacacaactgctaccagttgtaataaggggtatccttccagacaatgtccgggcaacaataacaaagctatgtgcattcatgaacgcaatttcgcagaaggtcatcgatccggatagattagaagcccttcagaatgaagtggtgcaatgtctcgtcagttttgagttgatatttccaccttcatttttcaatataatgacgcatctgctttgtcaccttgtgaaagagatccgtattctcgggcctatgtacctacacaacatgtttcctttcgagaggtacatgggcgttctgaagaagtatgttcgtaaccgtgctcgtccagaggcaagcatcgccaagggttatggaacagaggaggtcatcgaattttgcgtagaatttatcgaagaccttcgcccaatcggggtacctgaatcatgccatgaagggagactacggggaaagggaactctcggaaggaaagcaataatgacgatagacaacaatttattccgtaaagcccatttcactgttctgcaacactcttcattggtagctccttacattgaggagcacttggctctagttcgcgccaggaacatcggtaagtccgatgcatggattacacggcatcacattgatactttccccgcgtggctacgacaacatctcatgggtaacgagtcgatcaaccaacaacttgccttcctggcgaggggaccgtctgggtcgatcgcgacattccagggatatgagatcaatgggtacacattctacacgagagcccaagacatgaagagcacgaaccaaaacagcgctgttcatgtcgatgccatgggacacgatggaacaactgccacgtattacggtgccatcgaggacatatgggaacttgactatggtcctctcaaggttcctctgttccggtgccaatgggttaggttgactggtggaggcgtaatgattgatgacagtgggatgacaactgttgaccttaacaaggttggatactcggacgaaccttttgtccttgtcaatgatgtaacgcaagtctttttcgtgaaggacatgtctagcaaaggaaagaagggcagagggcctgatgagcctaagcgtcaagtggttctcccagtgcgccctcgtcttcttcaccaacacttagacgttttcggccgatcgatctctctcggcctctctccttcgccgccactgcctagggcaaatccccgcgccgagcgccgccgtatctcgccgtcgtctcgagctcagtcgtcctcgccgccgcctccgcctcctccgctgccgccgcatctctggggtgagagccgccgccgccagatctcccttcatctcgatctctccgatctcgatctctctccgtcgcgccgtccgccacgagacgccgcgccacgacgacgacgcgccacgccgacgccgcgccaagccgccgccggcacgccacgccgccgtcttcgccgccgcgcgcgcaatgccgccgccggcacgccacgccgccgccttcgccgccgcgcaacgccgccgccgcatgccaacgccacgccgccgccgccatcgccacgccgccgccgccttcaccgccgcgcgcgcaatgccgccgccgccacgccacgccgccgccgccacggccccgcaacgccacgccgccgccgccgtcgccacgccgccgcgccaaccgccgccccgatgccgccacaccgccgttaacgaacgagaacgagaacgatcgaacgaacgagagcgagaacgaacacgtcaacgtacgttgccgcgagaacatgtacgacatttacacttcctgcgggtacagaggacaaagtgaaaaggtggactctgaagaaaatggcagaacagtttcagagcttcaagggagatctgtaccggaagtatatactgaaggggcagacaccgaacttcgacacattcccaaagctaagggatcactgggacaagttcgttgcatataagacaggtgaacaagggcaggcgatgatggaaagaaacaaagaaaatgccgccaagaagaagtaccatcaccacttggggtcaggaggctatagcgtcgcgatgccgaagtgggagcagatggaggctagcttgattgagaggggtatcgaaccggcaacagccaattggccggaacgatcgaagttctggtactatgctcacggtggaacgctcaacccagctgatggctcactggtcttcggcgatcagatacgagaggctgcgcgacgactaacagatgcagtggaagcctcctctcagggcacgttccgaccagacagagatagggacgagctgacactcgccctgcagactccagagcatccaggacgaacacgagggaaaggggtgattccttggaagattggtttcaaggagaacatccacacgtacaggagtcggatgaggagcaagagagataccgaggcgaagattgcagacctagagttccgggtatcgagctacgaactcaacatgcaagaggaggtggcaaggaaggttgatgaacgcatggccgcacatcggtcccatgatccccagccgaccattcctcctgcaatggtgagcccgtcaggaaaccgtagcagctgtgcctcaacggggcaggtaggatcacagagcatggacgccatgcaaacacaggacgaatcgacctgtcccgttgatgacatcactcagcggacaccatgtgagctgcatattcctttcaagaacttatcaataaaggtagcgtcgggcatggccatcccaacggacccttcaggtacttaccactgcaggccaattccagcaggatagtcgaaggtcgaagttgagttggtcgaaggcgcgtacgaggacctcgagctggattaccctggaggagacggtgagacgcatctacgagacacatgccatgccattattctatggcgcaggcggtacatcatcctccctgggcgacaagcggcgtctcgtgcaccatctcctccggctccgccatctcctcctcaggatcatgcaccgtctcctcctcatgctccgccagcaccgtctccacctcaggctccagcatcgactcctcctcaggatcctgcaccgactcctcctcgtgctcctacacctactcccccgcaagctcctcttccggcaccttcaaaatcaagggcccccccagctccaccgcctgcccacacaagggcaacgaagaaggcgaaagttgacgccgccaagaacaaggacccggggtacgattgcacgcaagaggagcttgacgcttacgttgcatcagaagtcaagagacaattcaagcctcgaagtccagaaaagaagattcctatagaccccagtgtcaggaacttcttcaggggtatgtctgcatctgtcaaggaggccatcaagctatcggactatgagcgaacgctgaagaaagcatcttctggaaagtccaaaccagtccctcagcttggagagcaaccaaaccaggagatcgagccgttggtgaccggtaaagaaatgacgatagaacaatttattactgacaccggtctaactacggatcaattgctaggagtcgcaccaatcgaaaaggcggaagtgaaatacatgtacgaactcggtaaaccgcttgtcaagcctgagctgctgcagtccctacccacacaaatgtacaagttccatcagctgtacatggagatgagtgccaccggtagagagatgatcggagcgaggatcagggacacggacttcttgcaaggagatgacattctctggatcaatttcaggggaatctacgaactataccagctggatgccctcgacgtctctattatgagttgctggattttaatggagattcaaagggcccgacggcggagggttttcgatactggattcatcgaccctcggaaagtaaacgtcgcaatgctcgaccaatatccacaagaaacagaggacaatctcgtccatctcctgaaggcgcagcattacaagacgttcatactgttgccatacaacacagaattccactgggtgcttttactcttcgacctggatgcctgcaccgtcaacgtatatgactcaatggataaaaaagagtctacgtttgacaaggttttcgaacttatagacagggcttggtatcggttccgtcatttggtccgcggcaaatggagagaaagacttaggcggaagttcaaatttccttttattcgcatgagggataacctgaccacacacaaggaatttatcgcggcggttcaagaacaactcatgggattcatcaacgaagaaatccttgatcccaagggtgaattctactacgacggaaacacaattcaccggtccttagcttctgagctagcagcgagtactactacctcgccgtcacgggcgtctccgtggacgagatggcggcgccgccgatgatctccgcgccgaggctgcgtaactaaattaaaggggcat

SEQ ID NO: 16462 - DNA, 6711 bp, Oryza sativa
  Clone ID: PAT_MRT4530_22208C.1
agtggaggtcatgccaaaatttctattgaatttattttggtgattacatacaaatcggaggtgcctaaaaggtttatggatcggcaatggatgtacgctgaccggcggtccaaagagtttattgacggcgtgcactattttttgagagtggccgaagctaacaggcaaaggggttttatttgttgtccatgcaataagtgtaagaatcagaaggagtattctgcatccaggactattcatttccacttgtttgagtcggggttcatgccaagctataattgttggacatcccacggagagcaaggtgttgaaatggaagaagatgaagtggaagacgacaatattccggactttgctcagtatgttggatttgaaggaaatcaaacgggcgaggaggaaatagctgctgatggtaacgacgttgcggatgatcttggtcaaatgttgcaggacgccagggaggactgcgaaagtgaaaaggaggcccataaattggacaagatgttggaggaccacagaacttcgttgtacctaggttgcgagcaggggcacaaaaagttggataccactctggagttgttgcaatggaaggcaaaaaatggggttagtgacaaggcatttggcgatttattgaaactcgtcaagaacattcttccggggggaaacaaattgcccgagacaacgtacgaggctaagaagatagtctgcccgttaggactggaagttcataagattcacgcatgtccgaacgattgtatcctatatcgcggtgaggagtatgagaacctagaagcatgccctgtttgcaaagcactacgatacaagattagacgggacgatccaggagaagttgacgggcagctaacaaagaagagaattcctgctaaggtgatgtggtatttccctataataccacggctaaggcatttgttcaggaacaaggggaatgctagaatgttgcgatggcacgctgaagagcgtcaacaggacgggatgctgagacaccccgccgatggttcgcagtggcgaaacatcgacagaaaatttaaagaatttggaaaggacgcacgaaacatacggtttggccccaagcaacctggtaacgacatcgacgtgtacctaagaccactggtcgaagatcttaaacagttgtggaagaaggaaggtgtccccgtgtgggacgaggacaaacaggaggagtttaacctacgagcgctgctgttcgtaaccatcaacgattggcctgcacttagcaacctatccggacagtccaacaaggggtacaaggcttgcactcactgtatggatgaaacagaaagtacgtatcttaagcactgtaggaaggttgtatacatgggtcatcgtcgattccttgcagcaaaccacccggtacggaagaaaggcaagcacttcgaacataaggccgaccaccgtacgaagcctaaacatcgcagcgggaaaacagtgtttgctatggttaaagatcttaaagtagtgttcggaaaggggcctggaagccagcatatagagagcgaagatggtcacgcggcgatgtggaaaaagaactctatattttgggagttaccatattgggaattcttggaccatatggaacaacgcggcgaccttcacccggaaccaaaggagaaaggaagccattacttgagtccagccagctacactcttagcaaggcagagaaggaaagtatgtttgaatgcttggagagcataaaggtaccgtctggatactccacgaatatcaagcgaataataagcacgaaggagaagaagttcacaaacctaaagtctcatgactgtcacgtgttgatgacacaactgctaccagttgtaataaggggtatccttccagacaatgtccgggcaacaataacaaagatatgtgcattcatgaacgcaatttcgcagaaggtcatcgatccggatagattagaaacccttcagaatgaagtggtgcaatgtctcgtcagttttgagttgatatttccaccttcctttttcaatataatgatgcatctgctttgtcaccttgtgaaagagatccgtattctcgggcctatgtacctacacaacatgtttcattttgagaggtacatgggcgttctgaagaagtatgttcgtaaccgtgctcgtccagaggcaagcatcgccaagggttatggaacagaggaggtcatcaaattttgcatagaatttatcgaagaccttcgcccaatcggggtacctgaatcacgccatgaagggagactacggggaaagggaactctcggaaggaaagcaataacgacggtagacaacaatttattccgtaaagcccatttcactgttctgcaacactcttcattggtagctccttacatcgaggagcacttggctctagttcgcgccaggaacatcggtaagtccgatgcatggattacacggcatcacattgatactttccccgcgtggctacgacaacatctcatgggtaacgagtcgatcaaccaacaacttgccttcctggcgaggggaccgtctgggtcgatcgcgacattccagggatatgagatcaatgggtacacattctacacgagagcccaagacatgaagagcacgaaccaaaacagcgctgttcgtgtcgatgccatgggacacgatggaacaactgccacgtattacggtgccatcgaggacatatgggaacttgactatggtcctctcaaggttcctctgttccggtgccaatgggttaggttgactggtggaggcgtaatgattgatgacagtgggatgacaactgttgaccttaacaaggttggatactcggacgaaccttttgtccttgccaatgatgtaacgcaagtctttttcgtgaaggacatgtctagcaaaggaaagaagggcagagggcctgatgagcctaagcgtcaagtggttctcccaggcaaaagaaaaatcgtcggagttgaggacaagactgacgaggattacgatcagttggatgggcaaccccctttcacggtgacgattgaccctagcatcctcctatcaaatgaagacaccccttactcacgcagcgatcacaaggagggaacaatagtgaggagaaaaaaagacgtgttgtcggagtcgtccgtcaagcacttgatggctgaccgcgatgaggaacagatattgtacgatacaatcgcggagggaagcagccagtactggaatgaagaagaggggaacgaggatccaaaccagtacttgaacgaggaagggaacgtggagagggatgcggaggggaaccagcaggggcacgtggaaagggatgtggaggggaaccaggaggaggaggctagtggtagtcaaccctccgttggacagaagagggcacgcgggcaacgaggtgcagcgaagaagcttgagggtcggcacatcataacggaagtggaagaagatggacgtcctagtgccccggccgaagccgccaagaactatgtacgtcacagcggttgggttgtgcgggataacgtgcctgtcagtacggtgtactggcgaagaacaagggcacgcggagatcatgagagctttgtcccagattcggagaaagagatgctgtggaccacaatgctcgagacattcacccttcctgcgggtacagaggacaaagtgaaaaggtggactctgaagaaaatggcagaacagtttcagagcttcaagggagatctgtaccagaagtatatactgaaggggcagacaccgaacttcgacacattcccaaagctaagggatcactgggacgagttcgttgcatataagacaggtgaacaagggcaggcgatgatggaaagaaacaaagaaaatgccgccaagaagaagtaccatcaccacttggggtcaggaggctatagcgtcgcgatgccgaagtgggagcagatggaggctagcttgattgagaggggtatcgaaccggcaacagccaattggccggaacgatcgaagttctggtactatgctcacggtggaacgctcaacccagctgatggctcactggtcttcggctatcagatacaagaggctgcgcgacgactaacagatgcagtggaagcctcctgtcagggcacgttccgaccagacagagatagggacgagctgacactcaccctgcagactccagagcatccaggacgaactcgagggaaaggggtgattccttggaagattggtttcaaggaggacatccacacgtacaggagtcggatgaggagcaagagagataccgaggcgaagattgcagacctagagttccgggtatcgagctacgaactcaacatgcaagaggaggtggcaaggaaggttgatgaacgcatggccgcacatcggtcccatgatccccagccgaccattcctcctgcaatggtgagcccgtcaggaaaccgtagcagctgcgcctcaacggggcaggtaggatcacagagcatggacgccatgcaaacacaggacgaatcgacctgtcccgttgatgacatcactcagcggacaccatgtgagctgcatattcctttcaagaacttatcaataaaggtggcgtcgggcatggccatcccaacagacccttcaggtacttaccactgcaggccgattccagcaggatactccaaggtcgaagttgagttggtcgaaggcgcgtacgaggacctcgaactggattaccctggaggagacggtgagacgcatctacgagacacatgccatgccattattctatggcgcaggcggtacatcatcctccctgggcgacaagcggcgtctcgtgcaccatctcctccggctccgccatctcctcctcaggatcctgcaccgtctcctcctcatgctccgccagcaccgtctccacctcaggctccagcatcgactcctcctcaggatcctgcaccgactcctcctcgtgctcctacacctactcccccgcaagctcctcttccggcaccttcaaagtcaagggcccccccagctccaccgcttgcccacacaagggcaacaaagaaggcgaaagttgacgccgccaagaacaaggacccggggtacgattgcacgcaagaggagcttgacgcttacgttgcatcagaagtcaagagacaattcaagcctcgaagtccagaaaagaagattcctatagaccccagtgtcaggaacttcttcaggggtatgtctgcatctgtcaaggaggctatcaagctatcggactatgagcgaacgctgaagaaagcatcttctggaaagtccaaaccagtccctcagcttggagagcaaccaaaccaggagatcgagccgttggtgaccggtaaagaaatgacaatagaacaatttattactgacaccggtctaactacggatcaattgctaggagtcgcaccaatcgaaaaggcggaagtgaaatacatgtacgaactcggtaaaccgcttgtcaagcctgagctgctgcagtccctacccacacaaatgtacaagttccatcagctgtacatggagatgagcgccaccggtagagagatgatcggagcgaggatcagggacacggacttcttgcaaggagatgacattctctggatcaatttcaggggaatctacgaactataccagctggacgccctcgacgtctctattatgagttgctggattttaatggagattcaaagggcccgacggcggagggttttcgatactggattcatcgaccctcggaaagtaaacgtcgcaatgctcgaccaatatccacaagaaacagaggacaatctcgtccatctcctgaaggcgcagcattacaagacgttcatactgttgccatacaacacagaattccactgggtgcttttactcatcgacctggaggcctgcaccgtcaacgtatatgactcaatggataaaaaagagtctacgtttgacaaggttttcgaacttatagacagggcttggtatcggttccgtcatttggtccgcggcaaatggagagaaagacttaggcggaagttcaaatttccttgcgcaaagcaaaagcagggaactaacttgtgcggctattacgtgtgcgagtattgccactgccttgcagaccaaatcatcaccacaagagagctcgattttattcgcatgagggataacctgaccatacacaaggaatttatcgcggcggttcaagaacaactcatgggattcatcaacgaagaaatccttgatcccaagggtgaattctactacgacggaaacacaattcaccgagataatcgatgccgaatccttccgcgttcactcggacgacaccttgtttccattgaaggcaaggtgtttgaggacggcgtggctgaggaggtcggcaatggactccatcacggtggccgcaacgagaacgaggcccgcgatttagacgagtatatcatggcaacaaagcacatgacatgtctctgtgaaagacgtggccacgttggtgtttgtcacgttcgactcgcccacatgcaatgtgaccgcggcctgggcaagcgcattctcggccgcttcgtccttgtccttgaaggaggtagccatggagatagccccgtgttggctcatggaacaaggttgaagaagaagaaaaagaagaagaagaagaagaagaagtggttgctgagcgagcgatgggaacttacggttgtgaaaccttgtggttctattgttgatggatgtaaatga

SEQ ID NO: 16463 - DNA, 5907 bp, Oryza sativa
  Clone ID: PAT_MRT4530_22209C.1
atggagatgatagatcggcaatggatgtacgctgaccggcggtccaaagagtttattgacggcgtgcactattttttgagagtggccgaagctaacaggcaaaggggttttatttgttgtccatgcaataagtgtacgaatcagaaggagtattctgcatccaggactattcatttccacttgtttgagtcggggttcatgccaagctataattgttggacatcccacggagagcaaggtgttgaaatggaagaagatgaagtggaagacgacaatattccggactttgctcagtatgttggatttgaaggaaatcaaacgggggaggaggaaatagctgctgatggtaacgacgttgtggatgatcttggtcagatgttgcaggacgccagggaggactgcgaaagtgaaaaggaggcccataaattggacaagatgttggaggaccacagaacttcgttgtacccaggttgcgagcaggggcacaaaaagttggataccactctggagttgttgcaatggaaggcaaaaaatggggttagtgacaaggcatttggcgatttattgaaactcgtcaagaacattcttccggggggaaacaaattgcccgagacaacgtacgaggctaagaagatagtctgcccgttaggactggaagttcataagattcacgcatgtccgaacgattgtatcctatatcgcggtgaggagtatgagaacctagaagcatgccctgtttgcaaagcactacgatacaagattagacgggacgatccaggagaagttgacgggcagctaacaaagaagagaattcctgctaaggtgatgtggtatttccctataataccacggctaaggcgtttgttcaggaacaaggggaatgctagaatgttgcgatggcacgctgaagagcgtcaacaggacgggatgctgagacaccccgccgatggttcgcagtggcgaaacatcgacagaaaatttaaagaatttggaaaggacgcacgaaacatacggtttggccccaagcaacctggtaacgacatcgacgtgtacctaagaccactggtagaagatcttaaacagttgtggaagaaggaaggtgtccccgtgtgggacgaggacaaacaggaggattttaacctacgagcgctgctgttcgtaaccatcaacgattggcctgcacttagcaacctatccggacagtccaacaaggggtacaaggcttgcactcactgtatggatgaaacagaaagtacgtatcttaagcactgtaggaaggttgtatacatgggtcatcgtcgattccttgcagcaaaccacccggtacggaagaaaggcaagcacttcgaacataaggccgaccaccgtacgaagcctaaacatcgcagcgggaaaacagtgtttgctatggttaaagatcttaaagtagtgttcggaaaggggcctggaagccagcatatagagagcgaagatggtcacgcggcgatgtggaaaaagaactctatattttgggagttaccatattgggaattcttggacgtacgccacgcaatcgacgtgatgcacctcactaagaacctttgcgtaaaccttcttggcttcctaggtgtatacggaaagtcgaaagatacactggaagcacgtaatgatctgaagcatatggaacaacgcggcgaccttcacccagaaccaaaggagaaaggaagccattacttgagtccagccagctacactcttagcaaggcagagaaggaaagtatgtttgaatgcttggagagcataaaggtaccgtctggatactccacgaatatcaagcgaataataagcacgaaggagaagaagttcacaaacctaaagtctcatgactgtcacgtgttgatgacacaactgctaccagttgtaataaggggtatccttccagacaatgtccgggcaacaataacaaagctatgtgcattcatgaacgcaatttcgcagaaggtcatcgatccggatagattagaagcccttcagaatgaagtggtgcaatatccgtattctcgggcctatgtacctacacaacatgtttcctttcgagagtacatgggcgttctgaagaagtatgttcgtaaccgtgctcgtccagaggcaagcatcgccaagggttatggaacagaggaggtcatcgaattttgcgtagaatttatcgaagaccttcgcccaatcggggtacctgaatcacgccatgaagggagactacggggaaagggaactctcggaaggaaagcaataacgacggtagacaacaatttattccgtaaagcccatttcactgttctgcaacactcttcattggtagctccttacatcgaggagcacttggctctagttcgcgccaggaacatcggtaagtccgatgcatggattacacggcatcacattgatactttccccgcgtggctacgacaacatctcatgggtaacgagtcaatcaaccaacaacttgccttcctggcgaggggaccgtctgggtcgatcacgacattccagggatatgagatcaatgggtacacattctacacgagagcccaagacatgaagagcacgaaccaaaacagcgctgttcgtgtcgatgccatgggacacgatggaacaactgccacgtattacggtgccatcgaggacatatgggaacttgactatggtcctctcaaggttcctctgttccggtgccaatgggttaggttgactgatggaggcgtaatgattgatgacagtgggatgacaactgttgaccttaacaaggttggatactcggatgaaccttttgtccttgccaatgatgtaacgcaaatggctgaccgcgatgaggaacagatattgtacgatacaatcgcggagggaagcagccagtactggaatgaagaagaggggaacgaggatccaaaccagtacttgaacgaggaaggaaacgtggagagggatgcggaggggaaccagcaggggcacgtggaaagggatgtggaggggaaccaggaggaggaggctagtggtagtcaaccctccgttggacagaagagggcacgcgggcaacgaggtgcagcgaagaagcttgagggtcgacacatcataacggaagtgcaagaagatggacgtcctagtgccccggccgaagccgccaagaactatgtacgtcacagcggttgggttgtgcgggataacgtgcctgtcagtacggtgtactggcgaagaacaaggttacgcggagatcatgagagctttgtcccagattcggagaaagagatgctgtggaccacaatgctcgagacattcacccttcctgcgggtacagaggacaaagtgaaaaggtggactctgaagaaaatggcagaacagtttcagagcttcaagggagatctgtaccagaagtatatactgaaggggcagacaccgaacttcgacacattcccaaagttaagggatcactgggacgagttcgttgcatataagacaggtgaacaagggcaggcgatgatggaaagaaacaaagaaaatgccgccaagaagaagtaccatcaccacttggggtcaggaggctatagcgtcgcgatgccaaagtgggaggagatggaggctagcttgattgagaggggtatcgaaccggcaacagccaattggccggaacgatcgaagttctggtactatgctcacggtggaacgctcaacccagctgatggctcactggtcttcggcgatcagatacgagaggctgcgcgacgactaacagatgcagtggaagcctcctctcagggcacgttccgaccagacagagatagggacgaactgacactcgccctacagactccagagcatccaggacgaacacgagggaaaggggtgattccttggaagattggtttcaaggaggacatccacacgtacaggagtcggatgaggagcaagagagataccgaggcgaagattgcagacctagagttccgggtatcgagctacgaactcaacatgcaagaggaggtggcaaggaaggttgatgaacgcatgtccgcacatcggtcccatgatccccagccgaccattcctcctgcaatggtgagcccgtcaggaaaccgtagcagctgcgcctcaacgaggcaggtaggatcacagagcatggacgccatgcaaacacaggacgaatcgacatgtcccgttgatgacatcactcagcggacaccatgtgagctgcatattcctttcaagaacttatcaataaaggtggcgtcgggcatggccatcccaacggacccttcaggtacttaccactgcaggccgattccagcaggatactcgaaggtcgaagttgagttggtcgaaggcgcgtacgaggacctcgagctggattaccctggaggagacggtgagacgcatctacgagacacaagccatgccattattctatggcgcaggcggtacatcatcctccctgggcgacaagcggcgtctcgtgcaccatctcctccggctccgccatctcctcctcaggatcctgcaccgtctcctcctcatgctccgccagcaccgtctccacctcaggctccaacatcgactcctcctcaggatcctgcaccgactcctcctcgtgctcctacacctactcccccgcaagctcctcttccggcaccttcaaagtcaagggcccccccagctccaccggctgcccacacaagggcaacgaagaaggcgaaagttgacgccgccaagaacaaggacccggggtacgattgcacgcaagaggagcttgacgcttacgttgcatcagaagtcaagagacaattcaagcctcgaagtccagaaaagaagattcctatagaccccagtgtcaggaacttcttcagggtccctcagcttggagagcaaccaaaccaggagatcgagccgttggttaccggtaaagaaatgacgatagaacaatttattactgacaccggtctaactacggatcaattgctaggagtcgcaccaatcgaaaaggcggaagtgaaatacatgtacgaactcggtaaaccgcttgtcaagcctgagctgctgcagtccctacccacacaaatgtacaagttccatcagctgtacatggagatgagcgccgccggtagagagatgatcggagcgaggatcagggacacggacttcttgcaaggagatgacattctctggatcaatttcaagggaatctacgaactataccagctggacgccctcgacgtctctattatgagttgctggattttaatggagattcaaagggcccgacggcggagggttttcgatactggattcatcgaccctcggagagtaaacgtcgcaatgctcgaccaatatccacaagaaacagaggacaatctcgtccatctcctgaaggcgcagcattacaagacgttcatactgttgccatacaacacagaattccactgggtgcttttactcttcgacctggaggcctgcaccgtcaacgtatatgactcaatggataaaaaagagtctacgtttgacaaggttttcgaacttatagacagggcttggtatcggttccgtcatttggtccgcggcaaatggagagaaagacttaggcggaagttcaaatttccttgcgcaaagcaaaagcagggaaataacttgtgcggctattacgtgtgcgagtattgccactgccttgcaaaccaaatcatcaccacaagagagctcgattttattcgcatgagggataacctgaccacacacaaggaatttatcacggcggttcaagaacaactcatgggattcatcaacgaagaaatccttaatcccaagggtgaattctactacgacggaaacacaattcaccggtccttagcttctgagctagcagcgagtactactacgtcgaaatga

SEQ ID NO: 16464 - DNA, 141 bp, Oryza sativa
  Clone ID: PAT_MRT4530_2220C.1
atgagtcgcgcgtccactgtgccgcatgcagggcggtcggcggggcgacctgcgcttctcgcgcggctgcggctcttccttcgttcgaacctcgctctcgcagcctcgctcaacatgggaacgcgcggagtgcaggactag

SEQ ID NO: 16465 - DNA, 5925 bp, Oryza sativa
  Clone ID: PAT_MRT4530_22210C.1
atggatcggcaatggatgtacgctgaccggcggtccaaagagtttattgacggcgtgcactattttttgagagtggccgaagctaacaggcaaaggggttttatttgttgtccatgcaataagtgtaagaatcagaaggagtattctgcatccaggactattcatttccacttgtttgagtcggggttcatgccaagctataattgttggacatcccacggagagcaagatgttgaaatggaagaagatgaagtggaagatgacaatattccggactttgctcagtatgttggatttgaaggaaatcaaacaggcgaggaggaaatagctgctgatggtaacgacgttgcggatgatcttggtcagatgttgcaggacgctagggaggactgcgaaagtgaaaaggaggcccataaattggacaagatgttggaggaccacagaacttcgttgtacccaggttgcgagcaggggcacaaaaagttggataccactctggagttgttgcaatggaaggcaaaaaatggggttagtgacaaggcatttggcgatttattgaaactcgtcaagaacattcttccggggggaaacaaattgcccgagacaacgtacgaggctaagaagatagtctgcccgttaggactggaagttcataagattcacgcatgtccgaacgattgtatcctatatcgcggtgaggagtatgagaacctagaagcatgccctgtttgcaaagcactacgatacaagattagacgggacgatccaggagaagttgacgggcagctaacaaagaagagaattcctgctaaggtgatgtggtatttccctataataccacggctaaggcgtttgttcaggaacaaggggaatgctagaatgttgcgatggcacgctgaagagcgtcaacaggacgggatgctgagacaccccgccgatggttcgcagtggcgaaacatcgacagaaaatttaaagaatttggaaaggacgcacgaaacatatggtttggccccaagcaacctggtaacgacatcgacgtgtacctaagaccactggtcgaagatcttaaacagttgtggaagaaggaagcaaaccacccggtacggaagaaaggcaagcacttcgaacataaggccgaccaccgtacgaagcctaaacatcgcagcgggaaaacagtatttgctatggttaaagatcttaaagtagtgttcggaaaggggcctggaagccagcatatagagagcgaagatggtcacgcggcgatgtggaaaaagaactctatattttgggagttaccatattgggaattcttggacgaacgccacgcaatcgacgtgatgcacctcactaagaacctttgcgtaaaccttcttggcatcctaggtgtatacggaaagtcgaaagatacactggaagcacgtaatgatctgaagcatatggaacaacgcggcgaccttcacccgaaaccaaaggagaaaggaagccattacttgagtccagccagctacactcttagcaaggcagagaaggaaagtatgtttgaatgcttggagagcataaatgtaccatctggatactccacgaatatcaagcgaataataagcacgaaggagaagaagttcacaaacctaaagtctcatgactgtcacgtgttgatgacacaactgctaccagttgtaataaggggtatccttccagacaatgtccgggcaacaataacaaagctatgtgcattcatgaacgcaatttcgcagaaggtcatcgatccggatagattagaagcccttcagaatgaagtggtgcaatgtctcgtcagttttgagttgatagttccaccttcatttttcaatataatgacgcatctgctttgtcaccttgtgaaagagatccgtattctcgggcctatgtacctacacaacatgtttcctttcgagaggtacatgggcgttctgaagaagtatgttcgtaaccgtgctcgtccaaaggcaagcatcgccaagggttatggaacagaggaggtcatcgaattttgcgtagaatttatcgaagaccttcgcccaatcggggtacctgaatcacgccatgaagggagactacggggaaagggaactctcggaaggaaagcaataacgacggtagacaacaatttattccgtaaagcccatttcactgttctgcaacactcttcattggtagctccttacatcgaggagcacttggctctagttcgcgccaggaacatcggtaagtccgatgcatggattacacggcatcacattgatactttccccgcgtggctacgacaacatctcatgggtaacgagtcgatcaaccaacaacttgccttcctggcgaggggaccgtctgggtcgatcgcgacattccagggatatgagatcaatgggtacactttctacacgagagcccaagacatgaagagcacgaaccaaaacagcgctgttcgtgtcgatgccatgggacacgatggaacaactgccacgtattacggtgccatcgaggacatatgggaacttgactatggtcctctcaaggttcctctgttccggtgccaatgggttaggttgactggtggaggtgtaatgattgatgacagtgggatgacaactgttgaccttaacaaggttggatactcggacgaaccttttgtccttgccaatgatgtaacgcaagtctttttcgtgaaggacatgtctagcaaaggaaagaagggcagagggcctgatgagcctaagtgtcaagtggttctcccaggcaaaagaaaaatcgtcggagttgaggacaagactgacgaggattacgatcagttggatgggcaaccccctttcacggtgacgattgaccctagcatcctcctatcaaatgaagacaccccttactcacgcagcgatcacaaggagggaacaataatggctgaccgcgatgaggaacagatattgtacgatacaatcgcggagggaagcagccagtactggaataaagaagaggggaacgaggatccaaaccagtacttgaacgaggaagggaacgtggagagggatgcggaggggaaccagcaggggcacgtggaaagggatgtggaggggaaccaggaggaggaggctagtggtagtcaaccctccgttggacagaagagggcacgcgggcaacgaggtgcagcgaagaagcttgagggtcggcacatcataacggaagtggaagaagatggacgtcctagtgccccggccgaagccaccaagaactatgtacgtcacagcggttgggttgtgcgggataacgtgcctgtcagtacggtgtactggcgaagaacaagggcacgcggagatcatgagagttttgtcccagattcagagaaagagatgctgtggaccacaatgctcgagacattcacccttcctgcgggtacagaggacaaagtgaaaaggtggactctgaagaaaatggcagaacagtttcagagcttcaagggagatctgtaccagaagtatatactgaaggggcagacaccgaactttgacacattcccaaagctaagggatcactgggacgagttcgttgcatataagacaggtgaacaagggcaggcgatgatggaaagaaacaaagaaaatgccgccaagaagaagtaccatcaccacttggggtcaggaggctatagcgtcgcgatgccgaagtgggagcagatggaggctagcttgattgagaggggtatcgaaccggcaacagccaattggccggaacgatcgaagttctggtactatgctcacggtggaacgctcaacccagctgatggctcactggtcttcggcgatcagatacgagaggctgcgcgacgactaacagatgcagtggaagcctcctctcagggcacgttccgaccagacagagatagggacgagctgacactcgccctgcagactccagagcatccaggacgaacacgagggaaaggggtgattccttggaagattggtttcaaggaggacatcgacacgtacaggagtcggatgaggagcaagagagataccgaggcgaagattgcagacctagagttccgggtatcgagctacgaactcaacatgcaagaggaggtgacaaggaaggttgatgaacgcatggccgcacatcggtcccatgatccccagccgaccattcctcctgcaatggtgagcccgtcaggaaaccgtagcagctgcgcctcaacggggcaggtggcgtcgggcatggccatcccaacggacccttcaggtacttaccactgcaggccgattccagcaggatactcgaaggtcgaagttgagttggtcgaaggcgcgtacgaggacctcgagctggattaccctggaggagacggtgagacgcatctacgagacacatgccatgccattattctatggcgcaggcggtacatcatcctccctaggcgacaaacggcgtctcgtgcaccatctcctccggctccgccatctcctcctcaggatcctgcaccgtctcctcctcatgctccgccagcaccgtctccacctcaagctccagcatcgactcctcctcaggatcctgcaccgactcctcctcgtgctcctacacctactcccccgcaagctcctcttccggcaccttcaaagtcaagggcccccccagctccaccgcctgcccacacaagggcaacgaagaaggcgaaagttgacgccgccaagaacaaggacccggggtacgattgcacgcaagaggagcttgacgcttacgttgcatcagaagtcaagagacaattcaagcctcgaagtctagaaaagaagattcctatagaccccagtgtcaggaacttcttcaggggtatgtctgcatctgtcaaggaggccatcaagctatcggactatgagcgaacgctgaagaaagcatcttctagaaagtccaaaccagtccctcagcttggagagcaaccaaaccaggagatcgagccgttggtgaccggtaaagaaatgacgatagaacaatttattactgacaccggtctaactacggatcaattgctaggagtcgcaccaatcgaaaaggcggaagtgaaatacatgtatgaactcggtaaaccgcttgtcaagcctgagctgctgcagtccctacccacacaaatgtacaagttccatcagctgtacatggagatgagcgccaccggtagagagatgatcggagcgaggatcagggacacggacttcttgcaaggagatgacattctctggatcaatttcaggggaatctacgaactataccagctggacgccctcgacgtctctattatgagttgctggattttaatggagattcaaagggcccgacggcggagggttttcaatactggattcatcgaccctcggaaagtaaacgtcgcaatgctcgaccaatatccacaagaaacagaggacaatctcgtccatctcctgaaggcgcagcattacaagacgttcatactgttgccatacaacacagaattccactgggtgcttttactcttcgacctggaggcctgcaccgtcaacgtatatgactcaatggataaaaaagagtctacgtttgacaatgttttcgaacttatagacagggcttggtatcggttccgtcatttgtgcgcaaagcaaaagcagggaactaacttttgcggctattacgtgtgcgagtattgccactaccttgcagaccaaatcatcaccacaagagagctcgattttattcgcatgagggataacctgaccacacacaaggaatttatcgcggcggttcaagaacaactcatgggattcatcaacgaagaaatccttgatcccaagggtgaattctactacgacggaaacacaattcaccggtccttagcttctgagctagcagcgagtactactacgtcgaaatcgtag

SEQ ID NO: 16466 - DNA, 2860 bp, Oryza sativa
  Clone ID: PAT_MRT4530_22211C.1
atgaagccgaagagcctcccgttcatcgccttcgagcacaagcgggatgcctatggcttcgcagttcggccccaacacttgcagcgttacaaggagtatgcaggcatctacaaggaggaggaagaggagagatccgatagatggaagaattttctggagaggcagtcagaaccatcgggacaggaagagaagggtgaagctgccgggcgtgttgtggatagcagtggaattggcggttcttcgttgctgcaggagaagattgtgcaaggaccacacaagatcgagatatggaagccaatcagaccatccctgggcaacatagagcagatcatgagtgtacgtgtcgaggagaagcaatcacctgcttctggcaatcaggacacgaaggatgtcatccatccggtgaaggttcaagagggcaagttatctgaggattcagatgatgagttctatgatgtagacaaggttgagactagtcaagaaatgcattcaagtgatagtgcgaatactggcattgacaacaggggtcaagaggaaaattttccttcgatggaagagttggagtgtctagtccatggtggactgccaatggctttgagaggagagctatggcaagcttttgttggcattggagtgcgtagggtaaaagggtactatgatagtctccttgtggcagaaggtgaactagaagataccagtggttcgcgttcttcaacctcggatgttgccggggaaaatactgaagtatcttctgaaaagtggaaagggcaaatagagaaggacttgcctagaacttttccaggtcatcctgctttagacgaggatggaagaaatgctttgagacgtttgcttctagcttatgctagacacaatccagcagttggttactgccaggcaatgaacttctttgctggtctcttacttctattgatgccagaagagaatgcattttggacattggtaggaattatcgacgactattttgatggatacttttctgaagaaatgattgagtcgcaggtggatcagcttgttttagaggagttggtacgagaaaaattcccaaaactagcaaatcacctggattaccttggtcttcaagttgcatgggttactggaccatggttcctatccattttcaccaatgtgcttccttgggagagtgttctccgtgtctgggatgtccttctgtttgatgggaatcgtgtgatgctattccggacagctcttgcactacttgagttttatggtcctgcacttgtgaccacaaaagatgccggtgatgcagttacacttttgcagtctttagctggctccacttttgacagcagccagcttgtcttgacagctcgcatgggatatcagtctgtagatgaaacaggattgcaagagttaaggaataagcatcggccatctgttctatcttcaatggaagaaagagcaaaaggtctaggtgccttggacaccaacggtcttgcatcaaagctctataatttcaaacatgatcctgaaccactggtgtcaataagtgattcgcaagatcagatgagtgatgtgggagatgggaatgccaaccaaagtgattctggaaatatggatgatatgtatggcggtctgacagtcagttctgagattgaagctttaccggacccaaaggaccagatctcttggctgaagtttgaattatgccgattgctagaggagagaaggtcagctgttctcagagctgatgaactagagacggcattgatggaaatggtcaagcaagataataggcggcaattaagtgcaaaggttgagcagtcggaacaagaattgtctgaactaagacaaaccctattggacaagcaggaacaagagcaagcaatgtgtcaggtactgttgcgagtggaacaagaactgaaaattgcagaggaagcacgcatctctgctgagcaggatgccgcagctcagagatacgctgttaatgtgctgcaggaaaagtatgaggaagctatggcttcactcgcgaaaatggagaacagggctgtaatggcagagacaatgttggaggccacactgcagtatcaaactagccagcagaaagctcttctttcccccttgccttctccaagaacatccatgatagacgcatcccctggtcgagcaaaccatgattcatcacaggagttccagcccaaaaaaataaacttgctctcaccattttcactgagttggcgcgataagaacaagggaaagcagaacaatgttgatgacagtgccaagcttactgatgcacatgatcaaagggaagaaataaccaacaacaatgacgagaagcaggtagaaacaccaaaactggatgtgctagaagagtctatgggttcacccaaagaagataacaagtcgagagtagaggtgccaaaggaaacagcgatttggcaagcgtccaagtagtcgcaaatgatatgaatgggcagcatgaacagttgcaagaaataaaactggattgaacagttgcaagaaatcacaaaccaaccttttgcatatatcttcaccactatggtattcttttatctgatcttaccatggttgtcgagagagttaaacctggagggcttcaaggttcgaacacgatcattgctgtacctattttttgctctgtccccttctttttaattgtttccttttttttttttatcattgccactcttgtaggtctataggttactttttctctccattacccccccagaagagaaaaaaagggcgaaagttatctggttgtccattagttaactttcgatgtaaatgcatcaggggaaattaccaaatgtagaaacaccctttgcaattatggtatgcttgtttgtgaatcgtc

SEQ ID NO: 16467 - DNA, 3329 bp, Oryza sativa
  Clone ID: PAT_MRT4530_22212C.1
atggatcggcaatggatgtacactgaccggtggtccaaagagtttattgacgacgtgcactattttttgagagtggccgaagctaacaggcaaaggggttttatttgttgtccatgcaataagtgtaagaatcagaaggagtattctgcatccaggactattcatttctacttgtttgagtcggggtttatgccaagctataactgttggacatcccacggagagcaaggtgttgaaatggaagaatatgaagtggaagacgacaatattctggactttgctcagtacgttggatttgaaggaaatcaaacgggcgaggaggaaagggatgctgatggtaacgacgttgcggatgatattggtcagatgttgcaggacgccaaggaggactgcgaaagtgaaaagggggcccataaattggacaagatgttagaggaccacagaatttcgttgtacccaggttgcgagcaggggcacaaaaagttggataccactctggagttcttgcaatggaaggcaaaaaatggggttagtgacaaggcatttggcgatttattgaaactcgtcaagaacattcttccagagggaaacaaattgcccgagacaacgtacgaggctaagaagatagtctgcccgctaggactggaagttcagaagattcacgcatgtccgaatgattgtatcctatatcgcggtgaggagtatgagaacctagaagcatgccctgtttacaaagcactacgatacaagattagacgagacgatccaggagaagttgacgggcagctaacaaagaagagaattcctgctaaggtgatgtggtatttccctataataccacgactaaggcgtttgttcaggaacaaggggaatgctagaatgatgcgatggcacgttgaagagcgtcaacaggacgggatgctgagacaccccgctgatggttcgcagtggcgaaacatcgacagaaaatttaaagaatttggaaaggacgcacgaaacatacggtttggtttgagtacggatggcatgaatccttttggagagatgagcagcggccataggacttggcccgttacgatgtgtatctacaacctcccccctggctatgtatgaagaggaagtacataatgatgccgattattattcaaggccccaagcaacctggtaacgacatcgatgtgtacctaagaccactggtcgaagatcttaagctgttgtggaagaaggaaggtgtccccgtgtgggacgaggacaaacaggaggagtttaacatacgagcgctgctgttcgtaaccatcaacgattggcctgcacttagcaacctatctgaacagtccaacaaggggtacaaggcttgcactcactgtatggatgaaacagaaagtacgtatcttaagcactataggaaggttgtatacatgggtcatcatcgattccttgcagcaaaccacccggtacggaagaaaggcaagcacttcgaacataaggctgaccaccgtatgaagcctaaacatcgcagcgggaaaacagtgtttgctatggttaaagatcttaaagtagtgttcggaaaggggcctggaagccagcctatagagagcgaagatggtcacgcggcgatgtggaaaaagaactctatattttgggagttaccctattgggaattcttggacgtacgccacgcaattgacgtgatgcacctcactaagaacctttgcgtaaaccttcttggcttcctaggtgtatacggaaagtcgaaagatacactggaagcacgtaataatctgaagcatatggaacaacgcagcgaccttcacccggaaccaaaggagaaaggaagccattacttgagtccagccagctacactcttagcaaggcagagaaggaaagtatgtttgaatgcttggagagcataaaggtaccgtctggatactccacgaatatcaagcgaataataagcacgaaggagaagaagttcacaaacctaaagtctcatgactgtcacgtgttgatgacacaactgctaccagttgtaataaggggtatccttccaaacaatgtctgggcaacaatgacaaagctatgtgcattcatgaacgcaattttgcagaaggtcatcgatccggatagattagaagcccttcagaatgatgtggtgcaatgtcttgtcagttttgagttgatatttctaccttcatttttcaatataatgacgcatctgctttgttaccttgtgaaagagatcagtattctcgggcctgtgtacctatacaacatatttcctttcgagaggtacatgggcgttctgaagaagtatgttcataaccgtgctcatccagaggcaagcatcgccaagggttatggaacagaggaggtcatcgaattttgcgtagaatttatcgaagatcttcgcccaatcggggtacctgaatcacgccatgaagggagactacggggaaagggaactctcggaaggaaagcaataatgacggtagacaacaatttattccgtaaagcccatttcacggttctgcaacaatcttcatttgtagctccttatatcgaggagcacttggctctagttcgcgccaggaacatcggtaagtccgatgcatggattacacggcatcacattgatactttccccgcgtggatacgacaacatctcatgggtaacgagtagatcaaccaacaacttgccttcctggcgagaggaccgtcttagtcgatcgcgacattccagggatatgagatcaatgggtacacattctacacgagagctcaagacatgaagagcacgaaccaaaacaacgctgttcgtgtcgatgccatgggacacgttggaacaactggcacgtattacggtgccatcgaggacatatgggaacttgactatggtcctctcaaggttcctctgttccggtgccaatgggttaggttgactggtggaggcgtaatgattgatgacagtgggatgacaacggttgaccttaacaaggttggatacttggacgaaccttttgtccttgccgatgatgtaacgcaagtctttttcgtgaaggacatgtctagcaaaggaaagaagggtagagggcctgacgagcctaagaatcacgtggttctcccaggcaaaagaaaaatcgtcgaagttgaggacaagactgacgaggattacgatcagttggatgggcaaccccctttcacggtgacgattgaccttagcatcctcctatcaaatgaagacaccccttactcacgtagcgatcacaaggagggaacaatattaaggagaaagtacgtgcggtcaactgtcaccgtcgatgtattgccg

SEQ ID NO: 16468 - DNA, 235 bp, Oryza sativa
  Clone ID: PAT_MRT4530_22213C.1
gtgacagcccctacctcgctgatgcactcatcttcacaatcccaacaagcactcgagacagcttatcctataacgaggaggagatactatcatacgtacgtcatccatagatcgttgccgacgacctgctcactaacttgacctacaaaggcactactgtataccgagataatgacactatgtaccgcgccctctatcgtcacatatgactgctcatcgatcacaaaccggctgt

SEQ ID NO: 16469 - DNA, 672 bp, Oryza sativa
  Clone ID: PAT_MRT4530_22214C.1
atgggcattcccagagctctcctgctgctgctgctccacgtcgccgtcgtcgtcgttctccggtcgctgccggtgtcctccgccgacctgtacgcgctcgtctacaagggctgctccaaccagagcttccccggcggcgcggtgccccccacagtcgccgcgctctcctcctcgctctcggaccagtccgcctccgccaagttctacaagacctcgtcgtcatcctcggcttcctccacctccgtcttcggcctcttccagtgccgcggggacctctccggctccgactgcgccgcctgcgtctcccgcgccatgtcatcctggtccgaggtttgcggcgcctccgtcgccgcccgtgtccagctcaccggctgcctcgcgctctacgagatatccgggttcccccaggtgtccgggacccagatgctgttcaagacctgcggcaccggcggcggcggcgggaccgacttcgagatgcgccgcgacaccgccttcgcgcagatggaggccagcgtcggcgggggaaacggcgggttctacgccaccagctaccagcaggtgtacgccatggcgcagtgcgagggcgacctctcctcgggggactgcggccagtgcgtcacccaggccgtccagcacgtcgaggtcgagtgcgggggcgcgccatcaggccag

SEQ ID NO: 16470 - DNA, 214 bp, Oryza sativa
  Clone ID: PAT_MRT4530_22215C.1
atggaaacccgaatccagaaaaagggaaagcaaaaggagcacaaaaccaactcgacgcatccgagctcccggttctcggaaggagatcaggccatccccccacacccaatcgggattccgcggcgagcaatcgccgatttcggccggatcgaccggagaaaggaaaggaaagccataaatgaggaggaggggttttacctcccgccctccgggg

SEQ ID NO: 16471 - DNA, 644 bp, Oryza sativa
  Clone ID: PAT_MRT4530_22216C.1
attgtaaaatcaaaggtgtttttgattattattctgtgatgaacaattggcattggagattattggttttgatatttggaatttatttacgaaatggttttagagatgattggaatttgcaggtgaataagaactgttgatgtgatttgggtacgatcagaccgggcatgtgctgtcggctagagttcaatgcacgtagttggtgaagattccatatggcatacgatggatgtattgtttgtgtatgggatgcggagttgaatttggaagtagttcaaatttggtatgattggagtttgtaaagtttgtttcttgtaagagaaggtttcctaggtggattaggacttctagtatgagtttggtttgtggctttaggctgcgtaccttatgtataaatagagagagagcgtcagaccggcggcatcgcggcggtcagaccgacggagcaatggcagtcagaccgacggtgacttcaggcacggcaggtgatctcggcgatccaaccggagttccaatcttggtcagaccaacggcttccaggcgatcagatcggcgcaacaccttcggtcagaccgcgatccgtcgaattcgaggattctgaaaaaaacaccacaataggttttcaaaagaaagcaatagtatat

SEQ ID NO: 16472 - DNA, 773 bp, Oryza sativa
  Clone ID: PAT_MRT4530_22217C.1
gaataccatatagcatgtccgaaatgtaattaatagagaagatataccatcttccaattaagcagagtttaggtgctcaactgtagtacataattttattttgggattggcacacacatagtactgaatttattgctagtttttaattccattgcataaatataaaggctaaggccggccaagcctcctgatcccccacacttctgctcctgttggtatttccatagttcatcaacatattgacgcagccacaattgttaaaaagcactgggaataccacagggacataagaggagagatcaaagaagccatgccaacgaggcctacttggacggtggtgctggttcatcttggttgagtggtgctccttcctgagacccagctgtaggggggaatggaaggtccacttcttcaggttgtgcttcagtctcctggtttgtagcacgggcataaaggcgttgaatctcagttccaaggcaagcattttcagccctcatatgacaagtactgcatatactattgaactcctgcaacttgattgcgtaattctttttcttcaatttctcattctcaagcttcagctgctcattttgttgctggagggacttattctgagcttgcctcctcgccagtgaaaccttcatttgctttgatggatatccagagttatcagccatttgatttatctttttcttcttcaatacgagtctcgtctccttctttcttcttctcccccccccctaaccatgatggtcattgttgttatcctccat

SEQ ID NO: 16473 - DNA, 370 bp, Oryza sativa
  unsure (1)..(370): unsure at all n locations
  Clone ID: PAT_MRT4530_22218C.1
tttnccctttaaaaaaaaaaaaaacccctttaaaaaaaaaattttttccccaaaggggggaaaanaggggcccaaatttggncccccctttttgggtttccccgncccccctttttgggaaaattgggaaaaccaaggtttgggtttnggaatttggccccaattggggggaaaaaaaaaaacctttaaattttgggaaattaattcccaangtttttgggttttttttttgggtttaaccaatttttgggtttttggtttccaaaaaaagntttttaattaatttaattcccaaggtttttaaaaattttaaaaaaacccaaaaaatttccaattgggggcccaaaattttcccccnnttttngnaaaa

SEQ ID NO: 16474 - DNA, 1790 bp, Oryza sativa
  Clone ID: PAT_MRT4530_22219C.1
atggcggcgccaccaagcatggaggagcctcttcttggaggcggcaatggcgaggagaagaaaggagggagctcgaggctagcggtggtggccgaggtgaggaagcagctgtacctcgccgggccgctcatcgccgggtggctgctgcagaacgtggtgcagatgatctccgtcatgttcgtcggccacctcggcgagctcgagctctccagcgcctccatcgccacctccttcgccggcgtcaccggcttcagcctcctggctggcatggcgagcagcctggacacgctgtgcgggcaggcgttcggggcgaagcagcaccggctcgtgggcgtgtacaagcagcgcgccatggtggtgctcggcctcgccagcgtgtgcgtcgccgcggtctgggcctacaccggcgagctcctcctgctgttcgggcaggacccggagatcgcggcggcggcggggagctacatccggtggatgatcccggcgctgctggcgtacgggcccctgcagtgccacgtccggttcctgcagacgcagaacgccgtgatgccggtgatgctcagctccggcgccgccgcggcgtgccacctgccggtgtgctggctgctggtgtacggcgccgggctcggcagcaagggcgccgcgctcgccaacgccgtcgcctacctcgccaacgccgccgccctggccgcctacgtcaggctgtcgccagcgtgccggagcacgtggacggggttctcgtcggaggcgttccacgacttggtcggcttcatgaggctcgctgttccttctgctctcatggtctgcacccgggtctcgaatgagctcggcgccggtcgacccgaggcggcccgtctggccagccgtgtggtgatggcgctgggtctcgtcgtcggcgtcgcgatcgggctcgccatgatcctggtgcgccatctatggggttacgcgtacagcaacgaggaggaggtggtccagtacgtcgcgaagatgatgcccattcttgccgtctcgttcctcttcgatgacctgcagtgtgttctgtcaggtgttgcaagaggctgtgggtggcaaaagattggtgccattgttaaccttggagcgtactacctcgtcggaattccagcggcgctgtgtttcgccttcgtctaccatcttggtggcatggacaccgtcgccaatctcgtcacggcgctcgccgctgcccatgccgtgacgtccactggcaagaacggagacctcctcctcgccaccctcaccaaggcataggagagagttttcagttcgtccttgcccgcagacatgacatgataatacaatgtacacgatccaagaaccaagatgaagatcgatggacgattttgtttggcaatagtggccaagaaattctacgagacaatgggaaattacagcttgagaaattaagaccgtcatctctatgttttgatgacacaattaatagtcgccaaaacaaggaactatctgcaaggaagagttcagacagcgagaaatctgtttttgggggatttttggtcagacgaaaaaataaaatgttatggactagagacgctgcattggatacaataatgaattgaaatgttcagttaactacatgtaatggatgttaggatttcgacaatgacactattttggctctactattgattagatgattaattatattgtaagtattatgtgacatgcgccattgagtcatgattcatgataccttttctcctaaaaaaaaaaaaaaaaaaaaaaaaaaaaaaaaaaacctgcagcccggggatcca

SEQ ID NO: 16475 - DNA, 557 bp, Oryza sativa
  Clone ID: PAT_MRT4530_2221C.1
cgatcgttgtcgtgtctcgcgagatggaggcgctcgccggcgggaggccgctgtcgggacgggcgcggcaggtcggccggagcagggaggaggagctgctcggcctcctctccgacttctccggcgacagcggcgagttcggccgcgagctgtcgttcagtgacctcgtcgtagtcgaggacacggcgaacaaccccagcccgagaggaggcgatggtggtggtgacagggcagctccgacggcggcggcggcggagaacggccaggcgaggccgtcgtcgtcgtccgagcaggaggaggcggcggaggcggcgtcgaggcggcagcagcagcagcaggcggcggcggcggcgagggagaggaggctgcggagacggcggagcgacagcaggggaagctgcgggggcagcggcgacggcgtgctgctcaacttctacgtgccgggcctgctcaccaggagcatgacgacgccgcggcccgccgcccgaggcacgcttcccggcgccgccgcggccgcggccgcgccggcgacggcggctgccggcaaagctaggtga

SEQ ID NO: 16476 - DNA, 318 bp, Oryza sativa
  Clone ID: PAT_MRT4530_22220C.1
atggcattgaccgaacgacaaacatcggcggcggtgtgtaggcaacgacgggacggtggggaggccaggtacagcgggaggcgcggctgcggtggtgggcgtgttggccaacaggtgggcggcatagcacgtgccacaagctcatcggtgatgcgtccgcgctgccctgctcagctcggccctatctctgctgtcaccagccgcacgatgcgtcaccactaccgacaacctcggcccaagacactaccaccaccagctcacccttgccgcttaggtgctagtgaggccttctattttttctatgagatttacatgtga

SEQ ID NO: 16477 - DNA, 1704 bp, Oryza sativa
  Clone ID: PAT_MRT4530_22221C.1
gcacgaggcaccacagatcttcttccttcccgagacgccaggaaacgccgggagaaagcatgggttctctgggagcagcaggtaagccgcacgccgtgtgcatgccgtacccggcgcaggggcacatcaccccgatgctgaacgtggcgaagctgctccacgcccgcggcttcgacgtcacgttcgtgaacaccgagtacaaccacgcccgcctcgtccgcacccgcggcgaggccgcggtggcgggcgcgccgggcttccggttcgccaccatccccgacggcctgccgccgtcggacgacgacgacgtcacgcaggacatcccgtcgctgtgccgctccaccaaggagacctgccttgcccccttccgccgcctcctcgcccagctgaatgaccccgccacgggccacccgcccgtcacctgcgtcgtctccgacgtcgtcatgggtttctccatggctgccgccaaggagctcggcctcccctacgtccagctctggacagccagctccatcagctatctcggataccgtcactaccgcctcctcatggaacgtggccttgccccactcaaagatgtcgatcagctgacgaatggataccttgacacgccggtggaagacgtgccggggctgaggaacatgaggatcaaggacttcccgagcttcatacacacgacgaacccggaggagtacatggtaggctacgtcatcgaggagacggagcgctgcaaggatgcctcggccatcatcgtcaactccttcggcgacctcgagggtgaggcggtggcggccatggaggcgctcggcttgcccaaggtgtacacgctcgggccgctgccgctggtggcgcgcaaggacccgccctcgccgcggcgctcgtccatcaggctcagcctgtggaaggagcaggaggagtgccttcagtggctcgacggcaaggaggctggctccgtcgtgtacgtcaacttcggcagcatcaccgtcatgaccaacgagcagctggtggagttcgcgtgggggctggccaacagcggcagggagttcctgtggatcgtccggcgcgacctcgtcaagggcgacacggccgtgctgccgccggagttcctggccgagacggcggagcgcggcctcatggcgtcctggtgcccgcagcaggacgtgctgaaccaccccgccgtgggcgcgttcctgacgcacagcggctggaactcgacgctggagagcttggccgccggcgtgcccgtcatcagctggccattcttcgccgaccagcagacgaactgccggtaccagtgcaacgagtggggcgtcggcatggagatcgacagcaacgtcaagcgcggcgccgtcgcgtgcctcatcgctgagctcatggaaggtcagaaggggaaggagatgaggaggaaggcggaggagtggagggagaaggcgatcagggcggctaagcccggcggctcgtctcaccgcaacttcgaagagctggtccgccacgtgctcctggccaaagagtcgtagctcctcgcgtatgatttcctttgcgctagtgtcgttgtcatgagtgatgagccatgagtgatcagtgttgtattgtgtatttgtggctactggcctactgcctatatatactggatggtgcaatatcaccctgtttgatttacattgttcagcctattattgtaatggattatctactcattatttt

SEQ ID NO: 16478 - DNA, 6252 bp, Oryza sativa
  Clone ID: PAT_MRT4530_22222C.1
atggatcggcaatggatgtacgctgaccggcggtccaaagagtttattgacggcgtgtattattttttgagagtggccgaagctaacagacaaaagggttttatttgttgtccatgcaataagtgtaagaatcagaaggagtattctgcatccaggactattcatttccacttgtttgagtcggggttcatgccaagctataattgttggacatcccacagagagcaaggtgttgaaatgaaagaagatgaagtggaagacgacaatattcaggactttgctcagtacgctggatttgaaggaaatcaaacgggcgaggaggaaagggatgctgatggtaacaacgttgcggatgatcttggtcagatgttgtaggacgccaaggaggattgcgaaagtgaaaagggggcccataaattggacaagatgttagaggaccacagaacgtcgttgtacccaggttgcgagcaggggcacaaaaagttgaataccactctgaagttcttgcaatggaaggcaaaaaatggtgttagtgacaaggcatttggcgatttattgaaaatcgtcaagaacattcttccggagggaaattgcccgagacaacgtacgaggctaagaagatagtctgccctctaggattggaagttcagaagattcacgcatgtccgaatgattgtatcctatatcgcggtgaggagtacgagaacctagaagcatgccctgtttgcaaagcactacaatacaagattagacgagatgatccaggagaagttgacgggcagctaacgaagaagagaattcctgctaagatgatgtggtatttccctataataccacggctaagacgtttgttcaggaacaaggggaatgctagaatgatgcgatggtacgctgaagagcgtcaacaggacgggatgctgagacaccccgccgatggttcgcagtggcgaaacatcgatagaaaatttaaagactttggaaaggacgcacgaaacatacggtttggtttaagtacggatggcatgaatccttttgaagagatgagcagcggccatagcacttagcccgttacgatgtgtatctacaacctccccccgtggctatgcatgaagaggaaatacataatgatgccgattataattcaaggccccaagcaacctggtaatgacatcgatgtgtacctaagaccactggtcgaagatcttaaactgttgtggaagaaggaaggtgtccccgtgtgggatgaggacaaacaggaggagtttaacctacgagcgctagtgttcgtaactatcaacgattggcctacacttagcaacctatccgggcagtccaacaaggggtacaaggcatgtactcactgtatggatgaaacagaaagtacgtatcttaagcactgtaggaaggttgtgtacatgggtcatcatcgattccttgcagcaaaccacctagtacggaagaaaggcaagcactttgaacataaggcgaaccaccgtacgaagcctaaacatcgcagcgggaaaacagtgtttgctattgttaaagatcttaaagtagtgtttggaaaggggcctggcagccagcctatagagagcgaagatggtcacgcggcgatgtggaaaaagaactctatattttgggagttaccctattgggaattcttggacgtccgccacgcaatcgacatgatgcacctcactaagaatctttgcgtaaaccttcttggcttcctaggtgtatatggaaagtcgaaagatacactggaagcacgtaatgatctgaagcatatggaacaacgcggtgaccttcacccagaaccaaatgagaaaggaagccattatttgagtccagccaactacactattagcaaggcagagaagaaaagtatgtttgaatgcttggagagcatcaaggtaccgtctggatactccacgaatataaagtgaataataagcacgaaggagaagaagttcacaaatctaaagtctcatgactgtcacgtgttgatgacacagctgctaccagttgtaataaggggtatcctcccagacaatgtccgggcaacaataacaaagctatgtgctttcatgaacgcaatttcgcagaaggtcatcgatcctgatagattagaagccctgcagattgatgtggtgcaatgtcttgtcaactttgagttgatatttccaccttcatttttcaatataatgacgcatctgctttgtcaccttgtcaaagagatcggtattctcggtcctgtgtacctacacaatatgtttcctttcgagaggctcatgggtgttctgaagaagtatgttcgtaaccgtgctcgtccagaagcaagcatcgccaaggggtatggaacagaggaggtcattgaattctgcgtagaatttatcgaagaccttcacccaatcggggtacctgaatcacgccatgaagggagactacggggaaaggggactctcggaaggaaagcaataatgacggtagacaacaatttattccgtaaaacccatttcacggttctgcaacaatcttcattggtggatccctacatcgaggagcacttggctctagttcgcgccagaaacatcggtaagtccgatgcatggattacaaggcatcacattgatactttctccacgtggctgcaacatctcatgggtaacgagacgattaaccaacaactggccttcctggcgaggggaccatctggcttgatcgcgacatcccagggatatgaaatcaatgggtacacattctacacgagggcccaagatatgaagagcacgaaccagaacagtgttgttcatatcgaggccatgggacacgatggtacaactggcacgtattacggtgccatcgaggacatatgtgaacttgactatggacctctcaaggtccctctgttccggtgtcaatgggctagcttgactggtggaggcgtaacgattgatgacagtgggataacaacggttgaccttaacaaggttggatactcggacgaactttttgtccttgccaatgatgtaacccaagttttttacgtcaaggacatgtctagcaaaggaaaaaagggcaaagggcctgatgagccgaagcgccacgtggttctcccagtgcgcccttgtcttctccaccaacacttagacgttgttcgatctcggcttctccttcgccgccactgtgcctagggcaaccccgcgccgacaccgccgtcgtctctcgccgtcgcttggccgtcctcgccgcctccaccgcagacgtcgccgctgcatctcttgggtgttttttgtatgcacagatggctgatcgcgatgaggaacagatactatacgatacaattgcagagggaagcagccagtactggaacgaagaagaggggaacgacgatccacaccagtacttgaacgaggaggggaacgtggagagggatgcggaggggaacgaggaggggaacgatgaggaggaggctagtggaagtcatccctccgctggacagaagagggcacgcagacaacgaggtgccgcgaagaagatagagggtcggcacatcataactgagatggacgaagacggccgacctagtgccccggcagaagcagccaagaattttgtacgccatagcggttgggttgtgagggacaacgtgcctgtcagcacggtgtactggcgcagaacaagggcacgcggggataatgacagctttgtcccggacttagagaaagagatgctgtggaccacaatgctcgagacgttcacgctacccgcgggtacggagaacatagtgaaacagtggactctgaagaaaatggcagaacagttcgagagcttcaagggagatctctacaagaaatacatcctgaagggactaacaccgaacttcgacgtattcccaaagctaagggatcattaggacgagttcgttgcttacaagacagggcaacaagggcaagcgatgatggccagaaacaaagacaacgccgccaagaagaagtaccatcaccacttggggtcaggcggatatagcgtcgcaatgccgaagtgggaggagatggaggcaagtttgattgagaggggtatcgaaccggccaccgctaaatggccggatcgatcgaagttttggtactatgctcacggtggaacgtttaacccagttgatggctcccttgtctttagcgatcagatacgcgaggctgtcagtcgactaacggacgcagtgatagcctcttctcagggcacattccgacccgacagagagaaggatgagctgtcactcgccctacagactcccgagcatccaggacgaatacgagggaaaggcgtgattccctagaagattggatttaaggaggacatccacacgtacaggagtcggatgaggagcaagagagataccgaggcgaagattgcagatcttgagtacagggtatcgagctacgagctcagcatgcaagaggaggtggcaaggaaggtggatgaacgtatggccgcacatcggtcctaggatccccatccgtacattcatcctgcaatggtcagcccatcaggcaatcgtagcagctgcgcctcaacggggcaggtcggatcacagagcatggacgccatgcaaacccaggacgaaaccatctgccccgttgatgagatcacgcagcggacaccatgtgagctgcatattcccttcaagaacttatcaatccttgtggcgtcgggaatggccatcccaacggacccttccgggacttaccactgcaggccgattccagcaggatactcgagggtcgaagttgagctggtggaagccgcgtacgaggacctcgagttggactacccaggaggagacggtgagacgcatctacgagacacaagccacgccatcatactatggcgcaagcagtacatcatccttcctgggcgacaagcggcgtctcgtgcaccaactcctccggctcctccgccacctcctgctgcaccatctcctccggctcctccggctcctccgcctccaccgtgtccgcctgcacctcccaagacaaggtctcgccaagctccaccgcctgcccgcacaagggcaacgaagaaggtgaaagttgacgccaccaaaaacaaggagccaccgtacgattgcagtcaagaggagcttgatgcttatgtggcaggagaggtgaagaggcaactcaagcctcggagtcctgaaaagaagatacctattgacccgagcgtgaagaacttcttcaagggaatgtccacaacaaacaaggaggcgttacagatattggactatgaccgaacacttcagagagcctatcacaagaagtccaaaccagtccctcagcttggagaacaaccaaaccaagaggtcgagccgttggtgaccggcgaagattttggcataacggaattcatttcaaacaccggtctaactgtggatcagttggttggaggcgcaccaatcccgaaggcggaagtggcatacaagtttgaacttggtaaaccgcttgtcaaacctgaacagctgcagtccctaccaacacagatgtacaaattccatgaacggtacatggaaatgagcgccaagggtagagagatgttcagagcgaggatcagaaaccccgacttcttgcaaggagaagatgttctctggatccatttcaaggatctcttcgatctttaccagttggacgccctcgacgtctctcttctgagcgcatggattttaatggagattcaaagggcccgacggcggagggtctacgatactgggttcatcgaccctcggaaaatcaacaccgaaatgatcgacaagtacgagaaagacacaaaggacaatctcgtccatctcctaacgcagcagcatttcaagacgtacatactactgccgtacaacacagaattccactgggtcctgttattcttcgacttgtacgcatgcagagtcactgtgtacgactcaatgaataaagaggagaagatttttgacaaggtcttcaaactgatagacagggcttgggatcggttccgtcaattggtccgcgggacttggaaagaaaaacttggacggaggtttcattttctagtgattcacatgagggataatctcccacacaaggattttatcacggctgttcaagaacaactgatgggattcatcaacgaagaagtccttaatcccgacggtgaattctactacgacggatcaacaattcataacgttggtccttcctcttctgacataacgccggcgtcgaagtc

SEQ ID NO: 16479 - DNA, 379 bp, Oryza sativa
  Clone ID: PAT_MRT4530_22223C.1
ttgttttttaaaacaaaggggggttttttttttattgtttaatctacaccttgcatcccattgaacaagatgcccatggagagcaaccagaagttcatacaccttagccaaggggaactacatgtaatggtaccatcagggacgaaaaacacctaacactgattagatggataaagggattttggactggagagagccactgagctcgacaaccattgaactagaagataagatgattctgacacggatggctaaggataactgggaacgatgggccccaccaactattattttacttttcccgacggacagagccgcccaagccccccagcgtgttgccaccaaaggcgcctgcaccgtcctcaagggcacaccctta

SEQ ID NO: 16480 - DNA, 3447 bp, Oryza sativa
  Clone ID: PAT_MRT4530_22224C.1
acgccgacgccggggccacgctgccgccggcacgccacgccgccgccttcgccgccgcgcgcgcaacgccgccgccgccacgccacgccgccgcgcaacgccgccgccgcatgcaatgccacgccgccgccgccgtcgccactccgctgccgccgcgccaagcgccggcccgatgccgccacaccgctgttaacgaacacgtgaacgagaacgaacacgtcaatgtacgttgccgcgagaacgtgaacgagaacgagaacgatcgaacgaacgagagtgagaacgaacacgtcaacgtacgttgccgcgagaacgtgaacgagaacgagaacgatcgaacgaacgagagcgagaacgagaacgatcgaacgaattaacgtgaacgagaacgacaacgaatggctgaccgcgatgaggaacagatattgtacgatacaatcgcggagggaagcagccagtactagaatgaagaagaggggaacgaggatccaaaccagtacttgaacgaggaagggaacatggagagggatgcggaggggaaccagcaggggcacgtggaaagggatgtggaggggaaccaggaggaggaggctagtggtagtcaaccctccattggacagaagagggcacgcgggcaacgaggtgcagtgaagaagcttgagggtcggcacatcataacggaagtggaagaagatggacgtcctagtgccccggccgaagccgccaagaactatgtacgtcacagcggttgggttgtgcgggataacgtgcctgtcagtacggtgtattggcgaagaacaagggcacacggagatcatgagagctttgtcccagattcggagaaagagatgctgtggaccacaatgctcgagacattcacccttcctgcgggtacagaggacaaagtgaaaaggtggactctgaagaaaatggcagaacagtttcagagtttcaatagagatctataccagaagtatatcctgaaggggaagacaccgaacttcgacacatttccaaagctaagggatcactgggacgagttcgttgcatataagacaggtgaacaagggcaggcgatgatggaaagaaacaaagaaaatgccgtcaagaagaagtaccatcaccacttggggttaggaggctatagcgtcgcgatgccgaagtgggaggagatggaggctagcttgattgagaggggtatcgaaccggcaaccgccaattggctggaacgatcgaagttctggtactatgctcacggtggaacgctcaacccagctgatggctcactggtcttcggcgatcagatacgagaggctgcgcgacgactaacagatacagtggaagcctcctctcagggcacgttccgaccggacagagatagggacgagctgacactcgccttgcagactccagagcatccaggacgaacacgagggaaaggggtgattccttggaagattggtttcaaggaggacatccacacgtacatgagtcggatgaggagcaagagagataccgaggcgaagattgcagatctagagttccgggtatcgagctacgaactcagaatgcaagaggaggtggcaaggaaggttgatgaacgcatggccgcacatcggtcccatgatccccagccgaccattcctcctgcaatggtgagcccgtcaggaaaccgtagtagctgcgcctcaacggggcaggtaggatcacagagcatggacgccatgcaaacacaggacgaatcgacctgtcccgttgatgatatcactcagcggacaccatgtgagcttcattttccttacaagaacttatcaataaaggtggcgtcgggcacggccatcccaacggacccttcaggtacttaccacttcaggccgattccagcaggatactcgaaggtcgaagttgagtttgtcgaaggcgcgtacgaggacctcgagctggattaccctggaggagacggatcctgcaccgtctcctcctcatgctccgccagcaccgtctccacctcaggctccagcaccgactcctcctcaggatcctgcaccgactcctcctcgggctcctacacctactcctccgcaagctcctcttccggcacatttaaagtcaagggcccccccagctccaccgcctgcccacacaagggcaacgaagaaggcgaaagttgacaccgccaagaacaaggacccggggtacgattgcacgcaagaggagcttgacgcttacgttgcatcagaagtcaagagacaattcaagcctcgaagtccagaaaagaagattcctatagaccccagtgtcaggaacttcttcaggggtatgtctgcacctgtcaaggaggccatcaagctatcggactatgagcgaacgctgaagaaagcatcttctggaaagtccaaaccagtccctcagcttggagagcaaccaaaccaggagatcgagccgttggtgaccggggaagacatgacgatagaagaatttattattgacaccggtctaactacggatcaattgctaggagttgaaccaatagaaaaggcggaattgaaatacatgtacaaactcgggaaaccgcttgggaaaccgcttgtcaagcccgagctggtgcagtccctacccacacaaatgtacaagttccatcagctgtacatggagatgagcgccaccggtagatagatgatcggagcgaggatcagggacccagacttcttgcaaggagatgatattctctggatcaatttcaagggaatctacgaagtataccagctggacgccctcgacgtctctattatgagttgctggattttaatggagattcaaagggcccgacgtcggagtgttttcgatactggattcatcgaccctcggagagtaaacgtcgcaatgctcaaccaatatccacaagaaacagaggacaatctcgtccatctcctgaaggcgcagcattacaagacgttcatactgttgccgtacaacacagaatttcactgggtgcttttactcttcgacctgtcggcctgcaccgtcaacgtatatgactcaatggataaaaaagagtctacgtttgacaaggttttcgaacttatagacagggcttggtatcggttccgtcatttggtccacggcaattggagagaaagacttaggcggaggttcaaatttccttgcgcaaagcaaaagcagagaactaacttgtgcggctactacgtgtgcgagtattgccactgccttgcagaccaaatcatcaccacaagagagcttgattttattcgcatgagggataacctgaccacacacaaggaatttatcgtggcggttcaagaacaactcatgggattcatcaacgaagaaatccttgatcccaagggtgaattctactatgacggaaacacaattcaccggtccttagcttctgagctagcagcgagtactactgctacgtcgaaa

SEQ ID NO: 16481 - DNA, 285 bp, Oryza sativa
  Clone ID: PAT_MRT4530_22225C.1
atggagatatcgacctatacccgagagatccacggtggtggggaaccaaaaaaaacgacgattatctcgatgccgcgtgcaagagagaaaaaactgaagaagaagaagaagaagaagaagaagaagaagaagaagaagaagaatcaatgcaaacgcaatgcaggtaggaccgggccgggccaggccagggcctctcctcacctctcattttcgtcctcggcctggtctggtagggcccccatggcgagacaggctggctctggatccggacggatcgatcggtag

SEQ ID NO: 16482 - DNA, 5922 bp, Oryza sativa
  Clone ID: PAT_MRT4530_22226C.1
atgttggaggaccacagaacttcgttgtacccaggttgcgagcaggggcacaaaaagttggataccactttggagttcttgcaatggaaggcaaaaaatggggttagtgacaaggcatttggcgatttattgaaactcgtcaagaacattcttccggggggaaacaaattgcccgagacaacgtacgaggctaagaaaatagtctgcccgttaggactggaagttcataagattcacgcatgtccgaacgattgtatcctatatcgcggtgaggagtatgagaacctagaagcatgccctgtttgcaaagcactacgatacaagattagacgagacgatccaggagaagttgacgagcagctaacaaagaagagaattcctgctaaggtgatgtggtatttccctataataccacggctaaggcgtttgttcaggaacaaggggaatgctagaatgttgcgatggcacgctgaagagcgtcaacaggacgggatgctgagacatcccaccgatggttcgcagtggcaaaacatcgacagaaaatttaaagaatttgaaaaggatgcacgaaacatacggtttggccccaagcaacctggtaacgacatcgatgtgtacctaagaccattggtcgaagatcttaaacagttgtggaagaaggaaggtgtccctgtgtgggacgaagacaaacaggaggagtttaacctacgagcgctgctattcgtaaccatcaacgattggcctgcacttagcaacctatccggacagtccaacaaggggtacaaggcttgcactcactgtatggatgaaacagaaagtacgtatcttaagcactgtaggaaggttgtatacatgggtcatcgtcgattccttgcagcaaaccacccggtacggaagaaaggcaagcacttcgaacataaggccgaccaccgtatgaagcctaaacatcgcagcgggaaaacagtgtttgctatggttaaagatcttaaagtagtgttcggaaaggggcctggaagccagcctatagagagcgaagatggtcacgcggcgatgtggaaaaagaactctatattttgggagttaccatattgggaattcttggacgtacgccacacaatcgacgtgatgcacctcactaagaacctttgcgtaaaccttcttggcttcctaggtgtatacggaaagtcgaaagatacactggaagcacgtaatgatctgaagcatatggaacaacgcggcgaccttcacccggaaccaaaggagaaaggaagccattacttgagtccagccagctacattcttagcaaggcagagaaggaaagtatgtttgaatgcttggaaagcataaaggtaccgtctggatactccacgaatatcaagcgaataataagcacgaaggagaagaagttcacaaacctaaagtctcatgactgtcacgtgttgatgacacaactgctaccagttgtaataaggggtatccttccagacaatgtccgggcaataataacaaagctatgtgcattcatgaatgcaatttcgcagaaggtcatcgatccagatagattagaagcccttcagaatgaagtggtgcaatgtctcgtcagttttgagttaatatttccaccttcatttttcaatataatgacgcatctgctttgtcaccttgtgaaagagatccgtattctcgggcctgtgtacctacacaacatgtttcctttcgagaggtacatgggcgttctgaagaagtatgttcgtaaccgtgctcgtccagaggcaagcatcgccaacggttatggaacagaggaggtcatcgaattttgcatagaatttatcgaagaccttcgcccaattggggtacctgaatcacgccatgaagggagactacggggaaagggaactctcggaaggaaagcaataatgacggtagacaacaatttattccgtaaagcccatttcactgttctgcaacactcttcattggtagctccttacatcgaggagcacttggctctagttcgtgccaggaacatcggtaagtccgatgcatggattacacgacatcacattgatactttccccacgtggctacgacaacatctcataggtaacgagtcgatcaaccaacaacttgccttcctagcgaggggaccgtctgggtcgatcgcgacattccagggatatgagatcaatgggtacacattctacacgagagcccaagacataaagagcatgaaccaaaacagcgttgtttgtgtcgatgccatgggacacgatggaacaactgccacgtattacggtgccatcgaggatatatgggaacttgactatggtcctctcaaggttcctctgttccggtgccaatgggttaggttgactggtgaaggcgtaatgattgatgatagtggtatgacaactgttgaccttaacaaggttggatactcggacgaaccttttgtccttgctaatgatgtaacgcaagtctttttcatgaaggacatgtctagcaaaggaaagaagggcagagggcctgacgagcctaagcgtcaagtggttctcccaggcaaaagaaaaatcgtcggagttgagtacaagactgacgaggattacgatcagttggataggcaaccccctttcacggtgacgattgaccctagcatcctcctatcaaatgaagacaccccttactcacgcagcgatcacaaggagggaacaatgaaaagacgtgttgtcggagtcgtccctcaagccggagtggaagagctagccctagaaatggctgaccgcgatgaggaacagatattgtacgatacaatcgcggagggaagcagccagtactggaatgaagaagaggggaacgaggatccaaaccagtacttgaacgaggaagggaacgtggagagggatgcggaggggaaccagcaggggcacgtggaaagggatgtggaggggaaccaggaggaggaggctagtggtagtcaaccctccgttggacagaagagggcacgcgggcaacgaggtgcagcgaagaagcttgagggtcggcacatcataacggaagtggaagaagatggacgtcctagtgccccagccgaagccgccaagaactatgtacgtcacagcggttgggttgtgcgggataacgtgcctgtcagtacggtgtactggcgaagaacaagggcacgcggagatcatgagagctttgtcccatattcggagaaagagatgctgtggaccacaatgctcgagacattcacccttcctgctggtacagaggacaaagtgaaaaggtggactctgaagaaaatggcagaacagtttcagagcttcaagggagatctgtaccagaagtatatcctgaaggggcagacaccgaacttcgacacattcccaaagctaagggatcactgggacgagttcgttgcatataagacaggtgaacaagggcaggcgatgatggaaagaaacaaagaaaatgccgtcaaaaagaagtaccatcaccacttggggtcaggaggctatagcgtcgcgatgccgaagtgggaggagatggaggctagcttgattgagaggggtatcgaaccggcaaccgccaattggccggaacgatcgaagttttggtactatgctcacagtggaacgctcaacccagctgatggctcactggtcttcggcgatcagatacgagaggctgcgcgacgactaacagatgcagtggaagcctcctctcagggcacgttccgaccggacagagatagggacgagctgacactcgccctgcagactccagagcatccaggacgaacacgagggaaaggggtgattccttggaagattggtttcaaggaggacatctacacgtacaggagtcggatgaggagcaagaaagataccgaggcgaagattgcagatctagagttccgggtatcgagctacgaactcagaatgcaagaggaggtggcaaggaaggttgatgaacgcatggccgcacatcggtcccatgatccccagccgaccattcctcttgcaatggtgagcccgtcaggaaaacgtagcagttgcgcctcaacggggcaggtaggatcacagagcatggacgccatgcaaacacaggacgaatcgacctgttccgttgatgacatcactcagcggacaccatatgagctgcatattccttacaagaacttatcaataaaggtggcgtcgggcatggccatcccaacggacccttcaggtacttaccactgcaggcagattccagcaggatactcgaaggtcgaagttgagttggtcgaaggcgcgtacaaggacctcgagctggattaccctggaggagacagtgagacgcatctacgagacacaagccatgccattattctatggcgcaggtggtacatcatcctccctgggcgaaaagcggcgtctcgtgcaccatctcctcctcaggatcctgcaccgtctcctcctcatgctctgccagcaccgtctccacctcaggctccagaactaactcctcctcaggatcctgcaccgactcctcctcgggctcctacacctactcctccgcaagctcctctttcggcaccttcaaagtcaagggcatccccagctccaccgcctacccacacaagggcaacgaagaaggcgaaagttgacgccgccaagaacaaggacccggggtacgattgcacgcaagaggagcttgacgcttacattgcatcagaagtcaagagacaattcaagcctcgaagtctagaaaagaagattcctatagaccccagtgtcaggaacttcttcaggggtatgtctgcacctgtcaaggaggccatcaagctatcggactatgagcgaacgctgaagaaagcatcttctggaaagtccaaaccagtccctcagcttggagagcaaccaaaccaggagattgagccgttggtgaccggggaagacatgacgatagaagaatttattattgacaccggtctaactacggatcaattgctaggagttgaaccaatagaaaaggcggaattgaaatacatgtacgaactcggtaaaccgcttgtcaagcccgagctggtgcagtccctacccacacaaatgtacaagttacatcagctgtacatggagatgagcgccaccggtagagagatgatcggagcgaggatcagggacccggacttcttgcaaggagatgatattctctggatcaatttcaagggaatctacgaagtataccagctggacgccctcgacgtctctattatgagttgctggattttaatggagattcaaagggcccgacggcggagggttttcgatactggattcatcgaccctcggagagtaaacgtcgcaatgctcgaccaatatccacaagaaacagaggacaatctcgtccatctcctgaaggcgcaacattacaagacgttcatactgttgccgtacaacacagaattccactgggtgcttttactcttcgacctgtcggcctgcaccgtcaacgtatatgactcaatggataaaaaagagtctacgtatgacaaggttttcgaacttatagacagggcttggtatcggttccgtcatttggtccgcggcaactggagagaaagacttaggcgtaggttcaaatttccttgcgcaaagcaaaagcagggaactaacttgtgcggctactacgtgtgcgagtattgccactgccttgcagaccaaatcatcaccacaagagagctcgattttattcgcatgagggataacctgaccacacacaaggaatttatcacggcggttcaagaacaactcatgggattcatcaacgaagaaatccttgatcccaatggtgaattctactacgacggaaacacaattcaccggtccttagcttctgagctagcagcgagtactactactacgtcgaaatcgtag

SEQ ID NO: 16483 - DNA, 581 bp, Oryza sativa
  Clone ID: PAT_MRT4530_22227C.1
atgggcttcatccccaggacggagacgcaacggacgggcagggcccgggaaaggcggcggccggtaccgcggcgggaggaggtggtggtcgtgacggagctggagctgcggatgcagctgctcggcggcggcggcaactgctacaacatcaacgacaacgccgacctcctcgcggagatcctggcgcggctggacggccgctcgctcgccgccgccgcctgcgtgtgccgcctctgggccgccgtggcgcgccgggacgccgtctgggaggcgctctgcctccgccacgtggggccggcgtccggccccacggccggccccgccacccgcgccgtcgtcgccgcgctcggcgggtaccgccgcctctaccgcctctgcctcggcccggcgctggaccgcctcgggcgcggcggcggcgccatcgcccacgcgcacgccagggcccgcctgtccctctccctctcgctgtcgctcttctccatcgactgctacgagcgcctcggcggcggtggcggcgccggcgccggcaggcagccgcagccgtcgtcactgctcttcctgtgcaagccagtggacgtctc

SEQ ID NO: 16484 - DNA, 6332 bp, Oryza sativa
  Clone ID: PAT_MRT4530_22228C.1
atggatcggcaatggatgtacgctgaccagcggtccaaagagtttattgacggcgtgcattattttttgagagtggccgaagctaacaggcaaaagggttttatttgttgtccatgcaataattgtaagaatcggaaggagtattctgcatccaggactattcatttccacttgtttgagtcggggttcatgccaagctataattgttggacatcccacggagagcaagatgttgaaatggaagaagatgaagtagaagacaacaatattccggactttgctcagtacgctggatttgaaggaaatcaaacgggcgaggaggaaagggatgctgatggtaacaacgttgcggatgatcttggtcagatgttgcaggacgccaaggaggattgtgaaagtgaaaaggaggcccataaattggacaagatgttagaggaccacagaacgtcgttgtacccaggttgcgagcagtagcacaaaaagttggataccactctggagttcttgcaatggaaggcaaaaaatggtgttagtgacaaggcatttggcgatttattgaaactcgtcaagaacattcttccggagggaaacaaattgcccgagacaacgtacgaggctaagaagatagtctgccctctaggactggaagttcagaagattcacgcatgtccgaatgattgtatcctatatcgcggtgaggagtacgagaacctagaagcatgccccgtttgcaaagcactacgatacaagattagacgagatgatccagaagaagttgacgggcaactaacgaagaagagaattcctgctaaggtgatgtggtatttccctataataccatggctaaggcgtttgttcaggaacaaggggaatgctagaatgatgcgatggcacgctgaagagcgtcaacaggatgggatgctgagacaccccgctgatggttcgtagtggcaaaacatcgatagaaaatttaaagactttggaaaggacgcacgaaacatacggtttggtttaagtacggatggcatgaatccttttggagagatgagcagcggccatagcacttggcccgttatgatgtgtatctacaacctccccccgtggctatgtatgaagaggaagtacataatgatgccgattataattcaaggccccaagcaacctggtaacgtcaatgtgtacctaagaccactggtcgaagatcttaaactgttgtggaagaaggaaggtgtccccgtgtgggatgaggacaaacaggaggagtttaacctacgagcgctgctgttcgtaaccatcaacgattggcctgcacttagcaacctatccgagcagtccaacaaggggtacaaggcttgcactcactgtatggatgaaacagaaagtacgtatcttaagcactgtaggaaggttgtgtacatggttcttcgtcgattccttgcagcaaaccacccgatacggaagaaaggcaagcactttgaacataaggcagaccaccgtacgaagcctaaatatcgcggcgggaaaacagtgtttgctatggttatagatcttaaagtagtgtttggaaaggggcttggcagccagcctatagagagcgaagatggtcatgcggcgatgtggaaaaagaactctatattttgggagttaccctattgggaattcttggacgtccgccacgcaatcgacgtgatgcacctcactaagaatctttgcgtaaaccttcttggcttcctaggtgtatatggaaagtcgaaagatacactggaagcacgtaatgatctgaagcatatggaacaacgcggtgaccttcactcggaaccaaaggagaaaggaagccattacttgagtccagccagctacactcttagcaaggcagagaaggaaagtatgtttgaatgcttggagagcatcaaggtaccgtctggatactccacgaatataaagcgaataataagcacgaaggagaagaagttcacaaatctaaggtctcatgactgtcacgtgctgatgacacagctgctaccagttgtaataaggggtatcctcccagacaatatccgggcaacaataacaaagctatgtgctttcatgaacgcaatttcgcagaaggtcatcaatcctgatagattagaagccctacaaaatgatgtggtgcaatgtcttgtcagatttgagttgatatttccaccttcatttttcaatataatgacgcatctactttgtcaccttgtcaaagagatcggtattctcggtcctgtgtacctacacaacatgtttcctttcgagaggtacatgggcgttctgaagaagtatgttcgtaaccgtgctcgtccagaggcaagcatcgccaaggggtatggaacagaggaggtcattgaattctgcgtagaatttatcgaagaccttcgcccaatcggggtacctgaatcacgccatgaaggaagactacggggaaaggggactctcggaaggaaagcaataatgacggtagacaacaatttattccgtaaagcccatttcacggttctgcaacaatcttcattggtgactccctacttcgaggagcacttggctctagttcgcgccagaaacatcggtaagtccgatgcatggattacaaggcatcacattgatactttctccacgtggctgcgacaacatctcatgggtaacgagacgattaaccaacaactggccttcctggcgaggggaccatctggctcgatcgcgacattccagggatatgaaatcaatgggtacacattctacacgagggcccaagacatgaagagcacgaaccagaacagtgatgttcgtatcgatgccatgggacacgatggtacaactggcacgtattacggtgccatcgaggacatatgggaacttgactatggacctctcaaggtccctctgttccggtgccaatgggttaggttgactggtggaggcgtaacgattgatgacagtgggatgacaacggttgaccttaacaaggttagatactcggacgaaccttttgtccttgccaatgatgtaacccaagttttttacgtcaaggacatgtctagcaaaggaaaaaaggccaaagggcttgacgacccgaagcaccacgtgatattgccggtgcgccctcgtcttctccaccatcacttagacattttttgatctcggctcgatctccttcgccgccaccgtgcctagggcaaccccacgccgacaccgccgtcgtctctcgccatcacttggcggtcctcgccgcctccgccgcagacgcccccgccgcatctcttgagtgttttttgtatgcacagatggctgatcgcgatgaggaacagatactatacgatacaatcgcagagggaagcagccagtactagaacgaaggagaggggaacgaggatccaaaccagtacttgaacgaggaggggaacatggagagggatgcggaggggaacgaggaggggaacgataaggaggaggctagtggaagtcatccctccgctgcatagaagagggcacgcggacaacgaggtgccgcgaagaagatagagggtcggcacatcataactgaggtggacaaagacggccgacctagtgccccggcagaagcagccaagaattttgtacgccatagcggttgggttgtgagggacaatgtgcctgtcagcacggtgtactggcgcagaacaagggcacgcggggataatgacaactttgtcctggactcagagaaagagatgctgtggaccacaatgctcaagatgttcatgctacccgcgggtacggagaacatagtgaaacaatggactctgaagaaaatggcagaacagttctagagcttcaagggagatctctacaagaaatacatcctgaagagactaacaccgaacttcgacgtattcccaaagctaagggatcattgggacgagttcgttgcttacaagacagggcagcaagggcaagcgatgatggccagaaacaaagacaatgccgccaagaagaagtaccatcaccacttggggtcaggcggatatagcgtcgcaatgccaaagtgggaggagatggaggcaagtttgattgagaggggtattgaaccggccaccgctaaatggccggatcgatcgaagttttggtactatgcttacggtggaacgcttaacccagttgatggctcccttgtctttaacgatcagatacgcgaggctgccagtcgactaacggacgtagtggtagcctcttctcagggcacattccgacccgacagagagaaggatgagctgtcactcaccctacagactcccgagcatccaggacgaacacgagggaaaggcgtgattccctggaagattggatttaaggaggacatccacacgtacaggagtcggatgaggagcaagagagataccaaggcgaagattgcagatcttgagtacagggtatcgagctatgagctcagcatgcaagaggaggtggcaaggaaggtggatgaacgtatggccgcacatcggtcccaggatccccagctgtacattcatcctgcaatggtcagcccatcaggcaatcgtagcagctgcgcctcaacggggcaggtcggatcacagagcatggacgccatgcaaacccaggacgaaaccacctgccccgttgatgagatcacgcagcgaacaccatgtgagctgcatattcccttcaagaacttatcaatcaaggtggcgtcgggaatggccatcccaacggaccctttcgggacttaccactgcaggccgatttcagcaggatactcgagggtcgaagttgagctggtggaacacgcgtatgaggacctcgagttggactacccaggaggagacgatgagacgcatctacgagacacaagccacgccatcatactatggcacaagcggtacatcatccttcctgggcgacaagcggcgtctcgtgcaccatctcctccggctccgccatctcctcctacaccatctcctccggttcctccgccacgtcctcctgcaccatctcttccagctcctccgccacctcctgctgcaccatctcctccggctcctccggctcctccgcctccaccgtgtccgcctgcacctcccaagacaaggtctcgccaagctccaccgcctgcccgcacaagggcaacgaagaagacgaaagttgacgccaccaaaaacaaggagccaccgtacgattgcagtcaagaggagcttgatgcttatgtggcaggagaggtgaagaggcaactcaagcctcggagtcctgaaaagaagatacctattgacccgagcgtgaagaacttcttcaagggaatgtccacaacaaacaaggaggcgttacagatatcggactatgaccgaacacttcagagagcctatcacaagaagtccaaaccagtccctcagcttggagaacaaccaaaccaagaggtcgagccgttggtgaccggcgaagattttggcataacggaattcatttcagacaccggtctaactgtggatcagctggttggaggcgcaccaatcccaaaggcggaagtggcatacaagtttgaactcggtaaaccgcttgttaaacctgaacagctgcagtccctaccgacacagatgtacaaattccatgaacggtacatggaaatgagcgccaagggtagagagatgttcggagcgaggatcagaaaccccgacttcttgcaaggagaagatgttctctggatccatttcaaggatctcttcgatctgtaccagttggacgccctcgacgtctctcttctaaacgcatggattttaatggagattcaaagggcccgacggcagagggtctacgatactgggttcatcgactctcggaaaatcaacaccgaaatgatcgacaagtacgagaaagacacagaggacaatctcgtccatctcctaacgcagcagcatttcaagacgtacatactactaccgtacaacacagaattccactgggtcctgttattcttcgacttggacgcatgcagagtcactgtgtacgactcaatgaataaagaggagaagatttttgacaaggtcttcaaactgatagacagggcttggaatcggttccgtgaattggtccgcgggacttggacagaaaaacttggacggaggtttcattttccacgtattcacataagggataatctcccacacaaggattttatcacggctgttcaagaacaactgatgggattcatcagcgaagaagtccttaatcccgacggtgaattctactacgatggatcgacaattcataactcgctccctcccatcaccacaacagctgttcgtgcccgccgcatc

SEQ ID NO: 16485 - DNA, 636 bp, Oryza sativa
  Clone ID: PAT_MRT4530_22229C.1
atggattggttcgtgcggtgctacatgctggcgatcgccaacggcgtgtgcatcggcggcgcggcgatgatcgtctacgggatcgtgcaggtgtcgcggacgggcggcgacgcggggtccctcgtcgtgctctccctcttcctggcgctctgggtcgccgtcggctcctgcgtctacgcctccttctgcggcgcgttcttcccgtgggcgtcgctgcggcgcccgctggctcctgtccgggacgcgctctcccggtgcgcgcgcgcgctgctcccgcgccggaacggcggcggcggcgatggcctgccgagccacctgcgcgacggcgtgcagccacgggagacgccgaccgtgcgcggaggcggaggcgcgcgggtggcgacggcggacgacatccccgcgtacgagcagccgcctgcgggagagggcgagggcggcgcggcggcggcgccggagtgcgcggtgtgcctcggcgaggtggagaagggggagatggcgaagcggctgccggcgtgcctgcacgtgttccaccagcggtgcatcgacgcgtggctgcggggcaactccacctgcccggtctgccggcgcaacgccttcgccacggcggcgccgccattgccggctcaaatggtgtag

SEQ ID NO: 16486 - DNA, 147 bp, Oryza sativa
  Clone ID: PAT_MRT4530_2222C.1
tcggagctggccttcctcacgcggctctaccacaagcaccttgtcgtcttcgttggctactgtgaggagaatgacaagcagctgctcatctacaagtacatgaagaacggtgtgctcaacatcacttccacgatggcagctcgatga

SEQ ID NO: 16487 - DNA, 5391 bp, Oryza sativa
  Clone ID: PAT_MRT4530_22230C.1
tcggcaatggatgtacgctgaccggcggtccaaagagttcattgacggcgtgcactattttttgagagtggccgaagctaacgggcaaaggggttttattcgttgtccatgcaataagtctaagaatcagaagaagtattctgcatccaggactattcatttccacttgtttgagtcggggttcatgccaagctataattgttggacatcccacagagagcaaggtgttgaaatggaagaagatgaagtggaagacgacaatattccggactttgctcagtacgttggatttgaaggaaatcaaacaggcgaggaggaaagggatgctgatggtaacgacgttgcggatgatctcggtcagatgttgcaggacgccaaggaggactgcgaaagtgaaaagggggcccataaattggacaagatgttagaggaccacagaacgtcgttgtacccaggttgcgagtaggggcacaaaaagttggataccactctggagttcttgcaatggaaggcaaaaaatggggttagtgacaagacatttggcgatttattgaaactcgtcaagaacattcttccagagggaaacaaattgctcgagacaatgtacgaggctaagaagatagtctgcccgctaggactggaagttcagaagattcacatatgtccgaatgattgtatcctatatcgcggtgaggagtatgagaacctagaagcatgccctgtttgcaaagcactacgatacaagattagacgagacgatccaggagaagttgacgggcagctaacaaagaagagaattcctactaaggtgatgtggtatttccctataataccacggctaaggcgtttgttcaggaacaaggggaatgctagaatgatgcgatggcatgttgaagagcgtcaataggacaggatgctgagacaccccgccgatggttcgcagtggcgaaacatcgacagaaaatttaaagaatttggaaaggacgcacgaaacatacggtttggtttgagtacggatggcatgaatccttttggagagatgagcagcggccatagcacttggcccgttacgatgtgtatatacaacctcccccctggctatgcatgaataggaagtacataatgatgccgattattattcaaggccccaagcaacctggtaacgacatcgatgtgtacctaagaccactggtcgaagatcttaaactgttgtggaaaaaggaaggtgtccccgtgtgggacgaggacaaacaggaggtgtttaacctacgagcgctgctgttcgtaaccatcaacgattggcctgcacttagcaaactatccggacagtccaacaaggggtacaaggcttgcactcactgtatggatgaaacagaaagtgtatacggaaagtcgaaagatacactggaagcacgtaatgatctgaagcatatggaacaacgcggcgaccttcacccggaaccaaaggagaaaggaagccattacttgagtccagccagctacactcttagcaaggcagagaaggaaagtatgtttgaatgcttggagagcataaaggtgccgtctggatactccacgaaggaaaagatgttcacaaacctaaagtctcatgactgtcacgtgttgatgatacaactgctaccagttgtaataaggggtatccttccagacaatgtccgggcaacaataacaaagctatgtgcattcatgaacgcaatttcgtagaaggtcattgatccggatagattagaagccctttagaatgatgtgaggtacatgggcgttctgaagaagtatgttcgtaaccgtgctcgtccagaggcaagcatcgccaagggttatgaaacagaggaggtcatcgaattttgcgtagaatttatcgaagaccttcgcccaatcggggtacctgaatcacgccatgaagggagactacagggaaagggaactctcggaaggaaagcaataatgacggtagacaacaatttattccgtaaagcccatttcacggttctgcaacaatcttcattggtagctccttacatcgaggagcacttggctctagttcgcgccaggaacatcggtaagtccgatgcatggattacacggcatcacattgatactttccccgcgtggctactacaacatctcgtgggtaacgagtcgatcaaccaacaacttaccttcctggcgaggggaccgtcctggtcgatcgcgacattccagggatatgagatcaatgggtacacattctacacgagagcccaagacatgaagagcacgaatcaaagcagcgctgttcgtgtcgatgccatgggacacgatggaacaactggcacgtattacggtgccatcgaggacatatgggaacttgactatggtcctctcaaggtccctctgttccggtgccaatcggttaggttgactggtggaggcgtaatgattgatgacagtgggatgacaacggttgaccttgacaaagttggatactcggacgaaccttttgtccttgccaatgatgtaacgcaagtcttttacgtgaaggatatgtctagcaaaggaaagaagggcagagggcctgacgagcctaagcgtcatgtggttctcctagtcaaaagaaaaatcgtcggagctgaggacaagactgacgaggattacgatcagttggatgggcaaccccctttcacggtgatgattgaccctagcatcctcctatcaaatgaagacaccccttactcacgcagcgatcacaaggagggaacaatatatttgaacgaggaagggagcgttgagagggatgcggaggggaaccaggaggggcacgtggaaagggatgtggaggggaaccaggaggaggaggctagtggaagtcaaccctccgttggacagaagaggggacgcgggcaacgaggtgccacgaagaagcttgagggtcggcacatcataacggaagtggacgaagacggccgacctagtgccccggcagaagccgccaagaactatgtacgtcacagcggttgggttgcgcgggataacgtgcctgttagtacggtctactggcgcagaacaagggcacgcggagatcatgagagctttgtcccagattcggagaaagagatgctgtggaccacaatgctcgagacattcacccttcccgcgggtacagaggacaaagtgaaaaggtggactctgaagaaaatggcagaacagtttcggagcttcaagggagatctgtaccagaaatatatcctgaaggggcagacaccgaacttcgacacattcccaaagctaagggatcactgggacgagttcgttgcatataagacaggtgaacaagggcaggcgatgatggaaagaaacaaagaaaatgccgccaagaagaagtaccatcaccacttggggtcaggcggctatagcgtcgcgatgccgaagtgggaggagatggaggctagcttgcttgagaggggtatcgaaccggccaccgctaattggccggaacgatcgaagttctggtactatgctcacggtggaatgctcaacccagctgatggctccctggtcttcggcgatcagatacgcgaggctgcgcgtcgactaacagacacagtggaagcctcttcttagggcacgttccgaccgaacagagagaaggacgagctgagtcggatgaggagcaagagagataccgaggcgaagattgcagatctagagttcagggtatcgagctacgagctcagcatgcaagaggaggtggcaaggaaggttgatgaatgcatggccgcacatcggtcccatgatccccagccgaccattcctcctgcaatggtgagcccgtcaggaaaccgtagcagctgcgcctcaaaggggcaggtggcgtcgggcatggccatcccaacggacccttcaggtacttaccactgtaggccgattgcagcaggatactccaaggtcgaagttgagttggtcgaagacgcgtacgaggacctcgagctggattaccctggaggagatggtgagacgcatctacgagacacaagccacaccattattctatggcgcaagcgatacatcatcctccctgggcgacaagcggcgtctcgtgcaccatctcctctggctccgccgtctcctcctcaggctccagcaccgtctcctcctcatgctccagcaccgtctccacctcaggctcctccggcaccttccaagtcaagggcaacccaagctccaccgcctgcccccacaagggcaataaagaaggcgaaagttgacaccgccaagaacaaggacccggggtacgattgcacgcaagaggagcttgaagcttacgtggcatcagaagtcaacagacaattcaagcctcgaagtccagaaaagaagattcctatagacccgagtgttaggaacttcttcaggggtatgtctgcacctgccaaggaggccataaagctatcggactatgagcgaacgctcaagaaagcatcttctggaaagtccaaaccagtccctcagcttggagagcaaccaaaccaggagatcgagccgttggtgactggtgaagattttggaatacaagaatttattaatgacaccgggctaactacggatcaattgctaggagacgcaccaatcgaaaaggcggaagtgaaatacatgtacgaactcggtaaaccgcttgtcaagcctgagctgctgcagtccctacccacacaaatgtacaagttccatcagctgtacatggagatgagcgccaccggtagagagatgattggagcaaggatcagggacacggacttcttgcaaggagatgacattctctggatcaatttcaagggaatctacgaactataccagctggacgccctcgacgtctctattatgagttgctggattttaatggagattcaaagggcctaacggcggggggttttcgatactggattcatcgaccctcggaaagtaaacgtcgcaatgctcgaccaatatccgcaagccacagaggacaatctcgtccatctcctgaaggcgcagcattacaagacgttcatactgttgccgtacaacacagagttaaacgtatatgactcaatggataaaaaagagtctacgtttgacaaggttttcgaacttatagacagggcttggtatcggttctatcatttggtccgcggcaaatggagagaaagacttaggcggaagttcaaatttccttttattcgtatgagggataacctgatcacacacaaggaatttatcgcggcggttcaagaacaactcatgggattcatcaataaacaaatccttgatcccaagggtgaattctactacgacggaaacacaattcataggtccttagcttctgagctagcgactactactacgtcgaaatcgtagcta

SEQ ID NO: 16488 - DNA, 427 bp, Oryza sativa
  Clone ID: PAT_MRT4530_22231C.1
ctgtatacttgatgccggcgaatccgacgccgacaagcccaacgacggcctccgctccggcgagcacgtctcggtgatctgcgaacgggctgctacaaaattgtggctggcgcgtcgtctgtagaagaaattcgagtgcgcaacgcatcgacgcccaccccgaatcgttgaggtcgagatcgtgtcggctgctcggcggccatggattccgcgacgggggctatgggcaacctgctgctgaagctaggcgagcttgccatggacgagtacaagctgcagaagggcgtcaagaggaacgtcgaggctctccggagagagctggagagcatgcaggccgccctccgcaaggtcggcgacgtgccctccgaccagttcgacgagcaggtcgagctttgggcgcgcgacgtcagggaggttttctacgacg

SEQ ID NO: 16489 - DNA, 6803 bp, Oryza sativa
  Clone ID: PAT_MRT4530_22232C.1
atggatcggcaatggatgtacgctgaccggcggtccaaagagtttattgacggcgtgcactattttttgagagtggccgaagctaacaggcaaaggggttttatttgttgtccatgcaataagtgtaagaatcagaaggagtattctgcatccaggactattcatttccacttgtttgagtcggggttcatgccaagctataattgttggacatcccacggagagcaaggtgttgaaatggaagaagatgaagtggaagacgacaatattccggactttgctcagtatgttggatttgaaggaaatcaaacgggcgaggaggaaatagctgctgatggtaacgacgttgcggatgatcttggtcagatgttgcaggatgccagggaggactgcgaaagtgaaaaggaggcccataaattggacaagatgttggaggaccacagaacttcgttgtacccaggttgcgagcagaggcacaaaaagttggataccactctggagttgttgcaatggaaggcaaaaaatggggttagtgacaaggcatttggcgatttattgaaactcgtcaagaaaattcttccggggggaaacaaattgcccgagacaacgtacgaggctaagaagatagtctgcccgttaggactggaagttcataagattcacgcatgtccgaacgattgtatcctatatcgcggtgaggagtatgagaacctagaagcatgccctgtttgcaaagtactacgatacaagattagacgggacgatccaggagaagttgacgggcagctaacaaagatgagaattcctgctaaggtgatgtggtatttccctataataccacggctaaggcgtttgttcaggaacaaggggaatgctagaatgttgcgatggcacgctgaagagcgtcaacaggacgggatgctgagacaccccgccgatggttcgcagtggcaaaacatcgacagaaaatttaaagaatttggaaaggacgcacgaaacatacggtttggtttgagtacggatggcatgaatccttttggagagatcagcagcggccatagcacttggctcgttacgatgtgtatctacaacctccccccctggctatgcatgaaggggaagtacataatgatgccgattattattcaaggccccaagcaacctggtaacgacatcgacgtgtacctaagaccactggtcgaagatcttaaacagttgtggaagaaggaaggtgtccccgtgtgggacgaggacaaacaggaggagtttaacctacgagcgctgctgttcgtaaccatcaacgattggcctgcacttagcaacctatccggacagtccaacaaggggtacaaggcttgcactcactgtatggatgaaacagaaagtacgtatcttaagcactgtaggaaggttgtatacatgggtcatcgtcgattccttgcagcaaaccacccggtacggaagaaaggcaagcacttcgaacataaggccgaccaccgtacgaaacctaaacatcgcagcgggaaaacagtgtttgctatggttaaagatcttaaagtagtgttcggaatggggcttggaagccagcatatagagagcgaagatggtcacgcggtgatgtggaaaaagaactctatattttgggagttaccatattgggaattcttggacgtacgccacgcaatcgacgtgatgcacctcactaagaacctttgcgtaaaccttcttggcttcctaggtgtatacggaaagtcgaaagatacactggaagcacgtaatgatctgaagcatatggaacaacgcggcgaccttcacccggaaccaaaggagaaaggaagccattacttgagtccagccagctacactcttagcaaggcagagaaggaaagtatgtttgaatgcttggagagcataaaggtaccgtctggatactccacgaatatcaagcgaataataagcatgaaggagaagaagttcacaaacctaaagtctcatgactgtcacgtgttgatgacacaactgctaccagttgtaataaggggtatccttccagacaatgtccaggcaacaataacaaagctatgtgcattcatgaacgcaatttcgcagaaggtcatcgatccggatagattagaagcccttcagaatgaagtggtgcaatgtctcgtcagttttgagttgatatttccaccttcatttttcaatataatgacacatctgctttgtcaccttgtgaaagagatccgtattctcgggcctatgtacctacacaacatgtttcctttcgagagaggcaagcatcgccaagggttatggaacagaggaggtcatcgaattttgcgtagaatttatcgaagaccttcgcccaatcggggtacctgaatcacgccatgaagggagactacggggaaagggaactctcggaaggaaagcaataatgatggtagacaacaatttattccgtaaagcccatttcactgttctgcaacactcttcattggtagctccttacatcaaggagcacttggctctagttcgcgccaggaacatcggtaagtccgatgcatggattacacggcatcacattgatactttccccgcgtggctacgacaacatctcatgggtaacgagtcgatcaaccaacaacttgccttcctggcgaggggaccgtctgggtcgaccgcgacattccagggatatgagatcaatgggtacacattctacacgagagcccaagacatgaagagcacgaaccaaaacagcgctgtttgtgtcgatgccatgggacacgatggaacaactgccacgtattacggtgccatcgaggacatatgggaacttgactatggtcctctcaaggttcctctgttccggtgccaatgggttaggttgactggtggaggcgtaatgattgatgacagtgggatgacaactgttgaccttaacaaggttggatactcggacgaaccttttgtccttgccaatgatgtaacgcaagtctttttcgtgaaggacatgtctagcaaaggaaagaagggcagagggcctgatgagcctaagcgtcaagtggttctcccaggcaaaagaaaaatcgtcggaattgaggacaagactgacgaggattacgatcagttggatgggcaaccccctttcacggtgacgattgaccctagcatcctcctatcaaatgaagacaccccttactcacgcagcgatcacaaggagggaacaataggcaaatccccgcgccgacgccgccgtatctcgccgtcgtctcgagctcgtcatcctcgccgccgcctccgcctcctccgctgccgccgcatctctggggtgagagccgctgccgccagatctcccttcatctcgatctctccgatctcgatctctctccgtcgtgccgcccgccacgagacgccgcgccacgacgacgacgcgccacgccgccgccttcgccgccgtgcaacgccgccgccgcatgtcaacgccacgccgccgccgccgtcgccacgccgccgccgccttcgccgccgcgcgcgcaatgccgccgccgccacgccacgccgccgccgccacggccccgcaacgccacgccgtcgccgccgtcgccacgccgccgccgccgccgccacgccgccgcgccaaccgccgccccgatgccgccacaccgccgttaacgaacgagaacgagaacgatcgaacgaacgagagcgagaacgaacacgtcaacgtacgttgccgcgagaacgtgaacgagaacgagaacgatcgaacgaacgagagcgagaacgagaacgatcgaacgaagacaagcgagaacgagggaacgaacgtgaatgagaacaagcgaacgaacgtgaatgagaacgagcgaacgaacgtgaacgagctagggaacatggctgaccgcgatgaggaacagatattgtacgatacaatcgtggagggaagcagccagtactggaatgaagaagaggggaacgaggatccaaaccagtacttgaacgaaaaagggaacgtggagagggatgcggaggggaaccagcaggggcacgtggaaagggatgtggaggggaaccaggaggaggaggctagtggtagtcaaccctccgttgaacagaagagggcacgcgggcaacgaggtgcagcgaagaagcttgagggtcggcacatcataacggaagtggaagaagatggacgtcctagtgccccggccgaagccgccaagaactatgtacgtcacagcggttgggttgtgcgggataacgtgcctgtcagtacggtgtactggcgaagaacaagggcacgcggagatcatgagagctttgtcccagattcggagaaagagatgctgtggaccacaatgctcgagacattcacccttcctgcgggtacagaggacaaagtgaaaaggtggactctgaagaaaatggcagaacagtttcagagcttcaagggagatctataccagaagtatatactgaaggggcagacaccgaacttcgacacattcccaaagctaagggatcactgggacgagttcgttgcatataagacaggtgaacaagggcaggcgatgatggaaagaaacaaagaaaatgccgccaagaagaagtaccatcaccacttggggtcaggaggctatagcgtcgcgatgccgaagtgggagcagatggaggctagattgattgagaggggtatcgaaccggcaacagccaattggccggaacgatcgaagttctggtactatgctcacggtggaacgctcaacccagctgatggctcacaggtcttcggctatcagatacaagaggctgcgcgacgactaacagatgcagtggaagcctcctctcagggcacgttccgaccagacagagatagggacgagctgacactcgccctgcagactccagagcatccaggacgaactcaagggaaaggggtgattccttggaagattggtttcaaggaggacatccacacgtacaggagtcggatgaggagcaagagagataccgaggcgaagattgcagacctagagttccgggtatcgagctacgaactcaacatgcaagaggaggtggcaaggaaggttgatgaacgcatggccgcacatcggtcccatgatccccagccgaccattcctcctgcaatggtgagcccgtcaggaaaccgtagcagctgcgcctcaacggggcaggtaggatcacagagcatggacgccatacaaacacaggacgaatcgacctgtcccgttgatgacatcactcagcggacaccatgtgagctgcatattcctttcaagaacttatcaataaaggtggcgtcgggcatggccatcccaacggacccttcaggtacttaccactgcaggccgattccagcaggatactccaaggtcgaagttgagttggtcgaaggcgcgtacgaggacctcgagctagattaccctggaggagacgcaccgtctccacctcaggctccagcatcgactcctcctcaggatcctgcaccgactcctcctcgtgctcctacacctactcccccgcaagctcctcttccggcaccttcaaagtcaagggccaccccaactccaccgcttgcccacacaagggcaacaaagaaggcgaaagttgacgccgccaagaacaaggacccggggtacgattgcacgcaagaggagcttgacgcttacgttgcatcagaagtcaagagacaattcaagcctcgaagtccagaaaagaagattcctatagaccccagtgtcaggaacttcttcaggggtatatctgcatctgtcaaggaggccatcaagctatcggactatgagcgaacgctgaagaaagcatcttctggaaagtccaaaccagtccctcagcttggagagcaaccaaaccaggagatcgagccgttggtgaccggtaaagaaatgacgatagaacaatttattactgacaccggtctaactacggatcaattgctaggagtcgcaccaatcgaaaaggcagaagtgaaatacatgtacgaactcggtaaaccgcttgtcaagcctgagctgctgcagtccctacccacacaaatgtacaagttccatcagctgtacatggagatgagcgccaccggtagagagatgatcggagcgaggatcagggacacggacttcttgcaaggagatgacattctctggatcaatttcaggggaatctacgaactataccagctggacgccctcgacgtctctattataagttgctggattttaatggagattcaaagggcccgacggcggagggttttcgatactggattcatcgaccctcggaaagtaaacgtcgcaatgctcgaccaatatccacaagaaacagaggacaatctcgtccatctcctgaaggcgcagcattacaagacgttcatactgttgccatacaacacagaattccactgggtgcttttactcatcgacctggaggcctgcaccgtcaacgtatatgactcaatggataaaaaagagtctacgtttgacaagtgcgcaaagcaaaagcagggaactaacttgtgcggctattacgtgtgcgagtattgccactgccttgcagaccaaatcatcaccacaagagagctcgattttattcgcatgagggataacctgaccacacacaaagaatttatcgcggcggttcaagaacaactcatgggattcatcaacgaagaaatccttgatcccaagggtgaattctactacgacggaaacacaattcaccggtccttagcttctgagctactacgtcgaaatcgtagctag

SEQ ID NO: 16490 - DNA, 295 bp, Oryza sativa
  Clone ID: PAT_MRT4530_22233C.1
accacgcgtgcgacaaacgaaataaatatacgtttatcaccatggctatctacttggacgagatgagcccttgcggcgcacatgcacttactaccgaaacattgtgaacggggggcttcattctaaggtacaaggaccacctaccctctgcctggacaacaatctttccaccattattgacttacgcatccaatatattatactaaggaccacttcatccagctctatccatttactgtattcaataattccgagacctttaatctcttatcaccacatactagggaagaacttt

SEQ ID NO: 16491 - DNA, 6466 bp, Oryza sativa
  Clone ID: PAT_MRT4530_22234C.1
atggatcggcaatggatgtacgctgaccggcggtccaaagagtttattgacggcgtgcactattttttgatagtagccgaagctaacaggcaaaggggtttatttgttgtccatgcaataagtgtaagaatcagaaggagtattctgcatccaggactattcatttccacttgtttgagtcggggttcatgccaagctataattgttggacatcccacagagagcaatgtgttgaaatagaagaagatgaagtggaagacgacaatattccggactttgctcagtacgttggatttgaaggaaatcaaacgggcgaggaggaaagggatgctgatggtaacgacgttgcggatgatcttggtcagatgttgcaggacgccaaggaggactgcgaaagtgaaaagggagcccataaattggacaagatgttagaggaccatagaacttcgttatacccaggttgcgagcaggggcacaaaaagttggataccactctggagttcttgcaatggaaggcaaaaaatggggttagtgacaaggcatttggcgatttattgaaactcgtcaagaacattcttccggagggaaacaaattgcccgagacaatgtacgaggctaagaagatagtctacccgctaggactggaagttcagaagattcacgcatgtccgaatgattgtatcctatatcgcggtgaggagtatgagaacctagaagcatgccctgtttgcaaagcactacgatacaagattagacgagacaatccaggagaagttgacgggcagctaacaaagaagagaattcctgctaaggtgatgtggtatttccctataataccacggataaagcgtttgttcaggaacaaggagaatgctagaatgatgcgatggcacgctgaagagcgtcaacaggacaggatgctgagacaccccgccgatggttcgcagtggcgaaacatagacagaaaatttaaagaatttggaaaggacgcacgaaacatacggtttggtttgagtacagatggcatgaatccttttggagagatgagcagcggccatagcacttagcccgttacgatgtgtatctacaacctccccccctggtatgcatgaagaggaagtacataatgatgccgattattattcaaggccccaagcaacctggtaacgacatcgatgtatacctaaggccactggtcaaagatcttaagatgttgtggaagaaggaaggtgtccccgtgtgcgacgaggacaaacaggaggagtttaacatacgagcactgctgttcgtaaccatcaacgattggcctgcacttagcaacctatccggacagtccaacaaggggtacaaggcttgcactcactgtatggatgaaacagaaagtacgtatcttaagcactgtaggaaggttgtatacatgggtcatcgtcgattccttgcagcaaaccacccggtacggaagaaaggcaagcacttcgaacataaggctgaccaccgtacgaagcctaaacatcgcaacgggaaaacagtgtttgctatggttaaagatctaaaagtagtgttcggaaaggggcctggaagccagtctatagagagcgaagatggtcacgcggcgatgtggaaaaagaactctatattttgggagttaccctattgggaattcttggacgtacgccacgcaatcgacgtgatgcacctcactaagaacctttgcgtaaaccttcttggcttcctaggtgtacacggaaagtcgaaagatacactggaagcacgtaatgatctgaagcatatggaacaacgcggcgaccttcacctggaaccaaaggagaaaggaagccattacttgagtccagccagctacactcttagcaaggcagagaaggaaagtatgtttgaatgcttggagagtataaaggtaccatctggataccccacgaatatcaagcgaataataagcacgaaggaaaagaagttcacaaacctaaagtctcatgactgtcacgtgttgatgacacaactgctaccagttgtaataaggggtatccttccagacaatgtccgggcaacaataacaaagctatgtgcattcatgaacgcaatttcgcagaaggtcatcgatccggatagattagaagcccttcagaatgatgtggtgcaatgtctcgtcagttttgagttgatatttccaccttcatttttcaatataatgacgcatctactttgtcaccttgtgaaagagatcagtattttcgggcctgtgtacctacacaacatgtttcctttcgagaggtacatgcgttctgaagaagtatgtttgtaaccgtgctcgtccagaggcaagcatcgccaagggttatgaaacagaggaggtcatcgaattttgtgtagaatttatcgaagatcttcgcccaatcggggtacctgaatcacgccatgaagggagactacagggaaagggaactctcggaaggaaagcaataatgacggtagacaacaatttattccgtaaagcccatttcacggttctgcaacaatcttcattggtagctccttacatcgaggagcacttggctctagttcgcgctaggaacattgatactttccccgcgtggatacgacaacatctcatgggtaacgagtcgatcaaccaacaacttgccttcctggcgaggggaccgtctaggtcgatcgcgacattccagggatatgagatcaatgggtacacattctacacgagagcccaagacatgaagagcacgaaccaaaacagcgctgttcgtgtcgatgccatgggacacgatggaacaactggcacgtattacggtgccatcgaggacatatgggaacttgactatggtcctctcaaggtccctctgttctggtgccaatgggttaagttgactggtggaggcgtaatgattgatgacagtgggatgacaacggttgaccttaacaacgttggatactcagacgaaccttttgtccttgccaatgatgtaacgcaagtctttttcgtgaaggacatgtatagcaaaggaaagaagggcagagggcctgacgagcctaagcgtcacgtggttctcccagcgcgccctcgtcttctccaccaacacttagaagtttttgcccgatcgatctctctcgtcttctccttcgccgccactgcctagggcatccccgcgccgacgccgccgccgtatctcgccgtcgtctcgcgctcgtcgtcgtcgccgccgcctccgcctcctccgccgccgccgcatctccgagatgtttcctgtatgaacagatggctgatcacgatgaggaacagatattgtacgatacaatcgcggagggaagcagccagtactggaacgaagaagaggggaacgaggacccaaaccagtatttgaatgaggaagggaacgtggagagggatgcggaggggaaccaggaggggcacgtggaaagggatgtggaggggaaccaggaggaggaggctagtggaagtcaaccctccgttggacagaagagggcacgtgggcaacgaggtgccacgaagaagcttgagggtcggcacatcataacggaagtggaagaagatggacgacctagtgccccggcagaagccaccaagaactatgtacgtcacagcggttgggttgtgcgggataacgtgcctgtcattacggtgtattggcgaagaacaagggcacgcggagatcatgagagctttgtcccagatttggagaaagagatgctgtggaccacaatgctcgagacattcacccttcccgcgggtacagaggacaaagtgaaaaggtggactctgaagaaaatggcagaacagtttcagagcttcaagggagagctgtacaagaaatatatcctgaaggggcagacacattcccaaagctaagggatcactgggacgagttcgttgcatataagacaggtgaacaaaggcaggcgatgatggaaagaaacaaagaaaatgccgccaagaagaagtaccatcaccacttggggtcaggcggctatagcgtcgcgatgccgaagtgggaggagatggaggctagcttgcttgagaggggtatcgaaccggccaccgctaattggccggaacgatcgaagttctggtactgtgctcacggtggaacgctccacccagctgatggctcactggtcttcggcgatcagatacgagaggctgcgcgttgactaacagacgcagtggaagcctcttctcagggcacgttccgaccggatagagagagggacgagctgtcactcgccctgcagactccagagcatccaggacgaacacgagggaaaggggtgattccttggaagattgggttcaaggaggacatccacacgtacaggagtcggatgaggagcaagagagataccgaggcgaagattgcagatcttgagttcagggtatcgagctacgagctcagcatgcaagaggaggtagcaaggaaggttgatgaacgcatggccgcacatcggtccaatgatccccagccgaccattcctcctgcaatggtgagcccgttaggaaaccgtagcagctgcgcctcaacggggcaggtaggatcacagagcatggacgccatgcaaacccagagcatggacgccatgcaaacccaggacgaatccacctgccccgttgatgacatcactcagcggacaccatgtgagctgcatattcctttcaagaacttatcaataaaggtggcgtcgggcatggccatcccaacggacccttcaggtacttaccactgcaggccgattccagcaggatactccaaggtcgaagttgagttggtcgaaggcgtgtacgaggacctcgagctggattaccctggaggagacggtgagacgcatctacgagacacaagccatgccattattctatggcgcaggcggtacatcatcctccctgggcgacaagcggcgtctcgtgcaccatctcctttggctccgccatctcctcctcaggatcctgcaccgtctcctcctcatgctccagcaccgtctccacctcaggctcctgcaccgactcctcctcgggctcctacaccgactcctccgcaagctcctcttccggcaccttcaaagtcaagggcccctaaagctccaccgcctgcccacacaagggcaacgaagaaggcgaaagttgacgccgccaagaacaaggacccggggtacgattgcacgcaagagaagcttgacgcttacgtggcatcagaagtcaagagacaattcaagcctcgaagtccagaaaagaagattcctatagacacgagtgtcatgaacttcttcaggggtatgtctgcacctgccaaggaggccattaagctatcggactatgagcgaacgctgaagaaagcatcttctggaaagtccaaaccagtccctcagcttggagagcaaccaaaccaggagatcgagccgttggtgaccggtaaagaaatgacgatagaagaatttattactgacactagtctaactacggatcaattgctaggagtcgcaccaatcgaaaaggcggaagtgaaatacatgtacgaactcggtaaaccgcttgtcaagcctgagttgctgcagtccctacccacacaaatgtacaagttccatcagctgtacatggagatgagcgccaccggtagagagatgatcggagcgaggatcagggacacagacttcttgcaaggagatgacattctctggatcaatttcaagggaatctacgaactataccagctggacgctctcgacatctctattatgagttgctggattttaatggagattcaaagggcccgacggcggggggttttcgatactggattcatcgatcctcggaaagtaaacatcgcaatgctcgaccaatatccgcaagccacagaggacaatctcgttcatctcctgaaggcgcagcattacaagacgttcatactgttgccgtacaacacagaattccactgggtgcttttactcttcgacctgtcggcctgcaccgtcaacgtatatgacccaatggataaaaaagagtctacgtttgacaagattttcgaacttatagatagggcttggtatcggttccgtcatttggtccgcggcaaatggagagaaagacttaggcggaagttcaaatttccttttattcgcatgagggataacctgaccacgcacaaggaatttatcgcggcggttcaagaacaactcatgggattcatcaacgaacaaatccttgatcccaagggtgaattctactatgacggaaacacaattcataggtccttagcttctgagctagcgactactactacgtcgaaatcgtagctagctaggacatataatggatttccattgtaacccgacaaaggtgagtacctttgtaactggccgcacgcctcggttaaagatgggtcgattggaatgctagattttgtactagtgctggtatctggaa

SEQ ID NO: 16492 - DNA, 1530 bp, Oryza sativa
  Clone ID: PAT_MRT4530_22235C.1
atgcggcggaggtcgccgcctcctgctgcggcccagccccctcgaccgccgacgcgcgctgccgaatcgggggaggagggcggcgatcccggcaaggacgaggtcgccgccccgcccaagggggactccgcgctgccgcggagcggctccggcttcggctctggcaatgccgcggcgccggacggccccgccaagtcgccgatgaagcccaagaagagggtgacggcgccgccgtcgagcgaccacggctccagagagaacctcgccgccgggtcgccgtcgaacgaggtgccaactccgcaaggagatgatgcggcgcaggaggacgatctccccgagtcccctcccaagtcgaagaagaaccgcaagaagaagaagaaggccctgcgagctggcgactccggcaaggtcgctgctccggacgatcccgctgagcctacgcgcccccagcaagatgtgggggaggtggacggccgcttggccgagtctgagcaagaggtgccacccaacgcagggaaggcaaagaagaaggcatcagcgcaggcaaggaagaagccatcggcgaagcaacatgctgctgctcaagaggaggaagatggtgatttgatggcagaggctgaggaggaggtggcgccatggcaaggggatgaggaagacggcaagggtccgttgccgcagcggaagagcaagagggttgccgcattgtcaggcagcatttgcccacctgatcccaagagggccaagattgtggatgcgcagaagcccgggttcgggcgcaagtggaatggcaatgacgagatcatgatcctagaggctcttgttgatcaaatccgcagtggtggaaatgtgccgcaggagccgggccaccccttgttccatgaactcgtgcagcgcctggagggccgcaccttcaaccacagtgatgtgagggataaggtgcgcagtctcaagcgtcggtacaacgatgttgtcttgtcgggccttgctattaccaaggatcatgaccttcagcttcatgagctctcctgtgagatctgggggcgctctgttgctcatgccggggacgacaaacagaggtgccttgccagagacgagcagagctcccttgccagggatgagcagaagtctttcgccagggacgaggagaagtctttggccagagatgagcagagctcccttgccagggatgagcagaagtctttcgccagggatgagaagtctttggccagggacgaggagaagtccttagctagtgatgagcagaggtcattcgatgatatgtgcaaacagtttccattgctcgcaaaggaaattaaggtgctcatggagggacaacctgctatcatggaattgttccctaggttggacggcgaccaagttgtcgcaattgagaaaaagttggagaacctgaggtggattgatatgaagaggaagaaaaagatggcagttaagatggccaagattagaaagggactaatttacaagctcgaaggagctgcgatcctagctgatggtaatatgatccactag

SEQ ID NO: 16493 - DNA, 431 bp, Oryza sativa
  Clone ID: PAT_MRT4530_22236C.1
gcttatattaccaaccctctgcctcccttccggcgacgttcgacgacgaatgcaagccatcctcgccgctgccatggccgcccagaccctctggttctccgccaccgacccttccgcctcccttttccagttcccttgctctgcccgccctttacactcgctccgcctcgccgccggtcccgcgggcgccgccgctgccagggcgctcgttgtggccgacgccaccaagaaggccgccagcgtgctcaagggcacctcccaggttgagggagtcgtgaccctcacccaggatgaccaaggtcctacaacagtgaatgcacgcgtgacgggacttaatgacggacttcaaggggtccaccctcacgagtttggcgatactacgaacgggtgcatctcaacaggaccacattttacccaaacatttgacgcac

SEQ ID NO: 16494 - DNA, 3322 bp, Oryza sativa
  Clone ID: PAT_MRT4530_22237C.1
atggatcggcaatggatgtacgctgaccggcggtccaaagagtttattgacggcatgcattattttttgagagtggccgaagctaacaggagaaagggttttatttgttgtccatgcattaagtgtaagaatcagaaggagtattctgcatccaggactatttatttccacttgtttgagtcggggttcatgccaagctataattgttggacatcccacggagagcaaggtgttgaaatggaagaagatgaagtggaagacgacaatattccggactttgctcagtacgttggatttgaaggaaatcaaacgggaaagggatgctgatggtaacgacgttgcggatgatcttgatcagatgttgcaggacgccaaggaggactgcgaaagtgaaaaggtggcccataaattggacaagatgttagaggaccacagaacgtcgttgtacccaggttgcgagcaagggcacaaaaagttggataccactctggagttcttgcaatggaaggcaaaaaatagggttagtgacaaggcatttggcgatttattgaaactcgtcaagaacattcttctggagggaaacaaattgcccaagacaacgtacgagactaagaagatagtctgccctctaagactgaaagttcagaagattcacgcatgtccgaatgattgtatcctatatcgcggtgaggagtacgagaacctagaagcatgccctgtttgcaaagcactacgatacaagattagacgagacgatccaggagaagttgacgggcagctcacaaagaagagaattcctgctaaggtgatgtggtatttccctataataccacggctaaggcgtttgttcaggaacaaggggaatgctggaatgatgcggtggcacgctgaagagcatcaacaggacgggatgctgagacaccccgctgatggttcgcagtggcaaaacatcgacagaaaatttaaagactttggaaaggacgcaggaaacatacggtttggtttgagtacggatggcatgaatccttttggagagatgagcagcggccatagcacttggcccgttacgatgtgtatctacaacctccccccctagctatgcatgaagaggaagtacataatgatgccgattattattcaaggccccaagcaacctggtaacgacatcgatgtgtacctaagaccaccggtcgaaggtcttaaactgttgtggaagaaggaaggtgtccccgtgtgggacgaggacaaacaagaggagtttaacctacgagtgctgctgttcgtaaccatcaacgattggcctgcacttagcaacctatccggacagtccaacaaggggtacaaggcttgcactcactgtatggatgaaacagaaagtacgtatcttaagcactgtaggaaggttgtatacatgggtcatcgtcgattccttgcagcaaaccacccggtacggaagaaaggcaagcacttcgaacataaggctaaccaccgtacgaagcctaaacatcgcagtgggaaaacagtgtttgctatagttaaagatcttaaagtagtgttcggaaaggggcctggaagccagcctatagagagcgaagatggtcacgcggcgatgtggaaaaaaaactctatattttgggagttaccctattgggaattcttggacgtccgccatgcaatcgacgtgatgcacctcactaagaacctttgcgtaaaccttcttggctttctaggtgtatacggaaagtcgaaagatacactggaagcacgtaatgatctgaagcatatggaacaaagcagtgaccttcacccggaaccaaaggagaaaggaagccattactcgagtccagccagctacactcttagcaaggcagagaaggaaagtatgtttgaatgcttggagagcataaaggtaccgtctggatactccacgaatatctagcgaataataagcacgaaggagaagaagttcacaaacctaaagtttcatgactgtcacgtgttaatgacacaactgctactagttgtaataaggggtatccttccagacaatgtccgggcaacaataacaaagctatgtgcattcatgaacgcaatttcgcagaaggtcatcgatccggatagattagaagcccttcagaatgatgtggtgcaatgtctcgtcagttttgagttgatatttccgccttcatttttcaatataatgacacatctgctttgtcaccttgtcaaagacatcagtattctcgggactgtgtacctacacaacatgtttcctttcgagaggtacatgggcgttctgaagaagtatgttcgtaaccgtgcttgtccagaggcaagcatcgccaagggttatggaacagaggaggtcatcgaattttgcgtagaatttattgaagaccttcacccaatcggggtacctgaatcacaccatgaagggagactacggggaaagggaactctcggaaggaaagcaataatgacggtagacaacaatttattccgtaaagcccatttcacggttctgcaacaatcttcattggtagctccttacatcgaggagcacttggctctagttcgcaccaggaacatcggtaagtccgatgcatggattacacggcatcacattgatactttccccgcgtggctacgacaacatctcatgggtaacgagttgatcaaccaacaacttgccttcctggcgaggggaccatctgggtcgatcgcgacattcgagggatatgagatcaatgggtacacattctacacgagagcccaagacatgaagagcacgaaacaaaacagcgctattcgtgtcgatgccatgggacacgatggaacaactggcacgtattacggtgccatcgaggacatatgggaacttgactatggtcctctcaaggaccctctgttccggtgccaatgggttaggttgactggtggaggcgtaatgattgatgacagtgggatgacaacggttgaccttaacaaggttggatactcggacgaaccttttgtccttgccaatgatgtaacgcaagtcttttacgtgaaggacatgtctagcaaaagaaagaagggcagagggcctgacgagcctaagcgtcacgtggttctcccaggcaaaagaaaaatcatcggagttaaggacaagactgacgaggattacgataagttggatgggcaaccccctttcacggtgacgattgaccctagcatcctcctatcaaatgaagacaccccttactcacgtagcgatcacaaggagggaacaatagtgaggagaaagtacgtgcggtcaaccgtcaccgctgatgtattgccg

SEQ ID NO: 16495 - DNA, 303 bp, Oryza sativa
  Clone ID: PAT_MRT4530_22238C.1
atggcgcatggatcaagcgacatcgacaaccaggagggcggcggggcaagctgcacatccgccgccggctgcctgggcaagctccgcctcagccaccggccgcccgggcgagcttcgcccaccactgccgccggatgcccaagcgatcttcgcccacctccacttgcgcttgagccggttgccgcccctattcccagccttgcatccggccgtctccctcatgccaagccccgcctctttcagccggccactgccaccattcccatccgcggagagagggaggggagagatgatactggctag

SEQ ID NO: 16496 - DNA, 7158 bp, Oryza sativa
  Clone ID: PAT_MRT4530_22239C.1
atggatatctctgaggcaaatgaaggctacgcgagctgcggctcggtaatcgagatgtctaggcaaatgaagactacacgggtcggtgcccgccttaagcgcctttgtaataatatggatcggcaatggatgtacgctgaccggcggtccaaagagtttattgacggcgtgcactattttttgagagtggccgaagctaacaggcaaaggggttttatttgttgtccatgcaataagtgtaagaatcagaaggagtattctgcatccaggactattcatttccacttgtttgagtcggggttcatgccaagctataattgttggacatcccacggagagcaaggtgttgaaatggaagaagatgaagtggaagacgacaatattccggactttgctcagtatgttggatttgaaggaaatcaaacgggcgaggaggaaatagctgctgatggtaacgacgttgcggatgatcttggtcagatgttgcaggatgccagggaggactgcgaaagtgaaaaggaggcccataaattggacaagatgttggaggaccacagaacttcgttgtacccaggttgcgagcaggggcacaaaaagttggataccactctggagttgttgcaatggaaggcaaaaaatggggttagtgacaaggcatttggcgatttattgaaactcgtcaagaacattcttccggggggaaacaaattgcccgagacaacgtacgaggctaagaagatagtctgcccgttaggactgaaagttcataagattcacgcatgtccgaacgattgtatcctatatcgcggtgaggagtatgagaacctagaagcatgccctgtttgcaaagcactacgatacaagattagacgggacgatccaggagaagttgacgggcagctaacaaagaagagaattcctgctaaggtgatgtggtatttccctataataccacggctaaggcgtttgttcaggaacaaggggaatgctagaatgttgcgatggcacgctgaagagcgtcaacaggacgggatgctgagacaccccgacgatggttcgcagtggcgaaacatcgacagagaatttaaagaatttggaaaggacgcacgaaacatacggtttggtttgagtacagatggcatgaatccttttggagagatgagcagcggccatagcacttggcccgttacgatgtgtatctacaacctccccccctggctatgcatgaagaggaagtacataatgatgccgattattattcaaggccccaagcaacctggtaatgacatcgacgtgtacctaagaccactggtcgaagatcttaaacagttgtggaagaagaaaggtgtccccgtgtgggacgaggacaaacaggaggagtttaacctacgagcgctgctgttcgtaaccatcaacgattggcctgcacttagcaacctatccggacagtccaacaaggggtacaaggcttgcactcactgtatggatgaaacagaaagtacgtatcttaagcactgtaggaaggttgtatacatgggtcatcgtcgattccttgcagcaaaccacccggtacggaagaaaggcaagcacttcgaacataaggccgaccaccgtacgaagcctaaacatcgcagcgggaaaacagtgtttgctatggttaaagatcttaaagtagtgttcggaaaggggcctggaagccagcatatagagagcgaagatggtcacgcggcgatgtggaaaaagaactctatattttgggagttaccatattgggaattcttggaagtacgccacgcaatcgacgtgatgcacctcactaagaacctttgcgtaaaccttcttggcttcctaggtgtatacggaaagtcgaaagatacactggaagcacgtaatgatctgaagcatatggaacaacgcggcgaccttcacccggaaccaaaggagaaaggaagccattacttgagtccagctagctacactcttagcaaggcagagaaggaaaatatgtttgaatgcttggagagcataaaggtaccgtctggatactccacgaatatcaagcgaataataagcacgaaggagaagaagttcacaaacctaaagtctcatgactgtcacgtgttgatgacacaactgctaccagttgtaataaggggtatccttccagacaatgtccgggcaacaataacaaagctatgtgcattcatgaacgcaatttcgcagaaggtcatcgatccggatagattagatgcccttcagaatgaagtggtgcaatgtctcgtcagttttgagttgatatttccaccttcatttttcaatataatgacacatctgctttgtcaccttgtgaaagagatccgtattctcaggcctatgtacctacacaacatgtttcctttcgagaggtacatgggcgttctgaagaagtatgttcgtaaccgtgctcgtccagaggcaagcatcgccaagggttatggaacagaggaggtcatcgaattttgcgtagaatttatcgaagaccttcgcccaatcggggtacctgaatcacgccatgaagggagactacggggaaagggaactctcggaaggaaagcaataatgacggtagacaacaatttattccgtaaagcccatttcactgttctgcaacactcttcattggtagctccttacatcgaggagcacttggctctagttcgcgccaggaacatcggtaagtccgatgcatggattacacggcatcacattgatactttccccgcgtggctacgacaacatctcatgggtaacgagtcgatcaaccaacaacttgccttcctggcgaggggaccgtctgggtcgatcgcgacattccagggatatgagatcaatgggtacacattctacacgggagcccaagacatgaagagcacgaaccaaaacagcgctgttcgtgtcgatgccatgggacacgatggaataactgccacgtattacggtgccatcgaggacatatgggaacttgactatggtcctctcaaggttcctctgttccggtgccaatgggttaggttgactggtggaggcgtaatgattgatgacagtgggatgacaactgttgaccttaacaaggttggatactcggacgaaccttttgtccttgccaatgatgtaacgcaagtctttttcgtgaaggacatgtctagcaaaggaaagaagggcagagggcctgatgagcctaagcgtcaagtggttctcccaggcaaaagaaaaatcgtcggagttgaggacaagactgacgaggattacgatcagttggatgggcaaccccctttcacggtgacgattgaccctagcatcctcctatcaaatgaagacaccccttactcatgcagcgatcacaagaagggaacaataatggctgaccgcgatgaggaacagatattgtacgatacaatcgcggagggaagcagccagtactggaatgaagaagaggggaacgaggatccaaaccagtacttgaacgaggaagggaacgtggagagggatgcggaggggaaccagcaggggcacgtggaaagggatgtggaggggaaccaggaggaggaggctagtggtagtcaaccctccgttggacagaagagggcacgcgggcaacgaggtgcagcgaacaagcttgagggtcggcacatcataacggaagtggaagaagatggacgtcctagtgccccagccgaagccgccaagaactatgtacgtcacagcggttgggttgtgcgggataacgtgcctgtcagtagggtgtactggcgaagaacaagggcacgcggagatcatgagagctttgtcccagattcggagaaagagatgctgtggaccacaatgctcgagacattcacccttcctacgggtacagaggacaaagtgaaaaggtggactctgaagaaaatggcagaacagtttcagagcttcaagggagatctgtaccagaagtatatactgaaggggcagacaccgaacttcgacacattcccaaagctaagggatcactgggacgagttcgttgcttataagacaggtgaacaagggcaggcgatgatggaaagaaacaaagaaaatgccgccaagaagaagtaccatcaccacttggggtcaggaggctatagcgtcgcgatgccgaagtgggaggagatggaggctagcttgattgagaggggtatcgaaccggcaacagccaattggccggaacgatcgaagttctggtactatgctcacggtggaacgctcaacccagctgatggctcactggtcttcggcgatcagatacgagaggctgcgcgacgactaacagatgcagtggaagcctcctctcagggcacgttccgaccagacagagatagggacgagctgacactcgccctgcagactccagagcatccaggacgaacacgagggaaaggggtgattccttggaagattggtttcaaggaggacatccacacgtacaggagtcggatgaggagcaagagagataccgaggcgaagattgcagacctagagttccgggtatcgagctacgaacgcatggccgcacatcggtcccatgatccccagccgaccattcctcctgcaatggtgagcccgtcaggaaaccgtagcagctgcgcctcaacggggcaggtaggatcacagagcatggacgccatgcaaacacaggacgaatcgacctgtcccgttgatgacatcactcagcggacaccatgtgagctgcatattcctttcaagaacttatcaataaaggtggtgtcgggcatggccatcccaatggacccttcaggtacttaccactgcaggccgattccagcaggatactcgaaggtcgaagttgagttggtcgaaggcgcgtacgaggacctcgagctggattaccctggaggagacgcaccgtctccacctcaggctcctgcaccaactcctcctcaggctcctacaccgactccgcaagctcctcttccggcaccttccaagtcaagggccccccaagctccaccgcctgcccccacaagggcaacgaagaaggcgaaagttgacgccgccaagaacaaggacccggggtatgattgcacgcaagaggagcttgatgcttacgtggcatcagaagtcaggagacaattcaagcctcgaagtctagaaaagaagattcctatagacccgagtgtcaggaacttcttcaggggtatgtctgcacctgccaaggaggccataaagctatcggactatgagcgaacactcaaaaaagcatcttctggaaagtccaaaccagtccctcagcttggagagcaaccaaaccaggagatcgagccgttggtgaccggtgaagattttggaatacaagactttattaatgacaccgggctaactacggatcaattgctacgagacgcaccaatcgaaaaggcagaagtgaaatacatgtacgaactcggtaaactgcttgtcaagcctgagctgctgcagtccctacccacacaaatgtacaagttccatcagctgtacatggagatgagcgccaccggtagagagatgatcggagcgaggatcagggacacagacttcttgcaaggagatgacattctctggatcaatttcaagggaatctacgaactataccagctggacgccctcgacgtctctattatgagttgctggattttaatggagattcaaagggcccgacggcggggggtttttgatactggattcatcgaccctcggaaagtaaacgttgcaatgctcgaccaatatccgcaagccacaaaggacaatctcgtccatctcctgaaggcgcagcattacaagacgttcatattgttgccgtacaacacagaattccactgggtgcttttactcttcgacctggaggcctacaccgtcaacggagagggtatccttgatgtacttgatgccaagccattttctggagcggctgcacgcaccgccgaggcgccaacacgacgctgtgccgtggcgcgccgacaatcatcgcgcatcaccgtggccctggcccacgcctcggattcgaggatgcgctgcctccgccgcccggcaacccacctgctctgctccgctcggagcgcccacgccgggaacgcccccagggtgctcgacgaaatgccccttccgcctctcgctccatcacgccgcacgacgactctggtccgcgcgcaccacctgctcggcgcaatgcgcgggccggggttctgcaccaccgtgggctcagaatcagatgtggagccgcgattcacggtggtgccgggcgccgcccaggagggccttgcaccgggcgtgtccgaggcggcagaaagggtctgccgcgtcgtgtctgcccagccggagcatagaattgcgccggtgctcgatgctcttggggtaaccgtctcgccgcagttggtggccgaggttctcaagaacctaagcaacgctggcattcttgcgcttgctttcttccgatgggcagagaggcagcaaggcttcagatactcggccgagggattccataatttgattgaggctctcggcaagatcaagcagttcaggctggtgtggagcttagtggaggccatgcggtgccggagctgtctgtccaaggacacgttcaagatcattgtcaggaggtatgcccgggccagaaaggtcaaggaagctgtcgagacatttgagaagatgtccagttttgggctgaaaacagacttgtcagattacaactggctgattgatatattgagcaagtccaagcaagtgaagaaggcgcacgccatcttcaaggagatgaagagaaaaggtaggttcatacctgatctcaagacatacactgtcctcatggaaggctggggccatgagaaggacttgctgatgctcaaggcagtgtaccaagaaatgctcgatgcaggcatcaagcctgatgtcgtcgcgtacgggatgctaatcagtgcattttgcaagtctggcaaatgtgatgaggctatcaaggtgtttcatgagatggaagagagtggttgcatgccaagccctcatgtatattgtatgcttatcaacggcctcggttcaatggagagactcgatgaagctttgaaatactttcagctttctaaagaaagtgggttccccatggagcgttga

SEQ ID NO: 16497 - DNA, 332 bp, Oryza sativa
  Clone ID: PAT_MRT4530_2223C.1
aaaaaaaacttatttttttttccaaaacaaaaaccacagccccaaaaacttggcttggccactatgatttttttgacaaacttagggcccaaaaaacattggaaaaagaaaaagaaaaacataacataccccctataacttaccattctttaaacctaaaaaaatttctttccaaatgctaaaagggcgttggagtttttaaggggggaactgaaaattaaagggccccagcaaattgattttgccgggggaaaaaacccaaaaaatttttttccaaggccccaaacttaaaggccctttaccccaacgtggattactttagcaaggtttta

SEQ ID NO: 16498 - DNA, 1056 bp, Oryza sativa
  Clone ID: PAT_MRT4530_22240C.1
atggaagaagatgaagtggaagacgacaatattccggactttgctcagtacgctagatttgaaggaaatcaaacgggcgaggaggaaagggatgctgatggtaacaacgttgcggatgatcttggtcagatgttgcaggacgccaaggaggactgcgaaagtgaaaagggggcccataaattgaacaagatgttagaggaccacagaacgtcgttgtacccaggttgcgagcaggggcacaaaaagttggataccactctggagttcttgcaatggaaggcaaaaaatggtgttagtgacaaggcaattggtgatttattgaaactcgtcaagaacgttcttccggagggaaacaaattgtccgagacaacgaacaaggggaatgctagaatgatgcgttggcacgctgaagagcgtcaacaggacgggatgctgaggcaccccgccgatggttcgcagtggcgaaacatcgacagaaaatttaaagactttggaaaggacgcacgtaacatacagtttggtttaagtacggatgacatgaatccttttagagagatgagcagtggccatagcacttggcccgttacgatgtgtatctacaacctccccccttggctatgcatgaagaggaagtatataatgatgccgattattattcaaggccccaagcaacctggtaacaacatcgatgtgtacctaagatcactggtcgaagatcttaaactgttgtggaagaaggaaggtgtccccgtgtgggacgaggacaaacaggaggagtttaacctacgagcgctgctgttcgtaaccatcaatgattggcctgcacttagcaacctatccgggaagtccaacaaggggtacaaggcttgcactcactatatggatgaaacagaaagtacgtatcttaagcactgtaggaaggttgtgtacatgggtcatcgtcgattccttgcagcgaaccacccggtatggaagaaaggcaagcactttgaacatacgtggaccaccgtacgaagccaaaacatcgccgcggtaaaacagtgtttgctatggtga

SEQ ID NO: 16499 - DNA, 352 bp, Oryza sativa
  Clone ID: PAT_MRT4530_22241C.1
agaaatggggaaacacctttagattgattagtttttataggaaaacagaaagacagttttttttacactagcagggttttgggagtacaacagacaaaacaatcaaacaaagatgccacagctcaagaaaagaacagtacaagaatttgtaaatagatcagaaaatcataaaataaaaagaccaccaatggagtaggtacaacacatcggcaacacactgcctcactgcaattttgcagattattactaggtagtctattgttcttttgataattcattgtactcgtctatcaccacaataatgtcgggggcattatcctttcgaatattgcttgcttgtcctttgatctga

SEQ ID NO: 16500 - DNA, 194 bp, Oryza sativa
  Clone ID: PAT_MRT4530_22242C.1
aaatgcccgggatcctgtgtggtccttggatatgcctgcaactaacaccagatgcctcttgttgcaatccttttggtgtttttgagatatacaaacaatgatttgttgctccatacagtattagcttaatgccccaaactgtggatggccttccgttaggtgacttcaagttcgaataatattttcgttaacca

SEQ ID NO: 16501 - DNA, 228 bp, Oryza sativa
  unsure (1)..(228): unsure at all n locations
  Clone ID: PAT_MRT4530_22243C.1
cagcattccgctggattgcaagagggataacagcatgtctataccaagcatccagcctatgcctatactaccaaatcagatcttattccncattcattaaccacnatctaccctttcanactaaaagaagtattcctttctgatgtgaggctgctgccattgctatattatggcctggggggggggggtcatttttctccagtcatatccactcttcttcaacacata

SEQ ID NO: 16502 - DNA, 3032 bp, Oryza sativa
  Clone ID: PAT_MRT4530_22244C.1
atggccggactgttcgcatcgtcggccgtgaaatgggccatcgacaacctctcctccctgctgccggcggcggcggcggcggggtcgaaccggggcctggacgcgctggaggagctccggatgctggagcggaccatgcggcggatccacgccacgctgcgcgacgcggagcagcgctggaacatccgcgaggagtccgccaagctgcggttggaggagctcaaggagctcgcctacgacgccgaggacgtggtggaggagtacgagtacgaggtgaaccggcgcaaggtggaggcgctcgagcggctcgccgccgttcatggcggcggcggcgccagcaagcgcaagcgcgaggaggtacatgaagagcagttctccactgagtctggaatagttccagttccaagtgagttggctgacagaacaaggacagttattcagagattctgtgagatcaaagactactgcgatagttttagtttgtctgataatgatggggacagaaggattgtccctgatatcaatgctatgcggcagactagctcttttgtatttgcacccagaattcttggaagaaagaaagacatggagaatgttatcgcaaaattgctctctggggaaggcagccgtgttggaggttgcatgtctgttttggccattgttggtatgggaggattgggcaaaacaacactagcacagcttgtctacaatgatccaaggggagcattggccaacgagataaaggacaagagggttttccttgtctttgatgatgtatggaatgagcgaagcgattactgggagttgttgatcacaccgatgtttgcttctaaatgttgtgacattatagtaaccactcggaatgagacagtggcaaggttggtgcaaacaacacaaatgtacaatatgaactgcttaagtcctgacgagagttggtcattgttcaagcaaacagcatttactgagcaagaaaatatcagtccagcaaaccttgtagagattgctcgaatggtatctgaaaaatgcaaggggttaccattggtaatcaagactgtagggagcatattgcgatttgaaaccaatgaaattaaatggagggatgtcctacaaagtgagttatgggacttggagcagactcagaacgaggttttgccagtgttggagttgagctacaagcacatgccgatagacctgaaacagtgcttcgttgccctttctctatatccaaaatattattatcttgatgaaaacatggtagtttggttatggaaactacttggtttacttcaaggcgatgaaattggaaagttatatttcaatgaattggttcagcgatcattgcttcaaagttctatccatggacagaaagaaggggaagagttctttagacttgaggaagataaacaaactgaagttccacggggcgctcgatacatgtcgataatgccaagatcactatgtaggaagagaattcaaatatcaaatgcctcgcaatctctcagagccatcatagtgataatgggtgatattgatatcgtaaatccggaagtgttgtttacgcactgtaagaagcttcggatcatttacgtcgtacagggcagtgttcaaaaggcactacttgacttcataggtggcatgaaactactacggcatctcactctatcaggttatgaatgtgctacacatttatcacgtcctaattctatgtctgagctatttaatttgcaaaccctggacatacaagcgtatacgttacttaaaattggacgactgattaacttgcaaactttgcctgaaatacatctcatgaaatgtggttgcttcgttgacataagagagttgaggaatatgaacaaaataaggaagttgtgtattcgtggactgcgtaatgtacctagtatcatgcatgcagatgaagctcatttacaaagtaaaaggaaccttgaggtactagagttagattttgacgaattatttcttgataaagatttcgatgaattgagaagttgtgaacatacagagcatggtgacgctaatgaagcagctgtcactcaatcgcgaggccagttacttgagaaactacgaccacactaccaaagcctcaaggtactaagaatacaaaacttgaaccatggaaactaccccagctggttgggcagtgcttctttttccaagttaactgaactgaagttacaggcttgtcaatctcaacaccttccaacacttggtgagttaccttctctcaaatcccttgatataagccgaatggagtttgtggaacacattggccatgagttttgcagccttcagcaaagattcaaagggttccaagcattacaagacttgagctttgatggtatgactcgattgtcagagtgttctggactggaggatggaataaaggctgaaacccaccgctacacaactaacaacgacggcggagcccaatcacaggacgtcagtgccaagctaaacacaaaagcgacacaaaagctcccacatcgcaaaagaggtgttatcattgctgagcccattagcgagcagcttcgacttcatcagcagaaacaaccgaagagcatgtcacccaccacaagaatgaagcagacccaagaaggtgaaggcctcaccgaacacaaggtatgaaatcttttgaactgaaaaagaccatcaacagtcgtcgatgcgttggaacttctccgaagtgacacccacaaggaggacacgaagcgtaacgccgtcaccgctcattcgaaaatcggaacaaggttttcacctggagattttggggggggggggatatgaaagaacgccatgacaacgcctccaagaagggaaacagcgcccgcgggcgccgtcgtcatcgaaccggccaaaggcatggcaaggctttcgccagcatcttctgctagcacaagtcgtcgtcctgccaactccacatccgcacatccacgagacctgccaccggcaaaagaagcccccagcacatctgcacattcttgtcaaggatctaggccaactaaaatactttctag

SEQ ID NO: 16503 - DNA, 2670 bp, Oryza sativa
  Clone ID: PAT_MRT4530_22245C.1
atgacctatagacttagcaaatatttcttgtatgaacagatggctgatcgcgatgacgaacagatactatacgatacaatcgcagagggaagcagccagtactggaacgaagaagagtcgaacgaggatccaaacaagtacttgaacgaggaggggaacgtagagagggatgcggaggggaacgaggaggaggaggctagtggaagtcaaccctccgctgtacagaagagggcatgcggacaacgaggtgccgcgaagaagatagagggtcaacacatcataactgaagtggacgaagacggccgacctagtgccccggcagaagcagccaagaattacgtacgacacagcgactgggttgtgagggataacgtgcatgtcagtacggtgtactggcgcaggagaagggcacgcggagatcatgacagatttgtccctgattcggagaaagagatgctgtggaccacaatgctcgagacgttcacccttcctgtgggtacagagaacatagtgaaaatgtggactctaaagaaaatggcagaacagtttcagagcttcaagggagatctctgccagaaatacatcctgaaggggcagacactgaacttcaacacattaccgaagctaagggatcactgggacgagttcgttgcttacaagacagggcaacaagggcaagagatgatggacagaaacaaagaaaatgctgccaagaagaagtaccatcaccacttggggtcaggcggctatagcgtcgcaatgccgaagtgggaggagatggaggcaagcttgattgagaggggtatcgaaccggccaccgctaaatggccagatcgatcgaagttctggtactatgctcacggtggaacacttaacccagttgatggctccctggtcttcagcgatcagatacgcgaggctgccagtcgactaatggacgcagtggaagccttttctcagggcacgttccaacccgacagagagaaggacgagctgtcactcgctctgcagactcccgagcatccagcacgaacacgagggaaaggcgtggttccttggaagattggattcaaggaggacatccacacgtacaggagttcgatgaggagcaagagagataccgaggtgaagattgcagatcttgagtatagggcatcgagcaacgagctcagcatgcaagaggaggtggcaaggaaggtaggatcacagagcatggacgccatgcaaactcaggacgaaaccacatgccccgttgatgagatcacgcagcggacaccatgtgagctgcatattcccttcaagaacttatcaatcaaggtggcgtcgggaatggccatcccaacggacccttcagggacttaccactgcaggtcgattccagcaggatactcgagggtcgaagttgagctggtggaagccgcgtacgaggacctcgagttggactaccctggaggagacggctcctacaccgactcctcctcaggctcctcctactcaagcttctgcattgactcctccacaggctcctgcgccgactcctcctcaagctcctcgtccggcaccttccaagtcaaggtctcaccaagctccaccgcctgcccacacaagggcagcgagaagacgaaagttgacaccgcagaaaacaagccgccgccgggtatatttgcaccagccaagaaggccataaagctaacggactatgagcgaacacttaagaaagcatattatagaaagtccaaaccagtccctcagcttggggagcaaccaaaccaggaggtcgagccgttggtgaccgaggaagaaattggaataaaagaatttatttctgacaccgggctaactagggctcaattgctacgaggtgcaccaatcccaaaggcagaagtgagacaccagtacgaactcggtaaaccgcttgtcaagcctgagcagctgcagtccctaccgacacagatgtacaaattccatcaactatacatggaaatgagcgccaccggtagagagatgatcggagcgaggatcaggcacatggacttcttgcaaggagaagatattatccggatcaatttcaagggtatctacgaactataccagctggacgccctcgacgtctctcttctgagttgttggattttaatggagattcaaagggcccgacggcggggggttttcgatagtggattcatcgaccctcggaaagtaaacgtcgaaatgatcgacaaatatccgcaagccacagaggacaatctcatccatctcctgaaggagcaacattacaagacattcacactattgctgtacaacacagaattccactgggtccttttactcttcgacttggaggcctgcatagtcaatgtctatgactcaatggataaaaaagagtctacttttgacaaggtttttgaacttatagacagggcttggtatcagttctgtcatttggtctgcggcaattggaaagaaaaacttaggcggaagtttaaatttgctgttattcgcacgagggataacctcacacacaaggaatttatcgcggcggttcaagaacaactcataggattcatcaacgaacaagtccttgatcccgagggtgaattctactacgatggaaatacaattcataagtcgttagcttctgagctaacgacttctacatcgaagtcgtag

SEQ ID NO: 16504 - DNA, 536 bp, Oryza sativa
  Clone ID: PAT_MRT4530_22246C.1
tttttgttgaagatgaaaaattggagcaaccattataatgctaaaataattacattgacagtagtacaaaacaggttatttgacactttgactgttgactaccgtagaccccctatccttatgtacatgcacaggcaacatgcatactgaaaagtagctagctactcctagtttttcttaaaagaaaaaagaaaaagaaaaagaaaaaaatacgcctatactgtaggagtagtaattactatcgacggctaggttgcatgaatagaaatagaagtccatttccgagatttagatggtgaatttgccatgcggagcataatgtcaagcgacctccactcagcgtcgcacgtgattgccggtcgccgctttctctccaggctgcagcagcgcagcgccaggcggagcagcttctcggcctgcacctccggccagctcccggcggaggcgttcagcacggagtggacggcgtccattttgagggccttgcgcacctggtcggcgatgttgaggtcgagcagtccggtgagcacctggag

SEQ ID NO: 16505 - DNA, 984 bp, Oryza sativa
  Clone ID: PAT_MRT4530_22247C.1
atgcaaacccaggatgaaaccacctgccccgttgatgacatgactcagcggacaccatgtgagctgcatattcccttcaagaacttatcaataaaggtggcgtcgggcatggccatcccaacggacccttcagggacttaccactacaggccgattccagcaggatactccaaggtcaaagttgagtttgtggaagccacgtacgaggacctcgacttggactacgctggaggagacggtgagacgcatctacgagacacaagccatgccattatactatggcgcaagctcctacaccgtctcctcctcatgctccagcaccgtctccacctcaggcttctgcaccgactcctcctcaggctcctacaccgactcctccgcaagctcctcgtccggcattttccaagtcaagggcaacgaagggcaacgaagaaggcgaaagttgacaccgccaaaaacaaggacccaggaatggagattcaaacagcccgacggcggggggttttcgatactggattcatcgaccctcgtaaagtaaacgtcgaaatgatcaccaagtatccgcaagccacagaggacaatctcgtccatctcctgaaggcgcagcattacaagacattcatactattgtcgtacaacatagaattccactgggtccttttactcttcgacttggaggcctgcgtagtcaacgtatatgactcaatggataaaaaagagtctacgtttgaccagtgcgcaaagcaagcccagggaactaacttgtgcagctacttcgtgtgcgagtattgccactgccttgcaaaccaaatcatcaacacaacagagcttgatgttattcgcatgtgggataacctcacacacaaggaatttatcacggcggttcaagaacaactcatgggattcatcaacgaacaaatccttgatcccgagggtgaattctactgcgacggaaatacaattcataggtcgtttctgagataa

SEQ ID NO: 16506 - DNA, 462 bp, Oryza sativa
  Clone ID: PAT_MRT4530_22248C.1
atggaggaggtcgtcggagtggaagacgacgacggagttgagttcgatgagcaggaggaggaggaggacttccacgaccttgaacaagagttcctcagattccactggttccttttactcttcgacttggaggcctgcaccgtcaatgtatatgactcaatggataaaaaagagtctacgtttgacaaggttttcgaacttatagacagggtttggtatcagttccgtcatttggtccgcggcaaatggagagaaagacttaggtggaagtttaattttccttttattcgcatgaaggataacctcacacacaaggaatttatcgcggcggttcaagaacaactcatgggattcatcaacgaacaaatccttgatcccaagggtgaattctactacgacggaaatacaattcatacgtccttagcttctaagataacgactactactacatcgaaatcgtag

SEQ ID NO: 16507 - DNA, 358 bp, Oryza sativa
  Clone ID: PAT_MRT4530_22249C.1
attcaaatacatacaagtgtatattaattagatctctcgttgtttgtcatttatttgtagtgcgcaaagcaaaagcagggaactaacttgtgcggctattacatgtgcgagtattgccactgccttgcaaaccaaatcatcaccacaagagagctcgatgtactttattcgcatgagggataacctgaccacacacaaggaatttatcacggcggttcaagaacaactcatgggattcatcaacgaagaaatccttgatcccaagggtgaattctactacgacggaaacacaattcaccggtccttagcttctgagctagcagcgagtactactacgtcgaaatcgtagctagctagg

SEQ ID NO: 16508 - DNA, 1707 bp, Oryza sativa
  Clone ID: PAT_MRT4530_2224C.1
atgtccttgcacttgatgtcgccgcagggcagtggaagtggagggtcactgattgccaccctggctgtagcctactcgaagcatgggcgaagtttgtacaccggaggcactgatggcatggtctgtaggatcaatgcctcagatggctctgttgtagagaaatttaaatcttcatcaaaagcaatttctgcattagctgtgtcaccagatggggagattttagcaacagctgctggccagttgaggacctttgatgcttctgataacaagaagattcaaaaattctctggccatccagtagctgtgaggagcatggtttttagtggtgatagccaatatgttctgtcatctggagttggggaacgctatgttgccatttggaagttgggtagtggtaaaactcagagttcaagctgtatactctctatggagcatccagcgatctttgtggactgtaaatgttcagacattaatgatacagaaggagaaatacatgtgttggctatttctgagattggtgtctgctacttttggtctgggactaatatggatgacctgcgtaataagaagcccactaaaattgcattgtctgattcctctctttcaagatctaagcaaggttttgcaatatttgccgcaaaactgcaaggaatagatggccctaattctgcacatgttctgctggcttatggatctgtggtgaaaccgtcttttgacaaactgttggttcgttatggcatggatattagtttgggtgtatctgatgatggagttctcttacccatgattcaacccacaaagcctcagaaaggccaatctgctaaaaagcaaggaattataacggctctagaccgtgctaatgcagaagatgcaatccttcctctcccacagctccatacgcaggaaaagaaaaggaaacataatgcaacagaatccagtggtgacatccagtctgcacctcatagtgaccttagttctacaaaattgattgagaaaagagctcctatgcaaagaattgaagatgacagtgtatgcatcgaagacatgatgcggaagtgtggagttattgattctagagttgatcagggcatggaaggtcatcctagcatacccactagtattttatctgatctatttggcagcagcagtaaaatcgatgctaatttacccaacaagaagattcgagcacatctaagatccttgaagcctggagatgcttgcgaacttttagaaaaattagtatcttcatggaaaacaagatctggtagtgcagaggttgttttgcggtggatatactgcttattaattatccatggtcgttttatcccctttgagaaatctaaaaaaataattagcgaccttgagaagtggagttggggggttaagctattagcaactattgccttaaatgactgcagaatgtggataacatattctgattctaatttaaagaccaccaatgcaggcaggatgtgtggggaaagatacaaagcagctgaagatttactgaagctttctggtcgtcttcgattgctcatggctcagatcgtcaaggatccaaacgatgtttctgagcttccatcagaggagatgcaggattcagcggctgctcagtctgatgaagaggaggaagatgatgaaattgatgaaacggtgtatggtgaagacgctgattcgtctcaaacaagtgatgacgacgctgaatag

SEQ ID NO: 16509 - DNA, 1863 bp, Oryza sativa
  Clone ID: PAT_MRT4530_22250C.1
atggaggcggcggcgccagccatgctggcgccctcctcctgccacatcgactcccgatcatctaggacgaacacgagggaaaggggtgatccttggaagattggattcaaggaggacatccacacgtacaggagtcggatgaggagcaagagagataccgaggcgaagattgcagatcttgagtacagggtatcgagctacgagctcagcattcaagaggaggtggcaaggaaggtggataaacgcatggccgcacatcggtcccaggatccccagccgtacattcctcctgcaatggtcagcccatcaggcaatcgtagcagctgcgcctcaacggggcaggtaggatcacagagcatggtcgccatgcaaactcaggacgaaaccacctaccccgttgatgagatcactcagcggacaccatgtgagctacatattcccttcaagaacttatcaatcaaggtggtgtcgggaatggccatcccaacggacccttcagggacttaccactgcaggccgattcctgcaggatactcgaaggtcaaagttgagttggtggaagccgcgtacgaggacctcgagttggactaccctggaggagacggtgagacgcatctacgagacacaagccacgccattatactatggtgcaagcggtacatcatcctccctgggcgagaagcggcgtctcgtgcaccatctcctccggctccgccatctcctcctcaggctccagcaccgtctccacctcaggctcctgcaccgattcttcctcaggctcctacaccgactccgcatcaggctcctactcaagcttctgcagtgactcctcttcaggctcctgcgccgactcctcctcaagctccttgtccatctccttccaagtcaaggtcccaccaagctccaccgcctgtccgcacaagggcaacaaagaaggtgaaagttgacgccgccgaaaacaaggagccggcgtacaattgcatgcaagaggagcttgacgcttatgtggcagcagaagaggctataaagctatcggactataagcgaacacttaagaaagcatattctggaaagtccaaaccaatccctcagcttggagagcaaccaaaccaggaggttgagccgttggtgacaggtgaagaatttggaataaaagaatttatttctgacaccgggctaactacggatcaattgctacgaggtgcaccaatcccaaagacggaagtgaaatacaagcatgaactcagtaaatcgcttgtcaagcctgagcagctgcagtccctaccgacacagatgtacaaatttcatcaattgtacatggaaatgagcgccaccggtagagagataattggagcgaggattagggacacggacttcttgctaggagaagatattctctggatcaatttcaagagtatctacaaactataccaactggacgccctcgacgtctctattatgagttgttggattttaatggagattcaaagggcccgacggtggggggttttcgatactagattcatcgaccctcggaaagtaaacgtctcaatgatcgacaagtatccggaagcaatagaggacaatctcgtccatctcttaaaggcgcagcattacaagacattcatactatttccgtacaacacacagttagtttttactatcttcctaccaaatttcattcccgttattcgtatgaggtataacctcgcacacaaggaatttatcatggcggttcaagaacaactcatgggattcatcaacgaacaagtcattgatccccagggtgaattctactacgacggaaatacaattcataagtcgttagcttctgagataacgactactacatcgaagtcgtag

SEQ ID NO: 16510 - DNA, 1367 bp, Oryza sativa
  Clone ID: PAT_MRT4530_22251C.1
ggaaataaaaccccaaccttagtttagttttaaatcacaattttacaagctggaattacccatagctgaagtccaaattttggggttcaaatacagtaattgggagaatggaatttacaggggaaaagatgctcccaaatttggggatcaggggttcacacttttgatttttgaacgggattttttcacccagatatcttccgttcagcgtttttcatcattatcacaaattcatcgtagttcacctgcccgtcgccatcggtatccgcctcccttatcatctgctcaacctcctcgtctgtcatcttctccccaagattggtcatcactgtcctcagctcagttggggagataaaaccattctgatccttgtctaggacctcgaaagcttctttcagctcttcgtcgccatccccatccttcatcttcctggcaatgaggctcaggaactcctgaaaatctatgatcccattgccatctgtatcaacttccctcatcatgtcgttgagctcctgatcggtcggctcaaggccaagagaacgagtcaccgcagccagctcttccaaggtgatgcatccatcgccgttcttgtcgaagagcaagaacgcctcctggaacgccaccatctgctcgctcgtcagcccttccatgcaggctccgccaccttcacagtcacaccactagcaaggagagtgcaggaaaacaaaagggtggcggacgcgctggggataaacagcaggggggcaacttgtattggttattgatgcaagaattgacttggaacagaatgataacctttcattagggttagtagctttagctcggatttgagtagtagaccatcctccacgtaccgtatatctatgctggatccagtcagcctggagtgtaaaataatgaaaagtgacaaagaaaacaaagctcttgaccactccaccagcgatggtacccttgatgagagtgtcgagctcctcatctccacggatggcaagctgcagatggcgaggggtgatacgcttgaccttcagatccttgctagcgttcccagccagttccagaacctcagctgttaagtactccagaatagcagcagagtaaactgcggcagtagcaccaacacgtccatttgcctgagtcctttgcttcaactggcgatggatacggccaacagggaacagagtcctatcatggttggcttccatggtagctgaaaccaccacagttggtgccactggcatactaccaccttcctggagaccagcgcgggacgagcgggagacgggggccttcttccccttgtccttctccgccgacttggcggccgtcgtcttcgcggcgagcaagcccttacctccttttcccgccat

SEQ ID NO: 16511 - DNA, 273 bp, Oryza sativa
  Clone ID: PAT_MRT4530_22252C.1
gaaagcaaagattctcttgctgtaaccctgaagtagtcagtgtccaaggtgtcggcacgatctgacaaaatccgtaaatcacaacgatctatatccttgttcactcaaggaaaaccatcaacattgacaaaaaaaaatgaaggaaaagaactacagtttattggaaacgaaacaacacagcaaaagcatcttactacttgcaatttaacgcaataaaagtgaaagtgtttatagaggtcatgcaaagcacgatttctgaatcataaagtgagg

SEQ ID NO: 16512 - DNA, 463 bp, Oryza sativa
  Clone ID: PAT_MRT4530_22253C.1
attccactgggtccttttactcttcgacttggaggcctgccccgtcaacgtatatgactcaatggataaaaaagagtctacgtttgacaagattttcgaactgatagacagggcttggtatcggttccgtcatttggtccgcggcaagtggagagaaagacttaggcggaagtttaattttccttgcgcaaaacaagcccagggaactaacttgtgtggctactacatgtgtgaatattgccactgccttgcagaccaaatcatcaccacaagagagctcgattttattcacatgagggataacctcacacacaaggaatttatcgcggcggttcaagaacaactcatgggattcatcaacgaacaaatcctagatcccaagggtgaattctactacgatggaaatacaattcataggtccttagctgctgagataatgactactactacgtcgaaatcgtag

SEQ ID NO: 16513 - DNA, 2574 bp, Oryza sativa
  unsure (1)..(2574): unsure at all n locations
  Clone ID: PAT_MRT4530_22254C.1
agcagcaccggcggcggcggccgcagcagctgtgtcgtcgtacgtccgcgacgttctccgcctacgaggtctggatctctgagccgacctccatattttctttgtaggataatgtcagactctacggccatggacaaaagctggatggacttatctaataggagtcttcctgaatatcagcaaggagttgaccaatttattcagtttgctttcaaagattacaatgcagacaaattcctccgatgcccatacagaaagtgcaaaaacaatcacttctttgatcagaataatataaaggaacatctctttatccatggagtgcagaaagactacaaattatgggtctatcatggataaaacgtcccagattcagaagacagtggcaatattgatatggatgaaaattatgataactatggtatggatcagatgatgaatgattttggagaacctatggttgtgaatatgggatcactgggtggctcaacacctggtttgaatgatgacatggataactctacagtaactaacgaagaaactaacaaattctacagacttctagaagatgcagagcaagagttatatccagggtgtggtaccttttcgacactagcatttattgctctattttccatgttatgcaaggcatttcctagtagcagtaatgtgcctaagtcatatagtgatgcaaagaagactatgacagatcttggattggattacacaaagatcgatgcttgtttgaatgattgcatcctatatagaggggcttatgataaggctgattcttgtcctgtttgtggcatttcaagatggaaaaatgaagggcataataatgtctctaaatcaaggaggagaagagtgaagaaagtcccatagaaggtattgcgatacttcccattggtaccgaggttaaaacggatgtacttgtctacaaaacttgcaacacatatgcgatggcacaaggagaagttagtagatgatggatataagagacatcctgctaattcaaaagaatggaaggacttcgatgggaaattttcttcatttgcattggacgcacggaacatccgacttggtcttgctagtgatggatttaacccatttggaaatatgagttcttcatatagcatctggactgtagttcttgttatatataacttgccaccttggatgtgcatgaaagatccatatatggtgatgtctatgataattcttggcccaaaagcacctggtaatgacattgatgtatacttgtagccatatgcttccacaaagcagacttttaatttacgtgctgctttgctttggacaattaatgattttccagcatttgaaaacttgtcaggcattagcacaaaaggtaaatatgcatgtccttcatgccacactgaaacctgctaccacagacttgttaatgggcacaaatattgttatatgggacatcgccgcttcttgccgaggcgacatgtctggaggaacaatgatgcttcttttgatggccaaaaggaaaagcgaagtgctccaaaaccattgtcagaagatgatattatttctcagtatgagaaattcgaacaggtttttgggaaatcagggaagaaaaggaaacactctagtacattgtatggtacttgaaggaaaaagagtactttttttttccaactcccatattggagcaagctgactataaggctggccaccggagcgccgtcaccttgctcgcgcttctctctctcttctctcggcttcctgtgagacagaggaaaagaagacgaggaggagaaaaggaggaagaaggaaggctatgacaagtgggccccactgcatactaatcccaaaagacggcgtgaccaccgcatcatcggcaggaacatgttcaatcgatggttgggccgccgatccggagaccacaccagtggccaccggcggccgcacctcgatcgacgtcgtcactgccggagcgcaagaagaggagtcgtcgtcgacgacgcccgtggcgaccccgtaggccaccggttagtcccgattggtatcggttccgtcatttggtccacggcaaatgacgagaaagacttaggcggaagttcaattttctttgcgcaaagcaaaagcagggaactaacttgtgcggctactacgtgtgcgagtattgccattgccttgcagaccaaatcatcaccacaagagagctcgatgtacgtgcaaataaattcaaaatttcattgcgtacgtatcgatttgttgtttaattactaattaatttcatacattcatatagcttattcgcatgagggataacctgatcacacacaaggaatttatcgtggcggttcaagaacaactcatgggattcatcaacgaacaaatccttgatcacaagggtgaattctactatgacggaaatacaattcataggtccttagcttctgagataacaactactactacgtcgaaatcgtagctagctaggacatcataatggattgtaattaatacatgtctatttttctatatgcatgtacacattntctttaatgtaaatatatattnnggncatatatatatatatatata

SEQ ID NO: 16514 - DNA, 228 bp, Oryza sativa
  Clone ID: PAT_MRT4530_22255C.1
atggcttcttcgcgcactgcaacaaaaggaacaattgacatgattagcaacacatcggaagatacaaaggagggaattaaatctgtatttgatgcttacgttggagtaagcagcagactggaacttcttcacgcctccggcaggtcgaacgtcctcaatgctgtagccaaggggagcttcatacatcaaggaacgactactgctagacttctttttgccaccctttga

SEQ ID NO: 16515 - DNA, 1153 bp, Oryza sativa
  unsure (1)..(1153): unsure at all n locations
  Clone ID: PAT_MRT4530_22256C.1
ggtcgttgaacagccaataaaaggtccagtagaggacaccttttggggggccatgagccccactaaattttgtgggggggggaaaattaaagacccaaagagcccctttaaactttgggaaaccgcactgtgaaaaagaggagaagcaaaaagggggctagagcgtggaaaagagttacatgggggaaacccccacccccccgttttaagcccgttagaggggggcccatttccaaaaagggggggcattttgtgagaggggtgcgggggggcccttttttttttttcccccccgggtaaagggggggtttttcccaagcatttttttgtggcaccccaggggttttcccggctccacacttttataaaacggggcccggtgggggggcgggaaaatacccctcccataaggggcaatttgggggcccgggccccccccccaaagggaataaaaatttttttaaattataataaattaaaaaattttaaattttnnnnnaatttttntttatttgtcaaacgattcttaaattactctttgagcagatggctaacaaggagcaattaattaattaattaattaatattcaaagtacagggacgagaaggtgcagaagataaactggagaaggtaccccggaagaacagggagaaaacaattgttgtaacagaagagggacctaagcacaaacaccaaaacagatgtacagcatacacaacaccacagcgagcaccatccgtccaaagaaccagaaaatcacagctttgacaactgccgcttacaccaggcacaaccaatcacaggctccggatcaccaattcaccatcaccttggaagggtagtaattctcctcctacttggtgatgacccagacagcgtagatgatgccggggaggtagccgaagaaggtgagcagcaagcagatccagaactcaatcccgcagccgaacttgaagaagacgccgagcggcggcaggatgatggcgaggatgatgtcgatgcaggtcgccgtgctgtccgccattcttctgcttgttcccagctaacaacgatgcacaattgcacaaacaagaagaagaagaaaaatcaaagactgagctccaagctgagacgaagagagaggagtcaagagagccgtcccgtggggtgaat

SEQ ID NO: 16516 - DNA, 201 bp, Oryza sativa
  Clone ID: PAT_MRT4530_22257C.1
atgtggctgagggaggacgaagatggagagttgagagaattgactgggaattggaaatacagtttcttggttgatgatcaacagatgattaaattcatggtggatggaaagtgcaatcaactagaaattaaatggctaacgtttgcatttgacgcggctgttcatcgtctctgcgagatgcgcgtgtggaggaggaggtga

SEQ ID NO: 16517 - DNA, 311 bp, Oryza sativa
  Clone ID: PAT_MRT4530_22258C.1
ggtgtgacatcccagcctagggtttaataggattaatataatactcatatcaacaagttgcagcttcttttccgaaagccgatttccaaagaactccaaggttaagcatgcttggcctagagcaatttgggatgggtgaccgaccgggaattgtctttccggtgcgcacgagtgaggacaaagtgtgcagaaaagacacgtgttggtctgtgagggcagtctatgacttatgaaagctgccagatgtaagcgggcccggcctggtgatatcctccatctctttaccttcttgttggattgctttgttctgt

SEQ ID NO: 16518 - DNA, 6152 bp, Oryza sativa
  Clone ID: PAT_MRT4530_22259C.1
atggatcggcaatggatgtacgctgaccggcggtccaaagagtttattgacggcatgcagtattttttgagagtggccgaagcgaacaggcaaaggggttttatttgttgtccatgcaataagtgtaagaatcagaaggagtattctacatccaggattattcatttccacttgtttgagtcggggttcatgccaagctataattgttggacatcccacggagagcaaggtgttgaaatggaagaagatgaagtggaagacgacaatattccggactttgctcagtatgttggatttgaagaaaatcaaacgggcgaggaggaaatagctgctgatggtaacgacgttgcggatgatcttggtcagatgttgcaggacgccagggaggactgcgaaagtgaaaaggaggcccataaattggacaagatgttggaggatcacagaatttcgttgtatccaggctgcgagcaggggcacaaaaagttggataccattctggagttcttgcaatggaaggcaaaaattggggttagtgacaaggcatttggcgatttattgaaactcatcaagaaaattcttccggggggaaacaaattgcccgagacaacgtacgaggctaagaagatagtctgcccgttaggactggaagttcataagattcacgcatgtccgaacgattgtatcctatatcgcggtgaggagtatgagaacctagaagcatgccctgtttgcaaagcactacgatacaagattagacgagacgatccaggagaagttgacgggcagctaacaaagaagagaattcctgctaaggtgatgtggtatttccctataataccacggctaaggcctttgttcaggaacaaggggaatgctagaatgttgcgatggcacgctgaagagtgtcaacaggacgggatgctgagacaccccgccgatggtttgcagtggcgaaacatcgacagaaaatttaaagaatttggaaaggacgcacgaaacatacggtttggtttgagtacggatggcatgaatccttttggagagatgagcagcggccatagcacttggcctgttacgatgtgtatctacaacctcccccctggctatgcatgaagaggaagtacataatgatgccgattattattcaaggccccaagcaacctggtaacgacatcgatgtgtacctaagaccactggtcgaagatcttaaacagttgtggaagaaggaaggtgtccccgtgtgggacgaggacaaacaggaggagtttaacctacgagcgctgctgttcgtaaccatcaacgattggcctgcacttagcaacctatccggacagtccaacaaggggtacaaggcttgcactcactgtatggatgaaacagaaagtacgtatcttaagcactgtaggaaggttgtatacatgggtcatcgtcgattccttgcagcaaaccacccggtacggaagaaaggcaagcacttcgaacataaggccgaccaccgtacgaagcctaaacatcgcagcgggaaaacagtgtttgctatggttaaagatcttaaagtagtgttcggaaaggggcttggaagccagcctatagagagcgaagatggtcacgcggcgatgtggaaaaagaactctatattttgggagttaccatattgggaattcttggacgtacgctcatgactgtcacgtgttgatgacacaactgctaacagctgtaataaggggtatccttccagacaatgtccgggcaacaataacaaagctatgtgcattcatgaacgcaatttcgtagaaggtcatcgatccggatagattagaagcccttcagaatgaagtggtgcaatgtctcgtcagttttgagttgatatttccaccttcatttttcaatataatgacgcatctgctttgtcaccttgtgaaagagatctgtattctcgggcctgtgtacctacacaacatgtttcctttcgagaggtacatgggcgttctgaagaagtatgttcgtaaccatgctcgtccagaggcaagcatcgccaagggttatgaaacagaggaggtcatcgaattttgcgtagaatttatcgaaaaccttcgcccaatcggggtacctgaatcacgccatgaagggagactacggggaaagggaactctcggaaggaaagcaataatgacggtagacaacaatttattccgtaaagcccatttcactgttctgcaacactcttcattggtagctccttgcatcgaggagcacttggctctagttcgcgccaggaacatcggtaagtccgatgcatggattacacggcatcagattgatactttccccacgtggctacgacaacatctcatgggtaacgagtcgatcaaccaacaacttgccttcctggcgaggggaccgtctgggtcaatcgcgacattccagggatatgagatcaatgggtacacattctacacgagagcccaagacatgaagagcacgaaccaaaacagcgctgttcgtgtcgatgccatgggacacgatggaacaactgccacgtattacggtgccatcgaggatatatgggaacttgactatggtcctctcaaggttcctctgttccggtgccaatgggttaggttgactggtggaggcgtaatgattgatgacagtggtatgacaactgttgaccttaacaagattggatactcggacgaaccttttgtccttgccaatgatgtaacgcaagtctttttcgtgaaggacatgtctagcaaaggaaagaagggcagagggcctgacgagcctaagcgccaagtggttctcccagcgcgccctcatcttctccaccaacagttaacattttcggccgatcgatctctctcggcctctctcctttcgccgccactgcctagggcaaatccccgcgccgacgccgccgtatctcgacgtcgtctcgagctcgtcgtcctcgccgccacctccgtctcctccgctgccgccgcatctctgggatgtttctagtatcaacagatggctgaccgcgatgaggaacagatattatacaatacaatcgcggagggaagcagccagtactggaatgaagaagaggggaacgaggatccaaaccagtacttgaacgaggaagggaacgtggagagggatgcggaggggaaccagcaggggcacgtggaaagggatgtggaggggaaccaggaggaggaggctagtggtagtcaaccctctgttggacagaagagggcacgcgggcaacgaggtgcagcgaagaagcttgagggtcggcacatcataacggaagtggaagaagatggacgtcctagtgccccggccgaagccacgaagaactatgtacgtcacagcggttgggttgtgcgggataacgtgcctgtcagtacggtgtactggcgaagaacaagggcatgcggagatcatgagagctttgtcccagattcggagaaagagatgctgtggaccacaatgctcgagacattcacccttcccgcgggtacagaggacaaagtgataaggtggactctgaagaaaatggcagaacagtttcagagcttcaagggagagctgtacaagaaatatatcctgaaggggcagacaccgaactttgacacattcccaaagctaagggatcactgggacgagttcgttgcatataagacaggtgaacaagggtaggcgatgatggaaagaaacaaagaaaatgccgccaagaagaagtaccatcaccacttggggtcaggaggctatagcgtcgcgatgccgaagtgggaggagatggaggctagcttgattgagaggggtatcgaacaggcaaccgccaattggccggaacgatcgaagttctggtactatgctcacggtggaacgctcaacccagctgatggctcactggtcttcggtgatcagatacgagaggctgcacgacgactaacagatgcagtggaagcctcctctcagggcacgttccgaccggacagagatagggacgagctgacactcgccctgcagactccagagcattcaggacgaacacgagggaaaggggtgattccttggaagattggtttcaaggaggacatccacacgtacaggagtcggatgaggagtaagagagataccgaggcgaagattgcagatctagagttccgggtatcgagctacgaactcagcatgcaagaggagggggcaaggaaggttgatgaacgcatggccgcacatcggtcccatgatccccagccgaccattcctcctgcaatggtgagcccgttaggaaaccgtagcagctgcgcctcaacggggcaggtaagatcacagagcatggacgccatgcaaacacaggacgaatcgacctgtctcgttgatgacatcactcagcggacaccatgtgagctgcatattccttacaagaacttatcaataaaggtggcgtcgggcatggccatcctaacggacccttcaggtacttaccactgcaggccgattccagcaggatactcgaaggtcgaagttgagttggtcgaaggcgcgtacgaggacctcgagctggattaccctggaggagacggtgagacgcatctacgagacacaagccatgccattattctatggcgcaggcggtacatcatcctccctgggcgacaagcggcgtctcgtgcaccatctcctctggctccgccatctcctcctcaggatcctgcaccgtctcctcctcatgatctgccagcaccgactcctcctcaggatcctgcaccgactcctcctcgggcctctacacctactcctccgcaagctcctcttccggcaccttcaaagtcaagggcccccccagctccaccgcctgcccacacaagggaaaccaagaaggcgaaagttgacgccgccaagaacaaggacccggggtacgattgcacgcaagaggagcttgacgcttacgttgcatcagaagtcaagagacaattcaagcctcgaagtccagaaaagaagattcttatagaccccagtgtcaggaacttctttaggggtatgtctgcatctgtcaaggaggccatcaatctatcggactatgagcgaacgctgaagaaagcatcttctggaaagtccaaaccagtccctcagcttggagagcaaccaaaccaggagatcgagccgttggtgactggtaaagaaatgacgatagaacaatttattactgacaccggtctaactacggatcaattgctaggagtcgcaccaatcgaaaaggcggaagagaaatacatgtatgaactcggtaaaccgcttgtcaagcttgagctgctgcagtccctacccacacaaatgtacaagttccatcagctgtacatggagatgagcgccaccggtagagagatgatcggagcgaggatcagggacacggagttcttgcaaggagatgacattctctggatcaatttcaagggaatctatgaactataccagctggacgccctcgacgtctctattatgagttgctggattttaatggagattcaaagggcccgacggtggagggtttttgatactggattcatcgacactcggagagtaaacgtcgcaatgctcgaccaatatccacaagaaacaaaggacaatctcgtccatctcctgaaggcgcagcattacaagacgttcatactgttgccgtacaacacagaattccactgggtgcttttactcttcgacctgtcggcctgcaccgtcaacgtatatgactcaatgaataaaaaagagtctacgtttgacaaggttttcgaacctatagacagggcttggtatcggttccgtcatttggtccacggcaaatggagagaaagacttaggcggaagttcaaatttccttttattcgcacgagggataacctgaccacacacaaggaatttatcgcggcggttcaagaacaactcatgggattcatcaacgaagaaatccttgatcccaagggtgaattctactacgacggaaacacaattcaccggtccttagcttctgagctagcagcgagtactactactacgtcgaaatcaaagctgattttctttaaaacacgtgatgcatgcacactcacccatatgaatgcagacacacacggcagcaataatccaatgaataagataaaaag

SEQ ID NO: 16519 - DNA, 179 bp, Oryza sativa
  Clone ID: PAT_MRT4530_2225C.1
agcgagaggtaaaagagaacggggaaacacccaaaaaaaagaagaagggcataggtaggagagcaagcagaacaggaaggccaaagagcgaacatcagggtgaggcaaacaggcaggaaacgggacgaacaacaataagccaagcagggatgaacgaaaaaacgaaagaacagggggaa

SEQ ID NO: 16520 - DNA, 440 bp, Oryza sativa
  Clone ID: PAT_MRT4530_22260C.1
agacaattgcactttttcaaataatcaaagagtatatagcaggttactgaaatatggcatttgagaaaaaaaaaaagaaatgaacaatcaccccagatctaacgggcatgtagtgctcacagtacttgggagtccagggcagcctcctccgagcactgccacttcttgccatccataagttataggtccagcttcttccagaagttacattaagggaagcaacggattgtccaattatgtcggcagtccagtatttataagctgtattctgcagtagtctatcttggcacacatcacaggcaggagactggacccccaagccaacaccatacatgtgaaccattggtagatcaataaccagattacgttgaaaaataatactcataaaaaagaaaccgttgttcaacctaatagcagaaacaacacatgaaatattcatt

SEQ ID NO: 16521 - DNA, 6034 bp, Oryza sativa
  Clone ID: PAT_MRT4530_22261C.1
attgatcggcaatggatgtacgctgaccggcggtccgaagagtttattgacggcgtgcattattttttgagagtggccgaagctaacatgcataagggttttatttgttgtccatacaataagtgtaagaatcagaagaagtattctgcatccaggattattcatttccacttgtttaagtcggggttcatgccaagctataactgttagacatcccacggagagcaaggggttgaaatggaagaagatgaagtggaagacgacaatattctggagtttgctcagtacgctggatttgaaggaaatcaaacgggcaaggaggaaagggatgctgatggtaacgacgttgcggatgatcttggtcagatgttgcaggacgccaaggaggactacgaaagtgaaaatggggcccataaattggacaagatgttagaggaccacactacgtcgttgtacccaggttgtgagcaggggcacaaaaagttggataccactctggagttcttgcaatggaaggcaaaaaatggtgttagtgacaaggcatttggcgatttattgaaactcgtcaagaacattcttccggagggaaacaaattgcccgagacaacgtacgaggctaagaagatagtctgccctctaggactggaagttcaaaagattcacgcatgtccgaatgattgtatcctatatcgtggtgaggagtacgagaacctggaagcatgccctgtttgcaaagcactacgatacaagattagacgagacgatccaggagaagttgacgggcagctaacaaagaagagaattcctgctaagttgatgtggtatttccctataataccacggctaaggcgtttgttcaggaacaaggggaatgctagaatgatgcgatggcacgctgaagagcatcaacaggacgggatgctgagacaccccgccgatggttcgcagtggcgaaacatcgacagaaaattcaaagactttggaaaagacgcacgaaacatacggtttggtttaagtatggatggcatgaatccttttagagagatgaacagcggccatagcacttggcccgttacgatgtgtatctacaacctccccccttggctatgcatgaagaggaagtacataatgatgccgattattattcaaggccccaagcaacctggtaacgacatcgatgtgtacctaagaccactggtcgaagatcttaaactgttgtggaaaaaggaaggtgtccccatgtgggacgaggacaaacaggaggagtttaacctacgagcgctgctgttcgtaaccatcaacgattggcctgcacttagcaacctttccggtcagtccaacaaggggtacaaggcttgcactcactgtatggatgaaacagaaagtacgtatcttaatcactgtaggaaggttgtgtacatgggtcatcgtcgattccttgctgcaaaccacccgatacggaagaaaggcaagcactttgaacataaggcagaccaccgtacgaagcctaaatatcgcagcgggaaaacagtgtttgctatggttaaagatcttaaagtagtgttcggaaaggggcctagaagccagcctatagagagcgaagatggtcacgcggagatgtggaaaaagaaatctatattttgggagttaccctattgagaattcttggacgtccgccacgcaatcgacatcactaagaacctttgcgtaaaccttcttggcttcataggtgtatatggaatgtcgaaagatacactggaagcacgtaatgatctgaagcatatggaacaacgcagcgaccttcacccggaaccaaaggagaaaggaagccattacttgagtccagccagctacactcttagcaaggcagagaaggaaagtatgtttgaatgcttggagagcataaaggtaccgtctggatactccacgaatataaagcgaataaaaagcacgaaggagaagaagttcacaaacctaaagtctcatgactgtcacgtgttgatgacacaactgctaccagttgtaataaggggtatccttccagataatgtccgggcaacaataacaaagctatgtgctttcatgaacgcaatttcgcagaaggtcatcgatccggatagattagaagcccttcagaatgatgtggtgcaatgtcttgtcagttttgagttgatatttccaccgtcatttttcaatataatgacgcatctgctttgtcaccttgtcaaagagatcggtattctcgggcctgtgtacctaaacaacatgtttcctttcgagaggtacatgggcgttttgaagaagtatgttcataaccgtgctcgtccagaggcaagcatcgccaagggatatggaatagaggaggtcatcgaattttgcgtagaatttactgaagaccttcgcccaatcggggtacctgaatcacgccatgaagggagactacggggaaagagaactctcggaaggaaagcaataatgacggtagacaacaatttattccgtaaagcccatttcacggttctgcaacaatcttcattggtagctccgtacatcgaggagcacttggctctagttcgcgctagaaacatcggtaagtccgatgcatggattacacggcatcacattgatactttccccgcgtggctacgacaacatctcatgggtaacgagacgatcaaccaacaactggccttcctagcgaggggaccatctggctcgatcgtgatattccaaggatatgagatcaatgggtacacattctacacgagagcccaagacatgaagagcacgaaccaaaacaatgctgttcgtaatgatgccatgggacacgatgaaaaaactggcacgtattacggtgccatcgatgacatatgggaacttgactatggtcctctcaaggtccctctgtttcggtgccaatgggttggcttgactggtggaggcgtaacgattgatgacaatgggataacaacagttgaccttaacaaggttggatactcggacgaaccttttgtccttgccaatgatgtaacgcaagtcttttacgtgaaggacatgtctagcaaaggaaagaagggcagagggcctgatgagccgaagcgtcacgtggttctcccagcgcgccctcgtcatctccaccaacacttagaagttttttccccgatcgatctctctcggcttctccttcgccgccactgcctagggcatccccgtgccgacgccgccgtcgtatctcgccatcgtctcgcgggagtcatcgtcgccgcctccgccgccgccgcatctctgggacttagcaaatatttcttgtatgaacagatggctgatcgcgataaggaacagatactgtacgatacaatcacggagggaagcagccagtactggaacgaagaagaggggaacgaggatccaaaccagtacctgaacgaggaagggaacatggagagggatgcggaggggaaccaggaggggaacgtggagagggatgcggaggggaacgaggaggaggaggctagtgcaagtcaaccctccactggacagaagagggcacgcgggcaacgaggtgccgcgaagaagatagagggtcggcacatcataacggaagtggtcgaagacggccgacctagtgccccggcagaagcagccaagaactacgtacgacacagcggttgggttgtgcgggataacgtgcctgtctgtacggtgtactggcgcagaacaagggcacgcggagatcatgagagctttgtcccagattcggagatagagatgctatggaccacaatgctcgagacattcacccttcccgcgggtacagaggacaaagtgaaaaggtggactctaaagaaaatggcagaacagtttcagagcttcaagggagatctgtacgagaaatacaccctgaaggggcagacactgaacatcgacacattcccgaagctaagggatcattgggacgagttcgttgcatataagacaggtcaacaaggcagacgatgatggaaagaaacaaagaaaatgccgccaagaagaagtaccatcaccacttggggtcaggcagctatagcatcgcgatgcctaagtgggaggagatggaggcaagcttgcttgagaggggtatcgaaccggccaccgctaaatggccggatcaatcggagttctggtactatgctcatggtggaacgctcaacccagttgatggctcccaggtcttcagcgatcagatatgcgaggctgcgcgtcgactaacggacgcagtggaagcctcttctcagggcacgttccgacccgacagagagaaggacgagctgtcactcgcgctgcagactcccgagcatccaggacgaacacgagggaaatgggtgattccttggaagattggattcaaggaggacatccacacgtacaggagtcggatgaggagcaagagagataccgaggcgaagattacagatcttgagtacagggtatcgagctacgagctcagcatgcaagaggaggtggcaaggaaggttgatgaacgcatggccgcacatcggtcccatgatccccagccgtacattcctcctgcaatggtgagcccttcaggcaatggtagcagctgctcctcaacggggcaggtaggatcacagagcatggacgccatgcaaacctaggacgaaaccacctgccccgttgatgacatcgctcagcggacaccatgtgagctgcatattccattcaagaacttatcaataaaggtggcgtcgggcatggccatccgaacggacccttcagggacttaccactacaggccgattccagcaggatactccaaggtcaaagttgagttggtggaaggcgcgtacgaggacgtcgagttggactaccctggaggagacggtgagacgcatctacgagacacaagccacaccattatactatggcgcaagcggtacatcatcctccctaggcgacaagcggcgtctcgtgcaccatctcctccggttccgccatctcctcctcaggctcttgcaccgtctcctcctcgtgctccagcaccgtctccacctcaggctcctgcaccgactcctcctcaggctcctacaccgactcctccgcaagctcttcgtccggcaccttccaagtcaagggccccccaagctccaccgcctgcccccacaagggcaccgaagaaggcgaaagttgacgctgcaaaaaacaaggacccggggtatgattgcacgcaagaggagcttgacgcttatgtggcatcagaagtcaggagacaattgaagcctcgaagtccagaaaagaagattcttatagacccgagtgttagtaacttcttcaggggtatgtctgcacctcccaaggaggccataaagctatcggactatgagcgaacacttaagaaagcatcttctggaaagtccaaaccagtccctcagcttggagagcaaccaaaccaggagatcgagccgttggtgaccggtgaagattttggaatacaagaatttattaatgacaccgggctaactacggatcaattgctacgaggtgcaccaatcgaaaaggcggaagtgaaatacatgtacgaactcggtaaaccgcttgttaagcctgagcagctgcagtccctacccacacaaatgtacaaattccatcaactgtacatggagatgagcgccaccggtagagagatgatcggagcgtggatcagggacacggacttcttgtaaggagatgatattctctggatcaatttcaagggtatctacgaactataccagctggacgccctcgacgtctctattatgagttgctggattttaatggagattcaaagggcccgacggtggggggttttcgatactggattcatcgaccctcggaaagtaaacgtcgcaatgctcgaccaatatccgcaagccacagaggacaatctcgtccatctcctgaaggcgcagcattacaagacgttcatactattgccgtacaacacagagttagtttttactatcttcctatgacggagcgcggggctcctcaccgg

SEQ ID NO: 16522 - DNA, 6972 bp, Oryza sativa
  Clone ID: PAT_MRT4530_22262C.1
gggaagaacggccggtaagaggttaacgggcagctaccgggttaaacggcggcgagacgggtaaacaagtgcggaacaaaagaaaagaggagaaaaggcctccccgccaccggtggaagacggcgggcgaagaaggacgatggggatggggctccggcggcgaatctctacggaggaggggtggacggggtggatctcggccacgcgaacccgacggcggcgacggcgcggtgcggcggtgagcctagcggcggctagcggcggccggagtagcggagacggcggcggcgggtggttgcacggcgcgggagcgatggagagcacgagggagttcggcgagaaaaggaaaaagcgagagggagtgacggggaagcttaaataggggaggggagggccggacgtggccgggagaggcgggatttcgccggccaacgtgggagaagtgggggaggagagagaggcgggattcgaaaatcgaatcccggccatctcgggcgcgggcgcgagcgggagagagaggggagtgggcgcggggaacgcggcgcacgcgcgggcgtggtcgacgtggcccggaggaggcggaggcgtggacgcggcggcggtttcgggcgcggcggtttcgacgcctgcgttacgtcagaagaggaaggaccgacgttacgaattgtcgatccgtcgtagtagaattcaccatcgggattaaggacttcttcgttgataaaccccatcagttgttcttgaacagccatgataaaatccttgtgtgggagtttttccctcatgtgaatacgtggaaaatgaaacctccgtccaagtttttctttccaagtcccgcggaccaattgacggaaccgatcccaagccctgtctatcagttggaagaccttgtcaaaaaccttctcctctttattcattgagtcgtatacagtgactctgcatgcgtccaagtcgaaaaagaacaggacccaatggaattctgtgttgtacagcaatagtatgaacgtcttgtaatgctgctgcgttaggagatggacgagattgtcctctatgtctttctcgtacttgtcgagcatttcggtgtgattttccgagggtcgatgaacccagtatcataaaccctccgccgtcgggccctttgaatctccattaaaatccatgcgctcagaagagagacgtcgagggcgtcccgatggtacagatcaaagacatccttgaaatggatccatagaacatcttctccttgcaagaagtcggggtttctgatcctcgctccgaacatctctctaccattggcgctcatttccatgtaccgttcatggaatttgtacatttgtgtcggtagggactgcagctgctcaggcctgacaagcggtttaccgagttcaaacttgtatgccacttccgccttcgggattggtgcgcctccaaccaactgagccatggttagaccggtgtccgaaatgaaatccgttatgccaaagtcttcgccggtcacttggtgtggttgttcttcaagctgaggaactggtttggacttcttgtaataggctttcctaagtgttcggtcatagtccgatagctttaaggcctccttgtttgcggtggacattcccttgaagaaattcttcacgctcgggtcaataggtatcttcttttcaggactccgaggcttgagttgcctcttcacttctcctgccacataagcgtcaagctcctcttgacagcaaccgtacggcggctccttgtttttggtggtctcgactttggccttcttcgttgcccttgtgctggcaggtggaggaggaggcggaggagccggaggagatggtgcaggaggaggtggcggaggagccggaggagatggtgcaggaggagacggcggagccggaggagatggtgcaggaggaggtggcggaggagccggaggagatggtgcaggaggagacggcggaggagccggaggagatggtgcaggaggagacggcggagccggaggagatggtgcacgagacgccgctggtcgcctagggaggatgatgtactgctcgcgccatagtataatggcgtggcttgtgtctcgtagatgcgtctcaccgtctcctcctgggtagtccaactcgaggtcctcgtacatggcttccaccagctcaacttcgaccctcgagtatcctactggaatcggcctgcagtggtaagtccctaaaatgtccgttgggatggccattcccgacgccaccttgattgataagttcttgaagggaatatgcagctcacatggtgtccgatgcgtgatctcatcaacggggcaggtggtttcgtcctgggtttgcatggcgttcatgctatgtgatactacctaccccgttgaggcgcagctgctacgattgcctgatgggctgaccattggaggaggtatgtacggctggggatcgtgtgaccgatgtgctgccatgcgttcatccaccttccgggccacctcctcttgcatgctgagctcgtagctcgataccctgtacacaagatctgcaatcttcgcctcggtatctctcttgctcctcatccgactcctatacgtgtggatgtcctccttgaatcccatcttccagggaatcacgcctttccctcgtgttcgtcctggatgctcgggagtttgtagggcgagtgacagctcgtccttctctctgtcgggtcggaacgtgccctgagaagaggcttccactgcgtccgttagtcgattcgcagcctcgcgtatctgatcgctgaagaccaaggagccatcacctgggttgagcgttccaccgtgagcatagtaccagaacttcaatcgatcaggccacttagcggtggccagttcgatacccttctcaagcaagcttgcctccatcttctcccacttcggcatcgcgacgctatagccgcctgaccccaagtggtgatagtacttcttcttggcggcattttatttgtttctttccatcatcgcgtgcccttgttgacctgtcttgtaagcaacgaactcgtcccagtgatcccttagcttcgggaatacgtcgaagttcggtgtctgccccttcaggatgtatttccggtacagatctcccttgaaggtctggaactgttctgccattttcttaagagtccactgtttcactatgttctctgtacccgcaaggagcgtgaacgtctcgagcattgtggtccacagcatctctttctctgattccgggacaaagctgtcatcatccccgcgtgcccttgttctgcgccagtacaccttgctgacaggcacgttatccctcaaccaaaccgctgtggcgtacaaaattcttggctgcttgtgccggggcattaggtcggccgtctgcgtccacctcagttatgatgtgccgaccctctatcttcttcgcggcacctcgttgtccgcgtgccctcttctgtccagcggagggatgacttccactagcctcctcctcgttctcctccgcatccctctccacgttcccctcctcgttcccctttgcatccctctccgcgttcccctcctcgttcaagtactggtttggatcattgtttccctcttcttcgttccagtactggctacttcccgatgcgattgtatcgtacagtatctgttcctcatcgcgatcagccatctgttcatagaagaaacacccaagagacgcggcggcggcgtctgtggcggaggcggcgaggaccggcaggcgacggtgagagacgacggcggcgaaggagaagccaatgctcgatgacggcggcgaaggagaagccaatgctcgatctcgatggaaaaacgtctaagtgttggtggagaagacgagggcgcactgggagaaccacgtggcgcttcggctcgtcaggcccattgcccttctttcctttgctagacatgtccttcacataaaaaacttgcgttacatcattggcaaggacaaaaggttcgtccgagtatccaaccatgttaaggtcaaccgttgtcatcccactgtcatcaatcgttacgcctccaccagtcaacctaacccattggcaccggaacagagggaccttgagaggtccatagtcaagttcccatatctcctcgatggaaccgtaatacgtgccagttgtaccatcgtgtcccatggcatcgatacgaacagcactgttttggttcgttctcttcatgtcttgggctcttgtgtagaatgtgtacccattgatctcatatccctggaatgtcgcgatcgagccagatagacccctcgccaggaaggccagttgctggttaatcgtctcgttacccatgagatgttgtcgcagccatgcgaggaaagtatcaatgtgatgccgtgtaatccatgcatcggacttaccgatatttctggcgcgaactagagccaagtgctcctcgatgtaaggagccaccaatgaagattgttgtaaaaccgtgaaatgggctttacggaataaattgttgtctaccgtcattattgctttccttccgagagtcccctttccctgtagtctcccttcatggcgtgattcaggtaccccgattgggcgaaggtcttcaataaattctacgcagaattcaatgacctcctctgttccataccccttagcgatgcttgcctctggacgagcacggttacgaacatacttcttcagaacgcccatgtacctctcgaaaggaaacatgttgtgtagaaacacaggcccgagaataccgatctctttcactaggtgacaaagcagatgcgtcattatattgaaaaatgaaggtggaaatatcaactcaaagctgacaagacattgcaccacatcattctgaagggcttctaacctatccggatcgatgaccttctgcgaaattgcgttcatgaaagaatatagctttgttattgttgcccggacattgtctgggaggataccccttattataactggtagcagttgtgtcatcaacacgtgacagtcatgagactttaggtttgtgaacttcttctccttcgtgcttattattcgctttatattcgtggagtatccagatggtaccttgatgctctcgaagcattgaaacatactttccttctctgccttgctaagagtgtagctggctggactcaagtaatggatgcctttctcctttggttccgggtgaaggtcgccgcgttgttccatatgcttcagatcattacgtgcttccagtgtatctctcgactttccatatacacctaggaagccaagaaggtttacgcaaaggttcttagtgaggtgcatcacgtcgattgcgtggcggacgtccaagaattcccaatagggtaacttccaaaatatggagttttttttccacatcgccgcgtgaccatcttcgctctctataggctggctgccaggccactttccaaacactactttaagatctttaaccatagcaaacactgttttcccgctgcgatgtttaggcttcgtacggtggtctgccgtatgttcaaagtgcttgcctttcttccgtaccgggtggtttgctgcaaggaatcgacgatgacccatgtacacaaccttcctacagtgcttaagatacgtactttctgtttcatccatacagtgagtgcaagccttgtaccccttgttggactgcccggataggttgttaagtgcaggccaatcgttgatggttatgaacagcagcgctcgtaggttaaactcctcctgtttgtcctggtcccacacggggacaccttccttcttccacaacagtttaagatctttgaccagtggtcttaggaacacatcgatgtcgttaccaggttgcttggggccttgaataataatcggcatcattatgtacttcctcttcatgcatagccaaggggggaggttgtagatacacatcgtaacgggccaagtgctatggccgctgctcatctctccaaaaggattcatgccatccgtacttaaaccaaaccgtatgtttcgtgcgtcctttccaaagtctttaaattttctgtcaatgtttcgccactgcgaaccatctgcggggtgtctcagcatcccgtcctgttgacgttcttcagcgtgccaacgcatcattctagcattccccttgttcctgaacaaactccttagccgtggtattatagggaaataccacatcaccttagcaggaattctcttctttgttagctgcccgtcaacctcacctggatcatctcgtctaatcttgtatcgtagtgctttacaaacagggcatgcttctacgttctcgtactcctcaccgtgatataggatacaatcattcgaacatgcgtgaatcttctgaacttccagtcctagagggcagactatcttcttagcctcgtacgttgtctcgggcaatttgtttccctccggaagaatgttcttgacgagtttcaataaatcgccaaatgccttgtcactaacaccattttttgccttccattgcaagaactccagagtggtatccaactttttgtgcccctgctcgcaacctgggtacaacgacgttctgtggtcctctaacatcttgtccaatttatgggcccccttttcactttcgcagtcctccttggcatcctgcaacatctaaccaagatcatccgcaacgtcgttataatcagcatctctgtcctcctcgcccgtttgatttccttcaaatccagcgtactgagcaaagtctggaatattgtcgtcttccacttcatcttcttccatttcaaccccttactctccgtgggatgtccaacaattatagcttggcatgaaccccgactcaaacaagtggaaatgaatagtcctggatgcagaatactccttctgatttttacacttattgcatggacaacaaataaaacccttctgcttgttagcttcggccactctcaaaaaataatgcacgccgtcaataaactcttcggaccgccggtcagcgtacatccattgccgatccat

SEQ ID NO: 16523 - DNA, 239 bp, Oryza sativa
  Clone ID: PAT_MRT4530_22263C.1
ggctaccttgatcatccaaccttcggattgttcgaatatgtgaagacttgaactacatatatctttcattgccattatttgatatggctggccaatatcagtctcagtactgataacttcagtgtggtcatcagtgacagtgaggttattatgatgagaaattttatggtccttgatgttttgtacccaattttatacataacatattgctttctcaggaaaaaaaaaaaaaaaaaaaa

SEQ ID NO: 16524 - DNA, 6417 bp, Oryza sativa
  Clone ID: PAT_MRT4530_22264C.1
atggatcggcaatggatgtacgctgaccggcggtccaaagagtttattgacggcgtgcattattttttgagagtggccgaagctaacaagcagaagggttttatttgttgtccatgcaataagtgtaagaatcagaaggagtattctgcatccaggactattcatttccacttgtttgagtcggggttcattccaagctataattgttggacatcccacggagagcaaggggttgaaatggaagaagatgaagtggaagatgacaatattccagactttgctcagtacgctggatttgaaggaaatcaaacgggtgaggaggacagagatgctgattataacgacgttgcggatgatcttggtcagatgttgcaggatgccaaggaggactgcgaaagtgaaaagggggcccataaattggacaatatattagaggaccatagaacgtcgttgtacccaggttgcgagcaggggcacaaaaagttggataccactctggagttcttgcaatagaaggcaaaaaatggtgttagtgacaaggcatttggcgatttattgaaacttgtcaagaacattcttctggagagaaacaaattgcccgagacaacgtacgaggctaagaagatagtctgccctctaggactggaagttcagaagattcacgcatgtccgaatgattgtatcctatatcgcgatgaggagtacgagaacctagaagcatgccctgtttgtaaaacactacgatacaagattagacgagatgatccaggtgaggttgacgggcagctaacgaagaagagaattcctactaaggtgatgtagtatttccctataataccacggctaaggcgtttatttaggaacaaggggaatgctagaatgatgcgttggcacgctgaagaacatcaacaggacgggatgctgagacaccccgcagatggttcgcagtggcgaaacatcgacagaaaatttaaagactttggaaaggacgcacgaaacatacggtttggtttaagtacggatggcatgaatccttttgtagagatgagcagcggccatagcacttggcccgttacgatgtgtatctacaacctccccccttggctatgcatgaagaggaagtacataatgatgtcgattattattcaaggccctaagcaacctggtaacgacatcgatgtgttcctaagaccactggtcgaagatcttaaactgttgtggaagaagaaaggtgtccccgtgtgggatgaggataaacaggaggagtttaacctacgaacgctgctgttcataaccatcaacgattggcctgcacttagcaacctatccgggcagtcaaacaaggggtacaaggcttgcattcactgtatggatgaaacagaaagtacgtatcttaagcactgtaggaaggttgtgtacatgggtcatcgtcgatttcttgctgcaaaccacctagtacggaagaaaggcaagcactttgaacataaggcggaccaccgtacgaagcctaaacatcacagcgggaaaacagtgtttgctatggtgaaagatcttaaagtagtgtttggaaaggggcctggcagccagcctatagagtgcgaagatggtcacgcggcgatgtggaaaaaaaactccatattttgggagttcctattgggaattcttggacgtccgtcacgcaatcgacgtgatgcacctcactaagaacctttgcgtaaaccttcttggcttcctaggtgtatatggaaagtcgaaagatacactggaagcacgtaatgatctgaaacatatggaacaacgcggcgaccttcactcggaaccaaaggagaaaggcagccattacttgagtccagccagctacactcttagcaaggcagagaaggaaagtatgtttcaatgcttggagagcatcaaggtaccatctagatactccacgaatataaagcgaataataagcacgaaggagaagaagttcacaaacctaaagtctcatgactgtcacgtgttgatgacacagctgctaccagttataataaggggtatcctcccagacaatgtccgggcaacgataacaaagctatgttctttcatgaacgcaatttcgtagaaggtcatcgatccggataggttagaggcccttcagaatgatgtggtgcaatgtcttgtcagctttgagttgatatttccaccttcatttttcaatataatgacgcatctgctttgtcacctagtgaaagagatcggtattctcgcgcctgtgttcctacacaacatgtttcctttcgagaggtacatgggcgttctgaagaagtatgttcataaccgtgctcgtccagaggcaagcatcgccaaggggtatggaacaaaggaggtcattgaattctgcgtagaatttattgaagaccttcgcccaatcggggtacctgaatcacgccatgaaggggaaaggggactctcggaaggaaagcaataatgacggtagacaacaatttattccgtaaagcccattttacggttttacaacaatcttcattggtggctccttacatcgaggagcacttgactctagttcgcgccagaaacatcggtaagtccgatgcatagattacacggcatcacattgatactttcctcgcatggctgcgacaacatctcatgggtaacgagacaattaaccagcaactggccttcctggcgaggggtccatctggctcgatcgcggcattccagggatatgagatcaatgggtatacattctacacaagagcccaagacatgaagagcacgaaccagaacagtgctgttcatatcgatgccatgggacacgatggtacaactggcatgtattacggtgccatcgaggagatatgggaacttgactatggacctctcaaggtccctctgttccggtgccaatgggttaggttgactggtggaggcgtaacgattgatgacagtgggatgacaacggttgaccttaacaaggttggatactcggacgaaccttttgtccttgccaatgatgtaacgcaagttttttacgtgaaggacatgtctagcaaaggaaagaagggcaaagggcctgacgagccgaagcgccacttggttctcccagtgcgcccttgtcttctccaccaacacttcgacgtttttccatcgagatcgagcatcggcttctccttcgccaccactgtctagggcaaccccgcgccgacgccgccgtcgtctctcaccgtcgcctggcggtcctcgccgcctccgccgcagacgccgccgccgcgtctcttgggtgtttcttctatgaacagatggctgatcgcgatgaggaacagatactgtacgatacaatcgcagagggaagcagccagtactggaacgaagaagaggggaacgaggatccaaaccagtacttgaacgaggaggggaacgtggagagggatgcagaggggaacgaggaggggaacgtggagaggaatgcggaggggaacgaggaggaggctagtggaagtcatccctccgctggacagaagagggcacgcagacaacgaggtgccgcgaagaagatagagggtcggcacatcataactgaggtggacgcagacggccgacctagtgccccggcagaagcaaccaagaatttttgtacgccacagcggttgggttgtgagggataacgtgcctgtcagcaaaacaagggcacgtggggataatgacagctttgtcccggaatcagagaaagagatgttgtggaccacaatgctcaagacgttcacgctccctgcgggtacggagaacatagtgaaatagtggactcttaagaaaatggcagaacagttctagaccttcaagggagatctgtacaagaaatacatcctgaagggactaacaccgaacttcgacgtattcccaaagctaagggatcattgggacgagttcgttgcttacaagacagggcaacaagggcaagcaatgatggtcaaaaacaagtaaaacgttgccaagaagaagtaccatcaccacttggggtcaggtggctatagcgtcgcaataccgaagtgggaggagatggaggcaagaatgattgagaggggtatcgaaccagccaccgctaaatggccagatcgatcgaagttctggtactatgctcacggtggaacgcttaacccagttgatggctccctggtcttcagcgatcagatacgcgaggctgccagtcgactaacggacgcagtggaagcctcttctcatggcacgttccaacccgacagagagaaggacgagctgtcactcgccctacagactctcgagcatccaggacgaacacgagggaaaggcgtgattccctggaagattggattcaaggaggacatccacacgtacaagagtcggatgaggagcaagagagataccgaggcgaagattgcagatcttgagtacagggtatcgagctacgagctcagcatgcaagaggaggtggtccggaaggtggatgaacgcatggcagcacatcggtcacacgatccccagccatacatacctcctccaatggtcagcccatcaggcaatcgtagcagctgcgcctcaacggggcaggtagaatcacatagcatggacgccatgcaaacccaggacgaaaccacctgccccgttgatgagatcacgcaacggacaccatgtaagctgcatattcccttcaagaacttatcaatcaaggtggcgtcgggaatggccatcccaacggacatttcagggacttaccactactggccgattccagcaggatactcgagggtcgaagttgagctggtggaagccgtgtacgaggacctcgagttggactacccaggaggagacggtgagacgcatttacgagacacaagccacgccattatactatggcgcaagcggtacatcatcctccctgggcaacaagcggcgtctcgtgcaccatctcctccggctccgccgtctcctcctgcaccatctcctccggctcctctgccacctcctcctgcaccatctcctccggctcctctaccacctcctcctgcaccatctcctccggctcctccgcctcctccgcctccacctccaccgtgtccgcctgcacctcccaagacaaggtctcgccaagctccacctcctgccagcacaagggcaacgaagaaggccaaagttgacaccaccaaaaacaaggagccgccgtacggttgcagtcaagaggagcttgacgcttatgtggcaggagaagtgaagaggcaactcaagcctcggagtcctgaaaagaagatacctattaacccgagcgtgaagaatttcttcaagggaatatccaccgcaaacaaggaggccttaaagctatcggactatgaccgaacacttaggaaagcctattacaagaagtccaatccagttcctcagcttggaaaacaaccacaccaagtggtcgagccgttggtgaccggcgaagactttggcataacggatttcatttcggacaccggtctaactgtggctctgttggttggaggcgcaccaatcccgaaggcggaagtggcatacaagtttgaactcggtaaaccgcttgtcaggcctgagcggctgcagtccctaccgacacaaatgtataaattccatgaacggtacatggaaatgagcgccaatggtagagagatgttcggagcgaggattagaaaccccgacttcttgcaaggagaagatgttctatggatccatttcaaggatgtcttcgatctgtaccatcgggacgccctcgacgtctctcttctgagcgcatggattttaatggagattcaaagggcccgacggcggggggtttacgatactgggttcatcgaccctcggaaaatcaacaccgaaatgctcgacaagtacgagaaagacacagaggacaatctcgtccatctcctaacgcagcagcatttcaagacgttcatactattgtcgtacaacacagaattccactgggtcctgttctttttcgacttggacgcatgcagagtcactgtgtacgaggagaaggtttttgacaaaggtcttccaactgatagacagggcttgggatcggttccgtcaattggtccgcgggacttggaaagaaaaacttggatcgaggtttcattttccacgtattcacatgagggaaaaactcccacataaggaatttatcacggctgttcaagaacaactgatggggttcatcaacgaagaagtccttaatcccgatggtgaattctactacgacggatcgacaattcataacagttttagtccatctttgtcggtttgcaccgtaaaccgtccaccgccgctgcgagagtgtgacacctctttatacgtttgtcacgtggagtagcatcgctaacaatacacacgagacagaaacagttctgttct

SEQ ID NO: 16525 - DNA, 7110 bp, Oryza sativa
  Clone ID: PAT_MRT4530_22265C.1
atggatcggcaatggatgtacgctgaccggcggtccaaagagtttattgacggcgtgcactattttttgaaagtggccgaagctagtaggcaaaggggttttatttgttgtccatgcaataagtgtaagaatcagaaggagtattctgcatccaggactattcatttccacttgtttgagtcggggttcattccaagctataattattggacatcccacggagagcaaggtgttgaaatggaagaagaagaagtggaagacgacaatattccggactttgctcagtatgttggatttgaaggaaatcaaacgggcgaggaggaaatagctgctgatggtaacgacgttgcggatgatcttggtcagatgttgcaggacgccagggaagactgcgaaagtgaaaaggaggcccataaattggacaagatgttggaggaccacagaacttcgttgtacccaggttgcgagcaggggcacaaaaagttggataccactctggagttgttgcaatggaaggcaaaaaatggggttagtgacaaggcatttggcgatttattgaaactcgtcaagaacattcttccggggggaaacaaattgcccgagacaacgtacgaggctaagaagatagtctgcccgttaggactggaagttcataagattcacgcatgtccgaacgattgtatcctatatcgcggtgaggagtatgagaacctagaagcatgccctgtttgcaaagcactacgatacaagattagacgggacgatccaggagaagttgacgggcagctaacaaagaagagaattcctgctaaggtgatgtggaacaaggggaatgctagaatgttgcgatggcacgctgaagagcgtcaacaggacgggatgctgagacaccccgccgatggttcgcagtggcgaaacattgacagaaaatttaaagaatttggaaaggacgcacgaaacatacggtttggtttgagtacggatggcatgaatccttttggagagatgagcagcggccatagcacttggcccgttacgatgtgtatctacaacctccccccctggctatgcatgaagaggaagtacataatgatgccgattattattcaaggccccaagcaacctggtaacgacatcgacgtgtacctaagaccactggtcgaagatcttaaacagttgtggaagaaggaaggtgtccccgtgtgggacgaggacaaacaggaggagtttaacctacgagcgctgctgttcgtaaccatcaacgattggcctgcacttagcaacctatccggacagtccaacaaggggtacaaggcttgcactcactgtatggatgaaacagaaagtacgtatcttaagcactgtaggaaggttgtatacatgggtcatcgtcgattccttgcagcaaaccacccggtacggaagaaaggcaagcacttcgaacataaggccgaccaccgtacgaagcctaaacatcgcagcgggaaaacagtgtttgctatggttaaagatcttaatgtagtgttcggaaaggggcctggaagccagcatatagagagcgaagatggtcacgcggcgatgtggaaaaagaactctatattttgggagttaccatattgggaattcttggacgtatgctacgcaatcgacgtgatgcacctcactaagaacctttgcgtaaaccttcttggcttcctaggtgtatacggaaagtcgaaagatacactggaagcacttgtaataaggggtatccttccagacaatgtccaggcaacaataacaaagctatgtgcattcatgaacgcaatttcgcagaaggtcatcgatctggatagattagaagcccttcagaatgaagtggtgcaatgtctcgtcagttttgagttgatatttccaccttcatttttcaatataatgacgcatctgctttgtcaccttgtgaaagagatccgtattctcgggcctatgtacctacacaacatgtttcctttcgagaggtacatgggcgttctgaagaagtatgttcgtaaccgtgctcgtccagaggcaagcatcgccaagggttatggaacagaggaggtcatcgaattttgcgtagaatttatcgaagaccttcgcccaatcggggtacctgaatcacgccatgaagggagactacggggaaagggaactctcggaaggaaagcaataacgacggtagacaacaatttattccgtaaagcccatttcactgttctgcaacactcttcattggtagctccttacatcgaggagcacttggctctagttcgcgccaggaacatcggtaagtccgatgcatggattacacggcatcacattgatactttccccgcgtggctacgacaacatctcatgggtaacgagtcgatcaaccaacaacttgccttcctggcgaggggaccgtctgggtcgatcgcgacattccagggatatgagatcaatgggtacacattctacacgagagcccaagacatgaagagcacgaaccaaaacagcgatgttcgtgtcgatgccatgggacacgatggaacaactgtcacgtattacggtgccatcgaggacatatgggaacttgactatggtcctctcaaggttcctctgttccggtgccaatgggttaggttgactggtggaggcgtaatgattgatgacagtgggatgacaactgttgaccttaacaaggttggatactcggacgaaccttttgtccttgccaatgatgtaacgcaagtctttttcgtgaaggacatgtctagcaaaggaaagaagggcagagggcctgatgagcctaagcgtcaagtggttctcccaatggctgaccgcgatgaggaacagatattgtacgatacaatcgcggagggaagcagccagtactggaatgaagaagaggggaacgaggatccaaaccagtacttgaacgaggaagggaacgtggagagggatgcggaggggaaccagcaggggcacgtggaaagggatgtggaggggaaccaggaggaggaggctagtggtagtcaaccctccgttggacagaagagggcacgcgggcaacgaggtgcagcgaagaagcttgagggtcggcacatcataacggaagtggaagaagatggacgtcctagtgccccggccgaagccgccaagaactatgtacgtcacagcggttgggttgtgcgggataacgtgcctgtcagtatggtgtactggcgaagaacaagggcacgcggagatcatgagagctttgtcccagattcggagaaagagatgctgtggaccacaatgctcgagacattcacccttcctgcgggtacagaggacaaagtgaaaaggtggactctgaagaaaatggtagaacagtttcagaggttcaagggagatatgtaccagaagtatatactgaaggggcagacactgaacttcgacacattcccaaagctaagggatcactgggacgagttcgttgcatataagacaggcgaacaagggcaagcgatgatggaaagaaacaaagaaaatgccgccaagaagaagtaccatcaccacttggggtcaggaggctatagcgtcgcgatgccgaagtgggagcagatggaggctagcttgattgagaggggtatcgaaccggcaacagccaattggccgaaacgatcgaagttctggtactatgctcacggtggaacgctcaacccagccgatggctcactggtcttcggcgatcagatacgagaggctgcgcgacgactaacagatgcagtggaagcctcctctcagggcacgttccgaccagacagagataaggacgagctgacactcgccctgcagactccagagcatccaggacgaacacgagggaaaggggtgattccttggaagattggtttcaaggaggacatccacacgtaccggagtcggatgaggagcaagagagataccgaggcgaagattgcagacctagagtttcgggtatcgagctacgaactcaacatgcaagaggaggtggcaaggaaggttgatgaacgcatggccgcacatcggtcccatgatccccagccgaccattcctcctgcaatggtgagcccgtcaggaaaccgtagcagctgtgcctcaacggggcaggtaggatcacagagcatggacgccatgcaaacacaggacgaatcgacctgtcccgttgatgacatcactcagcggacaccatgtgagctgcatattcctttcaagaacttatcaataaaggtggcgtcgggcatggccatcccaacggacccttcaggtacttaccactgcaggccgattccagcaggatactcgaaggtcgaagttgagttggtcgaaggcgcgtacgaggacctcgagctggattaccctggaggagacggtgagacgcatctacgagacacatgccatgccattattctatggcgcaggcggtacatcatcctccctgggcgacaagcggcgtctcgtgcaccatctcctccggctccgccatctcctcctcaggatcctgcaccgtctcctcctcatgctccgccagcaccgtctccacctcaggctccagcatcgactcctcctctggatcctgcaccgactcctcctcgtgctcctacacctactcccccgcaagctcctcttccggcaccttcaaagtcaagggcccccccagctccaccgcctgcccacacaagggcaacgaagaaggcgaaagttgacgccgccaagaacaaggacccggggtacgattgcacgcaagaggagcttgacgcttacgttgcatcagaagtcaagagacaattcaagcctcgaagtccagaaaagaagattcctatagaccccagtgtcaggaacttcttcaggggtatgtctgcatctgtcaaggaggccatcaagctatcggactatgagcgaacgctgaagaaagcatcttctggaaagtccaaaccagtccctcagcttggagagcaaccaaaccaggagatcgagccgttggtgaccggtaaagaaatgacgatagaacaatttattactgacaccggtctaactacggatcaattgctaggagtcgcaccaatcgaaaaggcggaagtgaaatacatgtacgaactcggtaaaccgcttgtcaagcctgagctgttgcagtccctacccacacaaatgtacaagttccatcagctgtacatggagatgagcgccaccggtagagagatgatcggagcgaggatcagggacacggacttcttgcaaggagatgacattctctggatcaatttcaggggaatctacgaactataccagctggacgccctcgacgtctctattatgagttgttggattttaatggagattcaaagggcccaacggcggagggttttcgatactggattcatcgaccctcggaaagtaaacgtcgcaatgctcgaccaatatccacaagaaacagaggacaatctcgtccatctcctgaaggcgcagcattacaagacgttcatactgttgccatacaacacagaattccactgggtgcttttactcttcgacctggaggcctgcaccgtcaacgtatatgactcaatggataaaaaagagtctacgtttgacaaggttttcgaacttatagacagggcttggtatcggttccgtcatttggtccgcggcaaatggagagaaagacttaggcggaagttcaaatttccttttattcgcatgagggataacctgaccacacacaaggaatttatcgcggcggttcaagaacaactcatggcattcatcaacgaagaaatccttgatcccaagggtgaattctactatgacggaaacacaattcaccgatcctggccgccgggcttcacgggctcaaccgctaggaagcccccaagagctctagcctgggatcacttcagacggcggatggaaagaacttggatgaattgtaagttgtttagcaaggagcatccggagggggtcaccgagttcatggactttgtttctaaaaatttgagtggcagtcagaagatattatgcccatgtcgacgtgtggaggatgacttacttatgtacgggatgtctaacacatacactcggtggatacatcatggagaaccattggtcatggtcactgaaaatgttgagcatttgaatgaagatgttagctgcaatgttgaatttgagacgaatgagcctcaggatgacccagaagatgatcaaatgtaccgtatggtacaggatctgtacccagatcaaaatcatggaccaagaacgaagtcaaagtttgccaccatattagaagagatgaaacaggtgctacaccccggtggtccctatactaggttttcttttgtggtgaagttgctccacatcaagtcattttacagaatcagcaatgttgcattcagtgcttttttggaccttttaagttcagcatttccaaattgttctctccctgcatcctatgctgaagcgaagaattttattcgtgcattaggacttggatatgagtcaatacatgtgtgtccgaataactgtgttcttttccgaaaggagttggctaaaatggatgcatgcccaatatgtggtgcttcaagatggagggatgcagatagccgaaggcagattccagaaaaggttctaaggcattttcctttgagaggtgaaatcccaataatattgtgcaagcttgagaagattttcccgcctgccttttttgatgtgatggtgcacttgtgcattcatttaattgatgatgcaatcctaagagttccagttcaatatggatggatgtaccctgtagagcgtaggttgttgaccttgaaacgctttgtgaggaagatggcaaggcctgagggctccattgcagaggcatatgtcgcaaatgagtgcttgactgcttgctcaaggtattttgctgatgttgacactaggcacaatcgtgatggtaggaacaaagagcgtgttcctatgagtagatgtggtttatctattttccagcatggggcaaatctgttgggggcgcctcccggccacatcgagtggagaatggagatacataataagaatatagaacatagtacctacatagtagatttcgactaa

SEQ ID NO: 16526 - DNA, 6442 bp, Oryza sativa
  Clone ID: PAT_MRT4530_22266C.1
tacactcggcaatggatgtacgctgaccggcggtccaaagagttcattgacggcgtgcactattttttgagagtggccgaagctaacgggcaaaggggttttattcgttgtccatgcaataagtctaagaatcagaagaagtattctgcatccaggactattcatttccacttgtttgagtcggggttcatgccaagctataattgttggacatcccacagagagcaaggtgttgaaatggaagaagatgaagtggaagacgacaatattccggactttgctcagtacgttggatttgaaggaaatcaaacaggcgaggaggaaagggatgctgatggtaacgacgttgcggatgatctcggtcagatgttgcaggacgccaaggaggactgcgaaagtgaaaagggggcccataaattggacaagatgttagaggaccacagaacgtcgttgtacccaggttgcgagtaggggcacaaaaagttggataccactctggagttcttgcaatggaaggcaaaaaatggggttagtgacaagacatttggcgatttattgaaactcgtcaagaacattcttccagagggaaacaaattgctcgagacaatgtacgaggctaagaagatagtctgcccgctaggactggaagttcagaagattcacatatgtccgaatgattgtatcctatatcgcggtgaggagtatgagaacctagaagcatgccctgtttgcaaagcactacgatacaagattagacgagacgatccaggagaagttgacgggcagctaacaaagaagagaattcctactaaggtgatgtggtatttccctataataccacggctaaggcgtttgttcaggaacaaggggaatgctagaatgatgcgatggcatgttgaagagcgtcaataggacaggatgctgagacaccccgccgatggttcgcagtggcgaaacatcgacagaaaatttaaagaatttggaaaggacgcacgaaacatacggtttggtttgagtacggatggcatgaatccttttggagagatgagcagcggccatagcacttggcccgttacgatgtgtatatacaacctcccccctggctatgcatgaataggaagtacataatgatgccgattattattcaaggccccaagcaacctggtaacgacatcgatgtgtacctaagaccactggtcgaagatcttaaactgttgtggaaaaaggaaggtgtccccgtgtgggacgaggacaaacaggaggtgtttaacctacgagcgctgctgttcgtaaccatcaacgattggcctgcacttagcaaactatccggacagtccaacaaggggtacaaggcttgcactcactgtatggatgaaacagaaagtacgtatcttaagcactgtaggaaggttgtatacatgggtcatcgtcgattccttgcagcaaaccacccggtacggaagaaagacaagcacttcgaacataaggctgaccaccgtacgaagcctaaacatcgcagcgggaaaacagtgtttgctatggttaaagatcttaaagtagtgttcggaaaggggcctggaagccagcctatagagagcgaagatggtcacgcggcgatgtggaaaaagaactctatattttgggagttaccctattgggaattcttggacgtccgccacgcaatcgacgtgatgcacctcactaagaacctttgcgtaaaccttcttggcttcctaggtgtatacggaaagtcgaaagatacactggaagcacgtaatgatctgaagcatatggaacaacgcggcgaccttcacccggaaccaaaggagaaaggaagccattacttgagtccagccagctacactcttagcaaggcagagaaggaaagtatgtttgaatgcttggagagcataaaggtgccgtctggatactccacgaaggaaaagatgttcacaaacctaaagtctcatgactgtcacgtgttgatgatacaactgctaccagttgtaataaggggtatccttccagacaatgtccgggcaacaataacaaagctatgtgcattcatgaacgcaatttcgtagaaggtcattgatccggatagattagaagccctttagaatgatgtggtgcaatgtctcgtcagttttgagttgatatttctaccttcatttttcaatataatgacgcatttgctttgtcaccttgtcaaagagatcagtattctcgggcctgtgtacctacacaacatgtttcctttcgagaggtacatgggcgttctgaagaagtatgttcgtaaccgtgctcgtccagaggcaagcatcgccaagggttatgaaacagaggaggtcatcgaattttgcgtagaatttatcgaagaccttcgcccaatcggggtacctgaatcacgccatgaagggagactacagggaaagggaactctcggaaggaaagcaataatgacggtagacaacaatttattccgtaaagcccatttcacggttctgcaacaatcttcattggtagctccttacatcgaggagcacttggctctagttcgcgccaggaacatcggtaagtccgatgcatggattacacggcatcacattgatactttccccgcgtggctactacaacatctcgtgggtaacgagtcgatcaaccaacaacttaccttcctggcgaggggaccgtcctggtcgatcgcgacattccagggatatgagatcaatgggtacacattctacacgagagcccaagacatgaagagcacgaatcaaagcagcgctgttcgtgtcgatgccatgggacacgatggaacaactggcacgtattacggtgccatcgaggacatatgggaacttgactatggtcctctcaaggtccctctgttccggtgccaatcggttaggttgactggtggaggcgtaatgattgatgacagtgggatgacaacggttgaccttgacaaagttggatactcggacgaaccttttgtccttgccaatgatgtaacgcaagtcttttacgtgaaggatatgtctagcaaaggaaagaagggcagagggcctgacgagcctaagcgtcatgtggttctcctagcgcgccctcgtcttctccaccaacacttagaagtttttgcccgatcgatctctctcgacttctccttcaccgccactgcctagggcatccccatatctcgccgtcgtctcgcgctcgtcgtcgtcgccgccgcctccgcctcctccaccgccgcgccgcatctcagatgtttcctgtatgaacagatggctgatcgcaatgaggaacagatattgtacgatacaatcgcggagggaagcagccagaactggaacgaagaagaggggaacaaggatccaaaccagtatttgaacgaggaagggagcgttgagagggatgcggaggggaaccaggaggggcacgtggaaagggatgtggaggggaaccaggaggaggaggctagtggaagtcaaccctccgttggacagaagaggggacgcgggcaacgaggtgccacgaagaagcttgagggtcggcacatcataacggaagtggacgaagacggccgacctagtgccccggcagaagccgccaagaactatgtacgtcacagcggttgggttgcgcgggataacgtgcctgttagtacggtctactggcgcagaacaagggcacgcggagatcatgagagctttgtcccagattcggagaaagagatgctgtggaccacaatgctcgagacattcacccttcccgcgggtacagaggacaaagtgaaaaggtggactctgaagaaaatggcagaacagtttcggagcttcaagggagatctgtaccagaaatatatcctgaaggggcagacaccgaacttcgacacattcccaaagctaagggatcactgggacgagttcgttgcatataagacaggtgaacaagggcaggcgatgatggaaagaaacaaagaaaatgccgccaagaagaagtaccatcaccacttggggtcaggcggctatagcgtcgcgatgccgaagtgggaggagatggaggctagcttgcttgagaggggtatcgaaccggccaccgctaattggccggaacgatcgaagttctggtactatgctcacggtggaatgctcaacccagctgatggctccctggtcttcggcgatcagatacgcgaggctgcgcgtcgactaacagacacagtggaagcctcttcttagggcacgttccgaccgaacagagagaaggacgagctgtcactcaccctgcagactccagagcatccaggacgaacacgagggaaaggggtgattccttggaagattgggttcaaggaggacatccacacgtacaggagtcggatgaggagcaagagagataccgaggcgaagattgcagatctagagttcagggtatcgagctacgagctcagcatgcaagaggaggtggcaaggaaggttgatgaatgcatggccgcacatcggtcccatgatccccagccgaccattcctcctgcaatggtgagcccgtcaggaaaccgtagcagctgcgcctcaaaggggcaggtaggatcatagagcatggacgccatgcaaacgcaggacgaatccacctgccccgttgatgacatcactcagcggacaccatgtgagctgcatattcctttcaagaacttatcaataaaggtggcgtcgggcatggccatcccaacggacccttcaggtacttaccactgtaggccgattgcagcaggatactccaaggtcgaagttgagttggtcgaagacgcgtacgaggacctcgagctggattaccctggaggagatggtgagacgcatctacgagacacaagccacaccattattctatggcgcaagcgatacatcatcctccctgggcgacaagcggcgtctcgtgcaccatctcctctggctccgccgtctcctcctcaggctccagcaccgtctcctcctcatgctccagcaccgtctccacctcaggctcctgcaccgactcctccttaggctcctgcactgactcctcttcaggctcctgcaccgactcctccttaggctcctcttccggcaccttccaagtcaagggcaacccaagctccaccgcctgcccccacaagggcaataaagaaggcgaaagttgacaccgccaagaacaaggacccggggtacgattgcacgcaagaggagcttgaagcttacgtggcatcagaagtcaacagacaattcaagcctcgaagtccagaaaagaagattcctatagacccgagtgttaggaacttcttcaggggtatgtctgcacctgccaaggaggccataaagctatcggactatgagcgaacgctcaagaaagcatcttctggaaagtccaaaccagtccctcagcttggagagcaaccaaaccaggagatcgagccgttggtgactggtgaagattttggaatacaagaatttattaatgacaccgggctaactacggatcaattgctaggagacgcaccaatcgaaaaggcggaagtgaaatacatgtacgaactcggtaaaccgcttgtcaagcctgagctgctgcagtccctacccacacaaatgtacaagttccatcagctgtacatggagatgagcgccaccggtagagagatgattggagcaaggatcagggacacggacttcttgcaaggagatgacattctctggatcaatttcaagggaatctacgaactataccagctggacgccctcgacgtctctattatgagttgctggattttaatggagattcaaagggcctaacggcggggggttttcgatactggattcatcgaccctcggaaagtaaacgtcgcaatgctcgaccaatatccgcaagccacagaggacaatctcgtccatctcctgaaggcgcagcattacaagacgttcatactgttgccgtacaacacagaattccactgggtgcttttactcttcgacctggaagcctgtaacgtcaacgtatatgactcaatggataaaaaagagtctacgtttgacaaggttttcgaacttatagacagggcttggtatcggttctatcatttggtccgcggcaaatggagagaaagacttaggcggaagttcaaatttccttttattcgtatgagggataacctgatcacacacaaggaatttatcgcggcggttcaagaacaactcatgggattcatcaataaacaaatccttgatcccaagggtgaattctactacgacggaaacacaattcataggtccttagcttctgagctagcgactactactacgtcgaaatcgtagctagctaggacatataatggattaagaagtagagcaagctgttcaggacgtagatgtgtagataaatataaatatctaccagttattgttaagag

SEQ ID NO: 16527 - DNA, 1484 bp, Oryza sativa
  Clone ID: PAT_MRT4530_22267C.1
ctcgaagagaagcaaaatttggtgatttggtcgagcacggcgacgcatccacgcgagcccgcctccctctccatcccctccaccgtcgtcgagttagaccaaaccgccaagcgaagccacgacggatcgagccgccgccgccgccgccgtgcacgcccatatctagggtttcgatggagcccgcctcctcctcgtcgccggcgccggcgccggaagccgcggctgcggggaggagggtgccggaggcggcagagctgaagctgcggcggaggacgctggagacggtgctggagcagtgccagcgcgcgctcgagatgatgcgggaggctgatctgggcatcgccgtgtctgaggaggaggaggaggaggagggcgccgacgccgtggcggcgaatccggaggtggggggcagcgacgggtgtgatgaggagggtgcgccgccgccgtctccgccgtcggaggccgactacgagacggacgagttgtgcgatcttctcaaatcgagggttgcatcgcctgaatttcttgaaaaactcgataatattcagaagtcggtatatcaaaatggtgcagtagatgaaactatatcatgggatatcataagtgcggcagacatatgggacgacattgacaagggtatgaacattagtgatgattcagaggatggatatgttctcattaaacaagaggacatagttgatggtattgcaagcttcatggctgcatacttgctgtcgctgaaacaaactaaggacttgacacctaatcaacttcaacaagctcttagcaagaccttttcagctaagaagaggaaaagcaagcttcagaaagcatgggatggaacaaaagttatttataatatagcatcatggagtgcaactgctattggcatctaccagaatccagcaattctaaaagcagcaactgctgccttctggacttcctgccgtgtagcatccaagtttctgtgaatagtccatggctggtcgttgtggtgctgtgtacattgtgtgactacggcaacgatgttgcttccccgtgccatctgtcaaggggaaaatacttttgccaaaacattgtagtacactcaattatatgatgatgtaattctatcgagatcctccaccacaggttcacaggttgattgacagttagttcatgtgtcaggaaagatttcagctcagaccacatttgttatgaacatgtgggcctggtctatagtatcttgcacctgatctaatggttggaggacacctccctccctgtgtttacctgtatcatttgtatcagaccacctccggtttgtgattcctttgtacatataagcccgttcattgtaaatatatcagccattcaacactccaacagtgtatccgtccaattgtaaatatgtcgattcgtttgaataaactcatcgatcacatggctttcactcctctggagtaaaaaaaaaaaaaaaaaaaaaaaaaaaaaaaaaaaaaaaa

SEQ ID NO: 16528 - DNA, 6794 bp, Oryza sativa
  Clone ID: PAT_MRT4530_22268C.1
atggatcggcaatggatgtacgctgaccggcggtccaaagagtttattgacggcgtgcactattttttgagagtggccgaagctaacaggcaaaggggttttatttgttgtccatgcaataagtgtaagaatcagaaggagtattctgcatctaggactattcatttccacttgtttgagtcggggttcatgccaagctataattgttggacatcccacggagagcaaggtattgaaatggaagaagatgaagtggaagacgacaatattctggactttgctcagtatgttggatttgaagaaaatcaaacggacgaggaggaaatagctgctgatggtaacgacgttgcggatgatcttggtcagatgttgcaggacgccagggaggactgcgaaagtgaaaaggaggcccataaattggacaagatgttggaggaccacagaacttcgttgtacccaggttgcgacaaggcatttagcaatttattgaaactcgtcaagaacattcttccggggggaaacaaattgcccgagacaacgtacgaggctaagaagatagtctgcctgttaggactggaagttcataagattcacgcatgtccgaacgattgtatcctatatcacggtgaggagtatgagaacctagaagcgtgccctgtttgcaaagcactacgatacaagattagacgagacgatctaggggaagttgacgggcagctaacaaagaagagaattcctgctaaggtgatgtggtatttccctataataccacggctaaggcgtttgttcaggaacaaggggaatgctagaatgttgcgatggcacgctgaagagcgtcaacaggacgggatgctgagacaccccgctgatggttcgtagtggcgaaacatcgacagaaaatttaaagaatttggaaaggacgcacgaaacagacggtttggttttagtacggatggcatgaatccttttggagagatgagcagcggctatagcacttggcccgttatgatgtgtatctacaacctcccccatggctatgcatgaagaggaagtacataatgatgccgattattattcaaggccccaagcaacctggtaacgacatcgatgtgtacctaagaccactggtcgaagatcttaaacagttgtggaagaaggaaggtgtccccgtgtgggacgaggacaaacaggaggagtttaacctacgagcgctgctgttcgtaaccatcaacgattggcctgcacttagcaacctatccggatagtccaacaaggggtacaaggcttgcactcactgtatggatgaaacaaaaagtacgtatcttaagcactgtaggaaggttgtatacttgggtcatcgtcgattccttgcaacaaaccatccggtacggaagaaaggcaagcacttcgaacataaggccgaccaccgtatgaagcctaaacatcgcagcgggaaaacagtgtttgctatggttaaagatcttaaagtagtgttcggaaaggggcctggaagccagcctatagagagcgaagatggtcacgcggcgatgtggaaaaagaactctatattttgggagttaccatattgggaattcttggacgtacgccacgcaatcgacgtgatgcacctcactaagaacctttgcgtaaaccttcttggcttcctaggtgtatacgaaaagtcgaaagatatggaacgtaatgatctgaagcatatgtccgggcaacaataacaaagctatgtgcattcatgaacgcaatttcgtagaaggtcatcgatccggatagattagaagcccttcagaatgaagtggtgcaatgtctcgtcagttttgagttgatatttccaccttcatttttcaatataatgacgcatctgctttgtcaccttgtgaaagagatccgtattctcgggcctgtgtacctacacaacatgtttcctttcgagaggtacatgggcgttttgaagaagtatgttcgtaaccgtgctcatccagaggcaagcatcgccaagggttatggaacagaggaggtcaccgaattttgcgtagaatttatcgaagaccttcgcccaatcggggtacctgaatcacgccatgaagggagactacggggaaagggaactctcggaaggaaagcaataatgacggtagacaacaatttattccgtaaagcccatttcactgttctgcaacactcttcattggtagctccttacatcgaggagcacttggctctagttcacgccaggaacatcggtaagtccgatgcatggattacacagcatcacattgatactttccccacgtggctacgacaacatctcatgggtaacgagtcaatcaaccaacaacttgccttcctggcgaggggaccgtctgggtcgatcgcgacattctagggatatgagatcaatgggtacacattctacacgagagcccaagacatgaagagcacgaaccaaaacagcgctgttcgtgtcgatgccatgggacacgatggaacaactgccacgtattacggtgccatcgaggatatatgggaacttgactatggtcctctcaaggttcctctgttccggtgccaatgggttaggttgactggtggaggcgtaatgattgatgacagtggtatgacaactgttgaccttaacaaggttggatactcggacgaaccttttgtccttgccaatgatgtaacgcaagtctttttcgtgaaggacatgtctagcaaaggaaagaagggcagagggcctgacgagcctaagcgtcaagtggttctcccagcgcgccctcatcttctccaccaacacttaacgttttcggccgatcgatctctctcggcctctctccttcgccgccactgcctacggcaaatccccgcgccgacgccgccgtatctcgccgtcgtctcgagctcgtcgtcctcgccgccgcctccgcctcctccgccgccgccgcatctctcagatatttcttatatcaacagatggctgactgcgatgaggaacagatattgtacgatacaatcgcggagggaagcagccagtactggaatgaagaagaggggaacgaggatccaaaccagtacttgaacgaggaagggaacgtggagagggatgcggaggggaaccagcaggggcacgtggaaagggatgtggaggggaaccaggaggaggaggctagtggtagtcaaccctccgttgtacaaaagagggcacgcgggcaacgaggtgtagcgaagaagcttgagggtcggcacatcataacgtaagtgaaagaagatggacgtcctagtgccccggccgaagccgccaagaactatgtacgtcacagcggttgggttgtgcgggataacgtgactgtcaatacggtgtactggcgaagaacaagggcacgcggagatcatgagagctttgtcccagattcggagaaagagatgctgtggaccacaatgctcgagacattcacccttcccacgggtacagaggacaaagtgaaaaggtggactctgaagaaaatggcagaatagtttcagagctttaagggagagctgtacaagaaatatatcctgaaggggcagacaccgaacttcaacacattcccaaagctaagggatcactgggacgagttcgttgcatataagacaggtgaacaagggcaggcgatgatggaaagaaacaaagaaaatgccaccaagaagaagtaccatcaccacttggggtcaggaggctatagcgtcgcgatgccgaagtgggaggagatggaggctaacttgattgagaggggtatcgaaccggcaaccgccaattggccggaacgatcgaagttctggtactatgctcacggtggaacgctcaacccagctgatggctcactggtcttcggcgatcagatacgagaggctgcgcgatgactaacagatgcagtggaagcctcctctcagggcacgttccgaccggacagagatagggatgagctgacactcgccctgcagactccagagcatccaggacgaacacgagggaaaggggtgattccttggaagattggtttcaaggtggacatccacacgtacaggagtcggatgaggagtaagagagataccgaggcgaagattgcagatctagagttccgggtatcgagctacgaactcagcatgcaagaggaggtggcaaggaaggttgatgaacgcatggccgcacatcggtcccatgatccccagccgaccattcctcctgcaatggtgagcccgtcaggaaaccgtagcagctgcgcctcaacggggcaggtaggatcacagagcatggacgccatgcaaacacaggacgaatcgacctgtcccgttgatgacatcactcagcggacaccatgtgagccacatattccttacaagaacttatcaataaaggtggcgtcgggcatggccatcccaactaacccttcaggtacttaccactgcaggccgattccagcaggatactcgaaggtcgaagttgagttggtcgaaggcgcgtacgaggacctcgagctggattaccctggaggagacggtgagacgcatctacgagacacaagccatgccattattctatggcgcaggcggtacatcatcctccctgggcgacaagcggcgtctcgtgcaccatctcctccggctccgccatctcctcctcaggatcctgcaccgtctcctcctcatgatcctccagcaccgtctccacctcaggctccagcaccgactcctcctcaggatcctgcaccgactcctcctcgggctcctacacctactcctccgcaagcttctcttccggcaccttcaaagtcaagggccccccagctccaccgcctgcccacacaagggcaacgaagaaggcgaaagttgacgccgccaagaacaaggacccggggtacgattgcacgcaagaggagcttgacgcttacgttgcatcagaagtcaagagacaattcaagcctcgaagtccagaaaagaagattcctatagaccccagtgtcaggaacttcttcaggggtatgtctgcatctgtcaaggaggccatcaagctatcgtactatgagcgaacgctgaagaaagcatattctggaaagtccaaaacagtccctcagcttggagagcaaccaaaccaggagatcgagccgttggtgaccggtaaagaaatgacgatagaagaatttattactgacaccggtctaactacggatcaattgctaggagtcgcacaaatcgaaaaggcggaagtgaaatacatgtacgaactcggtaaaccgcttgtcaagcctgagctgctgcagtccctacccacacaaatgtacaagttccatcagctgtacatggagatgagcgccaccggtagagagatgatcggagcgaggatcagggacacagacttcttgcaaggagatgacattctctggatcaatttcaagggaatctacgaactatactagctggacgcactcgacgtctctattatgagttgctggattttaatggagatttaaagggcccgacggcggagggttttcgatactggattcatcgaccctcggagagtaaatgtcgcaatgctcgaccaatatccacaagaaacagaggacaatctcgtccatctcctgaaggcgcagcattacaagacgttcatactattgccgtacaacacagaattccactgggtgcttttactcttcgacctgtcggcctgcaccgtcaacgtatatgactcaatggataaaaaagagtctacgtttaacaaggttttcgaacttatacacagggcttggtatcggttccgtcatttggtccgcggcaaatggagagaaagacttaggcggaagttcaaatttccttttattcgcatgagggataacctgaccacacacaaggaatttatcgcggcggttcaagaacaactcatgggattcatcaacgaagaaatccttgatcccaagggtgaattctactatgacggaaacacaattcaccggtccttaccacccggcggtacggcggttaccggcggtaaccgcggtaaccgcgcaaaaccgcgacaaatttacaaatcgaaatttgaattcaaaaattcgggcaaaccgcgcgatgtgtaatgggttgcacagtaacgggccggcccatttttttttctttttccaattttcaaatttattctccgttttgctctcaaatttgaataaatattactcttttttgagaaatttcttcaccataaaacactataaatcaagcactaccttcactattttttttgattttttttttttaaatttttgaatttggacgaattttattaaaccgtaccgcgcaagcactaccttcactattttttttgatttttttcttttttttaaaatttttaaatttggacgaattttattaaaccgtaccgcgcggtacgggtaaccgtacccccgcggtacgggcggtaaccgcgccgcgcggttaccggcggtttttcacaccctgcctcctgggggtctcgaagatgcaggaggccaacccgtacactcgcggctgcagcaggatcaaccggtgccgcggctgacggacggcacgcgcgcgtcgcaattatacatgtgtatttgagtattgatcatcgacgacgacgatgagctagctggtggacgattgatttcgcgtggtggcgattggatctaattacccgtgtgtgtactactccgctcctccgattttaaatatactccgcaattattaacttgtttaaaaaaaaaaaaaaaaaaaaaaaaaaaaaaaaaaaa

SEQ ID NO: 16529 - DNA, 334 bp, Oryza sativa
  Clone ID: PAT_MRT4530_22269C.1
atgcatcatataatctgaattgcaaattgcagaaggagaatatacagggggtaagaagaattaccgttgaaataatacacaacacacactgacattatctaattacattcatttacattatgtctttgcgccgaattgaactattgcagccgacgataccattcaatcgggtgaatccagactacccttgaactctagaaatggaacagtgactccaaacaatgcagttagacaattgatctggaaacaaaaaaggacctttgcgtggtgtcactcttgcaagcagcccataaaagaacatgtcaaaaagtgcgttttaatttaatggctagac

SEQ ID NO: 16530 - DNA, 702 bp, Oryza sativa
  Clone ID: PAT_MRT4530_2226C.1
caatatcggcactaactgacaaaacttcgtcgcgcgaggctgcgggcgaacaggtttcgccaacccacgcccttcgccatagtgccaataaggcacggcgtcaagggctgcgggcgaggaggtttcgcccacccacgcccttcgccatagtaccaataaggtacggcgtcaagggttccgggcgaagaggtttcgccacacgccacgcccttcgccatagtaccaataaggcacgaaggtttcgccacacccacaatcttcgccatagtaccaataaggtacggttcgccacacccacgcccttcgccattgtaccaataaggtatggcgtcaagggctgggggcgaaaataagagtcttccaagttgggaggctacaaggccaccctagcctctggagccttttgccacacccacacccttcgccaaagtacccgcaaggtacggcgacaaggactgtgggcgaaaatgagttgcttccaagctggagggctacgaggccaccctagcctctggagcctttcgccatacccatgaccttcaccacagtatccgcaagttcattaccgacaataacaagcggtttgactccgagaagtcaaaggaaatgtgcgaggggctaaaacttgaaatcaagtttgcattggttgcacacccgcagacgaacggggcagccgaaagggatgaatggcaaaaccctagt

SEQ ID NO: 16531 - DNA, 5490 bp, Oryza sativa
  Clone ID: PAT_MRT4530_22270C.1
atgccgccgccgccttcgccgccgcgcgcgcaatgccaccgccgccacgccacgccgccgccgccacggccccgcaacgccacgccgccgccgccacgccgccgagccaaccgccgccccgatgccgccacaccgccgttaacgaacgagaacgagaacgatcgaacgaacgagagcgagaacgaacacgtcaacgtacgttgccgcgagaacgtgaacgagaacgagaacgatcgaacgaacgagagcgagaacgaacacgtcaacgtacgttgccgcgagaacgtgaacgagaacgagaatgatcgaacgaacgagagcgagaacgagaacgatcgaacgaagacaagcgagaacgagggaacgaacgtgaatgagaacaagcgaacgaacatgaatgagaacgagcgaacgaacgtgaacgagctagggaacatggctgaccgcaatgaggaacagatattgtacgatacaatcgcggagggaagcagccagtactggaatgaagaagaggggaacgaggatccaaaccagtacttgaacgaggaagggaacgtggagagggatgcggaagggaaccagcaggggcacgtggaaagggatgtggaggggaaccaggaggaggaggctagtggtagtcaaccctccgttggacagaagagggcacgcgggcaacgaggtgcagcgaagaagcttgagggtcggcacatcataacggaagtgaaagaagatggacgtcctagtgccccggccgaagccgccaagaactatgtacgtcacagcggttgggttgtgcgggataacgtgcctgtcagtacggtgtactggcgaagaacaagggcacgcggagatcatgagagctttgtcccagattcggagaaagagatgctgtggaccacaatgctcgagacattcacccttcctgcgggtacagaggacaaagtgaaaaggtggactctgaagaaaatggcagaacagtttcagagcttcaagggagatctgtaccagaagtatatactgaaggggcagacaccgaacttcgacacattcccaaagctaagggatcactgggacgagttcgttgcatataagacaggtgaacaagggcaggcgatgatggaaagaaacaaagaaaatgccgccaagaagaagtaccatcaccacttggggtcaggaggctatagcgtcgcgatgccgaagtgggagcagatggaggctagcttgattgagaggggtatcgaaccggcaacagccaattggccggaacgatcgaagttctggtactatgctcacggtggaacgctcaactcagctgatggctcactggtcttcggcgatcagatacgagaggctgcgcgacgactaacagatgcagtggaagcctcctctcagggcacgttccgaccagacagagatagggacgagctgacactcgccctgcagactccagagcatccaggacgaacacgagggaaaggggtgattccttggaagattggtttcaaggaggacatccacacgtacaggagtcggatgaggagcaagagagataccgaggcgaagattgcagacctagagttccgggtatcgagctacgaactcaacatgcaagaggaggtggcaaggaaggttgatgaacgcatggccgcacatcggtcccatgatccccaaccgaccattcctcctgcaatggtgagcccgtcaggaaaccgtagcagctgcgcctcaacggggcaggtggcgtcgggcatggccatcccaacggacccttcaggtacttaccactgcaggccgattctagcaggatactcgaaggtcgaagttgagttggtcgaaggcgcgtacgaggacctcgagctggattaccctggaggagacggcggtacatcatcctccctgggcgacaagcggcgtctcgatcctgcaccgactcctcctcgtgctcctacacctactcccccgcaagctcctcttccggcaccttcaaagtcaagggcccccccagctccaccgcctgcccacacaagggcaacgaagaaggcgaaagttgacgccgccaagaacaaggacccggggtacgattgcacgcaagaggagcttgacgcttacgttgcatcagaagtcaagagacaattcaagcctcgaagtccagaaaagaagattcctatagaccccagtgtcaggaacttcttcaggggtatgtctgcatctgtcaaggaggccatcaagctatcgaactataagcgaacgctgaagaaagcatcttctggaaagtccaaaccagtccctcagcttggagagcaaccaaaccaggagatcgagccgttggtgaccggtaaagaaatgacgatagaacaatttattactgacaccggtctaactacggatcaattgctaggagtcgcaccaatcgaaaaggcggaagtgaaatacatgtacgaactcggtaaaccgcttgtcaagcatgagctgctgcagtcccaacccacacaaatgtacaagttccatcagctgtacatggagatgagcgccaccggtagagagatgatcggagcgaggatcagggacacggacttcttaatggagattcaaagggcccgacggcggagggttttcgatactggattcatcgaccctcggaaagtaaacgtcgcaatgctcgaccaatatccacaagaaacagaggacaatctcgtccatctcctgaaggcgcagcattacaagacattccactgggtgcttttactcttcgacctggaggcctgcaccgtcaactgcgcaaagcaaaagcagggaactaacttgtgcggctattacgtgtgcgagtattgccactgccttgcagaccaaatcatcaccacaagagagctcgattttattcgcatgagggataacctgaccacacacaaggaatttatcgcggcggttcaagaacaactcatgggatttatcaacgaagaaatccttgatcccaaggagccgtcgtcaaccgggaagccatctcgtgcccggacgctcgccatccccgtcaagctgctggtgacactgtccaccgagtgccaccccgtcaaaggctgccgttgtgccggcactatcgcaccgacgccaagctctaaggatgccgccattgtgatcgctactgtgtgggcatgtctcaccgaaactccgccggccggcgacgccttcacgcttgtcgcggtctcttcggtcaccatcgacgtctactcatctcaatcatcttcgacggcggctcgtggaggcgaccggcgccggctgctgcttcgagcgggcgtccaaccagcggcggcggctttgaaggcagctgagcagcggcgcaagtccgacgaggaggtccgtcagtgcaacgtctccgaagcactgaagcagcagcaccaaagtgctgcctctgtctcagtagaagctggaccaaaacaagctggtatcaactcagatgatcctgcatgggctcattgtttttgcccagacataaccaagaaacatcacctacggtgcaagtattgtgacaaggtctgcactgctggaattacaagaattaagtaccatcttgctggaattaaaggtttcaatactactaagtgtcagaaagttccaagtccagtgcagcaagagatgtttgatttgcttaccaagaagactagtgaaaaggaacagaaaaacaaagaaaaggaagtggccagagctgaagttgacatagaaaattcagattgtgaaagtggcagtgaaggttcagatcatggcaataatgttcttgtgaaaaggaaggaaaaggtgatggatggattcaaggagcacaaggaatcatgggagctcacagtggaatgctcaggtgacaggaaagatggcaaatatatctttgaacttgtggacaggtacatagaagagataggggaacaacatgttgtccaagtggtgactgataatgctagcgtcaacacaactgcagcaagtctattgacagcaaaaagaccatcaatattttggaatggatgtgctgctcattgcttggatctcatgctcgaggatattgggaagcttggaccagttgaggaaaccattgctaatgcaagacaagccaaggggaagaaagccagcaaagtgatcatatctgaaaccttttggaaaaatgttgacattgcagttaattactttgagccattggctaacgtgttgagaagaatggacagcgatgtaccatcaatgggattcttccatggtttaatgcttgaggcgaagaaagaaatttctcagagattcgataatgataagagccgcttcatagaagtttgggatatcattgataaaagatgggacaacaagctcaagactctactacacctggctgggtactatttgaacccctactactactacccaaataagcaagagatcgagagtgatggatcatttagagcagcaaaatggtggctgaaccatggaacaagcacaccaaatcttaggaagttggctgcaagaattttgagtttgacctgcagctccttagcttgtgagaggaactggtcagtttttgaacaggttgatacaaagaagcgcaacaggctacttcatgaaaggatgcgagatctggtgtttgttaaatttaactccaagttaagaaataagagagagaacaagggtagagatcctatagagaaggaagtggatgatgttgtggcagatggtgacaatgaattcattactggtgttgtgccttcatcaagtgaaatggatcaacaatgtgcaaaagagtcacagcagcacacaacaccacaagcaccagcaccagctaaaaagaaaaggcctgtgcacgctaagaagaggaaagccggcaccgacctccactggctggcgtccgtggcttccgcctctgtcgtcagcgctgctccagggggccggggatccgtctacgccgccacctggtgggacggcctgcctcttcaccacgccacggtccacagcaggcgtcgccgggccctctccgacctcgactgccgcctggcgcacctcgtcctcgctcctccgctacggcgcgccgtcggcgaggccgaccaccgtcgtgccctccgactcctctacctttcatctccaccacctgcgccctctcctcacgtcggctccccgcgcatcttcggcctgatcaccagttcaggcgtctggctacaacgacttctgcaaccgatcgttatcgagcacgcgtctacgccattaagcttcggctgtagtgctgctgcccccttgggctgcagtgctgccgcctgtgatccacctccactggttgttggcacgctgagaggcgccctcctcagcatggcctccctactggtctggcaaacccggcttgacgtctcgtccttcacggttcgactacatcggctcttcggcgtcaccttcctcaacgaccgtcgtgattatgtcaccgtcttcgtctccagcgcgtcctcgctcgaagtgtccgcgttgctcatgctttga

SEQ ID NO: 16532 - DNA, 318 bp, Oryza sativa
  unsure (1)..(318): unsure at all n locations
  Clone ID: PAT_MRT4530_22271C.1
tgctgcatgcatgctggaaataatacccaccgaggatagttaagccacagggcagacaacagacccagtcatgtggctggatttgggtgttaacctgggttgtaagtngtttgtgttgtattgaatgntttgtcggttgtgctttggatgctaattgggctgtaacttttgtgctatactgggttttacttcgtgctttgacttgttgggtctatatgggcttagctcacttgttatttgatactaatgtaaatgaatataatatgattgggctgaaaatggtgtgtataatgtttgggcctaaaaaaaaaaaaaaaa

SEQ ID NO: 16533 - DNA, 6427 bp, Oryza sativa
  Clone ID: PAT_MRT4530_22272C.1
atggatcggcaatggatgtacgcggaccgacggtcaaaagagtttattgatgacgtgcattattttttgagagtggctgatgctaacaagcataagggttttatctgttgtccatgcaataagtgaaaaaaccagaaggagtattctacattaagaactattcatttccacttatttgagtcggggttcatgcctagttataattgttggacatcgcacggagagcaaggggttgaaatggaagaagatgaagtggaagacgacaatattccggactttgctcagtacgctggatttgaaggaaatcaaacgggtgaggaggaaagggatgctgatggtaacgacgttgctgatgatcttggtcagatgttgcaggacgccaaggaggactgcgaaagtgaaaagggggcccataaattggacaagatgttagaggactacagaatgtcgttgtacccaggttactagcaggggcacaaaaagttggataccactctgaagttcttgcaatggaaggcaaaaaatggtgttagtgacaaggcatttggcgatttattgaaactcgtcaagaacattcttccggagggaaacaaattgcccgagacaacgtacgaggctaagaagatagtctgccctctaggactagaagttcagaagattcacgcatgttcgaatgattgtatcctatatcgcggtgaggagtacgagaacctagaagcatgccctgtttgcaaagcactaccatacaagattagacgagacgatccaggagaagttgacgggcagctaacgtagaagagaattcctactaaggtgatgtggtatttccctataataccacggctaaggcgtttgttcaggaacaaggggaatgctagaatgatgcgatggcacgctgaagagcgttaacaggatgggatgctgagacacttcgctgatggttcgtagtggcgaaacatcgacagaaaatttaaagactttggaaagaacgaacgaaacatacggtttggtttaagtacagatggcatgaatccttttggagagatgagcaacggccatagcacttggcccgttacgatgtgtatatacaacctccccccttggctatgcatgaagaggaagtacataatgatgccgattattattcaaggtcccaagcaacctggtaacgacatcgatgtgtacttaagaccactggtcgaaaatcttaaactgttgtggaaaaaggaaggtgtccccatgtgggacgaggacaaacaggaggagtttaacctacgagcgctgctgttcgtaaccatcaacgattggcttgcacttagcaacctttccggtcagtccaataaggggtacaaggcttgcactcactgtatggatgaaatagaaagtacgtatcttaagcactgtaggaaggttgtgtatatgggtcatcgtcgattccttactgcaaaccacccggtacggaagaaaggcaagcactttgaacataaggcgaaccaccgtacgaagcctaaacatcgcagcgggaaaacagtgtttgctatggttaaagatcttaaagtagtgttcagaaaggggtctggaagccagcctatagagagcgaagatggtcacgcggcgatgtggaaaaagaactctatattttgggagttaccctattgggaattcttggacgtccgccacgcaatcgacgtgatgcacctcactaagaacctttgcgtaaaccttcttggcttcctaggtgtatatggaaagtcgaaagatacactggaagcacgtaatgatctgaagcatatggaacaacgcggcgaccttcacccggaaccaaaggagaaaggaagccattacttgagtccagccagctacactcttagcaaggcagagaaggaaagtatatttgaatgcttaaagagcataaaggtaccgtctggatactccacgaatataaagcgaataataagcacgaaggagaagaagttcacaaacctaaagtctcatgactgtcacgtgttgatgacacaactgctaccagttgtaataaggggtatccttccagacaatctccgggcaataataacaaagctatgtgctttcatgaacgcaatttcgcagaagatcatcgatccagatagattagaagcccttcagaatgatgtggtgcaatgtcttgtcagttttaagttgatatttccaccgtcatttttcaatataatgacgcatctgctttgtcaccttgtcaaagagatcggtattctcgggcctgtgtacctacacaacatgtttcctttcgagagttacatgggcgttctgaagaagtatgttcgtaaccgtgctcgtccagaggcaagcatcgccaaggggtatggaacagaggaggtcatcgaattttgcatagaatttattgaagaccttcgcccaatcggggtacctgaatcacgctatgaaggtaaactacggggaaagggatctctcggaaggaaagcaataatgacggtagacaacaatttattccgtaaagcccatttcacggttctgcaacaatcttcattggtagctccttacatcgaggagcacttggctttagttcgcgccagaaacatcggtaagtccgatgcatggattacacggcatcacattgatactttccccgcgtggctacgacaacatctcatgggtaacaagacgatcaaccaacaactggccttcctggtgaggggaccatctggctcgatcgcgacattccagggatatgagatcaatgggtacacattctacacgagagcccaagacatgaagagcacgaaccaaaatagcgctgttcgtaccgatgccatgggacacgatggaacaactggcacgtattacggtgccatcgaggacatatgggaacttgactatggtcctctcaaggtccctctgttctggtgccaatgggttaggttgactggtggaggcgtaacgattgatgacagtgggatgacaacagttgatcttaacaaggttggatgctcggaccaaccttttgtccttgccaatgatgtaacgcaagtcttttacgtgaaggacatgtctagcaaagcaaagaagggcaaagggcctgacgagtcgaagcgtcacgtggttttcccagcgcgccctcgtcttctccaccaacacttagaagttttttccccgatcgatctctctcggcttctccttcgccgccactgcctagggcatcctcgcaccgacgccgccgtcgtatctcgccgtcgtctcggacatctacagaaaatgttacatccgcctccctctctctctcgacgacctcgatctctctcaaatatttcttgtatgaacagatggctgatcgcaatgaggaacagatactgtacgatacaattgcggagggaagcagctagtactggaacgaagaagaggggaacgaggatccaaaccagtacatgaacgaggaagggaacgtggagagggatgcggaggggaaccaggaggagaacgtggagagggatgtagaggggaacgaggaggaggaggctagtggaagtcaaccctccgctggacagaagagggcatgcggacaacgaggtgccgcgaagaagctagagggtcggcacatcataacggaagtggacgaagatggccgacctagtgccccggcagaagcagccaagaactacgtacaacacaacggttggtttgtgcgggataacgtgcctgtcagtacggtgtattggcgtagaacaagggcacacggagatcatgagagctttgtcccagattcggagaaagagatgttgtggaccacaatgcttgagacattcacccttcccgcgggtatagagaacaaagtgaaaaggtggactctaaagaaaatggcagaacagtttcagagcttcaagggagatctgtaccagaaatacatcctgaaggggcaggcaccgaacttcgacacattcccaaagctaagggatcactaggacgagttcgttgcatataagacaggtcaacaagggcaggcgatgatggaaagaaacaatgaaaatgccgccaagaagaagtaccatcaccacttggggtcaggcggctatagcgtcgcgatgccgaagtgggaggagatggaggcaagcttgcttgagaggggtatcgaaccggccaccgctaaatggccggatcgatcgaagttctggtactatgctcacggtggaatgctcaacccagttgatggctccctggtcttcagcgatcagatacacgaggctgcgcgtcgactaacggacgcagtggaagcctcttctcaaggcacgttccaacccgacagagagaaggacgagctgtcactcgccctgtagactcccgagcatccaggacgaacatgagggaaaggggtgattccttggaagattggattcaaggaggacatccacacgtacaggagtcggataaggagcaagagagataccgaggcgaagattgcagatcttgagtacagggtatcgagctacgagctcagcatgcaagaggaggtggcaaggaaggttgatgaacgcatggccgcacatcggtcccatgatccccagccgtacattcctcctgcaatggtgagcccttcagcaatcgtagcagctgcgcctcaacggggtaggtaggatcacaaagcatggacgccatgcaaacccaggacgaatccacctgtcccgttgatgatatcactcagcagacaccatgtgagctgcatattcccttcaagaacttatcaataaaggtggcgtcaggcatggccatcccaacggacccttcagggacttaccactgcaggccgattccagcaggatactccaaggtcgaaattgagttggtggaaggcgcgtacgaggacctcgagttggactaccctggaggagacggtgagacgcatctacgagacacaagccacgccattatactacggcgcaagcgatacatcatccccctgggcgacaagcggcgtctcgtgcaccatctcctccggctccgccatctcctcctcaggctcctgcaccgtctcctcctcatgctccagcaccgtctccacctcaggcttttgcaccgactcctcctcaggctcctgcaccgactcctcctcaggctcctacaccgactcctccgcaagctcctcgtccagcaccttccaagtcaagggcctcccaagctccaccgcctgcccccacaagggcaacgaagaaggcgaaagttgacgctgcaaaaaacaaggacccggggtacgattgcacgcaagaggagcttgacgcttatgtggcatcagaagtcaggagacaattgaagcctcgaagtcgagaaaagaagattcctatagacccgagtgctaggaacttcttcaggggtatgtctgcacctgccaaggaggccataaagctatcagactatgagcgaacacttaagaaagcatcttctggaaagtccaaaccagtccctcagcttggagagcaaccaaaccaggagatcgagccgttggtgaccagtgaagattttggaatacaagaatttattaatgacaccgggctaactacagatcaattgctacgaggcgcaccaatcgaaaaggcggaagtgaaatacatgtacgaactcggtaaaccgcttgtcaagcctgagcagttgcagtccctatccacacaaatgtacaaattccatcaactgtacatggagatgagtgccaccggtagagagatgatcggagcgaggatcagggacacggacttcttgcgaggagaagatattctctggatcaattttaagggtatctacgaactataccagctggacgccctcgacgtctctattatgagttgctgggttttaatggagattcaaagggcccgacggcggggggttttcgatactggattcatcgaccctcggaaagtaaacgtcgcaatgctcgaccagtatccgcaagccacagaggacaatctcgtccatctcctaaaggcgcagcattacaagacgttcatactattgccgtacaacaccgaattccactgggtccttttactcttcgacttggaggcctgcaccgtcaacgtatatgactcaatggataaaaaagagtctacgtttgacaaggtttttgaacttatagatagggcttggtatcggttccgtcatttggtccgcggcaattggagagaaagacttaggcggaagtttaattttccttttattcgtataagggataatctcacacacaaggaatttatcgcggtggttcaagaacaacttatgggattcatcaacgaacaaatccttgatcccaacggtgaattctactacgacggaaatacaattcatatgttcttagcttctgagataactggcacaggaacgcgtcgtccgccgcgcagtaccacctcgcccgccggcgcaggcagcc

SEQ ID NO: 16534 - DNA, 657 bp, Oryza sativa
  Clone ID: PAT_MRT4530_22273C.1
atgatgacggcggtcttccggcgatcctcggtgacgacagaggggtggacgaggtcggcgatgacgtgatgaacccgacggtggccttctcgagcgacgacgacgaccggagcggcggcgacgcacggctggactcacggcggcggcggcggcgcacgggcactcgtggctagggcgctacgagcggcagcaagctaagacgaggttggcgacggagagaggaggtcccggggatccttttataggggctaggaggcggcgacggaggcccatggcgaccggcggcgagatggaaggttttagggttagaggagagagatcgatccgaatcgagctcaaatccgtcggtttccaaacgaaactagacgaagattccaaaagaggagatcccgaggatcatttcccctcaattgatttggccggagaaggaaaggagtggccgaattttggaagggtggcagcggctcgggcggctagggcgcggttacggcggcgcgaggttgaagactactgacaggtgggccccacctatcagcggcaccgagagagagaggagggagggcgcggcggactgggccggcttgggccgggcgcgagcaggccgaggcgaagggagagacttgggccgacttgggcccaaagccacaagggagattt

SEQ ID NO: 16535 - DNA, 4650 bp, Oryza sativa
  Clone ID: PAT_MRT4530_22274C.1
atcgagctctcttgtggtgatgatttggtctgcaaggcagtggcaatactcgcacacgtagtagccgcacaagttagttccctgcttttgctttccgcaaggagatttgaacttccgcctaagtgtttctctccatttgccgcggaccaaatgacggaaccgataccaatccctgtctataagttcgaaaaccttgtcaaacgtagactcttttttatccattgagtcatatacgtttaactctgtgttgtacggcaacagtatgaacgtcttgtaaagctgcgccttcaggagatggacgagattgtcctctgtggcttgcggatattggtcgagcattgcgacgtttacttttcgagggtcgatgaatccagtatcgaaaaccccccgccgtcgggctctttgaatctccattaaaatccagcaactcataatagagacgccgagggcgtccagctggtatagttcgtagattgccttgaaattgatccagagaatgtcatctccttgcaagaagtccgtgtccctaatcctcgctccgatcatctctctatcggtggcgctcatctccatgtacacctgatggaacttgtacatttgtgtgggtagggactgcagcagctcaggcttgacaagcggtttaccaagttcgtacatgtatttcacttccgccttttcgattggtgcgtctcctagcaattgatctgtagttagcccggtgtcattaataaagtcttgtattccaaaatcttgaccggtcactaacggctcgatctcctggtttggttgctctccaagctgagggactggtttggactttctagaacatgctttcttgagtgttcactcatagtccgatagctttatggcctccttggcaggtgcagacatacccctgaagaagttcctgacactcgggtctataggaatcttcttttctggacttcgaggcttgaattgtctcctgacttctgatgccacgtaagcgtcaagctcctcttgcgttcttcgttgcctttgtgggggcaggcggtggagcttggggggcccttgacttggaaggtgccgtaagaggagcttgcggaggagtcggtgtaggagcctgaggaggagttggtgcaggagcctgaggaggagtcggtgcaggagcctgaggtggagacggtgctggagcatgaggaggagacggtgcaggagccggaggagatggtgcacgagacgccgcttgtcgcccagggaggatgatgtaccgcttgcgccatagaataatggcgtggcttgtgtctcgtagatgcgcctcaccgtctcctccagggtaatctagctcgaagtcctagtacgcgccttcgaccaactcaacttcgaccttggagtatcctgctggaatcggcttgcagtggaagtacctgaagggtccgttgggatggccatgcccgacgccacctttattgataagttcttgaaggggatatgcagctcacatggtgtccgctgagtgatgtcatcaacggggcaggtggttttgtcctgggtttgcatggcgtccatgctctgtgatcctacctgccctgttgaggcgcaactgctacgatttcctgacgggctcaccattgcaggaggaatggtcggctggggatcattggaccgatgtgcggccatgcgttcatcaaccttccttgccacctcctcttgcatgctgagctcgtagctcgataccctgaactcaagatctgcaatcttcgcctcggtatctctcttgctcctcatccgactcctgtatgtgtggatgtcctccttgaacccaatattccaaggaatcacccatttccctcatgttcgtcctggatgctctggagtctgcagggcgagtgacagctcgtccttctctctgtccggtcggaacgtgccctgagaagagccttccactgcgtctgttaatcaacgcgcagcctcgcgtatctgatcgccgaagaccagggagccatctgctgggttgagcgttccaccgtgagcatagtaccagaacttcgatcgttccggccaattagcggtggccggttcgataccccactcaagcaagctagcctccatctcctcccacttcggcatcgcgacgctatagccgcctgaccccaagtggtgatggtacttcttcttggcggcattttctttgtttctttccatcatcgcctgcccttgttcacctgtcttatatgcaacgaactcgtcccagtgatcccttagctttgggaatgtgtcgaagttcggtgtcttccccttcaggatatatttctggtatagatctcccttgaagctctgaaactgttccgcgggaagggtgaatgtctcgagcattgtggtccacagcatctctttctccgaatctgggacaaagctctcatgatctccgcatgcccttgttctgcgccagtacaccgtactgacaggcacgttatcctgcacaacccaaccgctatgacgtacatagttcttggcggcttctgccggggcactaggtcggccgtcttcgtccacttccgttatgatgtgctgaccctcaagcttcttcgcggcacctcgttgcccgcgtgccctcttctgtccagcggagggttgacttccactagcctcctcctcctggttcccctccgcatccctctccacgttcccttcctcattcaaatactggtttggatccttgttccccttttcttcgttccagtactggctgcttccctccgcgattgtatcgtacaatatctgttcatcatcgcgatcagccatctttatgctctccaagcattcaaacatactttccttctctgccttgctaagagtgtagctggctggactcaagtaatggcttcatttctcctttggttccgggtgaaggtcgccgcgttgttccatatgctttagatcattacgtgcttccaatgtatcttttgactttccgtatacaccatctttgctctctataggctggcttccaggcccctttccgaacactactttaagatctttaaccatagcaaacactgttttcccgctgcgatgtttaggcttcctacgattgtcagccttatgttcgaagtgcttgcctttcttccataccgggtggtttgctgcaaggaatcgacgatgacccatgtatacaaccttcctacagtgcttaagatacgtactttctctttcatccatacagtgagtgcaagccttgtaccccttgttggactgtccggataggttgctaagtgcaggccaatcgttgatggttatgaacaacagcgctcgtaggttaaactcctcctgtttgtcctcgtcccacacggggacaccttccttcttccacaacagtttaagatcttcgaccagtggtcttaggtacacatcgatgtcattaccaggttgcttggggccttgaataataatcggcatcattatgtacttcctcttcatgcatagccaggggggaggttgaagatacacatcgtaacgggccaagtgctatggccgctactcatctctccaaaaggattcatgccatccgtactcaaaccaaactgtatgtttcgtgcgtcctttccaaagtctttaaattttctgtcgatgtttcgtcactgcgaaccatcggcggggtgtctcggcatcccgtccttagcaggaattctcttgcttgttagctgcccgtcaacttctcctggatcgtctcgtctaatcttgtatcgtagtgcattgcaaacagggcatgcttctaggttctcgtactcctcaccgtgatataggatacaatcattcggacatgcgtgaatcttctgaacttccaatcctagagggcagactatcttcttagcctcgtacgttgtctcgggcaatttgtttccctccagaagaatgttcttgacgagtttcaataaatcgccaaatgccttgtcactaaccccattttttgccatcttgttcaatttatggggctccttttcactttcgcagtccttcttggtgtcctgcaacatctaaccaagatcatccgcaacgttattgtggaattcggccgaccgacgaaagatggtttctccaccagtgaatgtcggataaatatgaaaacatagtatgtgatacaatcatctctatgattgcctctagggaatatcatcaacagactctgcattccatacgcacacaatatctccatcgtatgctatatggaatcttcaccaaccacgtacattgatctttagtctaagtatcccgcatgatatcttgatcatacggacatcattttctcccaatttgactcccgatcatcaccgggcaacgctctcccgaggcatcaacactcacctacacatggcatcaaccaagaaaccatatccgagcaagttttctccaacttgacttattgttagcacacaacagtactaaatatgcatagtatccatctagaagccataaatatgaactatccatgaatatccaacgaaacaacccgaaaacaaaaccgacacagagtcagccggtcagaccgcgggctagacagtctgaccgctcgatacatgccggtctgaccggcaagccttgcccggtctgatcggaccaaatcttcagcagcacctgttcatcacctgcaaatccaatcatctccaaaac

SEQ ID NO: 16536 - DNA, 987 bp, Oryza sativa
  Clone ID: PAT_MRT4530_22275C.1
atgaccagcgacggaggtggaggaggagcggtggagggacgggaacaagctaccattgaggaggagcccgtgttgctgccgcccgtatacgaggctccccgcgtggaggcagtgcatggatgcggtgctcgccggagggatctggaccgcgacgcggagatggcgaggcgaggaggaagtgggatggaggttggaggagagtacgctcatgaagcagaatctcaaaagggtgcttttgatagctttgttgtaagagaaactcaggatgctactgttgctgacggtcatggtggtgatgtagaagaggtcgaggttaatgttgcccaaggtgatgcagtagaggcaaatattgatgaaggtgatgtcgataatattgccgatgaaggtcatgctgctaacattgccgaagaaggtcatgaaactcatgatggtaatattgccgatgaagctagtgtgccggtggcgccgcgcctcaccgatggccagatttgccggtctcccttcctgcgggtcgtcggcggcagattcgcggggcgatgcctcgccgccggagtgatggatgccgagctccgcctagtcgctggcgctagatccagccgcagctgggacgacatccaccgctgccccgatgtcgagggcacccagctctgcagcctccttaacgagctctaccacaagcccgtcgtgcccgctggcatcttgctgccgcccgacactggcgacgaccgcgaccgctcggacatgatgcggtggctcgacaagcagctagcgaggtcggtcgtctacgtcgcgctcgggacagaggcgccgattacatcgggtaccgtccgcgagctcgattcctctaggcgctacgcaacgccagcgagtggctgccggaggggtacgaggcgcggcgtggtggagatgagacatttaactcagataatattatcatcacttgtgatatgtctccctagaacccgtattgctgaaagtgaacagtaa

SEQ ID NO: 16537 - DNA, 135 bp, Oryza sativa
  Clone ID: PAT_MRT4530_22276C.1
gacattgaaggtagtgtgatcttcttcctgttttgtaacaatggcctcacgcagtagtgccctgctcctcctcttttcggacttttgcttccttgcccggcgagccgtcgtttactacgtatattgtcatatcac

SEQ ID NO: 16538 - DNA, 1076 bp, Oryza sativa
  Clone ID: PAT_MRT4530_22277C.1
ctcttttttctcctttggctgttttgtggccctgggtgtttgtttcttcgtctgccattgttttccttgttttgttggctctggtggtttgcttgttacggatggtaaagtgcgagaaagccaagattctgaaggtgatcggccgaccagttcccacagcagagcttgtagaaactcatgtcttcctgacccacaacgatccccccgaacacacgcagctatcgcgaagcctagcggcggcggcctcctcgacctggagcaccacttcgccttccacggcgcgtaccacagcaacgccgtcaacgtcttcatccacacgctcttcgtctggcccatcttcttcaccgcgctcctcctcctccacctcgccgccgtctacggggccttctacctcctcctcgaccgccgcgctggcgccctcgccgcgctcctctgcttcctctgctggtccgccagcgccgccctcgccgcccgcctcggcttctccgccggatggaaggtggtattggtagctcagctgttctgttggactatgcagttcattggccatggtgtttttgagaagcgagcgcctgccctccttgacaatcttgtccaagctttcttgatggctccattcttcgtgctactagaggctcttcacaagtttgttgggtacgaaccgtgtcctggctttcacgccaaagtgcagaagctgattgacgaggcccgcaaggaatgggaggacaagaaagcgaagaagatgacgtgaagtgtgatttggaagttggcaacccccatactgcagaggcgtcttaatcacgtggccatttgatattttgattagacggaactgtgttaacatgtcgctgccaacatattgccttatttatgttgtaatatataaagagttttatgcactctcttgtctgatgtgtatacgttactggagaatatagaattctgatgatgattgtgaactgtattagaaaataaatacaggaaagtctttttaaaaaaaaaaaaaaagcaaaaccccgggtgctatgcacatcatagtcatcgtcgtcgtcttcatcttcctgctcctgcagccc

SEQ ID NO: 16539 - DNA, 423 bp, Oryza sativa
  Clone ID: PAT_MRT4530_22278C.1
atggcggcggcaggcggcggggatgcagccatgcaggtgtcagcgggagtagaggaggcacggccggcggtgtgcaagccggcgtggagcgtgcggcagagggaggccggcgcggcgggcgtcgtggaggatggcgcgacaggcgtcacggaggccggcacgacaagacggaagccggcgaggcgtgtgccggtgcggtacaacgaggcgcggccggtggtgacacgtggaggctggccagcggggagcgccggcggcggggagagggcagtggccggctgggagaaggggcgcggcgcggcagccggcgggagggaaactagcggggagaagggaactagcccggcggcggaggcggcgccgccgtggccatggctgcggacgacgtcgacgtcgacctcggcatcctcggcgacgagatga

SEQ ID NO: 16540 - DNA, 344 bp, Oryza sativa
  Clone ID: PAT_MRT4530_22279C.1
gtctccccggtggtctaggtggcgctcacggtagctccgcgcgggtctctcggaggagactcggcgcgggctgccgtagggagcggtgggctcgccgacgggaattggcgcgacggctcgaagaggtgaatcttttttttattgcacaaatttgagtccacaagtgttgtggatgaatggatgcggatgtgattgattcccaattttgtgttgaacggatgtgcttgctgtggatgaattttgtgttgtggatgaatgttcttgatgagcagagtagacgagggactgctcggctcgtcaaatctaaaaggataaccgacacctatttcaaaaaaaaaaaaaaa

SEQ ID NO: 16541 - DNA, 246 bp, Oryza sativa
  Clone ID: PAT_MRT4530_2227C.1
ccttaagccccccggatcgggcgatcgatcgatggatcggacgccgcacaccatcatttgcacggaggaaaaacggagcaaaccgatgtgatgtccatggatcggcaacaaaccggagcgaagcaaatcatggccgaaaagaagcgtatcaatggtcaagtacgggcaaaaacaaaaccgagcgagggaggcggcaggcaagggtcaaaagaggagatgataacccatctcagctgcaaccggaat

SEQ ID NO: 16542 - DNA, 198 bp, Oryza sativa
  Clone ID: PAT_MRT4530_22280C.1
atggctggctggatggctggctggatggatgatacggatgtagccttggatgtgcccgtgcccaatgaagaggaagagcgcaacatgaaacattacgcttgggtgctaacgggccgcaccttctatttcctcagggttataaataccccggaaaattgggggctgcaacaatcaccgataaaaccatcttgcgacaag

SEQ ID NO: 16543 - DNA, 429 bp, Oryza sativa
  Clone ID: PAT_MRT4530_22281C.1
atggggagcggtaggaggaggggagagaggggggaccacccggcgatgagcccgctgcagccgtcggcctccgtctgccccgccgctcgctgcagccgcgcctttcgctcgccgcagccgcagccccgcctctccccgcctcctccgctcgtcgcaatcgtggccctcgcttgccagagccgtcgtcccgcctccgcccgccccgccgcggccttcgctcgccgcagcccgccgcctccgctcgttgaaggccgcgccggccttcgctcgccaccgtcgtcgccccgcctccgcctgccccgcggcctcgcttccgcccgtcggcccgcttccacctgtcaccccgcctccgccggtcggcacgcaagtcgtcgtcgccgtcgccgcaccgaggtaggggcgccgtccgctggcgccgtaccgaggtag

SEQ ID NO: 16544 - DNA, 350 bp, Oryza sativa
  Clone ID: PAT_MRT4530_22282C.1
agctagttacaatagaaagctgccctctccttatctcttggccaaagaaaaagatgactagcgccctatttttctatttttcccctcccacttcatcgatcactttgtcctttttttcctcttccaccgcacccattgctgcccctgttcttaaccttgctgcctctgtttacccatggacttcgtccgttccaagagcaagttccatggatagtcccaatacttgcattaccttctgttactactcctactccgatctattcaagatttatttttatgatgtcgttttttttctttatatcccttacaatggcactcttctttctttcaattttctttaagttttcttt

SEQ ID NO: 16545 - DNA, 594 bp, Oryza sativa
  Clone ID: PAT_MRT4530_22283C.1
gcacgaggccgaaaccctagccgccgcctccgccgtcgccgtcgccgtcgaaaccctagccgccgcctcctcccgatccgatcgtgtcgccatggccatgcgctctctcctcaccaagctgcggatcccggcggccgcttcccgccggactctcccgccgtttcgctcttcatccaccgcccctcaggctaagggtaagcttagcagcactgctactgcccaagatggcactccagttcctggagagggcaggcgcatacttgaacagattatggaagaaggggacaagcgccaggggaagctgatgtggtatgaaatcattggcaacttcatcgcgttcaatgctacactctatactgtctaccttctataaaaggtggactaaacggggcaaggtgtctatgttgtataacagcactcagattatagcaatctagtgcttgtatattgttgctcctaatctatgtcagtctatgtatgttcgggctatgtattaaactaagcaatctagtgcttatgtattgttgctcctaatctatgccagtttatgtctgttcgggttatgtattaaactagagctctcaagttaatttg

SEQ ID NO: 16546 - DNA, 2289 bp, Oryza sativa
  Clone ID: PAT_MRT4530_22284C.1
atggcggtggtggcggcggcggcggccaccggttccaccaccagatcaggcggcggcggcggcgaggggacgaggtccgggaggaagaagccgccgccgccgccgctgcaggagagggtgcccctcgggcggcgcgcggcgtgggcgtggcggctggccggcctcgccgtcctcctcctcctcctcgccctcctcgccctccggctgcttcgccaccacggcggcgccgggggcgacggcggcgtgtggcgcgtggcgctcgtgtgcgaggcgtggttcgcggcgctgtgcgcgctcaacgtgagcgccaagtggagccccgtccggttcgtcacgcggccggagaacctcgtggcggagggcaggacgccgtcgacgacggcggcggagtacggcgagctgccggcggtggacatgctggtgacgacggcggacccggcgctggagccgccgctggtgacggtgaacacggtgctctcgctgctcgccctcgactacccgcgcgccggcgagcggctggcctgctacgtctccgacgacgggtgctcgccgctgacgtgccacgcgctgcgggaggccgccgggttcgccgccgcgtgggtgcccttctgccgccggtacggcgtcgccgtcagggccccgttccggtacttctcctcctcctcctcgccggagtccggcggcccggccgatcgcaagttcttggacgactggacattcatgaaggatgagtatgacaagttagtgcggcgcatcaagaacaccgacgagcgctccctcctccggcacggcggcggcgagttcttcgccgagttcttgaacgtcgagaggaggaatcaccccaccatcgtcaagacgagggtgtcagctgtgatgaccaacgcaccgatcatgctgaacatggactgcgacatgtttgtgaacaatccccaggccgtcctccatgcgatgtgcctgctgctggggttcgacgacgaggccagcagcgggttcgtccaggcgccgcagagattctacgacgccctcaaggacgatccatttgggaaccagatggagtgttttttcaagagatttatcagtggggttcaaggagttcagggtgccttttatgctggaaccggctgctttcaccgtaggaaagcagtttatggcgtgccaccgaacttcaatggagccgagagagaagataccataggttcatcgtcttataaggagcttcataccaggtttggaaactcagaggaattgaacgaatcagcaagaaacatcatttgggatctgtcctctaagccaatggttgatatatcaagtcgcattgaagtggcaaaagcagtttcagcttgcaactatgatattggcacatgttggggacaggaggttggttgggtctatggatcactaacagaagacatattgaccggacagcggatacacgcgatgggttggagatccgtattgatggtaaccgaaccacccgcattcatgggctccgcgccgattggaggaccagcctgcctaactcagttcaagagatgggcaactggccaatctgagataatcatcagccggaacaacccaattctcgcaaccatgttcaagcgcctcaaattccggcaatgtcttgcctacctgatcgtccttgggtggcctctgagagcgccttttgagctatgctatggattgttgggaccttattgcatactcacaaaccaatccttcttgccaaaggcatcagaagatggtttcagcgtcccgttagccctattcatatcctataacacatacaacttcatggagtacatggcgtgcgggctctccgcccgtgcatggtggaacaatcataggatgcaacggatcatctcggtctctgcctggacactagcatttcttaccgtgctcctcaagtccttaggcctctccgaaactgtttttgaggtcaccggcaaggacaaaagcatgtctgatgacgatgacaacaccgatggtgctgaccctgggaggttcaccttcgactcattgccggtgttcatccccgtgacggcacttgcgatgttaaacatcgttgcggtcactgtcggagcatgtagggtagctttcgggacagcggaaggtgtgccctgtgccccgggtatcggcgaattcatgtgttgtgggtggctggtgctgtgcttcttcccgtttgtaagagggatagtgtggggcaagggaagctatgggatcccttggagtgtcaagctgaaggctagcttacttgtggctatgtttgttaccttctgcaaaagaaactaa

SEQ ID NO: 16547 - DNA, 469 bp, Oryza sativa
  Clone ID: PAT_MRT4530_22285C.1
acgacgacggtggtgctcagcccgtgcgccgcgtgcaagatcctgcgccgccgctgcgtcgaccgctgcgtgctggcgccgtacttcccgccaaccgagccgcacaagttcaccaccgcgcaccgcgtcttcggcgccagcaacatcatcaagctcctgcaggagttgccggaggagcagcgggcggacgcggtgagcagcatggtgtacgaggcgaacgcgcggatccgggacccggtgtacggctgcgcgggggccatctgccagctgcagaagcaggtcaacgacctcaaggcgcagctggcgcgcgcccacgccgagctcgccggcgcccgcgcccagcacgcccacctcaagaattcatggcattcacaattgctaactttcaaattaggatttcaaaattaaaattgagtctaacaaagataaaaattaaaattgatcgattaattcagaatattaaacttat

SEQ ID NO: 16548 - DNA, 696 bp, Oryza sativa
  Clone ID: PAT_MRT4530_22286C.1
gctatcattataacaaggtgcagaggttctgaagcaaggagtcatttggaggatcggaagcggagataatgttaaaatttggggcgacccatagctgcctaggagtacatctcgaaaaccagtcacaccacagggtcaaaacttgttttccactgtttatgatcttgtagatccaataacatgacaatgggacaaggagttagtgcaagataccttctggacagaagatgcagaaactattctacctataccccggcatggtcgcatggatgatatcctggcatggcacttggatgcaaaagggtatgttctcggtgaaaggcaacgtttaagtcatcaagggacagcctccacaagccatccagcccttgtagcagatgaagttttggaagatgagatgtcctaacagaattaaacactttatgtggaggatggctcacaactctctagtcctgtgttgtaatttaaaaaaggagggatatggatgtttgacacgcaatgctttatgtgcaaaagaatggaggtcacttaatttttccagtgcaaatctgtaaaacgcgtctaacctagaagaaattagagagacattggcctcacagcaaacatcagtcgagatggtggagaacattcactgcaggccaggcgacgaggagaggggcggcggccgccggcgttaggccaagggggcgggagtgg

SEQ ID NO: 16549 - DNA, 2584 bp, Oryza sativa
  Clone ID: PAT_MRT4530_22287C.1
ttaatgaaattgcaacgaccacttcatgatcagagattgacaagtacatgatgataggagcaatgtagtaatttactatggtctccttttttatcagcaacaaactatactgcacataacaaatggctgtattgatataactactggtatgaattgtacataaaaaatgccaagcaccaaccattctttcgatgtcaaacaagtcacgagatgttacaatcaacaaaagatgagaaaaaaaaatgtaagaattacacagctcatggtagtgtccagtgtcctaaatttcatgtcgaaccttgatatagtcagcaccttgatagatcaaaagctaggtatccaattccgattgcttcgcaataccaaaaaattctgtttgcttgcagttcacactgcttcttctacaggcaaaactgatttttctttccatcttcggattatcaaaggtctttgcagatcaagctaccaatatagcgccaccaatgaaattcatgagggagttgtaactaaaatcattgatataaacatcccttaaccatcaaacatgactaatcgatcaagcatttggtcttctgccttcaaaaaaatctgagacctgattctccaaatcttcagggttgtactttatataccttgcggaattccttccaccctctagctgacctcggaaccttccaacaaaagaacgatatgctggaaggactttctctgagattgaaatcttcaactcctctcttaattgagggtccacaaccttccatgttgtctgtgtcttgtataactcctcgaatgccaagttaaagttcttgaacctttccttgagtgaagccttgagtgcacttgatgaacccattgtctgtggcaatccatcatctctcagacaagctaataccctcgtccatgaggacctaaggtaccctgtagagtaccgtcttatctgaccacgacgctggcggatccaattatcgccaagcaaggtcttcagctctgaatccttcaccttctgtacaatgtacagcagattgttcatcaaaaatatgttctgaagtgcctcatcctcatacagctttgatttctcctcgatcttggcctgtagatgtgtgatcagtatgagcacacactgccccagtggagtcatattcacgttgtcacctccattttctagctcagtatcccagtccttgagaagttggttcagtgagcggctatagtctgcaagcagtcggacatagttcatgacataccgcgtgagtgggtgaatctccccaccgggcaacgctctccgagatgtctccccctgtattgcatttgcaaactctgcaacggtgccacgcaccgcatccccaagcctcatgagtatccccacagcctcttccttgatgaaatcccttgcatcacctgagaacaagccctcgagctccggcaacacctcatccagcgcctcatacatgccaagaatgcggaacagcttctcggacgatctcttcccgattgcaattgcgtcaccaaagttgagcagctgcaggacacaccccttggctgcctcagtgaagcaatcctcctcggcttcggcatcggcggcaaagatctggttgcagatgcggcgctcctcagcaacaagccccctgacgacgaccttgagcgcctggatccacttcttcatcttgccgtcgaggacgccccattccacgcgctgcacctcctccaggctcatcttgtcgacgccaagcacggcgaggcactccatgagcgtgtcgcggcgcatctcgccgtagacctggcacagctccggcccgtagcctgcgcgcagcatgacgtccgcgatgcccctgagggcgccgacggtgtccggggagatgaggtacggggagatctcttcgtcggagacggaggccctgccgcccgcgccgccggactcgtccccgtcgccggtgtggctggcgaaggaggggcaatcgaggtcagaggcggaggaggcgaaggacggcaccgtgagcgagaggcggcggaggagggaggcgtgcaggtcctccccggcgagcggcgacatcccgcgggccagcaggtggcggaactcgtcctccagccgcgccatcgccgcctgcagcgccgcctccgcgcgcgcgccgcgcgcccccacgaggacggcggccgcgcccaggtaatcccccgcgtccttcgccgaatcgaacaccagcctatccccctcctccggagaatcccaccgctccaccaactccgccgcctcctccacctcgtcctcccgcgcgtcatcggggccggcctcctcctcctccacgacggagggctccctcacggcggcggcggcgggagggggaggcgggaagaggtcggacatgaaggtgaggcggtcgtcgaacccggagagtatccggatcatgtcgtcggcggcgttcttggagttggcgagcgacttgacgatgtgctgcgccgccgcgatcaccttctcctgccctcccggcggcgccgccgccatcctcctctccggttgggatcgagcccgagcgcgacgtcgaggaggggcctgcgccgccgcgggcggggggggccgaggacggcaccg

SEQ ID NO: 16550 - DNA, 2300 bp, Oryza sativa
  Clone ID: PAT_MRT4530_22288C.1
atgccaccaaagaaggtcgttaaggagagagttaccaagcgaaaggaaggtggcagcgaaggggacatggtagccgaagtgggagcagagccttcggcccccgaaggcgaagctacagcgtcgcctcctcctgtggcgtcgccatctctcccgccttcggcgcccgcgtcttcgatagaggcggagacggcgaaagcggcggcagcggcgaaggccctctggaccagagacgtgatcctatcatctcaagcaccgggggtgcctccagccaccgcctttgcccaaccagccacgacgtcgacagcaatcatcgtctcgcaagccaacgccaatctcgatgctcaaggagaagctgacataggggctatgcatcagaatatggctaaacttcaagacacgcttcgccagatgcaagagcaacagcaagcgtatgaagcagcaagacaaaccaagacccatactcagcagctttacgctcagccccaagtctttcccccacatgctgtaccagcaccagtgtacttcgccaagcccgccacagccgttgccgtgcgagcgaccccacaagtggtctcggcactggttcgcctggtggcacctcaaggccagtacctgaagcctactcacacgccacaaaaaatgatggaagcagctacgaccctacaagcacagtttcaagccttcttgcaacaactcaatcgaccccacaacaatgtaccaagagcttcgcctccggcccaagccaagggaagcccaagtcaggttaaacgattatatgatgctggttttattcgtccttgtcgatatgctgagtgggtttctagtatagttcctgttatcaagaagaacggcaaggtcagggtgtgtattgatttccgaaacttaaataaggctaccccgaaagacgaatacccaatgccagtagccgatcagctggttgatgctgcttcggggcataagattttgagttttatggatgttgctcacggcgatgagaataccaaggcgaaggtaatccacctcgtgctcgacggcataggggaatcgacaagggagtacatgcgccgattctcgcaagcacggtgccaagtacaagacataaccaaagcatccatcgtcaacgcaggttcggccggcttgcttgagggtgaactcacaaggaagatcggacgcaaggagccaaggacgatcgaacacctctttcgcataattgatggatatgctcgaggtgaggaagacaccaagcgaaggcaagagatacaagctgaatatgacaaggcggctgcagccgcaacagccaccgtgcaagctaacgctcaaactcaggttcaagcccaagttgtcagttcggcgcccgttctggttcaccctacccctccggcgaacccagcgcagcattcaaggccaaaccaagccccgatgacatggaaaaaattcaggaccgatcgaggtggcaaggccgtgatggccctcctcaatgtcgccttcggcacacaaggaaacaagagagaagaagagatactcttcgacattgttgacatcccatacaattataatgccatcttcggccgaggcactttgaccaagttcgaagcaatttatcatcataactacctcaagctcaagatgcttggcctagtcgatgtgatagttgtcaagggttcccagccttcggctaccacggtagcctccttcgacagggaagttcataccctagaagtcgaagggcaagaaagagccaggccaatgctgagacccgccccccacggcagaatgtctttcggcctaaggaatgcaggcgctacattcgctaggctggtgtacaaagtcttgggatcgcaattggggcgaaatgttgaagcctatgtcgatgacattgttgtgaaaagacgcaaggcattcgaccatgcgtcagatctgcaagagactttcgacaatcttcacgcagccggcatgaagttaaactggagaagtgtgtgttcggtgttcgcacgggtaagttattggggttccttgtgtctgaaaggggaattgaagctaaccctgaaaaaatcaatgccattcagcaaatgaagccaccatcgagcgtacgacaagtacaaaagctcacggggcgaattgcagcactcagctgattcctatcaaaggcagccgaaagaggattacctttcttcaagacccttcggggggcaaattcaaatggacgcctgagtgccaagcagccttcgaggagctaaagcagtatctgcaaagcccaccagctctggttagcccagcagcaagaagcgaactattgctct

SEQ ID NO: 16551 - DNA, 252 bp, Oryza sativa
  Clone ID: PAT_MRT4530_22289C.1
atgcagtggtctgtggctgagaagcaggacaccaaacgcctcacgtggcttgaaaggcaaaaggccattgcttccgtgtacatcggcttcggcagccacgccgtgatgacactggagaagacgacagagtttgcgtggggcctcgccgctagacatgggaaggacgaagttgtagagcatgttggccagtccgcagtgataatctcatcacagcagcaggtcgatcttcagggcagtgtagcatgtgtatga

SEQ ID NO: 16552 - DNA, 495 bp, Oryza sativa
  Clone ID: PAT_MRT4530_2228C.1
atgggccaacatggctcccggcagccgagtgggctgatcaagcccatgcaaatacgccatcaagaaggatgtgcctatagccgccgtctcgccgcgcgaggcgccgtcgtccagccgccctcccgctgcgcaggcatcgccggccaccgccctcccgccgcaagggccgccggccaccgacatcccaccgcgcgggcgtcgccggccaccgcccctcccgccgcgcgggcgtcgccggccaccgtccctcccgccgcgcaggcgggcgaccaccgcgcccccgtcgaacgggccaccggccagcgcgcgccgtttttcagccaccgcttctccggccgcgcgcgccgtcatccaggcgccgtcacgccgccaccgcccctctcgccgcgtgggtgtcgccggccaccgcgcccccgcagcaagggccgtagaccaccgcccctcccgtcgtgcgggcgtcgccggccaccgcccctcccaccgtgcgggccgccg

SEQ ID NO: 16553 - DNA, 156 bp, Oryza sativa
  Clone ID: PAT_MRT4530_22290C.1
gtacaaaaccatgaaactgatcgctgcagtgggtgggatacatttacaaactgtcaaaacatgatctcaactacagatcacgacccatctgcacagtttagctttgaaatgagagcccaggccaatcaaacagatctattaatgaatcgtgtgaca

SEQ ID NO: 16554 - DNA, 285 bp, Oryza sativa
  Clone ID: PAT_MRT4530_22291C.1
atgccgtgcagtggtggtggggcttcgaagggcgcggtgcagtactgcagcggcgcgatggacgcggcggcggcggcttcgaagggcgtggcgctgacggcgctctcctctcagtctcggtggcctccaggtcgaagagtaaaagcacccagtggaatctgcaatgagcctgaggtggagacggtgctggagcatgaggaggagacggtgcaggagcctgaggaggagatggcggagccggaggagatggtgcacgagacgccgcttgtcgcccagggaggatga

SEQ ID NO: 16555 - DNA, 206 bp, Oryza sativa
  unsure (1)..(206): unsure at all n locations
  Clone ID: PAT_MRT4530_22292C.1
ccggccgggatccctctcatacaaattaacaatcaagaatttctgcaaacaaaaaaaaatggcttccaacaaggtagtgatctcggcgttgctcgtcgtagtcgtctccgtgctcgcagtaacgacgantatggcggaccaccaccaagaacaggagctctacactcttcgtccagctatgtcttgccacaactcgctctacccga

SEQ ID NO: 16556 - DNA, 212 bp, Oryza sativa
  Clone ID: PAT_MRT4530_22293C.1
atggacacggaaaaagtccactttatttccctcaactacgggtcgagtttcatcgatggccaaatgagccgccggctagctcagtttgagcacgacctagcccgggcccaagatcagtcgggccggcacgacccgacctacatgccgggtcgtgccatgcccgctcatggactgcaccaacggcctaggcacgacccaataagactcgggcc

SEQ ID NO: 16557 - DNA, 6402 bp, Oryza sativa
  Clone ID: PAT_MRT4530_22294C.1
atggatcggcaatggatgtacgctgaccggcggtccaaagagtttattgacggcgtgcattattttttgagagtggccgaagctaacaagtagaagggttttatttgttgtccatgcaataagtgtaagaatcagaaggagtattctgcatccaggactattcatttccacttgtttgagtcggggttcatgccaagctataattgttggacatcccacggagagcaaggggttgaaatggaagaagatgaagtggaagacgacaatattccagactttgctcagtacgctggatttgaaggaaatcaaacgggcgaggaggacagagaagctgattataacgatgttgcggatgatcttggtcaaatgttgcaggatgccaaggaggactgcgaaagtgaaaagggggcccataaattagacaagatattagaggaccacagaacgtcgttgtacccaggttgcgagcaggggcacaaaaagttggataccactctggagttcttgcaatggaaggcaaaaaatggtgttagtgacaaggcatttggcgatttattgaaactcgtcaagaacattcttccggagggaaacaaattgcccgagacaatgtacgaggctaaaaagatagtctgccctctaggactggaagttcagaagattcacgcatgtccgaatgattgtatcctttatcgcggtgaggagtacgagaacctagaagcatgccctgtttgtaaagcactacgatacaagattagacgagatgatccaggtgaggttgacgggcagctaacgaagaagagaattccagctaaggtgatgtggtatttccctataataccatggctaaggcgtttgtttaggaacaaggggagtgctagaatgatgcattggcacgctgaagaacgtcaacaggacgggatgctgagacaccccgcagatggttcgcagtggcgaaacatcgacagaaaatttaaagactttggaaaggacgcacgaaacatactgtttggtttaagtacagatggcatgaatccttttggagagatgagcagcggccatagcacttggcccgttacgatgtgtatctacaacctccccccttggctatgcatgaagaggaagtacataatgatgccgattattattcaaggccccaagcaacctggtaacaacatcgatgtgttcctaagaccactggtcgaagattttaaactgttgtggaagaaggaaggtgtccccgtgtgggacgaggacaaacaggaggagtttaacctacgagcgctgctgttcgtaaccatcaacgattggcctgcacttagcaacctatccgggcagtccaacaaggggtacaaggcttgcactcactgtatggatgaaacagaaagtatgtatcttaagcactgtaggaaggttgtgtacatgggtcatcgtcgattccttgcaacaaaccacccggtacggaagaaaggcaagcactttaaacatacggcggaccaccgtacgaagcctaaacatcgcagcgggaaaacagtgtttgatatggttaaagatcttaaagtagtgtttggaaaggggcttggcagccagcctatagagagcgaagatggtcacgcggcgatgtggaaaaaaaaactccatattttgggagttaccctattgggaattcttggacgtccgccacgcaatcgacgtgatgcacctcactaagaacctttgcgtaaaccttcttggcttcctaggtgtatatgaaaagtcaaaagatacactggaagcacgtaatgatctgaagcatatggaacaatgcggcgaccttcacccggaaccacaggagaaaggcagccattacttgagttcagccagctacactcttagcaaggcagagaaggaaagtatgtttcaatgcttggagagcatcaaggtaccgtctggatactccacgaatataaagcgaataataagcacgaaggagaagaagttcacaaacctaaagtctcatgactgtcacgtgttgatgacacagctgctaccagttataataaggggtatcctcccagacaatgtccgggcaacaataacaaagctatgttatttcatgaacgcaatttcgcagaaggtcatcgatccagataggttagaaacccttcagaatgatgtggtgcaacgtcttgtcagctttgagttgatatttccaccttcatttttcaatataatgacgcatctactttgtcacctagtgaaagagatcgatattctcgggcttgtgttcctacacaacatgtttcctttcgagaggtacatggacgttctgaagaagtatgttcgtaaccgtgctcgtccagaggcaagcatcgccaaggggtatggaacagaggaggtcattgaattatgcgtagaatttattgaagacattcacccaatcggggtacctgaatcacgccatgaagggagactacggggaaaggggactctcggaaggaaagcaataatgacggtagacaataatttattccgtaaagcccatttcacgattttacaacaatcttcattggtggctccttacatcgaggagcacttggctctagttcgcgccagaaatatcggtaagtccgatgcatggattacacggcatcacattgatactttccccgcatggctgtgacaacatctcatgggtaacgagacgattaaccagcaactggccttcctggcgaggggtccatctggctcgatcgcgacattccagggatatgagatcaatgggtacacattctacacaagagcccaagacatgaagagcacgaaccagaacagtgctgttcgtatcgatgcatgtgacacgatggtacaactggcacgtattacggtgccatcgaggagatatgggaacttgactatggacctctcaaggtccttctgttctggtgccaatgggttaggttgattggtggaggcgtaacgattgatgacagtaggatgacaacggttgaccttaacaaggttggatactcggacgaaccttttgtccttgccaatgatgtaacgcaagttttttacgtgaaggacatgtctagcaaaggaaagaaggacaaagggcctgacaatcgaagcgccacgtggttctcccagtgcgccctcgtcttctccaccaacacttacacgtttttccatcaagatcgagcatcggcttctccttcgccgccactgcctagggcaaccccgcgccgacgccgccgtcgtctctcatcgtcgcctggcggtcctcgccgcctccaccgcagacgccaccgccgcgtctcttggcaaatatttctgctatgaacagatggctgatcgcgatgaggaacagatactatacgatacaatcgcattgggaagcagccagtactggaacaaagaagaggggaacgaggatccaaaccagtacttgaacgaggaggggaacgcggagagggatgcagaggggaacgaggaggggaacgtggagagggatgcggaggggaacgaggaggaggctagtggaagtcatccctccgctggatagaagagggcacgcggacaatgaggtgccgcgaagaagatagagggtcggcacatcattactgaggtggacgcagacggccgacctagtgccccggcacaagcagccaagaattttgtacgccacagcggttgggttgtgagggataacgtgcctgtcagcaaggtgtactggcgcagaacaagggcacgcgggggtgatgacagctttgtcccggagtcagagaaagagatgctgtggaccacaatgctcgagacgttcacgctccctgcgggtacagagaacatagtgaaacagtggactcttaagaaaatggcagaacagttccagaccttcaagggagatctgtaccggaaatacatcctgaaggggcagacaccgaacttcgacatattcccgaagctaagggatcactgggacgagttcattgcttacaagacaggtcaacaagggcaggcgatgatggaaagaaataaagaaaatgccgccaagaagaagtaccatcaccacttggggtcaggtggctatagcgtcgcgatgccgaagtgggaggagatggaggcaagcttgcttgagaggggtatcgaaccggccaccgctaaatggcctgatcgatcgaagttctggtactatgctcacggtggaatgctcaacccagttgatggctccttggtcttcagcgatcagatacgcgaggctgcgaatcgactaacggacgcagtggaagcctcttctcagggcacgttccgacccgacagagagaaggacgagctgtcactcgccctacagactcccgagcatccaggacaaacacgagggaaaggcgtgattccctggaagatgggattcaaggaggacatccacacgtacaggagtcggatgaggagcaagagagataccgaggcgaagattgcagatcttgagtacagggtatcgagctacgagctcagcatacaagaggaggtggcccggaaggtggatgaacgcatggcagcacatcggtcacacgatccccagccgtacatacctcctccaatggtcagcccatcaggcaatcgtagcagctgcgcctcaacggggcaggtagtatcacatagcatggacgccatgcaaacccaggacgaaaccacctaccccgttgatgagatcacgcaacggacaccatgtgagctgcatattcccttcaagaacttatcaatcaaggtggcgtagggaatggccatcccaacggacatttcagggacttaccactgcaggccgattccagcaggatactcgagggtcgaagttgagctggtggaagccgtgtacgaggacatcgagttggactacccaggaggagacggtgagacgcatctacgagacacaagccacgccattatattatggcgcaagcggtacatcatcgtccctgggcgacaagcggcgtctcgtgcaccatctcctccggctccgccgtctcctcctgcaccatctcctccggctcctccgccacctcctcctgcactatctcctccggctcctccgccacctcctcctgcaccatctcctccggctcctctgccacctcctcctgcaccatctcctccagctcctccgcctcctccgcctcctcctccaccgtgtccgcctgcacctcccaagacaaggtctcgccaagctccacctcctgctagcacaagggcaacgaagaaggccaaagttgacaccaccaaaaacaaggagccgccgtacggttgtagtcaagaggagcttgacgcttatgtggcaggagaagtgaagaggcaactcaagcctcagagtcctaaaaagaagatacctattaacccgagcgtgaagaatttcttcaagggaatgtccaccgcaaacaaggaggccttaaagctatcggactatgaccgaacacttaggaaagcctattacaagaagtccaaaccagttcctcagcttggagaacaaccacaccaagtggtcgagccgttggtgaccggcgaagactttggcataacggatttcatttcggacatcggtctaaccatggctcagttggttggaggcgcaccaatcccgaaggcggaagtggcatacaagtttgaactcggtaaaccgcttgtcaggcctgagcagctgcagtccctaccaacacaaatgtacaaattccatgaacggtacatggaaatgagcgccaatggtagagagatgttcggagcgaggatcagaaaccccgacttcttgcaaggagaagatgttctatggatccatttcaaggatgtttttgatctgtaccatcgggacgccctcgacgtctctcttctgagcgcatggattttaatggagattcaaagggcccgacggcggggggtttacgatactgggttcatcgaccctcggaaaatcaacaccgaaatgctcgacaagtacgagaaagacacagaggacaatctcgtccatctcctaacgcagcagcatttcaagacgttcatactattgccgtacaacacagaattccactgggtcctgttctttttcgacttggacgcatgcagagtcactgtgtacgactcaatgaataaagaggagaaggtttttgacaaggtcttccaactgatagacagggcttgggatcggttccgtcaattggtccgcgggacttggaaagaaaaacttggacggaggtttcattttccacgtattcacatgagggaaaaactcccacacaaggattttatcacggctgttcaagaacaactgatggggttcatcaacgaagaagtccttaatcccgatggtgaattctactacgacggatcgacaattcgtaacgtcggtccttcctcttctgacgtaacgcaggcatcgaagtc

SEQ ID NO: 16558 - DNA, 7740 bp, Oryza sativa
  Clone ID: PAT_MRT4530_22295C.1
atggcgagcgcgggggggcacggcgacgatggcgactccgggcgccgaccacccgccgaccccgcgctgggctccaaccacaaggacgaggtggaggcggcggcgaaccagagaagagtcgaggacgacggcggcgagttctactcgttgcgctcatggggtgaattggtgcggaggtggctacgcagggacgatggcgacgacgacgacgactccttcttcgcaatgccggcatggaggggatgtgcaccagcgacggcgacagcagctaccaggcgtcgcgctcgcgatcgaggtgatgacgactcctccttcgcactggcggcatggaggagatgcacactagcgacgccgacatcgacagcagctaccacgcgtcgcgcacgcgctcgaggtgtcatgggcgttcccgtcaccgcgcccgcgtccacggttcgcagcgacgcctccacgtccaagtccgagcccacgtccacggttcgcgacgacgcctccgcctccgcctccagcaccgactcggcgcccaagtccgcgtcactgcttcgccacgacgcctccggcacctactcggcgcccaagtccgcgtcacccaatgctcccgtgctcccgttcacggcggcctccgacgccgccacagcgttcaagtccatgccacccgacgcgtacgcggcgatccatgctctgatactcgcgtgctccaagacctcggacagtgcctcggcatcacctcccatgccacccgaggcgtacgcggccctgcactccctcatgctcgcatgctccaaggcctcgaacaccgcctccgcgtcagcgccgcccatgccacccgaggcgtacgcagccctgcacgctctcgtgctcgcctgctccaaggcatcagacactgcatccgcgtcgccgccgccaccgcccgacgcgcacgctctcgcgttcacggacctactatcttcttcgacaagattagcgacctctctcacgaatagccaagtgagtttggcggcaccggccgaccaccttgcacacagcatgtctattttagctgagaagatcgtcgaggggtcgaacggcttagaggaagccgctgcaaatgtgaagaatgccgcttcaactctgctcgtcgccgctgacaatccaaaagccagcgaagagttagccggcgaatcaagagatctcgcagcacgtattctgcagcttatccatgacgttgaagaccaagctcgcgaggatgcggctggcgccaagtttactgatcaggacgtgttgcccggatgcgaacagtgcgcagaccggagttgtctctgcccgtggctgttcgggagctgcacttcaccgtccggcggctgctccacgtcacaacctcgccgcgccgtcgacgagaagcaggagacacttcgggacaaatggactacatttttcacattttctatgccagcatcgttggcggtgttacccttgctggaaaaacacatttcccaaggctattctgctttgctgggttattcatatggtgccatatttttctcggctgcggcgggtgccttttttctggaaatcctacacccacaaaacacaactgacagagttccgaggaggttacgagaagggtgcggaagggaaatgaatcggcaatggatgtacgctgaccggcggtccaaagagtttattgacggcgtgcactattttttgagagtggccgaagctaacaggcaaaggggttttatttgttgtccatgcaataagtgtaagaatcagaaggagtattctgcatccaggactattcatttccacttgtttgagtcggggttcatgccaagctataattgttggacatcccacggagagcaaggtgttgaaatggaagaagatgaagtggaagacgacaatattccggactttgctcagtatgttggatttgaaggaaatcaaacgggcgaggaggaaatagctgctgatggtaacgacgttgcggatgatcttggtcagatgttgcaggacgctagggaggactgcgaaagtgaaaaggaggcccataaattggacaagatgttggaggaccacagaacttcgttgtacccaggttgcgagcaggggcacaaaaagttggataccactctggagttgttgcaatggaaggcaaaaaatagggttagtgacaaggcatttggcgatttattgaaactcattaagaacattcttccggggggaaacaaattgcccgagacaacgtacgaggctaagaagatagtctgcccgttaggactggaagttcataagattcacgcatgtccgaacgattgtatcctatatcgcggtgaggagtatgagaacctagaagcatgccctgtttgcaaagcactacgatacaagattagacgggacgatccaggagaagttgacgggcagctaacaaagaagagaattcctgctaaggtgatgtggtatttccctataataccacggctaaggcgtttgttcaggaacaagggaaatgctagaatgttgcgatggcacgctgaagagcgtcaacaggacgggatgctgagacaccccgccgatggttcgcagtggcgaaacatcgacagaaaatttaaagaatttggaaaggacgcacgaaacatacggtttggccccaagcaacctggtaacgacatcgacgtgtacctaagaccactggtcgaagatcttaaacagttgtggaagaaggaaggtgtccccgtgtgggacgaggacaaacaggaggagtttaacctacgagcgctgctgttcgtaaccatcaacgattggcctgcacttagcaacctatccggacagtccaacaaggggtacaaggcttgcactcactgtatggatgaaacagaaagtacgtatcttaagcactgtaggaaggttgtatacatgggtcatcgtcgattccttgcagcaaaccacccggtacggaagaaaggcaagcacttcgaacataaggccgaccaccgtacgaagcctaaacatcgcagcggaaaaacagtgtttgctatggttaaagatcttaaagtagtgttcggaaaggggcctggaagccagcatatagagagcgaagatggtcacgcggcgatgtggaaaaagaactctatattttgggagttaccatattgggaattcttggacgtacaccacgcaatcgacgtgatgcacctcactaagaacctttgcgtaaaccttcttggcttcctaggtgtatacggaaagtcgaaagatacactggaagcacgtaatgatctgaagcatatggaacaacgcggcgaccttcacccggaaccaaaggagaaaggaagccattacttgagtccagccagctacactcttagcaaggcagagaaggaaagtatgtttgaatgcttggagagcataaaggtaccgtctggatactccacgaatatcaagcgaataataagcacgaaggagaagaagttcacaaacctaaagtctcatgactgtcacgtgttgatgacacaactgctaccagttgtaataaggggtatccttccagacaatgtccgggcaacaataacaaagatatgtgcattcatgaacgcaatttcgcagaaggtcatcgatccggatagattagaagcccttcagaatgaagtggtgcaatgtctcgtcagttttgagttgatatttccaccttcatttttcaatataatgacgcatctgctttgtcaccttgtgaaagagatccgtattctcgggcctatgtacctacacaacatgtttcctttcgagaggtacatgggcgttctgaagaagtatgttcgtaaccgtgctcgtccagaggcaagcatcgccaagggttatggaacagaggaggtcatcgaattttgcgtagaatttatcgaagaccttcgcccaatcggggtacctgaatcacgtcatgaagggagactacggggaaagggaactctcggaaggaaagcaataacgacggtagacaacaatttattccgtaaagcccatttcactgttctgcaacactcttcattggtagctccttacatcgatgagcacttggctctagttcgcgcaaggaacatcgcccaagacatgaagagcacgaaccaaaacagtgctgttcgtgtcgatgccatgggacacgatggaacaactgccacgtattacggtgccatcgaggacatatgggaacttgactatggtcctctcaaggttcctctgttccggtgccaatgggttaggttgactggtggaggcgtaatgattgatgacagtgggatgacaactgttgaccttaacaaggttggatactcggacgaaccttttgtccttgccaatgatgtaacgcaagtctttttcgtgaaggacatgtctagcaaaggaaagaagggcagagggcctgatgagcctaagcgtcaagtggttctcccaggcaaaagaaaaatcgtcggagttgaggacaagactgacgaggattacgatcagttggatgggcaaccccctttcacggtgacgattgaccctagcatcctcctatcaaatgaagacaccccttactcacgcagcgatcacaaggagggaacaataatggctgaccgtgatgaggaacagatattgtacgatacaatcgcggagggaagcagccagtactggaatgaagaagaggggaacgaggatccaaaccagtacttgaacgaggaagggaacgtgaagagggatgcggaggggaaccagcaggggcacgtggaaagggatgtggaggggaaccaggaggaggaggctagtggtagtcaaccctccgttggacagaagagggcacgcgggcaacgaggtgcagcgaagaagcttgagggtcggcacatcataacggaagtggaagaagatggacgtcctagtgccccggccgaagccgccaagaactatgtacgtcacagcggttgggttgtgcgggataacgtgcctgtcagtacggtgtactggcgaagaacaagggcacgcggagatcatgagagctttgtcccagattcggagaaagagatgctgtggaccacaatgctcgagacattcacccttcctgcgagtacagaggacaaagtgaaaaggtggactctgaagaaaatggcagaacagtttcagagcttcaagggagatctgtaccagaagtatatactgaaggggcagacaccgaacttcgacacattcccaaagctaagggatcactgggacgagttcgttgcatataagacaggtgaacaagggaaggcgatgatggaaagaaacaaagaaaatgccgccaagaagaagtaccatcaccacttggggtcaggaggctatagcgtcgcgatgccgaagtggaagcagatggaggctagcttgattgagaggggtatcgaaccggcaacagccaattggccggaacgatcgaagttctggtactatgctcacggtggaacgctcaacccagttgatggctcactggtcttcggctatcagatacaagaggctgcgcgacgactaacagatgcagtggaagcctcctctcagggcacgttccgaccagacagagatagggacgagctgacactcgccctgcagactccagagcatccaggacgaactcgagggaaaggggtgattccttggaagattggtttcaaggaggacatccacacgtacaggagtcggatgaggagcaagagagataccgaggcgaagattgcagacctagagttccgggtatcgagctacgaactcaacatgcaagaggaggtggcaaggaaggttgatgaacgcatggccgcacatcggtcccatgatccccagccgaccattcctcctgcaatggtgggcccgtcaggaaaccgtagcagctgcgcctcaacggggcaggtaggatcacagagcatggacgccatgcaaacacaggacgaatcgacctgtcccgttgatgacatcactcagcggacaccatgtgagctgcatattcctttcaagaacttatcaataaaggtggcgtcgggcatggccatcccaacggacccttcaggtacttaccactgcaggccgattccagcaggatactccaaggtcgaagttgagttggtcgaaggcgcgtacgaggacctcgagctggattaccctggaggagacggtgagacgcatctacgagacacatgccatgccattattctatggcgcaggcggtacatcatcctccctgggcgacaagcggcgtctcgtgcaccatctcctccggctccgccatctcctcctcaggatcctgcaccgtctcctcctcatgctccgccagcaccgtctccacctcaggctccagcatcgactcctcaggatcctgcaccgactcctcctcgtgctcctacacctactcccccgcaagctcctcttccggcaccttcaaagtcaagggcccccccagctccaccgcttgcccacacaagggcaacaaagaaggcgaaagttgacgccgccaagaacaaggacccggggtacgattgcacgcaagaggagcttgacgcttacgttgcatcagaagtcaagagacaattcaagcctcgaagtccagaaaagaagattcctatagaccccagtgtcaggaacttcttcaggggtatgtctgcatctgtcaaggaggccatcaagctatcggactatgagcgaacgctgaagaaagcatcttctggaaagtccaaaccagtccctcagcttggagagcaaccaaaccaggagatcgagccgttggtgaccggtaaagaaatgacgatagaacaatttattactgacaccggtctaactacggatcaattgctaggagtcgcaccaatcgaaaaggcggaagtgaaatacatgtacgaactcggtaaaccgcttgtcaagcctgagctgctgcagtccctacccacacaaatgtacaagttccatcagctgtacatggagatgagcgccaccggtagagagatgatcggagcgaggatcagggacacggacttcttgcaaggagatgacattctctggatcaatttcaggggaatctacgaactataccagctggacgccctcgacgtctctattatgagttgctggattttaatggagattcaaagggcccgacggcggagggttttcgatactggattcatcgaccctcggaaagtaaacgtcgcaatgctcgaccaatatccacaagaaacagaggacaatctcgtccatctcctgaaggcgcagcattacaagacgttcatactgttgccatacaacacagaattccactgggtgcttttactcatcgacctggaggcctgcaccgtcaacgtatatgactcaatggataaaaaagagtctacgtttgacaaggttttcgaacttatagacagggcttggtatcggttccgtcatttggtccgcggcaaatggagagaaagacttaggcggaagttcaaatttctttgcgcaaagcaaaagcagggaactaacttgtgcggctattacgtgtgcgagtattgccactgccttgcagaccaaatcatcaccacaagagagctcgattttattcgcatgagggataacctgaccacacacaaggaatttatcgcggcggttcaagaacaactcatgggattcatcaacgaagaaatccttgatcccaagggtgaattctactacgacggaaacacaattcaccggtccttagcttctgagctagcagcgagtactactacgtcgaaatcgtag

SEQ ID NO: 16559 - DNA, 891 bp, Oryza sativa
  unsure (1)..(891): unsure at all n locations
  Clone ID: PAT_MRT4530_22296C.1
cccacgcgtccggcctctctccccctcctctcgtcctcacaagtcgcgaggagtcgagaggtgagcggcaatggcgggcgtcggctgccacttcctcctctccctctccccgccgctctactccatacgccgtcccgccgccgcccaccgcccggccaaagcgcgatcccatatcagctgttgctcgaggcacgacgacgcagaggcatgttcaacaagcaagcccttgaccaatggcaaggaagaagaaaaaaccactccttccagacgaaaatgccttgcttgcctatgtgctgtgacattaatcagtgcatcaggtccaacaatgcttacaccaaacggactcgcttcggatatgatgagcaagcctgctgtatgccggaattgcaacggtagcggtgctgtattatgtgacatgtgcggcggcactggaaaatggaaggccctcaaccgaaagagagcaaaagatgtctatctattcacagagtgcccaaactgctacggccgagggaaattggtgtgtccagtttgtctaggaacaggactgccaaacaacaaggggcttctccggcgaccagacgccaagaagctgctcgacaagatgtacaacggcaagatattgccagactcgtagatcgtctctacagaatacatgtgagatatagtaattgataggattcgtatgagatatatagtcaggctcgggatgttgctcaacattctctcctttctcctgtagttcaaatcaacgttctaaacttaatagattcatcacaggagcattacattatttattatttcatctcaatcataagagcattgtagcccatttntggcnncgtttcagcaacatgaatgaaccgttcngaagtcgttccaaaaaaaaaaaaa

SEQ ID NO: 16560 - DNA, 5449 bp, Oryza sativa
  unsure (1)..(5449): unsure at all n locations
  Clone ID: PAT_MRT4530_22297C.1
ccgccgcagagactaactcatcgcctctgcgcgatggatcggcaatggatgtacgctgaccggcggtccaaagagtttattgacggcgtgcactattttttgagagtggccgaagctaacaggcaaaggggttttatttgttgtccatgcaataagtgtaagaatcagaaggagtattctgcatccaggactattcatttccacttgtttgagtcggggttcatgccaagctataattgttggacatcccacggagagcaaggtgttgaaatggaagaagatgaagtggaagacgacaatattccggactttgctcagtatgttggatttgaaggaaatcaaacgggcgaggaggaaatagctgctgatggtaacgacgttgcggatgatcttggtcagatgttgcaggacgccagggaagactgcgaaagtgaaaaggaggcccataaattggacaagatgttggaggaccacagaacttcgttgtacccaggttgtgagcaggggcacaaaaagttggataccactctggaattgttgcaatggaaggcaaaaaatggggttagtgacaaggcatttggcgatttattgaaactcgtcaagaacattcttccggggggaaacaaattgcccgagacaacgtacgaggctaagaagatagtctgcccgttaggactggaagttcataagattcacgcatgtccgaacgattgtatcctatatcgcggtgaggagtatgagaacctagaagcatgccctgtttgcaaagcactacgatacaagattagacgggacgatccaggagaagttgacgggcagctaacaaagaagagaattcctgctaaggtgatgtggtatttccctataataccacggctaaggcgtttgttcaggaagaaggggaatgctagaatgttgcgatggcacgctgaagagcgtcaacaggacgggatgctgagacaccccgccgatggttcgcagtggtgaaacatcgacagaaaatttaaagaatttggaaaggacgcacgaaacatacggtttggtttgagtacggatggcatgaatccttttggagagatgagcagcggccatagcacttggcccgttacgatgtgtatctacaacctccccccctggctatgcatgaagaggaagtacataatgatgccgattattattcaaggccccaagcaacctggtaacgacatcgacgtgtacctaagaccactggtagaagatcttaaacagttgtggaagaaggaaggtgtccccgtgtgggacgaggacaaacaggaggagtttaacctacgagcgctgctgttcgtaaccatcaacgattggcctgcacttagcaacctatccggacagtccaacaagaggtacaaggcttgcactcactgtatggatgaaacagaaagtgtatacggaaagtcaaaagatacactggaagcacgtaatgatctgaagcatatggaacaacgcggcgaccttcacccggaaccaaaggagaaaggaagccattacttgagtccagccagctacactcttagcaaggcagagaaggaaagtatgtttgaatgcttggagagcataaaggtaccgtctggatactccacgaatatcaagcgaataataagcacgaaggagaagaagttcacaaacctaaagtctcatgactgtcacgtgttgatgacacaactgctaccagttgtaataaggggtatccttccagacaatgtccgggcaacaataacaaagctatgtgcattcatgaacgcaatttcgcagaaggtcatcgatccggatagattagaagcccttcagaatgaagtgaggtacatgggcgttctgaagaagtatgttcgtaaccgtgctcgtccagaggcaagcatcgccaagggttatggaacagaggaggtcatcgaattttgcgtagaatttatcgaagaccttcgcccaatcggggtacctgaatcacgccatgaagggagactacggggaaagggaactctcggaaggaaagcaataatgacggtagacaacaatttattccgtaaagcccatttcactgttctgcaacactcttcattggtagctccttacatcgagagcctgatgagcctaagcgtcaataaacacatatgtaagcgaaaatcatatgcagtgctataatctttagtcccggttcttaaccctaaccgggtttaaaaagaatttcgaaatagcgggaaaagatatttactcccggttgttgagaacaaccgggagtaaagatccaggggtatatatattcccggtgcgccctcgtcttcttcaccaacacttaaacgttttcggccgatcgatctctctcggcctctctccttcgccgccactgcctagggcaaatccccgcgctgacgccgccgtatctcgccgtcgtctcgagctcgtcgtcctcgccggcgccttcgncttctccgctgtcgacgcatctttggggtgagagccgccgcatctccattcatgcatctcgatctctccgatctcgatctctctccggcgccttttacgccgcgcaacgccgtcgccgcatgccaacgccacgccgccgccgccgtcgccacgccgccgccgcttttgccgccgcgcgtgcaatgccgccgccgccacgccacgccacgccaccgccgccacgccacgccaccgcgcgccacggccccacaacgccacgccgccgccgccgtcgccacgccgccgcgccaaccgccgccccgatgccgccacaccgccgttaacgaacgagaacgagaacgatcgaacgaacgagagcaagaacgaacacatctacttgaacgaggaagggaacgtggaaagggatgcggaggggaaccagcaggggcacgtggaaagggatgtggaggggaaccaggaggaggaggctagtggtagtcaaccctccgttggacagaagagggcacgcgggcaacgaggtgcagcgaagaagcttgagggtcggcacatcataacggaagtggaagaagatggacgtcctagtgccccggccgaagccgccaagaactatgtacgtcacagcggttgggttgtgcgggataacgtgcctgtcagtacggtgtactggcgaagaacaagggcacgcggagatcatgagagctttgtcccagattcggagaaagagatgctgtggaccacaatgctcgagacattcacccttcctgcgggtacagaggacaaagtgaaaaggtggactctgaagaaaatggcagaacaatttcagagcttcaagggagatctgtaccagaagtatatactgaaggggcagacaccgaacttcgacacattcccaaagctaagggatcactgggacgagttcgttgcatataagacaggtgaacaagggaaggcgatgatggaaagaaacaaagaaaatgccgccaaaaagaagtaccatcaccacttggggtcaggaggctatagcgtcgcgatgccgaagtgggagcagatggaggctagcttgattgagaagggtatcgaaccggcaacagccaattggccggaacgatcgaagttctggtactatgctcacggtggaacgctcaacccagctgatggctcactggtcttcggctatcagatacaagaggctgcgcgacgactaacagatgcagtggaagcctcctctcagggcacgttccgaccagacagagatagggacgagctgagtcggatgaggagcaagagagatactgaggcgaagattgcagacctagagttccgggtatcgagctacgaactcaacatgcaagaggaggtggcaaggaaggttgatgaacgcatggccgcacatcggtcccatgatccccagccgaccattcctcctgcaatggtgagcccgtcaggaaaccgtagcagctgcgcctcaacggggcaggtggcgtcgggcatggccatcccaacggacccttcaggtacttaccactgcaggccgattccagcaggatactccaaggtcgaagttgagttggtcgaaggcgcgtacgaggacctcgagctggattaccctggaggagacggtgagacgcatctacgagacacatgccatgccattattctatggcgcaggcggtacatcatcctccctgggtgacaagcggcgtctcgtgcaccatctcctccggctccgccacctcaggatcctgcaccgactcctcctcgtgctcctacacctactcccccgcaagctcctcttccggcaccttcaaagtcaagggcccccccagctccaccgcttgcccacacaagggcaacaaagaaggcgaaagttgacgccgccaagatcaaggacccggggtacgattgcacgcaagaggagcttgacgcttacgttgcatcagaagtcaagagacaattcaagcctcgaagtccagaaaagaagattcctatagaccccagtgtcaggaacttcttcaggggtatgtctgcatctgtcaaggaggccatcaagctatcggactatgagcgaacgctgaagaaagcatcttctggaaagtccaaaccagtccctcagcttggagagcaaccaaaccaggagatcgagccgttggtgaccggtaaagaaatgacgatagaacaatttattactgacaccggtctaactacggatcaattgctaggagtcgcaccaatcgaaaaggcggaagtgaaatacatgtacgaactcgataaaccgcttgtcaagcctgagctgctgcagtccctacccacacaaatgtacaagttccatcagctgtacatggagatgagcgccaccggtagagagatgatcggagcgaggatcagggacacggacttcttgcaaggagatgacattctctggatcaatttcaggggaatctacgaactataccagctggacgccctcgacgtctctattatgagttgctggattttaatggagattcaaagggcccgacggcggagggttttcgatactggattcatcgaccctcggaaagtaaacgtcgcaatgctcgaccaatatccacaagaaacagaggacaatctcgtccatctcctgaaggcgcagcattacaagacgttcatactgttgccatacaacacagagttaaacgtatatgactcaatggataaaaaagagtctacgtttgacaaggttttcgaacttatagacagggcttggtatcggttccgtcatttggtccgcggcaaatggagagaaagacttaggcggaagttcaaatttccttttattcgcatgagggataacctgaccacacacaaggaatttatcgcggcggttcaagaacaactcatgggattcatcaacgaagaaatccttgatcccaagggtgaattctactacgacggaaacacaattcaccggtccttagcttctgagctagcagcgagtactactacgtcgaaatcg

SEQ ID NO: 16561 - DNA, 831 bp, Oryza sativa
  Clone ID: PAT_MRT4530_22298C.1
atgagccagaatggcaagaaaaaagaaaaagagcaggagctccaccatgaatgtgtacttgggccgtcagaagtcgtcgtccagggacacgcggacgctgacaacgacggcggcgatgacgacgacatcgtcataccagcaagcatgccaacaaggtttagcttccagagattacaacgacggatagagaactcggatcctgtccttgttgtccctgaagaacaaccagacaagatcccagagtggaccgccaaacccgccctgactccctccctccagtctttcatcgacatcatcgatgacctccgaatacgggggttgtcggggtatgaagtcgctgccgacttcgtaggtaggcggatccaaccactccaggcccgcacctatccggccttcgattattcggggctagaggacacgaccctggtctctcctcggggtctggacagcgacaccgtggcatgccgcgtcagccaggtgatgatcattgctctagcgacggcgagcgacgtccccgtacccctttgcgagaagggtctggctgaacgcgaggctgcgatcaacgctctccctctgatggatgtcatcgggccactcgcggaccaccaggcggcgacgtcattgaaggagggcgtcaccaaggaggcgtccgacgtcgctgccgccactaccacgagcagcagcgacgttccgaagaaggggaggaaattctcctccatactcgggacccgtcagaaggcgcctaacctggcggcctcggacatgtccccccccgcctcagcgaaggcagaggctggtgacgatcggcgagaaagaatgacaataaagtga

SEQ ID NO: 16562 - DNA, 1697 bp, Oryza sativa
  Clone ID: PAT_MRT4530_22299C.1
atggtggcagcggtgcatggccggaggaggccggcgtggtggcggtggtgcacgataggcggaggccgacatgatggcactggtggcagcggggtgatggctagtggcggtggtttggtcatgggagcgaaggaggcaacggtggcgcctggtggtggtcgtggtggcgcggtgctcggtgacgacggcggcggtgtcccccagatccgtgccacttggctggatcttgagggtggccggcggcgcggctggcgacgtcgtgcagacgatcgccggcgacagcaagtggaggcagggaaggagtcgtgtgtgaggtgtggatggcgacgggcattcagcaacagcggctgcggtggtggtgaccgcgactacggtcactggaggcatgacggcttcggtcggctagctgagggcgtggcagacggctacttctggctggtgcggcatcatttggacgaggggttggagaccagcttggcgcagagaggcgcagccgatggtagcagaggccggctcggcgtgagaggcacgagcggcgaagatggagatcggcttggcgggagaggcgcgaccgatggagggaggccggactggcgcgagaggcccgtccggtggaggaggccggcttggcgcgagaggcgcggccggtggtggaggaggcgacctcggtgtgaggaggagctgctggtggatgtgacgcggtcttcggtgcacgaaggctggccagcgggggcgctggtgcaggggtcccacatgtcggccgagcttgagtggtggtggagcatcggggcactagccgtggattcgtaggtggtgagcagcgggtgaaaacccagtctggccttggccagaccggcaacgatgattccccctcctgagggcgttgtcgtgcgccggtggcgcggcaacggcaagacccggagaccaaggaggtgggtgaccttggagaagagctggctgcgtccacaggccacggtcttcacgcagccgcgacggttatgctggaaccggagcactgaactacccctaccaacctccccctcccgttctctctccttcttcgtcctcctcccgagccttaacagatgcgggcggcggcgttggcgtcggcgttgggcggcggtggcagcgtcgacgtcggcggtggtggcgtcagcgtcgacagcggcggcggtggtgggcggcggtgtcggcggcaacggcaggtgcacggcggtggtgggcagcaagcacgcgggagaagctagctcccattggagttggacactcatgcactcattcaatgtgtgtccaatgtgtgtcactaccacagaaagggtctttccatgcggttcggaagcatctttccatgcagttgcccaacccggcggcggcggcaccggatccgtcgccccagccgccttgcgtcgtcgccggcaacggatccatcgcccctgctgcccgccgtcgtcggcagcaccggatccgcacggtgcggcggtgccacccgaggcggccaagccgcccccgccgccgcggcgttgaggaggggggagggtcacctcatcgtcgtcgttgtcgacggcgttgagaggatggcgggtcgccgagccgccgccgtagccgcgccgcccgctgtcgctgtagccgctccctatggcggcgaatccggccctcccgagggcggtgccgccggatccgccacccgccgacgccat

SEQ ID NO: 16563 - DNA, 474 bp, Oryza sativa
  Clone ID: PAT_MRT4530_2229C.1
taaaacacccttgtagatggaagagtgccagctagagtggcatcaggagggagatggccggcaaagcccgcgcggcaagaggagcggcgaccggcggcccgcacggtgggaggggcggtggccggcgacgcccgcgcgacgggaggggcggtggccggcggcccttgctgcgggggcgcggtggccggcgacacccacgcggcgggaggggcggtggcggcgggcggtggctggacgacggcgcgcgcggccggcggcccgtgcggcgggggcgcggtggtcggccgcctgcgcggcgggatggcggtggccggcgacccttgcggcgggagggcggtggccggcgatgcctgcgcagcgggagggcggctggacgacggcgccccgcgcagcgagacggcggctggacaacgacctgcgtggccggagggcagcgggacggcggcgtgcagaggccattcgcatggaagagga

SEQ ID NO: 16564 - DNA, 456 bp, Oryza sativa
  Clone ID: PAT_MRT4530_222C.1
atggagaagggttcgtcctcgacgccgtccgccgcgaacacctccgagccgatgctagggcaagccgccatcgccgccaccaccgccgtgccgatgacaaacttccagctcttcggatccacggtgctggttccggtggcttccatggcgacggctattgctccggcagctatggcagcagccgataatggtggacatggatcctcgtcggcgtcacagaacgcctctggttcaggtcaaggacaaggtggcaacatgttcttgtccttgcaactgaggccgctcggctcaacgccatggggtttctcctcattgcagatctgtgttaagatttatttagctgcaatggagaagggctcgtcgtcgacgccgtccgccgcaaacacctccgagccgatggtagggcaagccgccgccgccaccaccaccgctgccatgcggatgacaaacttctag

SEQ ID NO: 16565 - DNA, 6282 bp, Oryza sativa
  Clone ID: PAT_MRT4530_22300C.1
atggatcggcaatggatgtacgctgaccggcggtccaaagagtttattgatggcgtgcattattttttgagagtggccgaagctaacaagcataagggttttatttgttgtccatgcaataagtgtaagaaccagaaggagtattctagattcaggactattcagatccacttgtttgagtcggggttcatgctaagctataattgttggacatcccatggtgagcaaggggttgaaatggaagaagatgaagtggaagacgagaacattccggactgggcttagtacgctgaatttgaaggaaatcaaacgggcaaggtggacagggatgctgacgataacgacgctgcggatgatcttggtcagatgttgcaggacgccaaggaggactgtgaaagtgaaaaggaggcccataaattggagtgtatgttagaggaccacagaatgttgttgtacccaggttgcgagaaggggcacaaaaagttggataccactttggagttcttgcaatggaaggcaacaaatggtgttagtgacaaggcatttggcgatttattgaaattcatcaagaacatttttttggagggaaacaaattgcccgagacaacgtacgaggctaagaagatagtctgccctctaggactggaagttcagaagattcacgcatgtccgaatgattgtatcctatatcgtggtgaggagtacgagaacctagaagcatgccttgtttgtaaagcactacgatacaagattagacgagatgatccaggtgaagttgacgggcagccaacgaagaagagaattcctgctaaggtgatgtggtatttccctataataccacggctaaggcatttgttcaggaaaaaggggaatgctagaatgatgcgttggcacgctgaagaacgttaacaggacgggatgctgagacaccccgccgatggttcgcagtggcaaaacatcgacagaacatttaaagactttggaaaggacgcacgaaacatacggtttggtttaagtacggatggcatgaatccttttggagagatgagcagcggccatagcacttggcctgttacgatgtgtatctacaacctccacccttggctatgcatgaagaggaagtacataatgatgctgattattattcaaggccccaagcaacctggtaacgacatcaatgtgtatctaagaccactggtcgaagatctgaaactgttgtggaagaaagaaggtgtccccgtgtgggacgaagacaaacaggaggagtttaacctacgatcgctgctgttcgtaaccatcaattattggcctgcacttagcaacctatccgggcaatctaacaaggggtacaaggcttgcactcactatatggataaaattgaaagtacgtatcttaagcactgtaggaaggttgtgtatatgggtcatcatcgattccttgctacaaaccacccggtacggaagaaaagcaagcactttgaacataaggcggaccaccgtacgaagcctaaatatcgcagcgggaaaacagtgtttgctatggtgaaagatcttaaagtagtgtttggaaaggggcctggcagccagcctatagagagcgaagatggtcatgcggcgatgtggaaaaagaactctatattttgggacttaacctattgggaattcttggatgtctgccatgcaatcgacgtgatgctcctcactaagaacctttgcgtaaacctgcttgtctttctgggtgtatatggaaagtcgaaagatacactggaagcacgtaatgatctgaagcatatggaacaatgcggcgaccttcacccggaaccaaaggataaaggaagccattactttagtccagccagctacactcttagcaaggcagagaaggaaagtatgtttgaatgcttagagagcattaaggtaccgtctggatactccacgaatataaagcgaataataagcacgaaggagaagaagttcacaaacctaaagtctcatgactgtcacgtgttgatgacatagctgctactagttataattcggggtatccttccagacaatgtccgggcaacaataacaaagctatgtgctttcatgaacgcaatttcgcagaaggtcatcgatctggatagattagaagcccttcaaaatgatgtggtgcaatgtcttgtcagctttgagttgatatttccaccttcatttttcaatataatgacgcatctgctttgtcaccttgtcaaagagattggtattctcaggcctgtgtacctacacaacatgtttcctttcgagaggtacatgggcgttctgaagaagtatgttcgtaaccgtgctcgtctagaggcaatcatcgccaaggggtatggaacagagaaggtcattgaattctgcgtagaatttattgaagaccttcgcccaatcggggtgcttgaatcacgccatgaaaggagactacgggaaaggggactctcggaaggaaatcaataatgacggtggacaacaatttattccgtaaagcccatttcatggttctgcaacaatcttcattggtggctccttacgtcgaggagcacttggctctagttcgcgccagaaacatcggtaagtccgatgcatggattacacggtatcacattgatactttccccgcgtggctgtgacaacatctcatgtgtaacgagacgattgaccaacaactggccttcctagcgaggggaccatctggctcgatcgcgacattctagggatataagatcaatgggtatacattctacacgagagcccaagacatgaagagcacgaaccagaatagtgttgttcgtatagatgccataggacacgatggtacaactggcatgtattacggtgccatcgaggacatatgggaacttgactatcgacctctcaaggtctctctgttccggtgccaatgggttaggttgactggtggaggcgtaacgattgatggcagtgggatgacaacgattgaccttaacaaggttgtcggactaaccttttgtccttgccaatgatgtaacgcaagttttttacatgaaggacatgtctagcaaaggaaagaagggcaaagggcctgacgagccaaagccccacgtggttctcccagggcgcactcgtcttctccaccaacacttagatgtttttctccgatctcagctgcatcaccttcgccgccgcgcctagggcatcccttgctccgacgccgcagtcatctcgctgtcgtcgtcgtcgccgtcgacgccgccgccgcattgggcggctgcaaatatttcttgtatgaacagatggctgatcgcgatgacaaacatatactatacgatacaatcgcagagggaagcagccagtactggaacgaagaagaggggaacgaggatccaaaccagtacctgaacgaggaggggaacgtggagagtgatgcagaggggactgaggaggggaacaaggaggcggaggctagtggaagtcaatcctccgctggacagaagagggcacgcggacaacgaggtgccgcgaagaagatagagggtcggcacatcataactgaggtggacgaagacgatcgacctagtgccccggctgaagcagccaagaattttgtacgacacagcggttgggttgtgaaggataacgtgcctgtcagcaaggtgtactggcgcagaacaagggcacgcggggattatgacagctttgtcccggaatcagagaaagatacgatgtggatcacaatgctcgagacgttcacgctccctgcgggtacggagaacatagtgaaacagtggactcttaagaaaatggtagaacaattccagagcttcaagggagatctctacaagaaatacatcctgaaggggctgacaccgaacttcgacgtattcccgaagctaagggatcattgggacgagttcgtcgcttacaagacagggcaacaagggcaagcgatgatggacagaaacaaagaaaatgccgccaagaagtaccatcacctcttggggtcagatggctatagcgtcacaatgctgaagtgggaggagatggaggccggcttgattgagaggggtgtcgaaccggccaccgctaaatggctggatcgatcgaagttctggtactatgctcacggtggaacgcttaaccctgttgacggctccctggtgttcagcgatcagatacgcgaggctgccagtcgactaacggatgtagtggaagcctcttgtcagggcacgttctgacccaacagagataaggacgagctgtcactcgccctgcagactcccgagcatcctggacgaacacgagggaaaggcgtggttccttggaagattggattcaaggaggacatccacacgtacaagagtcggatgaggagcaagagagataccgaggcgaagattgcagatcttgagtacagggtatcgagctacgagctcagcatgcaagaggaggtggcaaggaaggtggatgaacgcatggccgcacatcggtgccatgatgcccagccatacattcctcctgtaatggtcagcccctcaggcaatcgtagcagctgcgcctcaacggggcaggtaggatcacagagcatggacgccgtgcaaactcaggacgaaaccacttgccccattgatgagatcacgcagcggacaccatgtgagctgcatattcccttcaagaacttatcaatcaaggttacgtcgggaatgaccatcccaacggacccttcagggacttaccactgcaggctgattccagcaggatactcgagggtcgaagttgaactggtggaagccgcgtacgaggaactcgagttggactaccctggaggagacggtaagacgtatctacgcgacacaagccacgccattatactatggcgcaagcgctacatcatcctccctgggcgacaagcggtgtctcgtgcaccatcccctccggctccaccatctcctcctcaggctcctgcaccgtctcctactgatcaggctcctgcaccgtctcctcctcaggctcctgcatcgacttctcctcaggctcctctgccatgtcctccggcaccttccaagtcaagaactcaccaagctccaccgcttgcccgcacaagggcaacgaagaaggcgaaagttgacgctgccaagaacaaggagccaccgtacgattgcacgcaagaggagctcgacgcttacgtggcagaataagtgaagaggcaattgaagcctcagagtccaaaaaagaagattcctatagacccgagtgccaagaagttcttccagaagatgtcgggaccactcaaggaggccttaaagctaacggactatgagcgaacacttaggaaagcacattctggaaagtccaaaaaagtccctcagcttggagagcaaccaaaccaggaggtcgagttgttagtgaccgggcaagaatttggaataaaaaaattcatttctgacaccgggctaactagggctcagttgcttaaagcgcaccaatccctaaggcagaagtgagacaccagtacgaactcggtaaaccgcttgtcaagcctgatcagctacagtccctaccgacacagacgtaccaattccatgaacggtacatagagatgagcaccagcggtagggagattatcggagcgaggatcaagaacgccgacttcttacaaggagaagatgttctctggatcaattttaaggatatctacgaactataccagctagacgtcgtcgacgtctctcttctgagcgcatggattttaatggagattcaatgggcccgacggcggggggttttcgatactggattcatcgaccctcggaatgtaaacgtcgaaatggtcaccaagtatccacaggccactgaggaaaatctcgtccatctcctcaaggagcagcatttcaagacgttcatactactgccgtacaacacagcattccactgggtccttttactcttcgacttggaggcatgcagagttaatgtctatgactcaatgaataaagatgagtctacttttgaccaggtttttgaacttatagatagggcttggtatcggttctgtcatttggtccgcggcacttggaaagaaaaacttagccagaggttcaaatttccagttattcacatgagggacaacctcacacacaaggactttatcacggcggttcaagaacaactcatgggattcatcaaagaacaagtccttaatcccgagggtgaattctactacgacaaatctacaattcataagacgttatcttctgagataacgactacgtcgaagtc

SEQ ID NO: 16566 - DNA, 6138 bp, Oryza sativa
  Clone ID: PAT_MRT4530_22301C.1
atggatcggcaatggatgtacgctgaccggcggtccaaagagtttattgacggcgtgcactattttttgagagtggccgaagctaacaggcaaaggggttttatttgttgtccatgcaataagtgtaagaatcggaaggagtattctgcatccaggactattcatttccacttgtttgagtcggggttcatgccaagctataattgttggacatcccacggagagcaaggtgttgaaatggaagaagatgaagtggaagacgacaatattccggactttgctcagtatgttggatttgaaggaaatcaaacgggcgaggaggaaatagctgctgatggtaacgacgttgcggatgatcttggtcagatgttgcaggacgccagggaggactgcgaaagtgaaaaggaggcccataaattggacaagatgttggaggaccatagaacttcgttgtacccaggttgcgagcaggggcacaaaaagttggataccactctggagttgttgcaatggaaggcaaaaaatggggttagtgacaaggcatttggcgatttattgaaactcgtcaagaacattcttccggggggaaacaaattgcccgagacaacgtacgaggctaagaagatagtctgcccgttaggactggaagttcataagattcacgcatgtccgaacgattgtatcctatatcgcggtgaggagtatgagaacctagaagcatgccctgtttgcaaagcactacgatacaagattagacgggacgatccaggagaagttgacgggcagctaacaaagaagagaattcctgctaaggtgatgtggtatttccctataataccacggctaaggcgtttgttcaggaacaaggggaatgctagaatgttgcgatggcacgctgaagagcgtcaacaggacgggatgctgagacaccccgccgatggttcgcagtggcgaaacatcgacagaaaatttaaagaatttggaaaggatgcacgaaacatacggtttggccccaagcaacctggtaacgacatcgacgtgtacctaagaccactggtcgaagatcttaaacagttgtggaagaaggaaggtgtccccgtgtgggacgaggacaaacatgaggagtttaacctacgagcgctgctgttcgtaaccatcaatgattggcctgcacttagcaacctatccggacagtccaacaaggggtacaaggctagcactcactgtatggatgaaacagaaagtacatatcttaagcactgtaggaaggttgtatacatgggtcatcgtcgattccttgcagcaaaccacccggtacggaagaaaggcaagcacttcgaacataaggccgaccaccgtacgaagcctaaacatcacagcgggaaaacagtgtttgctatggttaaagatcttaaagagttaccatattatgaattcttggacgtacgccacgcaatcgacgtgatgcacctcactaagaacctttgtgtaaaccttcttggcttcctaggtgtatacagaaagtcgaaagatacactggaagcacgtaatgatctgaagcatatggaacaacgcggcgaccttcaccaggaaccaaaggagaaaggaagccattacttgagtccagccagctacactcttagcaaggcagagaaggaaagtatgtttgaatgcttggagagcataaaggtaccgtctggatactccacgaatatcaagcgaataataagcacgaaggagaagaagttcacaaacctaaagtctcatgactatcacgtgttgatgacacaactgctaccagttgtaataaggggtatccttccagacaatgtccgggcaacaataacaaagctatgtgcattcatgaatgcaatttcgcagaaggtcatcgatccggatagattagaagcccttcagaatgaagtggtgcaatgtctcgtcagttttgagttgatatttccaccttcatttttcaatataatgacgcatctgctttgtcaccttgtgaaagagatccgtattctcgggcctatgtacctacacaacatgtttcctttcgagaggtacatgggcgttctgaagaagtatgttcgtaaccgtgctcgtccagaggcaagcatcgccaagggttatggaacagaggaggtcatcgaattttgcgtagaatttatcgaagaccttcgcccaatcggggtacctgaatcacgccatgaagggagactacggggaaagggaactctcggaaggaaagcaataacgacggtagacaacaatttattccgtaaagcccatttcactgttctgcaacactcttcattggtagctccttacatcgaggagcacttggctctagttcgcgccaggaacatcggtaagtccgatgcatggattacacggcatcacattgatactttccccgcgtggctacgacaacatctcatgggtaacgagtcgatcaaccaacaacttgccttcctggcgaggggaccgtctgggtcgatcgcgacattccagggatatgagatcaatgggtacacattctacacgagagcccaagacatgaagagcacgaaccaaaacagcgctgttcgtgtcgatgccatgggacacgatggaacaactgccacgtattacggtgccatcgaggacatatgggaacttgactatggtcctctcaaggttcctctgttccggtgccaatgggttaggttgactggtggaggcgtaatgattgatgacagtgggatgacaactgttgaccttaacaaggttggatactcggacgaaccttttgtccttgccaatgatgtaacgcaagtttttttcgtgaaggacatgtctagcaaaggaaagaagggcagagggcctgatgagcctaagcgtcaagtggttctcccaggcaaaagaaaaatcgtcggagttgaggacaagactgacgaggattacgatcagttggatgggcaaccccctttcacggtgacgattgaccctagcatcctcctatcaaatgaagacaccccttactcacgcggcgatcacaaggagggaacaatagtgaggagaaagtacgtgcggtcaaccgtcactgccgatatggctgaccgtgatgaggaacagatattgtacgatacaatcgcggagggaagcagccagtactggaatgaagaagaggggaacgaggatccaaaccagtacttgaacgaggaagggaatgtggagagggatgcggaggggaaccagcaggggcacgtggaaagggatgtggaggggaaccaggaggaggaggctagtggtagtcaaccctccgttggacagaagagggcacgcgggcaacgaggtgcagcgaagaagcttgagggtcgacacatcataacggaagtggaagaagatggacgtcctagtgccccggccgaagccgccaagaactatgtacgtcacagcagttgggttgtgcgggataacgtgcctgtcagtacggtgtactggcgaagaacaagggcacgcggagatcatgagagctttgtcccagattcggagaaagagatgctgtggaccacaatgctcgagacattcacccttcctgcgggtacagaggacaaagtgaaaaggtggactctgaagaaaatggcagaacagtttcagagcttcaagggagatctgtaccagaagtatatactgaaggggcagacaccgaacttcgacacattcccaaagctaagggatcactgggacgagttcgttgcatataagacaggtgaacaagggcaggcgatgatggaaagaaacaaagaaaatgccaccaagaagatgtaccatcaccacttggggtcaggaggctatagcgtcacgatgccgaagtgggagcagatggaggctagcttgattgagaggggtatcgaaccggcaacagccaattggccagaacgatcgaagttctggtactatgctcacggtggaacgctcaacccagctgatggctcactggtcttcggcgatcagatacgagaggctgcgcgacgactaacagatgcagtggaagcctcctctcagggcacgttccgaccagacagagatagggacgagctgacactcgccctgcagactccagagcatccaggacgaacacgagggaaaggggtgattccttggaagattggtttcaaggaggacatccacacgtacaggagttggatgaggagcaagagagataccgaggcgaagattgcagacctagagttccgggtatcgagctacgaactcaacatgcaagaggaggtggcaaggaaggttgatgaacgcatggccgcacatcggtcccatgatccccagccgaccattcctcctgcaatggtgagcccgtcaagaaaccgtagcagctgcgcctcaacagggcaggtggcgtcgggcatggccatcccaacggacccttcaggtacttaccactgcaggccgattccagcaggctactcgaaggtcgaagttgagttggtccaaggcgcgtacgaggacctcgagctggattaccctggaggagacggtgagacgcatctacgagacacatgccatgccattattctatggcgcaggcggtacatcatcctccctgggcgacaagcggcgtctcgtgcaccatctcctccggctccgccatctcctcctcaggatcctgcaccgtctcctcctcatgctccgccagcaccgtctccacctcaggctccagcatcgactcctcttcaggatcctacaccgactcctcctcgtgctcctacacctactcccccgcaagctcctcttccggcaccttcaaagtcaagggcccccccatctccaccgcctgcccacacaaaggcaacgaagaaggcgaaagttgacgccgccaagaacaaggacccggggtacgattgcacgcaagaggagcttgacgcttacgttgcatcagaagtcaagagacaattcaagcctcgaagtccagaaaagaagattcctatagaccccagtgtcaggaacttcttcaggggtatgtctgcatctgtcaaggaggccatcaagctatcggactatgagcgaacgctgaagaaagcatcttctggaaagtccaaaccagtccctcagcttggagagcaaccaaaccaggagatcgagccgttggtgaccggtaaagaaatgacgatagaacaatttattactgacaccggtctaactacggatcaattgctaggagtcacaccaatcgaaaaggcggaagtgaaatacatgtacgaactcggtaaaccgcttgtcaagcctgagctgctgcagtccctacccacacaaatgtacaagttccatcagctgtacatggagatgagcgccaccggtagagagatgatcggagcgaggatcagggacacggacttcttgcaaggagatgacattctctggatcaatttcaggggaatctacgaactataccagctggacgccctcgacgtctctattatgagttgctggattttaatggagattcaaagggcccgacggcggagggttttcgatactggattcatcgaccctcggaaagtaaacgtcacaatgctcgaccaatatccacaagaaacagaggacaatctcgtccatctcctgaaggcgcagcattacaagacgttcatactgttgccatacaacacagaattccactgggtgcttttactcttcgacctggaggcctgcaccgtcaacgtatatgactcaatggataaaaaagagtctacgtttgacaaggttttcgaacttatagacagggcttggtatcggttccgtcatttggtccgcggcaaatggagagaaagacttaggcggaagttcaaatttccttgcgcaaagcaaaagcagggaactaacttgtgcggctattacgtgtgcgagtattgccactgccttgcagaccaaatcatcaccacaagagagctcgattttattcgcatgagggataacctgaccacacacaaggaatttatcgtggcggttcaagaacaactcatgggattcatcaacgaagaaatccttgatcccaagggtgaattctactacgacggaaacacaattcaccggtccttagcttctgagctagcagcgagtactactacgtcgaaatcgtag

SEQ ID NO: 16567 - DNA, 1525 bp, Oryza sativa
  Clone ID: PAT_MRT4530_22302C.1
gatactctggtccatcctcgtcgagtcctcccacggcggcggccatcaccaccaccacccgcagcctccgctcctgttccggcgccggcgccgtcggccaggcccagatccgctcccccttcgcgaaacgaaggggcgatcacctgctggattgctgctccaagcggccgccgccgtcttgggggtcaaagcgagcgcgctcggccgctccaagctgccgcccgccgccgcacggctcctcccccgttcccgatccttcctggtaaccccccccccccccctcctcccccgccgccgacgtggccgactacgtccgcttccgcgccgtgtgcggcccgtggcgccgctgctgcgccagcccgcgcggcggcggcggcccggttgatggccgcttcctcccccggcggtggatcatgatcgacaaggcgtcgcccgccgccgccaccgcttcctcaacgtcgccaccggcgagtgcatccacacggacctgccggagctcgcggagcacgacctgctcatggtgacccccgagggcctcctcctgctgttccgcaaggacgccccccacggcgtccgcctgctgaacccgctcacccgccacctcaccgagctcccgccgttcgccacggtcctgacgccggagcagcgcaacgacccccaccagggactgcgcggggaggatttccgggtcagaggcgtcgccattgccgactcctcctccacctccacctccaccgtggtagcgtatctcaaatcccccacgacactcgccgtcgccaagcccggcgacaagcgttgtaccaagatagacttcgaccacaggctcatgctctactcgacggtgcccttcgccggccgcatctaccatgccaccgccattggtatcatgacaccggagaccaccaccagctccgcctctccctcgactccgcctcaacgcgcctcctcgctaccgtggcctcccgctcgccgtcgcctctgacctcgcacgacctccaccgcctcctccccctccgcactctccccctcccctcccgcctccccactccgtccaccccgccgcaccgacactctcctccgccatggatcgcgacccctccgtctccgacgaggacgacgacctcgagaccctcgtcccgcagaaccacgtcaagccgccctcctcctccttccacgtcgccggcctccgcgccgcggtccctccctccgccgcctcgctcggccgcgtcctctggtcccgccgctacctcctcctcttcgtcgccctccccgtcctcttcctcgtgctcttcgtatcccttggcggcgcgtcctcccttcgcctgcccgcctccatccgcctcccctccgccgccgctcccgccgccgaccccgcggcgtcccggatgcgcgacgccgagctccgcgcgctctacctcctccgctcgcagcgctcgggcctcctcgccctcttcaaccacccaacccgccgcgtgctcccctcccctctaccgctcgcccaccggcccatcccactcacacgggc

SEQ ID NO: 16568 - DNA, 666 bp, Oryza sativa
  Clone ID: PAT_MRT4530_22303C.1
atattattattttttttttttttttattggctaactgcgcaaatcgaatccgtattaatgggcatatcaaattataatctgtcttgtgtatgtacagttcttataaaatgccactttcttttgggaggttggtttacacactgatctggagtagtagtatactggaagatcagatagctgctgcacactacgttcatgacaaaacagatcagatttcagaactccagaaaactggcaggcacacgcctcattggtctaccccctctgcctctctctctctttatctctctgcacaattatgctctgtattcgtctccacaatcgcctattatatccataagatttcttcccttattcgatgcttcagtgatgctgttcatgtcctcttcatctaattcaagcgagaagatggcgttggtgtcttttatgtgttcagagagtcccagtctcacacccaccattgaacccgcaacagatgtctggttcagtatgtatctcacagcaacagttgatatagaaacaccatgcttcaatgatactttcttcaacgtctgaagcaaagcctggaacaggctccagccaccccaggcatccaccatccgcttatacttctgcaaagatggggtattcagaggaggtccagcaaaaggtatagatacatgggtg

SEQ ID NO: 16569 - DNA, 5409 bp, Oryza sativa
  Clone ID: PAT_MRT4530_22304C.1
atggatcggcaatggatgtacgctgaccggtggtccaaagagtttattgacggcgtgcattattttttgagagtggccgaagctaacaggcaaaagggttttatttgttgtccatgcaataagtgtaagaatcagaaggagtattctgcatccaggactattcattttcacttgtttgagtcggggttcatgccaagctataattgttggacatcccacggagagtaaggtgttgaaatggaagaagatgaagtggaagacgacaatattccggactttgctcagtacgctggatttgaaggaaatcaaacgggcgaggaggaaagggatgctgatggtaacaacgttgcggatgatcttggtcagatgttgcaggacgccaaggaggattacgaaagtgaaaagggggcccataaattggacaagatgttagaggaccacagaacgttgttgtacccaggttgcgagcaggggcacaaaaagttggataccactctggagttcttgcaatggaaggaaaaaaatggtgttagtgacaaggcatttggcgatttattgaaactcgtcaagaacattcttccggagggaaacaagttgcccgagacaacatacgaggctaagaagatagtgtgccctctaggactggaagttcagaagattcacgcatgtccgaatgattgtatcctatatcgcggtgaggagtgcgagaacctagaagcatgccctgtttgcaaagcgctacgatacaagattagacgagatgatacaggagaagttgacaggcagctaacgaagaagagaattcctgctaaggtgatgtggtatttccctataataccacggctaaggtgtttgttcaagaacaaggggaacgctagaatgatgcggtggcacgctgaagagcgtcaacaggacgggatgctgagacaccccgccgatggttcgcagtggcgaaacatcgacagaaaatttaaagactttggaaaggacgcacgaaacatacggtttggtttaagtacggatggcatgaatccttttggagagatgagcagcggccatagcacttggcccgttacgatgtgtatctacaacctccccccatggctatgcatgaagaggaagtacataatgatgccgattataattcaaggccccaagcaacctggtaacgacatcgatgtgtacctaagaccactggtcgaagattttaaactgttgtggaagaaggaaggtgtctccgtgtgggatgaggacaaataggaggagtttaacctacgagcgctgctgttcgtaaccatcaacgattggcctgcacttagcaacctatccgggcagtccaacaaggggtacaaggcttgcactcactgtatggatgaaacagaaagtgtatatgaaaagtcgaaagatacactagaagcacgtaatgatctgaagcatatggaacaacgcggtgaccttcacccggaaccaaaggagaaaggaagccattacttgagtccagccagctacactcttagcaaggcagagaagggaagtatgtttgaatgcttggagagcatcaaggtaccgtctggatactccacgaatataaagcgaataataagcacgaaggagaagaagttcacaaatctaaagtctcatgactatcacgtgttgatgacacagctgctaccagttgtaataaggggtatcctcccagataatgtccgggcaacaataacaaagctatgtgctttcatgaacacaatttcgcagaaggtcatcgatcctgatagattagaagccctgcagaatgatgtgaggtacatgggcgttctgaagaagtatgttcgtaaccgtgctcgtccagaggcaagcattgccaaggggtatggaacataggaggtcattgaattctgcgtagaatttatcgaagcccttcgcccaatcggggtacctgaatcacgccatgaagggagactacggggaaaggggacttttggaaggaaagcaataatgacggtagacaacaatttattccgtaaagcccatttcacggttctgcaacaatcttcattggtggctccctacatcgaagagcacttggctctaattcgcgccaaaaacatcggtaagtccgatgcatggattacaaggcatcacattgatactttctccacgtggctgcgacaacatctcatgggtaacgagacgattaaccaacaactggccttcctggcgaggggaccatctagctcgatcgcgacattccagggatatgaaatcaatgggtacacattctacacgagggcccaagacatgaagagcacgaaccagaacagtgctgttcgtatcgatgccatgggacacgatggtacgactgacacgtattacggtgccatcgaggacatatgggaacttgactatggacctctcaaggtccctctgttccggtgccaatgggttaggttgactggtggaggcgtaacgattgatgacagtgggatgacaacggttgaccttaacaaggttggatactcggacgaaccttttgtccttgccaatgatgtaacccaagttttttacatcaagaacatgtctagcaaaggaaaaaagggcaaagtgactgacgagtcgaagcgccacgtggttctcccgggaaaaagaaaaatcgtcggagtagaggacaagactgactaggattacgattagtttgatgggcaaccccctttcacgatgacaattgaccctagcatcctcctatcaaatgaagacaccccttactcacgtagcgatcacaaggaaggaacaatatacttgaacgaggaggggaacgtggagagggatgcggaggggaacgaggaggggaacgatgcaaaggaggctagtggaagtcagccctctgctggacagaagagggcacgcggacaacgaggtgccgcgaagaagatagagggtcggcacatcataactgaggtggacgaagacgactgacctagtgcaccggcagaagcagccaagaattttgtacgccacagcggttgggttgtgagggacaacgtgcctgtcagcacggtgtactggcgcagaacaagggcacgcggggatgatgacagctttgtcccgaactcagagaaagagatgttgtggaccacaatgctcgagacgttcacgctacccgcgggtacggataacttagtgaaatagtggactctgaagaaaatggcagaacagttccagagcttcaagggagatctctacaagaaatacatcctgaagggactaacaccgaacttcgacgtattcccaaagctaagggatcattgggacgagttcgttgcttacaagacagggcaacaagggcaagcgatgatggccagaaacaaagaaaatgctgccaagaagaagtaccatcaccacttggggtcaggcggatatagcgtcgcgaagccgaagtgggaggagatggaggctagcttgcttgagaggggtatcgaaccggccaccgctaattggccggatcgatcgaagttctggtactatgctcacggtggaacgcttaacccagttgatggctcccttgtcttaagcgatcagatacgcgaggctgccagtcgactaacagacgcagtggtagcctcttctcagggcacattccgacccgatagagagaaggatgagctgagtcggatgaggaacaagagagataccgaggcgaagattgcagatcttgagtatagggtatcgagctacgagcttagcatgcaagaggaggtggcaaggaaggtggatgaacgtatggccgcacatcggtcccaagatccccagccgtacattcatcctgtaatggtcagcccatcaggcaatcgtagcagctgcgcctcaaccgggcaggtggcatcgggaatggccatcccaacggacccttccgggacttaccactgcaggccgattccagcaggatactcgagggtcgaagttgagctagtggaagccgcgtacgaggacctcgagttggactacccaggaggggacggtgagacgcatctacgagacacaagccacgccatcatactatggcgcaagcggtacatcatccttcctgggcgacaagtggcatttcgtgcaccatctcctccggctccgccatctcctccggctcctccgccacctcctgctgcaccatctcctccggctcctccgcctcctccgcctccaccgtgtccgcctgcacctcccaagacaaggtctcgccaagctccaccgcctgcccgcacaagggcaacgaagaaggcaaaagttgacgccaccaaaaacaaggagccaccatacgattgcagtcaagaggagcttgatgcttatgtggcaggagaggtgaagaggcaactcaagcctcagagtcctgaaaagaggatacctattgacccgagcgtgaagaacttcttcaagggaatgtccaaaacaaacaaggaggcgttacagatatcggactatgaccgaacacttcagagagcctatcacaagaagtccaaaccagtccctcagcttggagaacaaccaaaccaagaggtcgagtcgttggtgaccggtgaagattttggcataacggatttcattgcagacaccggtctatctgtggattagttggttggagccgcaccaatcccgaaggcggaagtggcatacaagtttgaactcggtaaaccgcttgtcaaacctgaacagctggagtccctaccgacacagatgtacaaattccatgaacggtacatggaaatgagcgccaacggtagagagatgtttggggcgaggatcagaaaccccgacttcttgcaaggagacgatgttctctggatccatttcaaagatctcttcgatctgtaccagttggacgccctcgacgtctctctcctgagcgcatggattttaatggagattcaaagggcccgacggcggagggtctacgatactgggttcatcgaccctcggaaaatcaacaccgaaatgatcgacaagtacgagaaagacacagaggacaatctcgtccatctcctaacgcagcagcatttcaagacgtacatactactgccgtacaacacagaagtcactgtgtacgactcaatgaataaataggagaagatttttgacaaggtcttcaaactgatagacagggcttgggatcggttccgtcaattggtccgcgggacttggaaagaaaaacttggacggaggtttcattttccacgtattcacatgagggataatctcccacacaaggattttatcatggctgttcaagaacaactgatgagattcatcaacgaagaagtccttaatcccgacggtgaattctactacgacggatcatcaacaattcataacgtcggtccttcctcttctgacataacgccggcgtcgaagtcgaagtcg

SEQ ID NO: 16570 - DNA, 240 bp, Oryza sativa
  Clone ID: PAT_MRT4530_22305C.1
ataggcggtctcttaggagaaatattacatttgttttcccttgtctacattaaaaccgacagaatttcaccgttcttttgccccacacttagcgggcccccaaaaaaattgacttgtcccccttagggggggaagagaggcccaaaaaccttccccccatttgcccggtgggttccccccctccaacgatgcacacacgcctttttaccacacggggtggggctttggcaaggaaaattt

SEQ ID NO: 16571 - DNA, 3788 bp, Oryza sativa
  Clone ID: PAT_MRT4530_22306C.1
atggctgaccgtgatgaggaacagatattgtacgatacaatcgcggagggaagcagccagtactggaatgaagaagaggggaacgaggatccaaaccagtacttgaacgaggaagggaacgtggagagggatgcggaggggaaccaacaggggcacgtggaaagggatgtggaggggaaccaggaggaggaggctagtggtagtcaaccctccattggacagaagagggcacgcgggcaacgaggtgcagcgaagaagcttgagggtcggcacatcataacggaagtggaagaagatggacgtcctagtgccccggccgaagccgccaagaactatgtacgtcacagcggttgggttgtgcgggataacgtgcctgtcagtacggtgtactggcgaagaacaagggcaagcggagatcatgagagctttgtcccagattcggagaaagagatgctgtggaccacaatgctcgagacattcacccttcctgcgggtacagaggacaaagtgaaaaggtggactctgaagaaaatggcagaacagtttcagagcttcaagggagatctgtaccagaagtatatactgaaggggcagacaccgaagttcgacacattcccaaagctaagggatcactgggacgagttcgttgcatataagacaggtgaacaagggcaggcgatgatggaaagaaacaaagaaaatgccgccaagaagaagtaccatcaccacttggggtcaggaggctatagcgtcgcgatgccgaagtgggagcagatggaggctagcttgattgagaggggtatcgaaccggcaacagccaattggccggaacgatcgaagttctggtactatgctcacggtggaacgctcaacccagctgatggctcactggtcttcggctataagatacaagaggctgcgcgacaactaacagatgcagtggaagcctcctctcagggcacgttccgaccagacagagatagggacgagctgacactcgccctgcagactccagagcatccaggacgaactcgagggaaaggggtgattccttggaagattggtttcaaggaggacatccacacgtacaggagtcggatgaggagcaagagagataccgaggcaaagattgcagacctagagttccgggtatcgagctacgaactcaacatgcaagaggaggtggcaaggaaggttgatgaacgcatggccgcacatcggtcccatgatccccagccgaccattcctcctgcaatggtgagcccgtcaggaaaccgtagcagctgcgcctcaacggggcaggtaggatcacagagcatggacgccatgcaaacacaggacgaatcgacctgtcccgttgatgacatcactcagcggacaccatgtgagctgcatattcctttcaagaacttatcaataaaggtggcgtcgggcatggccatcccaacggacccttcaggtacttaccactgcaggccgattccagcaggatactccaaggtcgaagttgagttggtcgaaggcgcgtacgaggacctcgagctggattaccctggaggagacggtgagacgcatctacgaaacacatgccatgccattattatatggcgcaggcggtacatcatcctccctgggcgacaagcggcgtctcgtgcaccatctcctctggctccgccatctcctcctcaggatcctgcaccgtctcctcctcatgctccgccagcaccgtctccacctcaggctccagcatcgactcctcaggatcctgcaccgactcctcctcgtgctgctacacctactcccccgcaagctcctcttccggcaccttcaaagtcaagggcccccccagctccaccgcttgcccacacaagggcaacaaagaaggcgaaagttgacgccgccaagaacaaggacccggggggtatgtctgcatctgtcaaggaggccatcaagctatcggactatgagcgaacgctgaagaaagcatcttctggaaagtccaaaccagtccctcagcttggagagcaaccaaaccaggagatcgagccgttggtgaccggtaaagaaatgacgatagaacaatttattactgacaccggtctaactacggatcaattgctaggagtcgcaccaatcgaaaagtcggaagtgaaatacatgtacgaactcggtaaaccgcttgtcaagcctgagctgctgcagtccctacccacacaaatgtacaagttccatcagctgtacatggagatgagcgccaccggtagagagatgatcggagcgaggatcagggacacggacttcttgcaaggagatgacattctctggatcaatttcaggggaatctacgaactataccagctggacgccctcgacgactctattatgagttgctggattttaatggagattcaaagggcccgacggcggagggttttcgatactggattcatcgactctcggaaagtaaacgtcgcaatgctcgaccaatatccacaagaaacagaggacaatctcgtccatctcctgaaggcgcagcattacaagacgttcatactgttgccatacaacacagaattccactgggtgcttttactcatcgacctggaggcctgcaccgtcaacgtatatgactcaatggataaaaaagagtctacgtttgacaaggttttcgaacttatagacagggcttggtatcggttccgtcatttggtccgcggcaaatggagagaaagacttaggcggaagttcaaatttccttttattcgcatgagggataacctgaccacacacaaggaatttatcgcggcggttcaagaacaactcatgggattcatcaacgaagaaatccttgatcccaagggtgaattctactacgacggaaacacaattcaccggggggttacgaaccgggactacaaagggtttctccaccagtggtggccgcacctccacctcgtctacgacgtgctcaccgccgcggtcgccgccgcggacgccaggacgctccgtaaccacgtcgaccggagcttcctcgccggcctcgtggcgctcttcgcctccgaggacccgcgcgagcgcgaccgcctcaagaccgtctaccaccagctctactccaagctcaccgtcgagcgcgcgtttaggcagcgcaccatggccgtcgcgctgctccggttcgtctacggcacgtccccggcggagcccgagcgccactgcggcgtcggcgagctgcttgagatctgcggcagcatcatcaatggcttcgtcgtgccgctcaaggaggagcaccgggcgttcatggcgcgcgtgctgctgccgctacaccggacgcggtgggtgcacacatgccaccgccagctctcctactacggcagcatccgtcgtccgggacatcttcctccgccactggccggcgaccaactgccagaaggaggtgctgcttaccgacgagctcgaggagatcgtcgagatcctcgaccagcaccacttcgacaagctcgtcgtccctgtctgctcccggattgcccgctgcgtcagcagtgcttgcttccaacatccgggttcgcgctggatccgagcaccggccgggcctagagggggagtggcggcgggactgcttggagacggggcaggcggtggcgaggccgtcgccgctccagccctcgcccgcaccctgccgtcgccactccagcccccggctgccgccgccaccgatgtagcagtgcggctcctcttccacctcgccccctcttgttgtgaccgtgttcgactgcgcatcagacttttcgacg

SEQ ID NO: 16572 - DNA, 1092 bp, Oryza sativa
  Clone ID: PAT_MRT4530_22307C.1
atggcgtcctccaccttggctctcgacttcctccgccgcctactctgcgcgcacgccgccgccggcaatgcgggcggcggcgacgacgacggtgcggtggtggtgcaggtgcaggtacagcaggaggaggggatgagcccctgcgtcgtggccaggctgatggggctcgacgcaatgccgccgccgccgccggagacggagtgccagccgctgcggcggcagcggcggaggaggaggagcaggtcggtgagctcggcggaggggtggccgccgccgccggcgccgtacttgaaggaggagggcgacgagttcatcgtcctcagcttcagcccggatgccgcttctcgccacgacaatggcgaacccgacggcaagagcggacacgtcggagccaagaaacagagcggtggctgcccccgccgcaagctgcactacggcggcgacgacgacgacgacgaggcgcagcatcccggccacggcaggaggagagcggcggcgacagagcgcggcatgccgagctcaagcccggtgtcggtgctgcacgcgcagcactcgtcgtcgtcgtcgtcgtcgtcgtccacgacgacgaccaccaccaccaccaccacgtcgtcgtgctcgccgaatcatcatcactgtaaatctctacaaattgcagaagaaattcggcttgcaaacaatcaacagagctcaaggaggaagctgcaacccgatttcaacgacgatctcgacaacccgttatctcctgaaactagcagttgccatgtctcaaaatgttcagaaagtgggatgaggaacaggagtgtgatgaacaagtctgaggtgttcatcccgggtgtgtctggcactctgcagttcatctgcaggctggttgaggaagatctgaacagcgtgatatggttaactagtgattctgagaacattgcagctgacatggtctctgagattcttgatcagctcacatctgagacagctgatgaactcatgcagacaggttctgaaactgtacattcttcacctggccgcctcatctccatgaaacatccaagcttcagggttgatcgaaatatgcaggcaattcgaagcaactga

SEQ ID NO: 16573 - DNA, 6174 bp, Oryza sativa
  Clone ID: PAT_MRT4530_22308C.1
atggctgaccgcgatgaggaacagatattgtacgatacaatcgcggagggaagcagccagtactggaataaagaagaggggaacgaggatccaaaccagtacttgaacgaggaagggaacgtggagagggatgcggaggggaaccagcaggggcacgtggaaagggatgtggaggggaaccaggaggaggaggctagtggtagtcaaccctccgttggacagaagagggcacgcgggcaacgaggtgcagcgaagaagcttgagggtcggcacatcataacggaagtggaagaagatggacgtcctagtgccccggccgaagccgccaagaactatcgaagaacaagggcacgcggagatcatgagagctttgtcccagattcggagaaagagatgctgtggaccacaatgctcgagacattcacccttcctgcgggtacagaggacaaagtgaaaaggtggactctgaagaaaatggcagaacagtttcagagcttcaagggagatctgtaccagaagtatatactgaaggggcagacaccgaacttcgacacattcccaaagctaagggatcactgggacgagttcgttgcatataagacaggtgaacaagggaaggcgatgatggaaagaaacaaagaaaatgccgccaagaagaagtaccatcaccacttggggtcaggaggctatagcgtcgcgatgccgaagtgggagcagatggaggctagcttgattgagaggggcatcgaaccggcaacagccaattggccggaacgatcgaagttctggtactatgctcacggtggaacgctcaacccaactgatggctcactggtcttcggctatcagatacaagaggctgcgcgacgactaacagatgcagtggaggcctcctctcagggcacgttccgaccagacagagatagggacgagctgacactcgccctgcagactccagagcatccaggacgaactcgagggaaaggggtgattccttggaagattggtttcaaggaggacatccacacgtacaggagtcggatgaggagcaagagagataccgaggcgaagattgcagacctagagttccgggtatcgagctacgaactcaacatgcaagaggaggttgcaaggaaggttgatgaacgcatggccgcacatcggtcccatgatccccagccgaccattcctcctgcaatggtgagcccgtcaggaaaccgtagcagctgcgcctcaacggggcaggtaggatcacagagcatggacgccatgcaaacacaggacgaatcgacctgtcccgttgatgacatcactcagcggacaccatgtgagctgcatattcctttcaagaacttatcaataaaggtggcgtcgggcatggccatcccaacggacccttcaggtacttaccactgcaggccgattccagcaggatactccaaggtcgaagttgagttggtcgaaggcgcgtacgaggacctcgagctggattaccctggaggagacggtgagacgcatctacgagacacatgccatgccattattctatggcgcaggcggtacatcatcctccctgggcgacaagcggcgtctcgtgcaccatctcctccggctccgccatctcctcctcaggatcctgcaccgtctcctcctcatgctccgccagcaccgtctccacctcaggctccagcatcgactcctcaggatcctgcaccgactcctcctcgtgctcctacacctactcccccgcaagctcctcttccggcaccttcaaagtcaagggcccccccagctccaccgcttgcccacacaagggcaacaaagatggcgaaagttgacgccgccaagaacaaggacccggggtacgattgcacgcaagaggagcttgacgcttacgttgcatcagaagtcaagagacaattcaagcctcgaagtccagaaaagaagattcctatagaccccagtgtcaggaacttcttcaggggtatgtctgcatctgtcaaggaggccatcaagctatcggactatgagcgaacgctgaagaaagcatcttctggaaagtccaaaccagtccctcagcttggagagcaaccaaaccaggagatcgagccgttggtgaccggtaaagaaatgacgatagaacaatttattactaacaccggtctaactacggatcaattgctaggagtcgcaccaatcgaaaaggcggaagtgaaatacatgtacgaactcggtaaaccgcttgtcaagcctgagctgctgcagtccctacccacacaaatgtacaagttccatcagctgtacatggagatgagcgccaccggtagagagatgatcggagcgaggatcagggacacggacttcttgcaaggagatgacattctctggatcaatttcaggggaatctacgaactataccagctggacgccctcgacgtctgtattatgagttgctggattttaatggagattcaaagggcccgacggcggagggttttcgatactggattcatcgaccctcggaaagtaaacgtcgcaatgctcgaccaatatccacaagaaacagaggacaatctcgtccatctcctgaaggcgcagcattacaagacgttcatactgttgccatacaacacagaattccactgggtgcttttactcatcgacctggaggcctgcaccgtcaacgtatatgactcaatggataaaaaagagtctacgtttgacaaggttttcgaacttatagacagggcttggtatcggttccgtcatttggtccgcggcaaatggagagaaagacttaggcggaagttcaaatttccttgcgcaaagcaaaagcagggaactaacttgtgcggctattacgtgtgcgagtattgccactgccttgcagaccaaatcatcaccacaaaagagctcgattttattcgcatgagggataacctgaccacacacaaggaatttatcgcggcggttcaagaacaactcatgggattcatcaacgaagaaatccttgatcccaagggtgaattctactacgacggaaacacaattcaccgagaggaggccttcagggccagagaaattgctgtaaagaagctggaaaatagagactttgtcggcgcccgcaagatcgcgattaaagctcaaaggctttttcctgagcttgagaacatctcccagctgttaattatctgtgaagttctttcttcagctgaggcaaagatctctggagagttggattggtatggtgttcttcaggtggataaaatggcagacgaaacagtaataagaaggcaatacaacatactttcgtatcggcttcatcctgataataatactctgtttggtgccgaagccgcattcaggtttgtttcagaagctcatgcaatattgagtgatcatgtgaagaggtctctgtatgacaccaaaagacagtgtgcttcaagagaagtggccaaggaggctacacagccaccaaacaagactgattcaaacataagcaatgtggctggatccatgacaccatctgcttctgtgcttgtattctggacaatatgtccgcattgtcagaagcgatttctgtactaccaacggaactttttggcccgctgcagtgattgtggtaagaggttcttcgcaatcaaactgcatgagcagtctgttccctcgagaatcctatcaactgctgcaaaaaagtctcagctttcaacgtcagaaatgttatcatttcaacgaagtagtgtccccaatcagcatcaacaaggtaaatgcttggttacaagaagcgaggccattcaattttcagcaatgaagcaaactaaatctcacatctgcgcttttgacaatgataagcctggaactttggtaccaaagagttctgatcttaagtccatctcagttaagaatttgactagagaaagtgcacctgcagaggaaaatgctgcagaatcatccagtcttcagatattgggtaagagaaagctttatgttacctctgacagcagccatggtatgaactccaatattaagaggcaaaggaagtatacttgtccatccgattctgattcgagtaatgagcagatatgtaatgatgatgttgctgttcctgataatcaatctactggacagaatgttcccatcgaagtggacagtgaagaggaaagaaatgcaagacatggaagcaaccaacaaacttgtaagaaaaatgttactgatactgcttctcagaagtctgtcaattcggtgattgcctacccttatccagactttgatttttgcaagtccagagatgctgaagaaactgatgaatccataaaacaatatggctgggctggtgacatggcaggtaaaggcctggtgacaagaagtgacagagttcaattttcagaaattagccaagctaaatctcatgtgcctcctgctgacaacgatatacccggaactttggtaccaaggagtcctgatccaaactccaccgctgtgcagaatttgactggagaaagtgtatcagcagagacaaatgctccaggatcatccagtcttcagatattgggtcggagaaagctctgtgatagctctgacagcaaccgtgctatgaactctaatattgagaggaaaatgaagtataattctccatctgatgctgattggagtactgagcaaacatgtaatgatgatgttgctgttactgagaatcaatttgccaaacaacatgtccccaccgaagtggacagtgaagaggaaggaaatgaaaaacatggagacaatcaacaaagtcataggaaagatgatactgatacttcttctcagaattctgccaatcctgtgattgcctactcttctacagacttctttgattttgacaagtccagagatgtgtcccaaattgcggttgatcagatctgggcattcacttggctggtgcacaacacagtaaatgaacaaaattccaaatcgaccaatgaaaaactgccatttgcttgtgggaacttctgcttaggagaaacagatgtattgcacaatccatcaaggtacttatcccacagtgtttcatcgacaggcaaaaatgggaactcctgtgatataaatcctaacatgggtgaggtgtgggctctttataaaggatggagcatgcagttgagctctcatgcagatagatatcaatcatatgggtatgatattgtgcaagtcctttctagtggctcaatggatgatggtgtcacggtttcaccgctggtcaggattgcagggtttgtcagtctatttgcgaaagtgaagaacgagtcatgtttttcgatatcatcatgtgaggtacttcatttttctcacagtatccccttctataaaacgaacggaaatgaaagggtaggtgttgcagaagggttcctggaactagacactgcagctcttccaagtgacttggattcggcatttacttccattactcttgaatcctacatggctcttgacaacaaaacaaatatcgaattaatcagttatgtatgccctgattcagaattctacaacttcgaacaagaccgctcgcatgataagtttgaagctggccagatttgggctctttacagtgatactgataaatttcccaacttctatggttgggtaagcaaagttgagatggaaccgttcaacgtggatttggcctggcttgaggcttgccctcaacgagcgcaggagaagctgtggttggagcatgatgtacctgtgagctgtggtacatttgaaatccaaaacatggaaacaaagtttaatgaaaattgtgcattctcccatttaatagaaaccaaacaaattggagcaaagtgcaaggttcaaattcatccaaagataggtgaggtctgggccatctacaagaactggtcaaataagtgggttccttcccgcagcactcgtggtactaagtatgctattggcaagatcgtcgactccactgaagctttcacattatttggttatctgactaaagttgatggttacatctctgtgttcaagcctgatgtacgaaggggaattctgaagattcctgtgaaagagaacctgaggttttctcatcgaataccatcgttttgtctcacaaaagagaaaggtggaaagctccatgactgctatgagctcgacccagctgctgttcctgatgtttttctacacaagaattga

SEQ ID NO: 16574 - DNA, 6318 bp, Oryza sativa
  Clone ID: PAT_MRT4530_22309C.1
atggatcggcaatggatgtacgctgatcggcggtccaaagagtttattgacggcgtgcattattttttgagagtggctgaagctaacacgcataagggttttatttgttgtccatgcaataagtgtaagaatcagaaggagtattctgcatccaggactattcatttccacttgtttgagtcgagcttcatgccaagctataactgttggacatcccatggagagcaaggggttgaaatagaagaagatgaagtggaagacgacaatattccgaactttgctcagtacgctagatttgaaggaaatcaaacgggcgaggagaaaagggatgctgatggtaatgacgttgcgaatgatcttggtcagatgttgcaggacgccaaggaggactgcaaaagtgaaaagggggcccataaattggacgagatgttagaggaccacagaacgtcgttgtacccaggttgcgagcaggggcacaaaaagatggataccactctggagttcttgcaatggaaggcaaaaaatggtgttagtgacaaagcatttggcgatttattgagactcgtcaagaacattcttccggagggaaacaaattgtccgagacaacgtacgaggctaagaagatagtcttccctctaggactggaagttcagaagattcacgcatgtccgaatgattgtatcctatatcgcggtgaggagtacgagaacctagaagcatgccctgtttgcaaagcactacgatacatgattagacgagacgatccaggagaagttcacggccagctaacaaagaagagaattcctgctaaggtgatgtggtatttccctataataccacggctaaggcgtttgttcaggaacaaggggaatgctagaatgatgcgatggcacgctgaagagcgtcaacaagacgggatgctgagacaccccgccgatggttcgcagtggcgaaacatcgacaggaaatttaaagactttggaaaggacgcacgaaacatatggtttggtttaagtacggatggcatgaatccttttggagagatgagtagctgccatagcacttggcccgttacgacgtgtatctacaacctccccccttggctatgcatgaagaggaagtacataatgatgccgattattattcaaggccccaagcaacctggtaacgacatcgatgtgtagctaagaccactggttgaagatcttaaactgttgtggaaaaagtaacctacgagcgctgcagttcgtaaccatcaacgattggcctgcatttagcaacctttccggtcagtccaacaaggggtataaggcttgcactcactgtatggatgaaacagaaagtacgtatcttaagcactgtaggaaggttgtgtatgtgggtcatcgtcgattccttgctgcaaaccacccggtacggaaaaaaggcaagcactttgaacataaggcggaccaccgtacgaagcctaaacattgcagcgggaaaacaatgtttgctatggttaaagatcttaaattagtgttcagaaaggggcctggaagccagcctatagatagcgaagatggtcacgcggcgatgtggaaaaaaaactctatattttgggagttaccctattgggaattcttggacgtccgccacgcaatcgacgtgatgcaccatactaagaacctttgcgtaaaccttcttggcttcctaggtgtatatggaaagtcgaaagatacactggaagcacgtaatgatctgaagcatatggaacaatgcagcgaccttcacccggaaccaaaggagaaaggaagccattacttgagtccagccagctacactcttagcaaggcagagaaggaaagtatgtttgaatgcttggagagcataaaggtaccgtctggatactccacgaatatcaagcgaataataagcacgaaggagaagaagttcacaaacctaaagtctcatgattgtcacgtgttgatgacacaactgctaccagttgtaataaggggtatccttccagacaatgtccggacaataataacaaagctatgtgctttcatgaacgcaatttcgcagatggttatcgatccggatagattagaagcccttcagaatgatgtggtgcaatgtcttgtcagttttgagttgatatttctaccttcatttttcaatataatgacgcatctgctttgtcaccttgtcaaagagatcagtattctcgggcctgtgtacctacacaacatgtttcctttcgagaggtacatgggcattctgaagaagtatgttcataaccgtgctcgtccagaggcaagcatcgccaaggggtatggaacagaggaggtcatcgaattttgcgtagaatttattgaagaccttcacccaatcagggtacctgaatcacggcatgaagggagactacggggaaagggaactctcggaaggaaagcaataatgacggtatacagcaatttattccgtaaagcccatttcacggttctgcaacaatcttcattggtagctccttacatcgaggagcacttggctctagttcgcgccagaaacatcggtaagtccgatgcatggattacacggcatcacattgatactttccccgcgtggctacgacaacatctcatgggtaacgagacgatcaaccaacaattggccttcctagcgaggggaccatctggctcaatcgcgacattccagggatatgagatcaatgggtacacattctacacgagagcccaagacatgaagagcacaaaccaaaacagcgttgttcgtatcgatgccatgggacacaatggaataactggcacgtattacggttccatcgaggacatatgggaacttgactatggtcctctcaaggtccctatgttccggtgccaatgggttaggttgactagtggaggcgtaacgattgatgacagtgggatgacaacggttgaccttaacaaggttggatactcggacgaaccttttgtccttgccaatgatgtaacgcaagtcttttacgtgaaggacatgtctagcaaaagaaataagggcagagggcctgatgagccgaagagtcacgtggttctcccagcgcgctctcgtcttctccaccaatacttagaagttttttccctgatcgatctctcttggcttctccttcgccgccactgcctagggcatccccgcgccgacgccgccgtcgtatctcgccgtcgtctcgcgggcgtcgtcgtcgccgcctctgccgccgccgtatctctggggtgagagcccaactatttcttgtatgaacagatggctgatcgcgatgaggaacagatactgtacgatacaatcgcagagggaagcagccagtactggaacgaagaagaggggaacaaagatccaaaccagtacttgaacgaggaagggaacgtggagagggatgcggaggggaacgaggaggaggaggctagtggaagtcaaccctccgctggacagaagagggcacgcgggcaacgaggtgccgcgaataagctagagggtcggcacatcataacagaagtggatgaagacggctgacctagtgcctcggcagaagcagccaagaactacgtacgacacagcggttgggttgtgcgggataacgtgcctgtcagtacggtgtactggcgcagaacaagagcacgcggagatcatgagagctttgtcccagattcggagaaagagatgctatggaccacaatgttcaagacattcacccttctcgcgggtacagaggacaaagtgaaaaggtggactctaaagaaaatggcagaatagtttcagagcttcaagggagatctgtaccaaaaatatatcctgaaggggcagacaccgaacttcgacacattcccaaagctaagggatcactgggatgagtacgttgcatataagacaggtcaacaagggtaggcgatgatggaaagaaacaaagaaaatgccgccaagaagaagtaccatcatcacttggggtcaggcggctatagcgtcgcgatgccgaagtgggaggagatggaggcaagcttgcttgagaggggtatcgaaccggccaccgctaaatggccggatcgatcgaagttctagtactatgctcacggtggaactctcaacccagttgatggctccctagtcttcagcgatcagatacgcgaggctgcgcgtcgactaacggacgcagtggaagcctcttctcagggcacgttccgacccgacagagagaaggacgagctgtcacttgccctgcagactccagagcatccaggacgaacacgagggaaaggggtgattccttgaaagattggattcaaggaagacatccacacgtacaggagtcggatgaggagcaagagagataccgaggcgaagattgcagatcttgagtacagggtatcgagctacgagctcagcatgcaagaggaggtggcaaggaaggttgatgaacgcatggccgcacatcggtcccatgatccccagccgaccattcctcctgcgatggtgagcccttcaggcaatcgtagcagctgcgcctcaacaaggcaggtagaatcacagagcatggacgccatgcaaacccaggacgaaaccacctgccctgttgatgacatcactcagcggacaccatgtgagctgcatattcccttcaagaacttatcaataaaggtggcgtcgggtatggccatcccaacggacccttcggggacttaccactgcaggccgattctagcaggatactccaaggtcgaagttgagttggtgaaaggcgcgtacgaggacctcgagttggattaccctggaggagacggtgagacgcatctacgagacacaagccacgccattatactatggcgcaagcgatacatcatcctccctgggcgacaagcggcgtctcgtgcaccatctcctccggctctgccatatcctcctcaggctcctgcaccgtctcctcctcatgctccagcactgtctccacctcaggctcctgcactgactcctcctcaggctcctacaccgactcctccgcaagctccttgtccggcaccttccaagtcaagggccccccaagctccaccgcctgcccccacaagggcaacgaagaaggcgaaagttgacgccgcaaaaaacaaggacccagggtacgattgcacgcaagaggagcttgacgcttatgtggcatcagaagtcaggagataattgaagcctcgaagtctagaaaagaagattcctatagacccgagtgttaggaacttcttcaggggtatgtctgcacctgccaaggaggccataaagcaatcggactatgagcgaacacttaagaaagcatcttctggaaaagtccaaaccagtccctcagcttggagagcaaccaaaccaggagatcgagccgttggtgaccggtgaagattttggaatacaagaatttattaatgacaccaggctaactacggatcaattgctacgaggcgcaccaatcgaaaaggcggaagtgaaatacatgtacgaactcggtaaaccgcttgtcaagcctgagcagttgcagtccctacccacacaaatgtacaaattccatcaactgtacatggagatgagcgccaccggtagagagatgatcggagcgaggatcaaggacacagacttcttgcaaggagatgatattctctagatcaatttcaagggtatctacgaactataccagctggacgccctcgacgtatctattatgagttgctggattttaatggagattcaaagggcccgacggcggggggttttcgatactggattcatcgaccctcggaaagtaaacgtcgcaatgctcgaccagtatccacaagccacagaggacaatctcgtccatctcctgaaggcgcagcattacaagacgttcatactattgccgtacaacacagaattccactgggtccttttactcttcgacttggaggcctgcactgtcaacgtaaatgactcaatggataaaaaagagtctacgtttgacaaagttttcgaacttatagacagcgcttggtatcggttccgtcatttggtccgtggcaaatggagagaaaagtttaattttccttttattcacatgagggataacctcacacacaaggaatttatcgcggcggttcaagaacaactgatgggatttatcaacgaacaaatccttaatcccaagggtgaattctactacaacagaaatacaattcatatgtccttagcttctgagataacgactagtactacgtcgaaattggaggaatcggtagcatctcttcataaacgacactcgattgatcggt

SEQ ID NO: 16575 - DNA, 6444 bp, Oryza sativa
  Clone ID: PAT_MRT4530_22310C.1
atggatcggcaatggatgtacgctgaccggcggtccaaagagtttattgacggcgtgcactattttttgagagtggccgaagctaacaggcaaagaggttttatttgttgtccatgcaataagtgtaagaatcagaaggagtattctgcatccaggactattcatttccacttgtttgagtcggggttcatgccaagctataattgttggacatcccacggagagcaaggtgttgaaatggaagaagatgaagtggaagacgacaatattccggactttgctcagtatgttggatttgaaggaaatcaaacggacgaggaggaaatagctgctgatggtaacgacgttgcggatgatcttggtcagatgttgcaggacgccagggaagactgcgaaagtgaaaaggaggcccataaattggacaagatgttggaggaccacagaacttcgttgtacccaggttgcgagcaggggcacaaaaagttggataccactctggagttgttgcaatggaaggcaaaaaatggggttagtgacaaggcatttggcgatttattgaaactcgtcaagaacattcttccggggggaaacaaattgcccgagacaacgtacgaggctaagaagatagtctgcccgttaggactggaagttcataagattcacgcatgtccgaacgattgtatcctatatcgcggtgaggagtatgagaacctagaagcatgccctgtttgcaaagcactacgatacaagattagacgggacgatcctggagaagttgacgggcagctaacaaagaagagaattcctgctaaggtgatgtggtatttccctataataccacggctaaggcgtttgttcaggaacaaggggaatgctagaatgttgcgatggcacgctgaagagcgtcaacaggacgggatgctgagacaccccgccgatggttcgcagtggcgaaacatcgacagaaaatttaaagaatttggaaaggacgcacgaaacatacggtttggtttgagtacggatggcatgaatccttttggagagatgagcagcggccatagcacttggcccgttacgatgtgtatctacaacctccccccctggctatgcatgaagaggatgtacataatgatgccgattattattcaaggccccaagcaacctggtaacgacatcgacgtgtacctaagaccactggtcgaagatcttaaacaattgtggaagaagaaaggtgtccccgtgtgggacgaggacaaacaggaggagtttaacctacgagcgctgctgttcgtaaccatcaacgattggcctgcacttagcaacctatccggacagtccaacaaggggtacaaggcttgcactcactgtatggatgaaacagaaagtacgtatcttaagcactgtaggaaggttgtatacatgggtcatcgtcgattccttgcagcaaaccacccggtacggaagaaaggcaagcacttcgaacataaggtcgaccaccgtacgaagcctaaacatcgcagcgggaaaacagtgtttgctatggttaaagatcttaaagtagtgttcggaaaggggcctggaagccagcatatagagagcgaagatggtcacgcggcgatgtggaaaaagaactctatattttgggagttaccatattgggaattcttggacgtacgccacgcaatcgacgtgatgcacctcactaagaacctttgcgtaaaccttcttgacttcctaggtgtatacggaaagtcgaaagatacactggaagcacgtaatgatctgaagcatatggaacaacgcggcgaccttcacccggaaccaaaggagaaaggaagccattacttgagtccagccagctacactcatagcaaggcagagaaggaaagtatgtttgaatgcttggagagcataaaggtaccgtctggatactccacgaatatcaagcgaataataagcacgaaggagaagaagttcacaaacctaaagtctcatgactgtcacgtgttgatgacacaactgctaccagttgtaataaggggtatccttccagacaatgtccgggcaacaataacaaagctatgtgcattcatgaacgcaatttcgcagaaggtcatcgatccggatagattagaagcccttcagaatgaagtggtgcaatgtctcgtcagttttgagttgatatttccaccttcatttttcaatataatgacgcatctgctttgtcaccttgtgaaagagatccgtattctcgggcctatgtacctacacaacatgtttcctttcgagaggtacatgggcgttctgaagaagtatgttcgtaaccgtgctcgtccagaggcaagcatcgccaagggttatggaacagaggaggtcatcgaattttgcgtagaatttatcgaagaccttcgcccaatcggggtacctgaatcacgccatgaagggagactacggggaaagggaactctcagaaggaaagcaataatgacggtagacaacaatttattctgtaaagcccatttcactgttctgcaacactcttcattggtagctccttacatcgaggagcacttggctctagttcgcgccaggaacatcggtaagtccgatgcatggattacacggcatcacattgatacttttcccgcgtggctacgacaacatctcatgggtaacgagtcgatcaaccaacaacttgccttcctagcgaggggaccgtctaggtcgatcgcgacattccagggatatgagatcaatgggtacacattctacacgagagtccaagacatgaagagcacgaaccaaaacagcgctgttcgtgtcgatgccatgggacacgatggaacaactgccacgtattacggtgccatcgaggacatatgggaacttgactatggtcctctcaaggttcctctgttccggtgccaatgggttaggttgactggtggaggcgtaatgattgatgacagtgggatgacaactgttgaccttaacaaggttggatactcggacgaaccttttgtccttgccaatgatgtaacgcaagtctttttcgtgaaggacatgtctagcaaaggaaagaagggcagagggcctgatgagcctaagcgtcaagtggttctcccaggcaaaagaaaaatcgtcggagttgaggacaagactgacgaggattacgatcagttggatgggcaaccccctttcacggtgacgattgaccctagcatcctcctatcaaatgaagacaccccttactcacgcagcgatcacaaggagggaacaatagtgaggagaaaatgtttcttgtatcaacagatggctgaccgcgatgaggaacagatattgtacgatacaatcgcggagggaagcaaccagtactggaatgaagaagaggggaacgaggatccaaaccagtacttgaacgaggaagggaacgggcacgtggaaagggatgtggaggggaaccaggaggaggaggctagtggtagtcaaccctccgttggacagaagagggcacgcgggcaacgaggtgcagcgaagaagcttgagggtcggcacatcataacggaagtggaagaagatggacgtcctagtgccccggccgaagccgccaagaactatgtacgtcacagcggttgggttgtgcgggataatgtgcctgtcagtacggtgtactggcgaagaataagggcacgcggagatcatgagagctttgtcccagattcggagaaagagatgctgtggaccacaatgctcgagacattcacccttcctgcgggtacagaggacaaagtgaaaaggtggactctgaagaaaatggcagaacagtttcagagcttcaagggagatctgtaccagaagtatatactgaaggggcagacaccgaacttcgacacattcccaaagctaagggatcactgggacgagttcgttgcatataagacaggtgaacaagggaaggcgatgatggaaagaaacaaagaaaatgccgccaagaagaagtaccatcaccacttggggtcaggaggctatagcgtcgcgatgccgaagtgggagcagatggaggctagcttgattgagaggggtatcgaaccggcaacagccaattggccggaacgatcgaagttctggtactatgctcacggtggaacgctcaacccagctgatggctcactggtcttcggctatcagatacaagaggctgcgcgacgactaacagatgcagtggaagcctcctctcagggcacgttccgaccagacagagatagggacgagctgacactcgccctgcagactccagagcatccaggacgaactcgagggaaaggggtgattccttggaagattggtttcaaggaggacatccacacgtacaggagtcggatgaggagcaagagagataccgaggcgaagattgcagacctagagttccgggtatcgagctacgaactcaacatgcaagaggaggtggcaaggaaggttgatgaacgcatggccgcacatcggtcccatgatccccagccgaccattcctcctgcaatggtgagcccgtcaggaaaccgtagcagctgcgcctcaacggggcaggtaggatcacagagcatggacgccatgcaaacacaggacgaatcgacctgtcccgttgatgacatcactcagcggacaccatgtgagctgcatattcctttgaagaacttatcaataaaggtggcgtcgggcatggccatcccaacggacccttcaggtacttaccactgcaggccgattccagcaggatactccaaggtcgaagttgagttggtcgagggcgcgtacgaggacctcgagctggattaccctggaggagacggtgagatgcatctacgagacacatgccatgccattattctatggcgcaggcggtacatcatcctccctgggcgacaagcggcgtctcgtgcaccatctcctccggctccgccatctcctcctcaggatcctgcaccgtctcctcctcatgctccgccagcaccgtctccacctcaggctccagcatctactcctcaggatcctgcaccgactcctcctcgtgctcctacacctactcccccgcaagctcctcttccggcaccttcaaagtcaagggcccccccagctccaccgcttgcccacataagggcaacaaagaaggcgaaagttgacgccgccaagaacaaggacccggggtacgattgcacgcaagaggagcttgacgcttacgttgcatcagaagtcaagagacaattcaagcctcgaagtccagaaaagaagattcctatagaccccagtgtcaggaacttcttcaggggtatgtctgcatctgtcaaggaggccatcaagctatcggactatgagcgaacgctgaagaaagcatcttctggaaagtccaaaccagtccctcagcttggagagcaaccaaaccaggagatcgagccgttggtgaccggtaaagaaatgacgatagaacaatttattactgacaccggtctaactacggatcaattgctaggagtcgcaccaatcgaaaaggcggaagtgaaatacatgtacgaactcggtaaaccgcttgtcaagcctgagctgctgcagtccctacccacacaaatgtacaagttccatcagctgtacatggagatgagcgccaccggtagagagatgatcggagcgaggatcagggacacggacttcttgcaaggagatgacattctctggatcaatttcaggggaatctacgaactataccagctggacgccctcgacgtctctattatgagttgctggattttaatggagattcaaagggcccgacggcggagggttttcgatactggattcatcgaccctcggaaagtaaacgtcgcaatgctcgaccaatatccacaagaaacagaggacaatctcatccatctcctgaaggcgcagcattacaagacgttcatactgttgccatacaacacagaattccactgggtgtttttactcatcgacctggaggcctgcaccgtcaacgtatatgactcaatggataaaaaagagtctacgtttgacaaggttttcgaacttatagacagggcttggtatcggttccgtcatttggtccgcggcaaatggagagaaagacttaggcggaagttcaaatttccttgcgcaaagcaaaagcagggaactaacttgtgcggctattacatgtgcgagtattgccactgccttgcagaccaaatcatcaccacaagagagctcgattttattcgcatgagggataacctgaccacacacaaggaatttatcgcggcggttcaagaacaactcatgggattcatcaacgaagaaatccttgatcccaagggtgaattctactacgacggaaacacaattcaccggtccttagcttctgagctagcagcgagtactactacgtcgaaatcgtag

SEQ ID NO: 16576 - DNA, 424 bp, Oryza sativa
  unsure (1)..(424): unsure at all n locations
  Clone ID: PAT_MRT4530_22311C.1
cactatatgtatatataataaataaatanataatcttttgtnctaaatttgtatttagaaggtcgaacaagaaaagctaacaatatgtggaagtactgtcgaagggcaatttgtaaagctgatgtagaggtggagtggtagattcgccaccactaccaccattgcctttttaaaaaagcattatggatattggtaagatttagtttgaatattttgcagattttagttatctccgtaaaccaactgtgataggtttgagtttaggatttgtatgtgatacatgaaaataaatcagtagatttgtcctgagaggtactttcagaatattagtcttgttagggttaccaaatatattttncaataaaaataggctttcnaagctggtattttgaaggctctacaaatgctgaaatgacttgtgact

SEQ ID NO: 16577 - DNA, 400 bp, Oryza sativa
  Clone ID: PAT_MRT4530_22312C.1
cacgcgtccggtcgtcggcgctggcgtaagtgcgaaggtcggtgctggcgtcggtgcgaaggttagtgctggcgccggcgttggatcacgcgctgtagttggcgcgaacgtctgtgctggcgtcggagcaaaggttggtgctggagtatgcgttggagctggagctggcgtcattgctaaggtcgacgctggcgtcggggttggcgctggtgctgtcgttccttagaaggtctgtgctggtgttggtgctaaaggcgacgctgacgtttgtgctgatgttcgcgccgacgatgccactggagctcgcgttggtattgtggctaacgtgcgtgcttgcgcattctcgactacttgggctggtgctggctactattgctcacgcaagagaacacgctggtgc

SEQ ID NO: 16578 - DNA, 2404 bp, Oryza sativa
  Clone ID: PAT_MRT4530_22313C.1
tcatgtccacgtaaatgccatcgggctcgccacgctgtgcttgccgtccgaccagacgaggcggccgaatccggcggtgcccgacggctgcgacttcgccgtgaagctcaccgtgtagctcttcttctcgccggccgacgtgaacgccagctcggtcggctccacggccacggccacgccaggcatggcggccgcgctcaccttgtacgtccccgccgcgccgacgttggtgagcgtgcgcctgtgcgtcaccgtcgtcgccgccgcgccggagctctccgccgcctggctgctcgccgtcgagtacgccacggcgaaggacgggtagttgaggttgtacacggagtaggccttgccctccgtgcagccgtagctcttgctccgcgccacggcggcgatcatggtggacgtgtagttgagcgcgcagaggaagtcgacgtagtcggcggtgccgaggtcgtagacgagtcccgggtcgacggcgctggccgggtcgacgtggccggcgccgtagtcgaacggcgtggcgggcgcgccggtcgccgcgtcgaggagcgggttggcgtcgccggcgccggcgtaggtggagtaggcggtggtcatgagcgccgaccgcacggcggcggggctccactccgggtgcgcgctcctcagcagcgcggcgaggccgctcacgtgcgggcacgacatggacgtgccggagatgatgttgaaggcgacgcggcgcgtgtcggcggcgatccccgtcggcccagccttgccggtccacgccgcgaggatgttcacccccggcgcgatgatgtccggcttcaggatctccggcgtcagcatgttgggcccgcgcgacgagaacgcggcgaccaccggcgacgggcgcacgtccacctgcgtcccggcgaccacgatggtggccgtggggctcgggtcggaggccacgtacgcctttattgcggcgccttccttcgcgcccacgcccgcggcggggaggaggtgcgcgtcggcgacgagctcctcgccgttggtggcggtgttggagagcaccatgcccgcgccgccggcgtcgcgcacgacgaagcccttctggacccgcgcgctgacgccgcggtcgcagacgacgatcttgccggccaccttctccggcgtgagcgtccctggcatgcagaggttgcccgccgtggagttggaggcgttggcggcgtagacgatggggagcggggtggaggggagggccttcccggcgtagagggagacgccggtgtagttcttgccgttgccaagcgagacgtacgccgggaagtcgcggtcgagcgtccccgcgcccacggtggtgatccatggcgccacgttcgacagcgtggacgtgccgggcccggcgttccccgcggagcaggacaccaggacgttctgctccatcgccgcgaacgcgccgatcgcgacgctgtcgcgcgcgtagtcggcggcgccgccaccgagcgagagcgagagcacgccgcacccgtcggcgacggcggcgtccatcccggcgaggatgtcggagctgaagcagccgccgagccagcacaccttgtacacggcgacgcgcgccctgggcgccatgccgcgcgccgtgccggacgcgaaccccagcaggctggcgccggagacggcggcgccggcggccgtggacgacgtgtgcgtgccgtgtccgtcgtcgtcgcgcggggagcgcgactccctggtggtgtccatgggccccatcgccgcctcgtacccacggttgaagaaccgcgcgccgacgagcttccggttgcaggcggaggagttgaaccccgtcccggccatgcactcccccttccaccacgacggcacctcgccgaggcccgcgtcgtcgtagctcctgctctccggccacaccccggtgtcgagcaccccgacgacgacgtcccccgccgtgccggactgcgggaacagcccgtcgttcccggcgatccccaggaactccggcgtccgcgtggtgtgcagctcgtacctcgcctccgggttgacggcgagcaccccgtccatggccgccatgtcgcgcgcctcccgcgcggtgagccgcgcggagaagccgtggagcacggtgtcgtacgcgtacagcatcttcccggcgccggacacggagcgcagcgacgcgccgtaccactcgccgtggtcgtccccgtactccgccggcatcgccgacttcgccatgtggacgatgtacgtcgccctctcctccgccgccacaaccaccgccgccatcgccaccgccaccgccaccagcagcagcctcatcatggccgtcgtagttcatctgcaagcgcacggatataccattgtagcatttcacccgagagtattccaagggtatcgtatttattttatcccgtggaagatcatgtag

SEQ ID NO: 16579 - DNA, 1571 bp, Oryza sativa
  Clone ID: PAT_MRT4530_22314C.1
ctcaacaaataaaccacgctctcgcgacgaatcgccccgggcggcaccgctcaccaacacttaccctccccccccccccccaggggcaaacccgcgccccaccaaacctcacccactggctcacgcggtcccccccatccaacttttcctcaccccactgcttttaccccccgccacaccccctttacgtcagaggagactcatccggtgtcatccgtacccacctcgccttccgcctcgcctcccacctctgcctctgcctgcgccgcccgcgcgacctccgccgccgctacggcgcctgggccctcgccgctgttcgtgccgaccgcggacgcctacgcggcggcggcggcgcggtggatcgggcacggcgcggtgtgcatgcccaacctctggtctttttggctgtcttgaagtttcttctttaacgttagatgaaagccaaataactgatattccacaagtttctcaattagaaaataatgctttagtacaagatttattttttgagaaggaaattaaagatacgatttttcaaatggaacataataaagctctgagtccggatgaattcctagctgagttttatcaggttttttggaattttattaagtccgatttggttgatttatttaatgattttcatagtggtagtttacctctttagtctcttaactttggttactgcccaagtgcaaagaggccttgaaaattcaaacatataggcctatttgtttacttaatgtcttaatgttagtttgaaaatttttactacagttgctacaaatagaatttctggagtggctcagaaggttattagtcccacacagacagcttttatacaagggaggaatattagggaggtgattgttattcttcatgaaacgatacatgaattgcatcagaaaaaaaagagtggtgtacttttaaaaactgattttgagaaagcttatgataaagtaaaatggtcttttgttcaacaaactttgaaaatgaagggtttctctcaaaaatggtgtgattgtattgcttttttttatccaaggtggacatgttggcattaaagtgaatgatcaagtggaaccaaaatttcaaacctataagggatttaggcaacgggacccgttatctccaattccttttaatatagttgttgatatgttagctatattaatagagcaaaagatgatggttaaatttctagagtggtcccacatctggttgatgatggtttgtctatcttataatatgctgatgatactatcatttttttagagcatgatttacagaaagctaaaaatatgaaattgattttaattgcttttgaaaaattatctggcctgaagacaaattttcacaagaaaagcttaataataaagattggctaacaattgaacaaagaattgagagaaaacttagtagttggaaggcttttgaaaaggaaatatcttggtattaaatctataactcaagttgacaggaaacaaggggatttccattttttgtcaggtttgatgaaggttaaaagttcttttctaaatatgggttactggattattaataatggtgaa

SEQ ID NO: 16580 - DNA, 178 bp, Oryza sativa
  Clone ID: PAT_MRT4530_22315C.1
ccgcgtgaagcgcagatccagcaagaaggaagaagagggttctggcggttcaggggctgaagagagcatagaacggcagggggattccgtcgtcgaggttgtcgcccccttcttccaatctgccaccccacctcatggccggccaagaaaggagagcaggggcgccggcaccatctag

SEQ ID NO: 16581 - DNA, 784 bp, Oryza sativa
  Clone ID: PAT_MRT4530_22316C.1
gctccaccgccgggctcgcccgccgtccgctccgcccacagcccgccaccgctctgctgccgcgctcagccatcgcggctgcgcccgccgccagcctgaaggagaagagagaggagagaagagaaaagagaagagaagaagaaaagagaagaaaaaaatatgtgcagctgtagagatgaccaagacagacagtgaactggaggatatggctgtcagacttctggcgtgcgatggcatagacagaaaggagtaaaccagggccttccaacacggctgtaattgcttcaactgtaacggttgctgggtctctggcgacatatctggagtcgcctttgctgtactctttccaaacttcatcggagaaagaggggttttgattgctgaagaggactttaaccttcttctcatgagctcgcgaaggcataggttccctccattatgtgagcgagaccggtgaaggcccaccagcacatgagcaaacgatcggtcttggagtcttggacagcttgcctccacatcttccagagatgaaccagatggcaaagacgataaagatggaggttcccaggtagggcacgatgatttccccttgtgacaatcacagaggaacgaagtttggaaggtgcaggtctaacggtgtgtaaaggtgagggtgccgcattccttcccgccggccagcaggaacctcgaggtggccgacgccacgttaatggtgctccccatccccgccgccgccgccgccgcgatcgtgtggatttcgaattccaagtgaagtgggagcagg

SEQ ID NO: 16582 - DNA, 623 bp, Oryza sativa
  Clone ID: PAT_MRT4530_22317C.1
gagtgggcagacaaaatagctgaaattatacgggaacagtttggacttaagcctaagaaaaacatacatacatgtatcggtaaccatattttgattggtttgacagggttccattaccaaaccgatacaggcacccaatttctcaaagttttcaagacaagagaatattttaatagttgagcatgttagtcgattcctgacacaatgtggtgagacatcatcttaagaggctatgagagttaggttctttccatatcactttctagatcgatgttcatttggttttcttctttactagctaattatatcaggagttgggccaatctagtaaaatagtttcataattacttcttttctggaatccaaaagatgaagctttcagattttacatcgtttagacaatggtcagatgaatcagtccctgattaaatccaaaggtttagagatgtttgaagccaatgttatagtttcaatttgagcattgcacatttagaatttttggcttttcaaggattgcttggggctaactaaggacattttcttcacaagattatgtatgtttttctcacttgatgtaaaaggtgttggttcatgaacaccagaagtaagaggagagaaggggg

SEQ ID NO: 16583 - DNA, 267 bp, Oryza sativa
  Clone ID: PAT_MRT4530_22318C.1
gaactaattaatattaattgatcttaataatagggaacaatagtggtagtaatacatcgagcctttcggggggggggggggggggaaaagaaaaaaaaaaaaccggacggggggcaagggatccatttggacaatttttctatttttattgaaaaccaatttttttttaaggcttgtttaaaaaaaggggtgttggggaaaaaaagggggatttttccaaaaaccccgtttaaggggccaattttctttgaaaaacaccctttgggg

SEQ ID NO: 16584 - DNA, 305 bp, Oryza sativa
  Clone ID: PAT_MRT4530_22319C.1
atggagtaatggccttccatgctatatctggaacatatagataacaagtcttgttttgagtgcaaaaactgtcactttgatgtgatcttttgaatttgtacaaattttaatagtgggcaggtttaagcaaggatgaagctgctgctgtgtaagcaaaggagggtaacttctgaatatgactctgaacgttggtgtgaagtggcaacaacgggaagatggcgagtatgttgaagaaaactgatgcagtcatgaagatcatatctaatcttttctactaccagttgttgtcgatggcttcttcattc

SEQ ID NO: 16585 - DNA, 1662 bp, Oryza sativa
  Clone ID: PAT_MRT4530_2231C.1
aggagtaaatgtctcttagtggataccaatggctgcgggtgaagaggtttcgcccacccatgcccatcgccatagtgccaataaggcacggcgtcaagggctgcgggcgaagaggtttcgccacacgccgtttcgccaacccttgcccttcgccatagtgccaataaggcacggcgtcaagggctacgggcgaagaggtttcgccacacgccttgcccttcgccatagtgccaataaggcacagcgtcaagggctgcaggagaagaggtttcgccacacccacgcccttcgccatagtgccaaaaaggcacgtttcgccacacccacgcccttcgccatagtaccaataaggtatggcgtcaagggctgggggcgaaaataagttgcttccaagttggagggctacaaggccaccctagcctctgaagcctttcgccacacccacagtacccgcaaggtacagcgacaagggctgggggcgaaaatgagttgcttccaagctggggggctacgaggccaccctagcctttggagcctttcgccatacccatgccctttgccatagtaccaataagttcattaccgacaataacaagcggtttgactccgagaagtccaaggaaatgtgcgaggggctaaaacttgaaattaagtttgcatcggttgcacccccgcagacgaaaggggcagccgaaagggacgaatggcaaaaccctagcagcacggcggcccgcacggtgggaggggcggtggccggcgacgcccgcgcgacgggaggggcggtggccggcggcccttgctgcgggggcgcggtggccggcgacacccacgcggcgggaggggcggtggcggcgtgacagcggctggacgacggcgcgcgcggccggaaagcgggacgatggcgcgcgcggcgggagggcggtggccggcgacgcccacgcggcgggagggcggctggacgacggcgtcccgcgcggcgtgacggcggctggacggcggtgcgcgcggccggaggggcggtggccggcggcacgcgcggtgggaggacggtggccggcggcgcaacgcgcggcgtgacggcggctggacgacggcgcgcgcggccggaggggcggtggctggacgacggcgcgcgcggccggcggcccgtgcggcgggggcgcggtggtcggccgcctgcgcggcgggaggggcggtggccggcgacgcccgcgcggtgggatggcggtggccggcgacccttgcggcgggagggcggtggccggcgatgcctgcgcagcgggagggcggctggacgacggcgccccgcgcagcgagacggcggctggacaacgacccttgcccatgaggggcttgttggaggcatgccatgaagcccttcggccggacctgccgaaaccatagtaccagcaaggattcaagccaaagccgtcaagaccattcaggcaagccttatggtgaaagcaataagcgaagatggcgaaggctggaaagccgcatcggtactccgaaagtaaaggcatctcgagcgaactacaaagacttcgccatgacgagttcggcatcaaggaggaccaacaggctgcccccggccttttaggcccgttcgccatagaccaggcccagcctatcagcccattaacggcccatatgtacaaatga

SEQ ID NO: 16586 - DNA, 2380 bp, Oryza sativa
  Clone ID: PAT_MRT4530_22320C.1
ttcacacgctcacacatcgatcgtcattgtcttagctagctaatctttctttctcctcggttaattatcctttgcatgcccctctccaagctcggacgctgcaagctaagatgggtccgaggattcagcagctggccgctgtgttgctggcggctgtcgtcgtcgtcgcagccgccagggatgaacctgcagcagcaaaaaactaccaaactcagtgggatacagtgatgtcaatacttaactgtaagagtgattcgttgatccctagctacatctgcagcgtgatcagcaaaagtcgctggggttgggcgtcagatgaccccgacgactacacgccggcggcagatccgtcgccgacggcggcgaggccgttgaggagcacggcggacctacccaagtacgtggacccgctgccgcagatggccaggatccagggctacggcatcaaccagttcggctttcccgtgcccaccaacctcaccatcggcatgtacaacaagacctggcaattccaccgcgacatgccgccgacgccggtgttcgtgtacgggcagtcgctgcagacggcgacgttcccggggcccaccatcgtggcgcgctacaacgtgccgctctacgtgacgtgggagaaccacctccccgacgcccacatcctcccgtgggaccccaccgtccccaccgccattcccaagaacggcggcgtccccaccgtcgtccacctccacggcgccgcccaggcccccgattccgacggccacgccttcgcctggttcacccgggacttcgccgagaacggcagcacatggacgcagaagacctacacctaccccaacgtgcagccggcggccggcaacatctggtaccacgaccacgccctcggcctcacccgcgccagcctcctcgccggcctcctcgccgcctacatcgtcgagtggcccgagctcgagatgcccttcaacctcccctccggcgagttcgacctccacctcgtcatcgccgaccgcaagttcaacgtcgacggcaccatcttcatggacaccgtcggcgccgtgccatccgtccacccgcagtggcagccggagtacttcggcgaggtcatcaccgtcaacggcaaggcgtggccgttccaagccgtccagcgccgccgctaccgcctccgcatcctcaacgccagcaacgcgaggtacctcaacatcaggttctccaatggtctccccttcaccgtcatcgcctccgacgcgacgtacctctcccgcccggtcaccgtctccaacctcctcctctccccggccgagatcttcgacgtcatcgtcgacttctccctcgtggtgaaccccaacgccaccgacatcgagttgctcaactcggcgccctacccgttccccaccggcactccggcgaacgcgacactcgacggcaaggtgatggcgttcaatgtctccgccaagtggcaggtcggcgacgacatgccgatgcaggagccggaaaactcgacggtggtgccggagatcggtgtgccgttcgcgaaggtgacggcgctgccgccgacgatgaagacgaggtacatcgtcctgtacgagaacatgacgagcaacgacccgaacaccgccaagacgatgaacctctacatcaacgggctccggctggaggatccgccgacggagacgccgatatcggggacgacggagctgtggcacgtgatcaacctcacccccgacaaccacccgctgcacctccacctcgccgagttccaggccgtccagatgctgcagctcgtcgacccggacaccttcaagagctgcatgctgaagcacaacgacaccttcgcctgcaacctcgaccagcacgccgtcggggccctgcagccggtgccggaggaggagaagacgtggaagaacgtcgtgaagatcccgccggcgtacgtcacgtcggtggtggtggcgttcaggctcgtccacaacaacatgccctaccccttcgacgccacggcggcgccgggatacgtctatcactgccacatcctggatcacgaagacaacgccatgatcaggccactcacgctgcttccatgaacaagactgcacacagtacgtggtggttgatgcatgaggagatcaagacgcctcaccaggattaaaaattatgagcatttctgtttgggtgaaagttaattatcgcgttatccaagttattttactatggttgtcagcccatgcatttgtatgggggtatttgttacttcttggtgggtgtggccatgcatggttgtctccattcggataggatagcctatgctttgttgtgtgtttaccttgtgaattcccttcccttaataaaatttggccggagttcctccgccggccggcctgccgatcctgtc

SEQ ID NO: 16587 - DNA, 360 bp, Oryza sativa
  unsure (1)..(360): unsure at all n locations
  Clone ID: PAT_MRT4530_22321C.1
gcatccgccgccgcagccgcagccgccgccgccgacgccgacgaggagaggaggagagggaaggcgagagggaggtaggtaggtaggcagttagccatgtcgccggcggagcancgagggaggagagcgtgtacaaggcgaantggcgganaggcggagcggtacgaggagatggtggagtacatggagcgcgtggcggcncggncgggggncgcctccggcggggaggagctcacggtggaggagcggaacctnctgtccgtngcgtacaagaacgtcatcggcgcccgccgcgcgttcgttagcggatcatctcgtcgatcgagcagaaggaaggaagggccncgggaacgacggcca

SEQ ID NO: 16588 - DNA, 535 bp, Oryza sativa
  Clone ID: PAT_MRT4530_22322C.1
ccaaaaaaggggaaaaaaaaccaaaacccaacccttggtttaaaaaaaaaaaaggggccctttggaaaccggccttttttaaggagagggagagagagccccccctccaaaagataaataaccccaagaaaaaggggcaagggaattccccccccccagcccaagggggggaggaaaaccaagggaacccccttggctggggccccaccaatcaagggaaccggccttttttccccaaaacccgggccggccacccggttcccttgggagggcttcccaataagggggaaaaacaaccccggggtcaaaagaaaaccccaggaaaaggcgggagggaaaatttttgccccccggggattttggggcccccctcccccggttttggtttggaaaaaaaagcaaccaaagcagggcccccaaattttgggaggaaaacagagggcgttgggcccccggttaccaaaccccttttaaacccccccaaaccctgaaaaaaattaagggggcttcccccccccccttggccatggttttt

SEQ ID NO: 16589 - DNA, 6156 bp, Oryza sativa
  Clone ID: PAT_MRT4530_22323C.1
atggaagaagatgaagtggaagacgacaatattccggactttgctcagtatgttggatttgaaggaaatcaaacgggcgaggaggaaatagctgctgatggtaacgatgttgcggatgatcttggtcagatgttgcaggacgccagggaggactgcgaaagtgaaaaggaggcccataaattggacaagatgttggaggaccacagaacttcgttgtacccaggttgcgagcaggggcataaaaagttggataccactctggagttgttgcaatggaaggtaaaaaatggggttagtaacaaggcatttggcgatttattgaaactcgtcaagaacattcttccggggggaaacaaattgcccgagacaacgtacgaggctaagaagatagtctgcccgttaggactggaagttcataagattcacgcatgtccgaatgattgtatcctatatcgcggtgaggagtatgagaacctagaagcatgccctgtttgcaaagcactacgatacaagattagacgggacgatccaggagaagttgacgggcagctaacaaagatgagattcctgctaaggaacaaggggaatgctagaatgttgcgatggcacgctgaagagcgtcaacaggacgggatgctgagacaccccgccgatggttcgcagtggcgaaacatcgacagaaaatttaaagaatttggaaaggacgcacgaaacatacggtttggtttgagtacggatggcatgaatccttttggagagatgagcagcggccatagcacttggcccgttacgatgtgtatctacaacctccccccctggctatgcatgaagaggaagtacataatgatgccgattattattcaaggccccaagcaacctggtaacgacatcgacgtgtacctaagaccactggtcgaagatcttaaacagttgtggaagaaggaaggtgtccccgtgtgggacgaggataaacaggaagagtttaacctacaagcgctgctgttcgtaaccatcaacgattggcctgcacttagcaacctatccggacagtccaacaaggggtacaaggcttgcactcactgtatggatgaaacagaaagtaggtatcttaagcactgtaggaaggttgtatacatgggtcatcgtcaattccttgcagcaaaccacccggtacggaagaaaggcaagcacttcgaacataaggccgaccaccgtacgaagcctaaacatcgcagcgggaaaacagtgtttgctatggttaaagatcttaaagtagtgttcggaaaggggcctggaagccagcatatagagagcgaagatggtcacgcggcgatgtggaaaaagaactctatattttgggagttaccatattgggaattcttggacgtacgccacgtaatcgacgtgatgcacctcactaagaacctttgcgtaaaccttcttggcttcctaggtgtatacggaaagtcgaaagatacactggaagcacgtaatgatctgaagcatatggaacaacgcggcgaccttcacccggaaccaaaggagaaaggaagccattacttgagtccagccagctacactcttagcaaggcagagaaggaaagtatgtttgaatgcttggagagcataaaggtaccgtctggatactccacgaatatcaagcgaataataagcacgaaggagaagaagttcacaaacctaaagtctcatgactgtcacgtgttgatgacacaactgctaccagttgtaataaggggtatccttccagacaatgtccgggcaacaataacaaagctatgtgcattcatgaacgcaatttcgcagaaggtcatcgatccggatagattagaagcccttcagaatgaagtggtgcaatgtctcgtcagttttgagttgatatttccaccttcatttttcaatataatgacgcatctgctttgtcaccttgtgaaagagatccgtattctcgggcctatgtacctacacaacatgtttcctttcgagaggtacatgggcgttctgaagaagtatgttcgtaaccgtgctcgtccagaggcaagcatcgccaagggttatggaacagaggaggtcatcgaattttgcgtagaatttatcgaagaccttcgcccaatcggggtacctgaatcacgccatgaagggagactacggggaaagggaactctcggaaggaaagcaataatgacggtagacaacaatttattccgtaaagcccatttcactgttctgcaacactcttcattggtagctccttacatcgaggagcatttggctctagttcgcgccaggaacatcggtaagtccgatgcatggattacacggcatcacattgatactttccccgcgtggctacgacaacatctcatgggtaacgagtcgatcaaccaacaacttgccttcctggcgaggggaccatctgggtcgatcgcgacattccagggatatgagatcaatgggtacacattctacacgagagcccaagacatgaagagcacgaaccaaaacagcgctgttcgtgtcgatgccatgggacacgatggaacaactgccacgtattacggtgccatcgaggacatatgggaacttgactatggtcctctcaaggttcctctgttccggtgccaatgggttaggttgactggtggaggcgtaatgattgatgacagtgggatgacaactgttgaccttaacaaggttggatactcggacgaaccttttgtccttgccaatgatgtaacgcaagtctttttcgtgaaggacatgtctagcaaaggaaagaagggcagagggcctgatgagcctaagcgtcaagtggttctcccaggcaaaagaaaaatcgtcggagttgaggacaagactgacgaggattacgatcagttggatgggcaaccccctttcacggtgacgattgaccctagcatcctcctatcaaatgaagacaccccttactcacgcagcgatcacaaggagggaacaatagtgaggagaaaatgtttcttgtatcaacagatggctgaccgcgatgaggaacagatattgtacgatacaatcgcggagggaagcagccagtactggaatgaagaagaggggaacgaggatccaaaccagtacttgaacgaggaagggaacgtggagagggatgcggaggggaaccagcaggggcacgtggaaagggatgtggaggggaaccaggaggaggaggctagtggtagtcaaccctccgttggacagaagagggcacgcgggcaacgaggtgcagcgaagaagcttgagggtcggcacatcataacggaagtggaagaagatggacgtcctagtgccccggccgaagccgccaagaactatgtacgtcacagcggttgggttgtgcgggataacgtgcctgtcagtacggtgtactggcgaagaacaagggcacgcggagatcatgagagctttgtccaagattcggagaaagagatgctgtggaccacaatgctcgagacattcacccttcctgcgggtacagaggacaaagtgaaaaggtggactctgaagaaaatggcagaacagtttcagagcttcaagggagatctgtaccagaagtatatactgaaggggcagacaccgaactttgacacattcccaaagctaagggatcactgggacgagttcgttgcatataagacaggtgaacaagggaaggcgatgatggaaagaaacaaagaaaatgccgccaagaagaagtaccatcaccacttggggtcaggaggctatagcgtcgcgatgccgaagtgggagcagatggaggctagcttgattgagaggggtatcgaaccggcaacagccaattggccggaacgatcgaagttctggtactatgctcacggtggaacgctcaacccagctgatggctcactggtcttcggctatcagatacaagaggctgtgcgacgactaacagatgcagtggaagcctcctctcagggcacgttccgaccagacagagatagggacgagctgacactcgccctgcagactccagagcatccaggacgaactcgagggaaaggggtgattccttggaagattggtttcaaggaggacatccacacgtacaggagtcggatcaggagcaagagagataccgaggcgaagattgcagacctagagttccgggtatcgagctacgaactcaacatgcaagaggaggtggcaaggaaggttgatgaacgcatggccgcacatcggtcccatgatccccagccgaccattcctcctgcaatggtgagcccgtcaggaaaccgtagcagctgcgcctcaacggggcaggtaggatcacagagcatggacgccatgcaaacacaggacgaatcgacctgtcccgttgatgacatcactcagcggacaccatgtgagctgcatattcctttcaagaacttatcaataaaggtggcgtcgggcatggccatcccaacggacccttcaggtacttaccactgcaggccgattccagcaggatactccaaggtcgaagttgagttggtcgaaggcgcgtacgaggacctcgagctggattaccctggaggagacggtgagacgcatctacgagacacatgccatgccattattctatggcgcaggcggtacatcatcctccctgggcgacaagcggcgtctcgtgcaccatctcctccggctccgccatctcctcctcaggatcctgcaccgtctcctcctcatgctccgccagcaccgtctccacctcaggctccagcatcgactcctcaggatcctgcaccgactcctcctcgtgctcctacacctactcccccgcaagctcctgttccggcaccttcaaagtcaagggcccccccagctccaccgcttgcccacacaagggcaacaaagaaggcgaaagttgacgccgccaagaacaaggacccggggtacgattgcacgcaagaggagcttgacgcttacgttgcatcagaagtcaagagacaattcaagcctcgaagtccagaaaagaagattcctatagaccccagtgtcaggaacttcttcaggggtatgtctgcatctgtcaaggaggccatcaagctatcggactatgagcaaacgctgaagaaagcatcttctggaaagtccaaaccagtccctcagcttggagagcaaccaaaccaggagatcgagccgttggtgaccggtaaagaaatgacgatagaacaatttattactgacaccggtctaactacggatcaattgctaggagtcgcaccaatcgaaaaggcggaagtgaaatacatgtacgaatcgtccctacccacacaaatgtacaagttccatcagctgtacatggagatgagcgccaccggtagagagatgatcggagcgaggatcagggacacggacttcttgcaaggagatgacattctctggatcaatttcaggggaatctacgaactataccagctggacgccctcgacgtctctattatgagttgctggattttaatggagattcaaagggcccgacggcggagggttttcgatactggattcatcgaccctcggaaagtaaacgtcgcaatgctcgaccaatatccacaagaaacagaggacaatctcgtccatctcctgaaggcgcagcattacaagacgttcatactgttgccatacaacacagaattccactgggtgcttttactcatcgacctggaggcctgcaccgtcaacgtatatgactcaatggataaaaaagagtctacgtttgacaaggttttcgaacttatagacagagcttggtatcggttccgtcatttggtccgcggcaaatggagagaaagacttaggcggaagttcaaatttccttgcgcaaagcaaaagcagggaactaacttgtgcggctattacgtgtgcgagtattgccactgccttgcagaccaaatcatcaccacaagagagctcgattttattcgcatgagggataacctgaccacacacaaggaatttatcgcggcggttcaagaacaactcatgggattcatcaacgaagaaatccttgatcccaagggtgaattctactacgacggaaacacaattcaccggtccttagcttctgagctagcagcgagtactactacgtcgaaatcgtag

SEQ ID NO: 16590 - DNA, 1345 bp, Oryza sativa
  Clone ID: PAT_MRT4530_22324C.1
ctagaaatctaacatcggtgcatcgtgggccgcaggcccgcagttgcccacacgccacctcttctgctgggtcccgcctgtcggtatcccccactccacacttccacaactccgaccatgtccgcggccgccgcttcgcctccgcctcccgccgccgccggcgaacacctccgcttccacctccgcggcttcctctccccggagacctgcaaggtatataccttcttccccttttggcctctccgcctgaatcatctcaaaggctctccgaaccatggctttggtgcgacgggaatcgcgtgcgcaggagctggagttcgtgcaccggagctgcggcacggccgggtaccgcccttcggtggtgtcgacgtcgcttccgcacctggctgccaccggctgcggccacctcctcctcccgttcgtccccgtccgcgagcggctccgcgacgccgtcgagtcggccttctcctgccacttcgacctcttcatcgagttcaccgggctcatcaggtggtgcgagggcacgtgttgtgcgtggcactttgatgacaacaaaccttatcttaggcaaagagccttcacggatgttgtcatctacactgcagataatagtaatacccattgtgtagatgaggtgactgaaggtgaaagactcaccctaactctttggttcaccagagacagtgcttatgacgaggacccaaagctcctttcctttctttctcagacatcactgaactatgaaccagttcatcagagttcttatattcctttgccagcctctgatataatgtattggtttgcctatgaccattctggttttgacgtacgatgtgctagagtgcacattcttgggttctctttccactcaagcattgatgaagacaataaatctgttgcacctgctgaagatgaccctatagagttgcttgggaagccagtacgacttggtaggggagatgatgtctttgacaaagtttttgccaatggcttgcatgctcttcaggtggtgcagttttactactggaaagcacctgagctgtcagcaaagaggaaacaaacttctggtggttcaggaacagtctgctgtcctgttagtcaatccagaggaacaaaactaccattgccatgcaaccatggccttgaacaaaccatatttggatcacataagaatgtagagattgattttgaatggagtgattttgaattagccgtatctatgtgggagaattattcagaagaattgcagagaaagctgttgacatttttgccatattggctgtccagtgaggccatttttattgtcagttcctgttctccccaggtatgcactgaagggaactaa

SEQ ID NO: 16591 - DNA, 6372 bp, Oryza sativa
  Clone ID: PAT_MRT4530_22325C.1
atggctaagacagatgatccttctcatggatcagctgcatatgcagctggctcagccagcagtcaacaagaaacttcagaatatgagaggaaacgagctgcagcggcgacagatcagatggatcggcaatggatgtacgctgatcggcggtccaaagagtttattgacggcgtgcactattttttgagagtggccgaagctaacaggcaaaggggttttatttgttgtccatgcaataagtgtaagaatcagaaggagtattctgcatccaggactattcatttccacttgtttgagtcggggttcatgccaagctataattgttggacatcccacggagagcaaggtgttgaaatggaagaagatgaagtggaagacgacaatattccggactttgctcagtatgttggatttgaaggaaatcaaacgggcgaggaggaaatagctgctgatggtaacgacgttgcggatgatcttggtcagatgttgcaggacgccagggaagactgcgaaagtgaaaaggaggcccataaattggacaagatgttggaggaccacagaacttcgttgtacccaggttgcgagcaggggcacaaaaagttggataccactctggagttgttgcaatggaaggcaaaaaatggggttagtgacaaggcatttggcgatttattgaaactcgtcaagaacattcttccggggggaaacaaattgcccgagacaacgtacgaggctaagaagatagtctgcccgttaggactggaagttcataagattcacgcatgtccgaacgattgtatcctatatcgcggtgaggagtatgagaacctagaagcatgccctgtttacaaagcactacgatacaagattagacgggacgatccaggagaagttgacgggcagctaacaaagaagagaattcctgctaaggtgatgtggtattttcctataataccacggctaaggcgtttgttcaggaacaaggggaatgctagaatgttgcgatggcacgctgaagagcgtcaacaggacgggatgctgagacaccccgccgatggttcgcagtggcgaaacatcgacagaaaatttaaagaatttggaaaggacgcacgaaacatacggtttggccccaagcaacctggtaacgacatcgacgtgtacctaagaccactggtcaaagatcttaaacagttgtggaagaagaaaggtgtccccgtgtgggacgaggacaaacaggaggagtttaacctacgagcgctgctgttcgtaaccatcaacgattggcctgcacttagcaacctatccggacagtccaacaaggggtacaaggcttgcactcactgtatggatgaaacagaaagtacgtatcttaagcactgtaggaaggttgtatacatgggtcatcgtcgattccttgcagcaaaccacccggtacggaagaaaggcaagcacttcgaacataaggccgaccaccgtacgaagcctaaacatcgcagcgggaaaacagtgtttgctatggttaaagatcttaaagtagtgttcggaaaggggcctggaagccagcatatagagagcgaagatggtcacgcggcgatgtggaaaaagaactctatattttgggagttaccatattgggaattcttggacgtacgccacgcaatcgacgtgatgcacctcactaagaacctttgcgtaaaccttcttggcttcctaggtgtatacggaaagtcgaaagatacactggaagcacgtaatgatctgaagcatatggaacaacgcggcgaccttcacccggaaccaaaggagaaaggaagccattacttgagtccagccagctacactcttagcaaggcagagaaggaaagtatgtttgaatgcttggagagcataaaggtaccgtctggatactccacgaatatcaagcgaataataagcacgaaggagaagaagttcataaacctaaagtcccatgactgtcacgtgttgatgacacaactgcttccagttgtaataaggggtatccttccagacaatgtccgggcaacaataacaaagctatgtgcattcatgaacgcaatttcgcagaaggtcatcgatccggatagattagaagcccttcagaatgaagtggtgcaatgtctcgtcagttttgagttgatatttccaccttcatttttcaatataatgacgcatctgctttgtcaccttgtgaaagagatccgtattctcgggcctatgtacctacacaacatgtttcctgtcgagaggtacatgggcgttctgaagaagtatgttcgtaaccgtgctcgtccagaggcaagcatcgccaagggttatggaacagaggaggtcatcgaattttgcgtagaatttatcaaagaccttcgcccaatcggggtacctgaatcacgccatgaagggagactacggggaaagggaactctcggaaggaaagcaataatgacggtagacaacaatttattccgtaaagcccatttcactgttctgcaacactcttcattggtagctccttacatcgaggagcacttggctctagttcgcgccaggaacatcggtaagtccgatgcatggattacacggcatcacattgatactttccccgcgtggctacgacaacatctcatgggtaacgagtcgatcaaccaacaacttgccttcctggcgaggggaccgtctgggtctatcgcgacattccagggatatgagatcaatgggtacacattctacacgagagcccaagacatgaagagcacgaaccaaaacagcgctgttcgtgtcgatgccatgggacacgatggaacaactgccacgtattacggtgccatcgaggacatatgggaacttgactatggtcctctcaaggttcctctgttccgtgggatgacaactgttgaccttaacaaggttggatactcggacgaaccttttgtccttgccaatgatgtaacgcaagtctttttcgtgaaggacatgtctagcaaaggaaagaagggcagagggcctgatgagcctaagcgtcaagtggttctcccaggcaaaagaaaaatcgtcggagttgaggacaagactgacgaggattacgatcagttggatgggcaaccccctttcacagtgacgattgaccctagcatcctcctatcaaatgaagacaccccttactcacgcagcgatcacaaggagggaacaataatggctgaccgcgatcaggaacagatattgtacgatacaatcgcggagggaagcagccagtactggaatgaagaagaggggaacgaggatccaaaccagtacttgaacgaggaagggaacatggagagggatgcggaggggaaccagcaggggcacgtggaaagggatgtggaggggaaccaggaggaggaggctagtggtagtcaaccctccgttggacagaagagggcacgcgggcaacgaggtgcagcgaagaagcttgagggtcggcacatcataacggaagtggaagaagatggacgtcctagtgccccggccgaagccgccaagaactatgtacgtcacagcggttgggttgtgcgggataacgtgcctgtcagtacggtgtactggcgaagaacaagggcacgcggagatcatgagagctttgtcccagattcggagaaagagatgctgtggaccacaatgctcgagacattcacccttcctgcgggtacagaggacaaagtgaaaaggtggactctgaagaaaatggcagaacagtttcagagcttcaagggagatctgtaccagaagtatatactgaaggggcagacaccgaacttcgacacattcccaaagctaagggatcactgggacgagttcgttgcatataagacaggtgaacaagggaaggcgatgatggaaagaaacaaagaaaatgccgccaagaagaagtaccatcaccacttggggtcaggaggctatagcgtcgcgatgccgaagtgggagcagatggaggctagcttgattgagagggctatcgaaccggtaacagccaattggccggaacgatcgaagttctggtactatgctcacggtggaacgctcaacccagctgatggctcactggtcttcggctatcagatacaagaggctgcgcgacgactaacagatgcagtggaggcctcctctcagggcacgttccgaccagacagagatagggacgagctgacactcgccctgcagactccagagcatccaggacgaactcgagggaaatgggtgattccttggaagattggtttcaaggaggacatccacacgtacaggagtcggatgaggagcaagagagataccgaggcgaagattgcagacctagagttccgggtatcgagctacgaactcaacatgcaagaggaggtggcaaggaaggttgatgaacgcatggccgcacatcggtcccatgatccccagccgaccattcctcctgcaatggtgagcccgtcaggaaaccgtagcagctgcgcctcaacggggcaggtaggatcacagagcatggacgccatgcaaacacaggacgaatcgacctgtcccgttgatgacatcactcagcggacaccatgtgagctgcatattcctttcaagaacttatcaataaaggtggcgtcgggcatggccatcccaacggacccttcaggtacttaccactgcaggccgattccagcaggatactccaaggtcgaagttgagttggtcgaaggcgcgtacgaggacctcgagctggattaccctggaggagacggtgagacgcatctacgagacacatgccatgccattattctatggcgcaggcggtacatcatcctccctgggcgacaagcggcgtctcgtgcaccatctcctccggctccgccatctcctcctcaggatcctgcaccgtctcctcctcatgctccgccagcaccgtctccacctcaggctccagcatcgactcctcaggatcctgcaccgactcctcctcgtgctcctacacctactcccccgcaagcccctcttccggcaccttcaaagtcaagggcccccccagctccaccgcttgcccacacaagggcaacaaagaaggcgaaagttgacgccgccaagaacaaggacccggggtacgattgcacgcaagaggagcttgacgcttacgttgcatcagaagtcaagagacaattcaagcctcgaagtccagaaaagaagattcctatagaccccagtgtcaggaacttctttaggggtatgtctgcatctgtcaaggaggccatcaagctatcggactatgagcgaacgctgaagaaagcatcttctggaaagtccaaaccagtccctcagcttggagagcaaccaaaccaggagatcgagccgttggtgaccggtaaagaaatgacgatagaacaatttattactgacaccggtctaactacggatcaattgctaggagtcgcaccaatcgaaaaggcagaagtgaaatacatgtacgaactcggtaaaccgcttgtcaagcctgagctgctgcagtccctacccacacaaatgtacaagttccatcagctgtacatggagatgagcgccaccggtagagagatgatcggagcgaggatcagggacacggacttcttgcaaggagatgacattctctggatcaatttcaggggaatctacgaactataccagctggacgccctcgacgtctctattatgagttgctggattttaatggagattcaaagggcccgacggcggagggttttcgatactggattcatcgaccctcggaaagtaaacgtcgcaatgctcgaccaatatccacaagaaacagaggacaatctcgtccatctcctgaaggcgcagcattacaagacgttcatactgttgccatacaacacagaattccactgggtgcttttactcatcgacctggaggcctgcaccgtcaacgtatatgactcaatggataaaaaagagtctacgtttgacaaggttttcaaacttatagacagggcttggtatcggttccgtcatttggtccgcggcaaatggagagaaagacttaggcggaagttcaaatttccttgcgcaaagcaaaagcagggaactaacttgtgcggctattacgtgtgcgagtattgccactgccttgcagaccaaatcatcaccacaagagagctcgattttattcgcatgagggataacctgaccacacacaaggaatttatcgcggcggttcaagaacaactcatgggattcatcaacgaagaaatccttgatcccaagggtgaattctactacgacggaaacacaattcaccggtccttagcttctgagctagcagcgagtactactacgtcgaaatcgtag

SEQ ID NO: 16592 - DNA, 1026 bp, Oryza sativa
  Clone ID: PAT_MRT4530_22326C.1
atgggatgcgaaaagcaacacttcgaccttaggattagcttatgccgggtttcacgacccttggttcaacgtcgaggtcctcaaccattcgagcgtccccatgagagagaagcggcgccgggtggcctcgtcggattggccgacattggcgatttcgttggcggcgacggctttcgacgacgcgtggcagcggcggattggctgggcaaggtggcggcggcggattggctaggcaaggatggtggcaaaatagatggaagagaagcaaataggactttagccccaatatatgtgagatcaaaggggaagtatttgatggaagataaaactggatttggtgatagtatggaagcaagtgacatggacattgaagacgagggcaatgaggatggtactaatgaaagtgatcatgagaacatatttaattcacctgctacagaatttgctagtgttgatgaacaactagtttttactgtcgatatgtatgatccaagaaattgggataaacttgatcataaagctagggacatattagtggagaaggggccaataagagaagaaaatattgaattccctttggatgataacttaacacatttcccatatgctcttttttctagaaaaatgagcaacgagaaggttcatgatggaaaatggttggcttactcaaagcatgttgatagagtaatttgcttttgttgtaagattttcaactctagaaattgcaagagttcacttgaacatgatgggtttagagattggaggcatattagtgaaagactaaaagaacataaagctagtgtcaagcatatcaccaacatgacctcttggaatgaattgagagctagattgaggaaaaatgaaacaattgacaaagatttgcaacaacaaattactaaggagaaagaacgtatacgacaagttttactaagaataattgctattgtcaaatttcttggtaaacgtaatttggcttttagaagatccaatgagcaatttacaatcatcagaatggcaatttcttag

SEQ ID NO: 16593 - DNA, 6385 bp, Oryza sativa
  Clone ID: PAT_MRT4530_22327C.1
atggatcggcaatggatgtacgctgaccggcggtccaaagagtttattgacggcgtgcactattttttgagagtagccgaagctaacaggcaaaggggttttatttgttgtccatgcaataagtgtaagaatcagaaggagtattctgcatccaggactattcatttccacttgtttgagtcggggttcatgccaagctataattgttggacatcccacggagagcaaggtgttgaaatggaagaagatgaagtggaagacgacaatattccggactttgctcagtatgttggatttgaaggaaatcaaacgggcgaggaggaaatagctgctgatggtaacgacgttgcggatgatcttagtcagatgttgcaggacgccagggaggactgcgaaagtgaaaaggaggcccataaattggacaagatgttggaggaccacagaacttcgttgtacccaggttgcgagcaggggcacaaaaagttggataccactctggagttgttgcaatggaaggcaaaaaatagggttagtgacaaggcatttggcgatttattgaaactcgtcaagaacattcttccggggggaaataaattgcccgagacaacgtacgaggctaagaagatagtctgcccgttaggactggaagttcataagattcacgcatgtccgaacgattgtatcctatatcgcggtgaggagtacgagaacctagaagcatgccctgtttgcaaagggctacgatacaagattagacgggacgatccaggagaagttgacggggagctaacaaagaagagaattcctgctaaggtgatgtggtatttccctataataccacgtttaaggcgtttgttcaggaacaaggggaatgctagaatgttgcgatggcacgctgaagagcgtcaacaggacgggatgctgagacaccccgccgatggttcgcagtggcgaaacatcgacagaaaatttaaagaatttggaaaggacgcacgaaacatacggtttggtttgagtacggatggcatgaatccttttggagagatgagcagcggccatagcacttggcccgttacgatgtgtatctacaacctccccccctggctatgcatgaagaggaagtacataatgatgccgattattattcaaggccccaagcaacctggtaacgacatcgacgtgtacctaagaccactggtagaagatcttaaacagttgtggaagaaggaaggtgtccccgtgtgggacgaggacaaacaggaggagtttaacctacgagcgctgctgttcgtaaccatcaacgattggcctgcacttagcaacctatccggacagtccaacaaggggtacaaggcttgcactcactgtatggatgaaacagaaagtacgtatcttaagcactgtaggaagattgtatacatgggtcatcgtcgattccttgcagcaaaccacccggtacggaagaaaggcaagcacttcgaacataaggccgaccaccgtacgaagcttaaacatcgcagcgggaaaacagtgtttgctatggttaaagatcttaaagtagtgttcggaaaggggcctggaagccagcatatagagagcgaagatggtcacgcggcgatgtggaaaaagaactctatattttgggagttaccatattgggaattcttggacgtacgccacgcaattgacgtgatgcacctcactaagaacatttgcgtaaatcttcttggcttcctaggtgtatacggaaagtcgaaagataccctggaagcacgtaatgatctgaagcatatggaacaacgcggcgaccttcacccggaaccaaaggagaaaggaagccattacttgagtccagccagctacactcttagcaaggcagagaaggaaagtatgtttgaatgcttggagagcataaaggtaccgtctggatactccacgaatatcaagcgaataataagcacgaaggagaagaagttcacaaacctaaagtctcatgactgtcacgtgttgatgacacaactgctaccagttgtaataaggggtatccttccagacaatgtccgggcaacaataacaaagctatgtgcattcatgaacgcaatttcgcagaaggtcatcgatccggatagattagaagcccttcagaatgaagtggtgcaatgtctcgtcagttttgagttgatatttccaccttcatttttcaatataatgacgcatctgctttgtcaccttgtgaaagagatccgtattctcggtcctatgtacctacacaacatgtttcctttcgagaggtacatgggcgttctgaagaagtatgttcataaccgtgcttgtccagaggcaagcatcgccaagggttatggaacagaggaggtcatcgaattttgcgtagaatttatcgaagaccttcgcccaatcggggtacctgaatcacgccaagaagggagactacggggaaagggaactctcgaaaggaaagcaataatgacggtagacaacaatttattccgtaaagcccatttcactgttctgcaacactcttcattggtagctccttacatcgaggagcacttggctctagttcgcgctaggaacatcggtaagtctgatgcatggattacacggcatcacattgatactttccccgcgtggctacgacaacttctcatgggtaacgagtcgatcaaccaacaacttgccttcctggcgaggggaccgtctgggtcgatcgcgacattccagggatatgagatcaatgggtacacattctacacgagagcccaagacatgaagagcacgaaccaaaacagcgctgttcgtgtcgatgccataggacatgatggaacaactgccacgtattacggtgccatcgaggacatatgggaacttgactatggtcctctcaaggttcctctgttccggtgccaatgggttaggttgactggtggaggcgtaatgattgatgacagtgggatgacaactgttgaccttaacaaggttggatactcggacgaaccttttgtccttgccaatgatgtaacgcaagtcttttttgtgaaggacatgtctagcaaaggaaagaagggcagagggcctgatgaccctaagcgtcaagtggttctcccagtgcgccctcgtcttcttcaccaacacttagacgttttcggccacgagacgctcaatttcatcatcaatatcaccttcatcaccactgccttcaccatcctgcaggagtgacatatgcatagaaagaaagcacatcataaatataatatgaacaaacttcaagaagaaaagaagggaaggtttaaatagcagatgtttcttgtatcaacagatggctgaccgcgatgaggaacagatattgtacgatacaatcgcggagggaagcagccagtactggaatgaagaagaggggaacgaggatccaaaccagtacttgaacaaggaaggaaacgtggagagggatgcggaggggaaccagcaggggcacgtggaaagggatgtggaggggaaccaggaggaggaggctagtggtagtcaaccctccgttggacagaagagggcacgcgggcaacgaggtgcagcgaagaagcttgagggtcggcacatcataacggaagtgcaagaagatggacgtcctagtgccccggccgaagccgccaagaactatgtacgtcacagcggttgggttgtgcgggataacgtgcctgtcagtacggtgtactggcgaagaacaagggcacgcggagatcatgagagctttgtcccagattcggagaaagagatgctgtggaccacaatgcacgagacattcacccttcctgcgggtacagaggacaaagtgaaaaggtggactctgaagaaaatggcagaacagtttcagagcttcaagggagatctgtaccagaagtatatactgaaggggcagacaccgaacttcgacacattcccaaagctaagggatcactgggacgagttcgttgcttataagacaggtgaacaagggcaggcgatgatggaaagaaacaaagaaaatgccgccaagaagaagtaccatcaccacttggggtcaggaggctatagcgtcgcgatgccccagtgggagcagatggaggctagcttgattgagaggggtatcgaaccggcaacagccaattggccggaacgatcgaagttctggtactatgctcacggtggaacgctcaacccagctgatggctcactggtcttcggcgatcagatacgagaggctgcgcgacgactaacagatgcagtggaagcctcctctcagggcacgttccgaccagacagagatagggacgagctgacactcgccctgcagactccagagcatccaggacgaacacgagggaaatgggtgattccttggaagattggtttcaaggaggacatccacacgtacaggagtcggatgaggagcaagagagataccgaggcgaagattgcagacctagagttccgggtatcgagctacgaactgaacatgcaagaggaggtggcaaggaaggttgatgaacgcatggccgcacatcggtcccatgatccccagccgaccattcctcctgcaacggtgagcccgtcaggaaaccgtagcagctgcgcctcaacggggcaggtaggatcacagagcatggacgccatgcaaacacaggacgaatcgacctgtcccgttgatgacatcactcagcggacaccatgtgagctgcatattcctttcaaaaacttatcaataaaggtggcgtcgggcatggccatcccaacggacccttcaggtacttaccactgcaggccgattccagcaggatactcgaaggtcgaagttgagttggtcgaaggcgcgtacgaggacctcgagctggattaccctggaggagacggtgagacgcatctacgagacacaagccatgccattattctatggcgcaggcggtacatcatcctccctgggcgacaagcggcgtctcgtgcaccatctcctccggctccgccatctcctcctcaggatcctgcaccgtctcctcctcatgctccgccagcaccgtctccacctcaggctccagcaccgactcctcctcaggatcctgcaccgactcctcctcgtgctcctacacctactcccccgcaagctcctcttccggcaccttcaaagtcaagggcctccccagctgcaccgcctgcccacacaagggcaacgaagaaggcgaaagttgacgccgccaagaacaaggacccggggtacgattgcacgcaagaggagcttgacgcttacgttgcatcagaagtcaagagacaattcaagcctcgaagtccagaaaagaagattcctatagaccccagtgtcaggaacttcttcaggggtatgtctgcatctgtcaaggaggccatcaagctatcggactatgagcgaacgctgaagaaagcatcttctggaaagtccaaaccagtccctcagcttggagagcaaccaacccaggagatcgagccgttggtgaccggtaaagaaatgacgatagaacaatttattactgacaccggtctaactatggatcaattggtaggagtcgcaccaatcgaaaaggcggaagtgaaatacatgtacgaactcggtaaaccgcttgtcaagcctgagctgctgcagtccctacccacacaaatgtacaagttccatcagctgtacatggagatgagcgccaccggtagagagatgatcggagcgaggatcagggacacggacttcttgcaaggaaatgacattctctggatcaatttcaagggaatctacgaactataccagctggacgccctcgacgtctctattatgagttgctggattttaatggagattcaaagggcccgacggcggagggttttcgacactggattcatcgaccctcggaaagtaaacgtcgcaatgctcgaccaatatccacaagaaacagaggacaatctcgtccatctcctgaaggcgcagcattacaagacgttcatactgttgccatacaacacagaattccactgggtgcttttactcttcgacctggaggcctgcaccgtcaacgtatatgactcaatggataaaaaagagtctacgtttgacaaggttttcgaacttatagacagggcttggtatcggttccgtcaattggtccgcggcaaatggagagaaagacttaggcggaagttcaaatttccttttattcgcatgagggataacctgaccacacacacggaatttatcacggcggttcaagaacaactcatgggattcatcaatgaagaaatccttgatcccaagggtgaattctactacgacggaaacacaattcaccggtccttagcttctgagctagcagcgagtact

SEQ ID NO: 16594 - DNA, 1887 bp, Oryza sativa
  Clone ID: PAT_MRT4530_22328C.1
atgccgattattattcaaggccccaagcaacccggtaacgacatcgatgtgtacctaagaccactggtcgaagatcttaaactgttgtggaagaaggaaggtgtccccgtgtgggacgaggacaaacaggaggagtttaacttacgagcgctgctgttcgtaaccatcaacgattggcctgcacttagcaacctatccggacagtccaacaaggtgtacaaggcttgcactcactgtatggatgaaacagaaagtacgtatcttaagcactgtaggaaggttgtatacatgggtcatcatcgattccttgcagcaaaccacccggtacggaagaaaggcaagcacttcgaacataaggttgaccaccgtacgaagcctaaacatcgcagcgggaaaacagtgtttgctatggttaaagatcttaaagtagtgttcggaaaggggcctggaagccagcctatagagagcgaagatggtcacacggcgatgtggaaaaagaactctatattttgggagttaccctattgggaattcttgaacgtccgccacgcaatcgacgtgatgcacctcactaagaacctttgcgtaaacattcttggcttcctaggtgtatacggaaagtcgaaagatacactggaagcacgtaatgatctgaagcatatgaaacaacgcggcgaccttcacccggaaccaaaggagaaaggaagccattacttgcgtccagccagctacactcttagcaaggcagagaagaaaagtatgtttgaatgcttggagagcatagaggtaccgtctggatactccaccaatatcaagcgaataataagcacgaaggagaagaagttcacaaatctaaagtctcatgactgtcacgtgttgatgacacaactgctaccagttgtaataaggggtatccttccagacaatgtccgggcaacaataacaaagctatgtgcattcatgaacgcaatttcgcagaaggtcatcgatccggatagattagaagcccttcagaatgatgtggtgcaatgtctcgtcagttttgagttgatatttccaccttcatttttcaatataatgacacatctgctttgtcaccttgtcaaagagatcagtattctcgggcctgtgtacctacacaacatgtttcctttcgagaggtacatgggcgttctgaagaagtatgtttgtaaccgtgctcatccagagacaagcatcgccaagggatatggaacagaggaggtcatcgaattttccgtagaatttatcgaagaccatcgcccaatcggggtacctgaatcacgccatgaagggagactacgggaaaagggaactctcggaaggaaagcaataatgacggtagacaacaatttattccgtaaagcccatttcacggttctgcaacaatcttcattggtagctccttacattgaggagcacttggctctagttcacgccaggaacatcgatcaatgggtacacattctacacgagagccaaaacagtgctgttcgtgtcgatgccatgggacacgatggaacaactggcacgtattacggtgccatcgaggacatatgggaacttgactatggtcctctcaaggtccctctgttccggtgccaatgggttaggttgactggtggaggcgtaatgattgatgacagtgggatgacaacggttgaccttaacaaggttggatactcggacgaaccttttgtcgttgcgaatgatgtaacgcaagtcttttacgtgaaggacatgtctagcaaaggaaagaagggcagagggcctgacgagcctaagcgtcacgtggttctcccaggcaaaagaaaaatcgtcggagttgaggacaagacaacaataatttttcgaagtaattgtcattaa

SEQ ID NO: 16595 - DNA, 1130 bp, Oryza sativa
  Clone ID: PAT_MRT4530_22329C.1
cggacgccggccctcgcggaataataacctttttttttctttttccaagcgcccttcaaacccatctcctctcccctctccctcccaattcgatgcagccgcggtagcaattcgcatcgccccgccctcctcgccgcgcggattcgctcgccgcccccgccaccgcacccccatggacgcctccgccggatccggcaatgcctccggtggcgccggcgccggcgcgtccgcgtgctgctactactccctgctcggcatccggaagaacgcgtccgccaccgacgtgcgcgccgcctaccggaggctcgccatgaagtggcacccggaccggtgcgtgagcgaccccggcgaggccaatcggcggttccagcggatccaagaggcgtactccgttctgtccgacaaggggaagcgagccatgtacgacgccgggctgttcgatcccctcgacgacgacgaccaggatttctccgatttcatgcaggagatgctggtgatgatggataacgtgaaaaacgagaagccggacacactcgaggacctgcagaagatgctgcaagacatcgtcagcggcgacggcggaagccgcggcggcggcgtcggtggccgcgtgccgtcggacggcacacggaggacgcgcgtcgcgccctacccggcgcagtcgcgcaggtgaccggcgcgccggtgtacgagacgtgcacacgcctctaagtgatgaaaagagagacaagcagaagaagagaggaagcaaacgggaaagaaaaaccaataaaatttggcagaatttgtttcccttttttttaggtcatcagatgattgactccgtttagttcgctgggttgggttgggttgggttgggtcgggtgtgccgttcgattccggccgcgtcacccaagaattggtgcgtgcgtggccaagattccaatatcttgtcgacatttcgtcctgaattttactctcttgttgatgtgttcatcatgcgtcctcttctgccttcctgtgtcattgtccctgtcctactcccacagtgtattcccaatttgttacactactggtgctactattgatgtgtcaaaaccgccaaaaaaaaaaaaaaaaaaaatctgcctctcgggctggcatcttttggc

SEQ ID NO: 16596 - DNA, 834 bp, Oryza sativa
  Clone ID: PAT_MRT4530_2232C.1
atggcggcgctccgccccacctggtcgccgcctcatctcgcggtgaccgccgcgccgacgagcgccctggccttcctccctctgattagccaacgccgccgcctcccctcgccggcgccggcgaggaggatacagctccgctcccactgtacaaagagcccaacggagtcagagccggagcacgaggacgacggcgccgacgacgaggatgcagctgcaagatcagagcatccagcaatcatcttccaggagagattagacaaattcctggatgattacagagcagccttgggcctgcgtacgccccctgatatgttccgtaaggagaagtacaaaattgcggttatcatgcagaagatgtattcttccagttctaagattctgaatgcagacgagaaggagatggtgtcaacggtttgcaggaaagcacgattagctctagatttagcttcggaggtcatggatgttgctgccttcgggcttggtacaaccgaaatttctcaacgtacagcagatcagatggtgaggacgtacacaactatcttttgtgaggttgccaacgagttatatcataatagggtcacaatggaaaatattctatcctttcttgatgctcttggaggcttaggggcaataacacatatcttggttcaagataccgtggataagctccataatggtcttttaaaaaagaaaatcacccatgatctggatgcactttcccataagtttgataaggagatgaacattttgaaagacaattttaaaagggaaacaagaattgatggatacaaggttctcatcaatatgttaatcttctggaaccgagtttaa

SEQ ID NO: 16597 - DNA, 506 bp, Oryza sativa
  Clone ID: PAT_MRT4530_22330C.1
gtgggcgcaccagaacccatggattaactgcggatggggtaacaagacgtcttcaagtatcggttggcgctcactgtcgaattaacaagaaatgattaaagggagtgcaatagtgtaaagaggtctcaaaacgtgaggtaaaaatgaaagcatgttgcccagggcccattgtgcaaaaaataggaataaggcctgaggaagaaagtccctgaaaagccatgtaagccaagtaagtcaaagggtccaaatctggcgaagtctctggtatgacctaaaggttcagtggggttttaacaccaaatttggtgttcctatatatctccatccttccagagcataccaaaatcgtatgtggttttgataatacaagctgttgccatacaaaatatttgatgttggtaatagtagaatagtaggattgttgttttgtactataacggttcttggatatggatcatccaatagcaaccaacccactctacatttggcgtaaaaaaaaaaaaaaa

SEQ ID NO: 16598 - DNA, 6470 bp, Oryza sativa
  Clone ID: PAT_MRT4530_22331C.1
atggatcggcaatggatgtacgctgaccggcggtccaaagagtttattgacggtgtgcactattttttgagagtggccgaagctaacaggcaaaggggttttatttgttgtccatgcaataagtgtaagaatcagaaggagtattctgcatccaggactattcatttccacttgtttgagtcggggttcatgccaagctataattgttggacatcccatggagagcaaggtgttgaaatggaagaagatgaagtggaagacgacaatattccggactttgctcagtatgttggatttgaaggaaatcaaacgggcgaggaggaaatagctgctgatggtaacgacgttgcggatgatcttggtcagatgttgcaggacgccagggaggactgcgaaagtgaaaaggaggcccataaattggacaagatgttggaggaccacagaacttcattgtacccaggttgcgagcaggggcacaaaaagttggataccactctggagttgttgcaatggaaggcaaaaaatggggttagtgacaaggcatttggcgatttattgaaactagtcaagaacattcttccggggggaaacaaattgcccgagacaacgtacgaggctaagaagatagtctgcccgttaggactggaagttcataagattcacgcatgtccgaacgattgtatcctatatcgtggtgaggagtatgagaacctagaagcatgccctgtttgcaaagcactacgatacaagattagacgagacgatccaggagaaagttgacgggcagctaacaaagaagagaattcctgctagggtgatgtggtatttccctataataccacggctaaggcgtttgttcaggaacaaggggaatgctagaatgttgcgatggcacgctgaagagcgtcaacaggacgggatgctgagacaccccgccgatggttcgcagtgacgaaacatcgacagaaaatttaaagaatttggaaaggacgcacgaaacatacggtttggtttgtgtacggatggcatgaatccttttggagagatgagcagcggccatagcacttggcccgttacgatgtgtatctacaacctccccccctggctatgcatgaagaggaagtacataatgatgccgattattattcaaggccccaagcaacctggtaacgacatcgacgtgtacctaagaccactggtcgaagatcttaaacagttgtggaagaaggaaggtgtccccgtgtgggacgaggacaaacaggaggagtttaacctacgagcgctgctgttcgtaaccatcaacgattggcctgcacttagcaacctatccggacagtccaacaaggggtacaaggcttgcactcactgtaaggatgaaacagaaagtacgtatcttaagcactgtaggaaggttgtatacatgggtcatcgtcgattccttgcagcaaaccacccggtacggaagaaaggcaagcacttcgaacataaggccgaccaccgtacgaagcctaaacatcgcagcgggaaaacagtgtttgctatggttaaagatcttaaagtagtgttcggaaatgggcctggaagccagcctatagagagcgaagatggtcacgcggcgatgtggaaaaagaactctatattttgggagttaccatattgggaattcttggacatacgccacgcaatcgacgtgatgcacctcactaagaacctttgcgtaaaccttcttggcttcctaggtgtatacggaaagtcgaaagatacactggaagcacgtaatgatctgaagcatatggaacaacgtggcgaccttcacccggaaccaaaggagaaaggaagccattacttgagtccagccagctacactcttagcaaggcagagaaggaaagtatgtttgaatgcttggagagcataaaggtaccgtctggatactccacgaatatcaagcgaataataagcacgaaggagaagaagttcacaaacctaaagtctcatgactgtcacgtgttgatgacacaactgctaccagttgtaataaggggtatccttccagacaatgtccgggcaacaataacaaagctatgtgcattcatgaacgcaatttcgcagaaggtcatcgatccggatagattagaagcccttcagaatgaagtggtgcaatgtctcatcagttttgagttgatatttccaccttcatttttcaatataatgacgcatctgctttgtcatcttgtgaaagagatccgtattctcgggcctatgtacctatacaacatgtttcctttcgagaggtacatgagcgttctgaagaagtatgttcgtaaccgtgcttgtccagaggcaagcatcgccaagggttatggaacagaggaggtcatcgaattttgcgtagaatttatcgaagtccttcgcccaatcagggtacctgaatcacgccatgaagggagactacggggaaagggaactctcggaaggaaagcaataacgacggtagacaacaatttattccgtaaagcccatttcactgttctgcaacactcttcattggtagctccttacatcgaggagcacttggctctagttcgcgccaggaacatcggtaagtccgatgcatggattacacggcatcacattgatactttccccgcgtggctacgacaacatctcatgggtaacgagtcgatcaaccaacaacttgccttcctggcgaggggaccgtctgggtcgattgcgacattccagggatatgagatcaatgggtacacattctacacgagagcccaagacatgaagagcacgaaccaaaacagcgctgttcgtgtcgatgccatgggacacgatggaacaactgccacgtattacggtgccatcgaggacatatgggaacttgactatggtcctctcaaggttcctctgttccggtgccaatgggttaggttgactggtggaggcgtaatgattgatgacagtgggatgacaactgttgaccttaacaaggttggatactcggacgaaccttttgtccttgccaatgatgtaacgcaagtctttttcgtgaaggacatgtctagcaaaggaaagaagggcagaggtcctgatgagcctaagcgtcaagtggttctcccagtgcgccctcgtcttcttcaccaacacttagacgttttcggccgatcgatctctctcggcctctctccttcgccgccactgtctagggcaaatccccgcgccgacgccgccgtatctcgccgtcgtctcgagctcgtcgtcctcgccgccgcctccgcctcctccgctgtcgccgcatctctaagatgtttcttgtatcaacggatggctgaccgcgatgaggaacagatattgtacgatacaatcgcggagggaagcagccagtactggaatgaagaagaggggaacgaggatccaaaccagtacttgaacgaggaagggaatgtggagagggatgcggaggggaaccagcaggggcacgtggaaagggatgtggaggggaaccaggaggaggaggctagtggtagtcaaccctccgttggacagaagagggcacgcgggcaagaggtgcagcgaagaagcttgagggtcggcacatcataacggaagtggaagaagatggacgtcctagtgccccggccgaagccgccaagaactatgtacgtcacagcggttgggttgtgcgggataacgtgcctgtcagtacggtgtactggcgaagaacaagggcacgcggagatcatgagagctttgtcccagattcggagaaagagatgctgtggaccacaatgctcgagacattcacccttcctgcgggtacagaggacaaagtgaaaaggtggactctgaagaaaatggcagaacagtttcagagcttcaagggagatctgtaccagaagtatatactgaaggggcagacaccgaacttcgacacattcccaaagctaagggatcactgggacgagttcgttgcatataagacaggtgaacaagggcaggcgatgatggaaagaaacaaagaaaataccgccaagaagaagtaccatcaccacttggggtcaggaggctatagcgtcgcgatgccgaagtgggaggagatggaggctagcttgattgagaggggtatcgaaccggcaacagccaattggccggaacgatcgaagttctggtactatgctcacggtggaacgctcaacccagctgatggctcactggtcttcggcgatcagatacgagaggctgcgcgacgactaacagatgcagtggaagcctcctctcagggcacgttccgaccagacagagatagggacgagctgacactcgccctgcatactccagagcatccaggacgaacacgagggaaatgggtgattccttggaagattggtttcaaggaggacatccacacgtacaggagtcggatgaggagcaagagagataccgaggcgaagattgcagacctagagttccgggtatcgagctacgaagtcaacatgcaagaggaggtggcaaggaaggttgatgaacgcatggccgcacatcggtcccatgatccccagccgaccattcctcctgcaatggtgagcccgtcagtaaaccgtagcagctgcgcctcaacggggcaggtaggatcacagagcatggacgccatgcaaacacaggacgaatcgacctgtcccgttgatgacatcactcagcggacaccatgtgagctgcatattcctttcaagaacttatcaataaaggtggcgtcgggcatggccatcccaacggacccttcaggtacttaccactgcaggccgattccagcaggatactcgaaggtcgaagttgagttggtcgaaggcgcgtacgaggacctcgagctggattaccctggaggagacggtgagacgcatctacgagacacaagccatgccattattctatggcgcaggcggtacatcatcctccctaggcgacaagcggcgtctcgtgcaccatctcctccggctccgccatctcctcctcaggatcctgcaccgtctcctcctcatgctccgccagcaccgtctccacctcaggctccagcatcgactcctcctcaggatcctgcaccgactcctcctcgtgctcctacacctactcctccgcaagctcctcttccggcaccttcaaaatcaagggcccccccagctccaccgcctgcccacacaagggcaacgaagaaggcgaaagttgacgccgccaagaacaaggacccggggtacgattgcacgcaagaggagcttgacgcttacgttgcatcagaagtcaagagacaattcaagcctcgaagtccagaaaagaagattcctatagaccccagtgtcaggaatttcttcagtggtatgtctacacctgtcaaggaggccatcaagctatcggactatgagcgaacactgaagaaagcatcttctggaaagtccaaaccagtccctcagcttggagagcaaccaaaccaggagatcgagccgttggtgaccggggaagacatgacgagagaagaatttattattgacaccggtctaactacggatcaattgctaggagttgaaccaatagaaaaggcggaattaaaatacatgtacgaactcggtaaaccgcttgtcaagcccgagctggtgcagtccctacccacacaaatgtacaagttccatcagctgtacgtggagatgagcgccaccggtagagagatgatcggagcgaggatcagagacccggacttcttgcaaggagatgatattctctagatcaatttcaagggaatctacgaagtataccagctggacgccctcgacgtctctattatgagttgctggactttaatggagattcaacgggcccgacggcggagggttttcgatactggattcatcgaccctcggagagtaaacgttgcaatgctcgaccaatatccgcaggaaacagaggacaatctcgtccatctcctgaaggcgcagcattacaagacgttcatactgttaccgtacaacacagaattccactgggtgcttttactcttcgacctgtcggcctgcaccgtcaatgtatatgactcaatggataaaaaagagtctacgtttgacaaggttttcgaacttatagatagggcttggtttcggttccgtcatttggtccgcgacaactagagagaaagacttaggcggaggttcaaatttccttttattcgcatgagggataacctgaccacacacaaggaatttatcgcagcggttcaagaacaactcatgggattcatcaacgaagaaatccttgatcccaagggtgaattctactacgacggaaacataattcaccggtccttagcttctgagctagcagcgactactactactctcccgcctcgtgctttgtgccttggaagagaacggagctggacaagcaggcggtggcaaaacaccaaagtttggaattaagagtg

SEQ ID NO: 16599 - DNA, 2601 bp, Oryza sativa
  Clone ID: PAT_MRT4530_22332C.1
atgtcgtcaagtctcgtcaacaacagcgtcgaccccagcgtcaaccaaggagttccgacttcaataatactggtgtggactcaagttggtgaaatcgtcttcccggtttacaccacggtgccggtctcgattggtccatcagtgatcggaaatgagaatgccgtggccataaccccggacgaccccacgccaaaggatcctcccgcagaagcggagaacggaacgtcgacgacatccaagccagaggaaaatcctagtgcggccaaatcttgtccttccgacaagaatcacgagccgacaaggacaacttccgaggcgacaaggtcctggtgccctattcacaaaaccaggaaacacaccttgcaagcttgttgggtttttctcaacgcacaagctgagatccgtgcctgcaaagagcgtggaattcagcgtacttcttcaactcgtgatgtctattgtcctatccacaagacaaagaatcacgacctctcaagctgcaagattcttctcaaagccatgaagacgtcgcctcctaaggtccagcagtcacaaatctctcctagagatgtgaacaaggaacgaggagcgacggtcatctcagaccgattcgttggggtgatcgatgtcaatccccacgagccatcagtcctacactcgctcgaggaccagggttcatcgtcgacaagcacaccacgcgatgtgtttgctatcgaagggaccagcgcgtctgcgcacgccgacacggaagcagagaatcaagtggttacaccggcccagcacatcggggccatcaacgcaatactgagggaaacctcttatgatcccgttctgaacgatgatctcgcacgcaacgcgttcgaggaggccgctgccgcggcacacccagaacaatcaccagctggcggtgcaaatggcgcaccaccagagcagcgggcctcacctcgacaagccacccctccaccccgcggcaccagcgatctccgtgaccatttgaatggtcgccaagaagcacgacgcgcgcaagacaacgagaatcgttcccgatatcgtctctattcacgatgtcgagagaacgaagagcgaggaggacacccgagcgagaaccgagaccgtgataaccgccacaaccaccacgagcgcgatgatcacgaacagcggatgccgggcgatactggtcgaggacgccgccataacgatggcgatgacggagatcggcgtcgggacgacaacgatagacatccgcgaaggacatacgatcgccgacaacccaccgcccccagcgctgggtgtagagctttcaaccgttcgctacgagatgtccgatggcctaagagattccgaccgggagcaatagagaagtacgatgggagtaccgacccagaagaattccttcaggtctactccacggtactctacgctgccggagcagacgacaacgcgttggcaaattatttgccgacggcattgaagggttctgcgcgttcatggctgatgcacctcccgccctactcgatttcttcgtgggcagatctgtggcaccagttcgtcgctaacttccagggaacttacaagtgccacgcgatcgaagacgatctacacgcattgacacataatccgggtgaatctttgagggactatgttcggcgctttaatgagtgcagaaatacaatccccgaaatcaccgacgcttctgtgattcgcactttcaaaaccggtgtcagagatcgctatactacccaggagttggcaacaagacggatcacaactacccgaagattgttcgagatcgttgatcgatgcgctcacgcggacgacgcactaagacgcaagaacgacaagccgaagacggggggagagaagaaaccagccaaggacgcacctgaaccaagcaagaagaaaagtagcaagagtgggaaaaggaaagctcaagcggaagtcctcacgtcagaatacgagcgccctcccaagcacccagacctacaaggcagcgacacgaagagaatatggtgccctatacacaagtcggacagacataaaaaagtcgctggaaaagcaactggcattggagaagggcaagcgagttccacgacgtactcctcaaagcaagaatacaagaaagtggagcgtgaagtttgttcgacatggcagggggctgcacccaagatgaagtggtccgaacagaagatcaagttctcagatgaggaccaccccaaggctgctatcatctcaggacgatatccaatcgtggccgagcccactatttggaatatcaaagtcgcgcgagttctcatagatggcggcaactccatcaacctcctcttcgccagcaccttggacgcgatgggaattccacgaagcgagttgactcccaccgatcaacccttccatgggattactcctcagtcgtcgtccaagccattgggcaagattacattgcctatgactttcggccaagcaaataacttccgaacggagcagatcacctttgatgtcgctgaatttgatacagcatacaacgtcatcatcgggagaactgcactcgtgaagttcatggccgcatcattccaaacttttctcgtgcaacaactcaagattaattaa

SEQ ID NO: 16600 - DNA, 184 bp, Oryza sativa
  Clone ID: PAT_MRT4530_22333C.1
gtcagattaagctggcaagccgttggttgccttgtgggccttgccggagctagtgagggagtgaccagagaaaaatgaatgagcttttgtaatgcacaccctatcagactttgtggccttgataaaagtaataatttatgagatggctacagaaatgtttactgaaaaaaaaaaaaaaaaaaaa

SEQ ID NO: 16601 - DNA, 6296 bp, Oryza sativa
  Clone ID: PAT_MRT4530_22334C.1
atggatcggcaatggatgtacgctgaccggtggtccaaagagtttattgacggcgtgcattattttttgagagtggccaaagctaacaggcaaaagggttttatttgttgtccatgcaataagtgtaagaatcagaaggagtattctgcatccagaactattcatttccacttgtttgagtcggggttcatgccaagctataattgttggacatcccacggagagcaaggtgttaaaatggaagaagatgaagtggaagacgacaatattccggactttactcagtacgctggatttgaaggaaatcaaacgggcgaggaggaaagggatgctgatggtaacaacgttgcggatgatcttggtcagatgttgcaggacgccaaggaggattgcgaaagtgaaaatggggcccataaattggacaagatgttagagggccacagaacgtcgttgtacccaggttgcgagcaggggcacaaaaagttggataccactctggagttcttgtaatggaaggcaaaaaatggtgttagtgacaaggcatttggcgatttattgaaactcgtcaagaacattcttccggagggaaacaagttgcccgagacaacgtacgaggctaagaagatagtctgccctctaggactggaagttcagaagattcacgcatgtccgaatgattgtatcctatatcgcggtgaggagtacgagaacctagaagcatgccctgtttgcaaagcgctacgataaaagtttagacgagatgatccaggagaagttgacgggcagctaacgaagaagagaattcctgctaaggtgatgtggtatttccctataataccacggctaaggcgtttgttcaggaacaaggggaacgctagaatgatgcaatggcatgctgaagagcgtcaacaggacgggatgctgagacaccccgccgatggttcgcagtggcgaaacatcgacagaaaatttaaagactttggaaaggacgcacgaaacatacggtttggtttaagtacgaatggcatgaatccttttggagagatgagcagcggccatagcacttggcccgttacgatgtgtatctacaacctccccccgtggctatgcatgaagaggaagtacataatgatgccgattataattcaaggccccaagcaacctggtaacgacatcgatgtgtacctaagaccactggtcgaagatcttaaactgttgtggaaaaaggaaggtgtccccatgtgggatgaggacaaacaggaggagtttaacctacgagcgctgctgttcgtaaccatcaacgattggcctgcacttagcaacctatccgggcagtccaacaaggggtacaaggctagcactcactgtatggatgaaacagaaagtacgtatcttaagcactgtaggaaggttgtgtacatgggtcatcgtcgattccttgcagcaaaccacccggtacggaagaaaggcaagcactttgaacataaggcggaccaccgtatgaagcctaaacatcgcagcgggaaaacaatgtttgctatggttaaagatcttaaagtagtgtttggaaaggggcctggcagccagcctatagagagcgaagatggtcacgcggcgatgtggaaaaagaactctatattttgggagttaccctattgggaattcttggacgtccgccacgcaatcgacgtgatgcaactcactaagaatctttgcgtaaaccttcttggcttcctaggtttatatggaaagtcgaaagatacactggaagcatgtaatgatctgaagcatatggaacaacacggtgaccttcacccggaaccaaaggagaaaggaagccattacttgagtccagccagctacacttttagcaaggcagagaaggaaagtatgtttaaatgcttggagagcatcaaggtaccgtctggatactccacgaatataaagcgaataataagcacgaaggagaagaagttcacaaatctaaagtctcatgactgtcacgtgttgatgacacagctgctaccagttgtaataagaggtatcctcccagacaatgtccgggcaacaataacaaagctatgtgctttcatgaacgtaattttgcaaaaggtcatcgatcctgatagattagaagccctgcagaatgatgtggtgcaatgtcttgtcagctttgagttgatatttccacattcatttttcaatataatgacgcatctactttgtcaccttgtcaatgagatcggtattctcggtcctgtgtacctacacaacatgtttcctttcgagaggtacatgggcattctgaagaagtatgttcgtaaccgtgctcgtccagaggcaagcatcgccaaggggtatggaacagaggaagtcattgaattctgcgtagaatttatcgaagcccttcgcccaatcggggtacctgaatcacgccatgaagggagactacggggaaaggggactctaggaaggaaagcaataatgacggtagacaacaatttattccgtaaagcccatttcacggttctgcaacaatcttcattggtggcttcctacatcgaggagcacttggctctagttcgcgccagaaacatcggtaagtccgatgcatggattacaaggcatcacattgatactttctccacgtggctgcgacaatatctcatgggtaacgagacgattaaccaacaactagccttcwtggcgaggggaccatctggctcgatckygacattccagggatatgaaattaataggtacacattctacacgagggcccaagacatgaagagcacaaaccaaaacagtgctgttcgtatcgatgccataggacatgatggtacaactggcacgtattacggtgccatcgaggacatatgggaacttgactatggacctctcaaggtccctctgttccagtgccaatgggttaggttaactggtggaggtgtaacgattaatgacagtgggatgacaacagttgaccttaacaaggttggatactcggacgaaccttttgtccttgtcaatgatgtaacccaagttttttacgtcaaggacatgtctagcaaaggaaaaaagggcaaagggcctgacgagcagaagcaccacgtggttctcccagtgcgccctcgtcttttccaccaacacttagccgtttttcgatctcggcttctccttcgccgctaccgtgcctagggcaaccacgtgccgacaccaccgtcgtctctcgccgtcgcttggtggtcctcgccgcctctgccgcagacgctgccgccgcacttcttgggtgttttttgtatgcatagatggctgatcgcgatgaggaacagatactatacgatacaatcacagagggaagcagccagtactggaatgaagaagaggggaacgatgatccaaaccagtacttgaacgaggaggggaacgtggagagggatgcggaggggaacaaggaggggaacgatgcggaggaggctagtggaagtcagccctctgctggacagaaaagggcacgcggacaacgaggtgacgcgaagaagatagagggttggcacatcataactgaggtggacgaagacggccgacctagtgccccagcagaagcagccaagaattttgtacaccacagcggttgggttgtgagggacaacatgcctgtcagcatggtttactggcgcagaacaagggcacgcgggtatgatgacagctttgtcccgaactcagagaaagatatgttgtggaccacaatgctcgagacgttcacgctacccgcgggtatggataacatagtgaaatagtggactctgaagaaaatggcagaacagttccagagcttcaagggagatctctacaagaaatacatcctgaagggactaacaccgaacttcgacgtattcccaaagctaagggatcattgggacgagttcgttgcttacaagacggggcaacaagggcaagcgatgatggccaaaaacaaagaaaatgccgccaagaagaagtaccatcaccacccttggggtcaggcggatatagcgtcgcgaggccgaagtgggaggagatggaggctagcttgcttgagaggggtatcgaaccggccaccgctaattggctagatcgatcgaagttctggtactatgctcacggtggaatgcttaacccagttgatggctcccttgtcttcagcgattagatacgcgaggcttccagtcgactaacggacgtagtggtagccacttctcagggcacattccgacccgacagagagaaggatgagctgtcactcgccctacagactcccgagcatccaggacgaacacgagggaaaggcgtgattccctggaagattggatttaaggaggacatccacacgtacaggagtcggatgaggagtaagagagataccgaggcgaagattgctgatcttgagtacagggtatcgagctacgagctcagcatgcaagaggaggtggcaaggaaggtggatgaacgtatggccgcacatcggtcctaggatccccagccgtacattcatcctgcaatggtcagcccatcaggcaatcgtagcagctgcgcctcaatggggcaggtcggatcacagagcatggacgccatgcaaacccaggatgaaaccacctgccccgttgatgaggtcacgcagcggacaccatgtgagttgcatattcccttcaagaacttatcaatcaaggtggcgtcgggaatggccatcccaacagacccttccgggacttaccactacaggccgattccagcaggatactcgagggttgaagttgagctggtggaagccgcgtacgaggacctcgagttggactacccaggaggggacggtgagatgcatctacgagacacaagccacgccatcatactatggcgcaagcggtacatcatccttcctgggtgacaagaggcatttcgtgcaccatctcctccggctccgccatctcctcctgcaccatctcctcaggttcctccaccacgtcctcctgcaccatcacctccggctcctccgccacctgccgctgcaccatctcctccggytcctccgcctccaccgtgtccgcctgcacctcccaagacaaggtcttgccaagctccaccgcctgcccgcacaagggcaacgaagaaggcgaaggttgacgccaccaaaaacaaggagccaccatacgattgcagtcaagaggagcttgatgcttatgtggcaggagaggtgaagaggcaactcaagcctcggagtcctgaaaagaagatacctactgacccgagcgtgaagaacttcttcaagggaatgtccacaacaaacaagaaggcgttacagatatcggactatgaccgaacacttcagagagcctagcacaagaagtccaaaccagtccctcagcttggagaacaaccaaaccaagaggtcgagccgttggtgaccggcgaagattttggcataacggatttcattgcagacaccggtctaactttggatcagttggttcgaggcgcaccaatcccggaggcggaagtggcaaacaagtttgaactcggtaaaccgcttgtcaaacctgaacaggtggagtccctaccgacacagatgtacaaattccatgaacggtacatggaaatgagcgccaacggtagagagatgttcagagcgaggatcagaaaccccgacttcttgcaaggagacgatgttctctggatccatttcaaggatttcttcgatctgtaccagttggacgccctcgacgtctctcttctgagcgcatggattttaatggagattcaaagggcccgacggcggagggtctacgacactgggttcatcgaccctcagagaatcaacaccgaaatggtcgacaagtacgagaaagacacagaggacaatctcgtccatctcctaacgcagcagcatttcaagacatacatactactgccgtacaacacagaattccacttggtcctgttattcttcgacttggatgcatgcagagtcactgtgtacgactcaatgaataaagaggagaagatttttgacaaggtcttcaaactgatagacagggcttgggatcggttccatcaattggtccgcaggacttggaaagaaaaacttgaacggaggtttcattttccacgtattcacatgagggataatctcccacaaaaggattttatcatagctgttcaagaacaactgatgggattcatcaacgaagaagtccttaatctcgacggtgaattctactacgactgttcgacaattcataacgtcggtccttcctctt

SEQ ID NO: 16602 - DNA, 1290 bp, Oryza sativa
  Clone ID: PAT_MRT4530_22335C.1
ctaggtagtatagcaatctctaacaccggttttgaaaacgcgaatcacagatgcgtcgatgatttcggggattgtatttctgcactcattaaagcgccgaacatagtccctcaaagatttgctcggattttgtgtcaacacgtgtagatcgtcttcgatcgcgtggcgcttgtaagttccttggaaattagcgacgaactgctgccacagatctgcccacgaagaaatcgagtagggcgggaggtgcatcagccatgaacgcgcataacgcttcaatgccatcggcaaataatttgccaacgcgttgtcgtctgctccggcagcgtagagtaccgtggagtagacctgaaggaattcttctgggtcggtactcccatcgtacttctctattgctcccggtcggaatgatgaggatgaagaggatgatgacgacgacgatgggtcacttggctctagtgtgcgattccaaggatgacgtccgggttctcgggaatcctgtcgtcgtccaccgttgtcatcccggcgccgatctccgtcatcgtcatcgttatggcggcgtcctcgacctgtatcgcccggcatccgttgttcgcgatcatcgtgctcgtggcagttgtggcagttatcacggtctcggttctcgctcggttgtcctcctcgctcttcgttccctcgacgtcgtgaagagagacgatgtcgggaacaattctcgttgtcttgcgcgcgtcgtgcttctcggcggccattcaaatggtcacggagatcgctggtgccgcggggtggaggagtggcctgccgaggtgaggcccgctgctctggtggtgcaccatttgcaccgccagctggcggttgttctgggtgtgccacggcagcggcctcctcgaacgcgttgttgaggttggtcactgattccggtagtcgttctgtccactgtgcgagatcatcgttcagaacgggatcataaggggtttccctcagtattgcgttgatggccccgatatgctgggccggtgtaaccacttgattctctgcttccgtgtcggcgcgtgcagacacgtaggatccttctcgggcttggatgtcgtcgacgttctgttctccacttatatgggaggatccttcgacatggaattgtccggggttgtagccacggcgttctcgcttccggtcattgatagaccagtccaaaccggcaccatggtgtaaaccaggaagacgatttcgccgacttgagtccacccagcattgttgaagtagaaactccttggttgaagccggggttgacgccat

SEQ ID NO: 16603 - DNA, 6368 bp, Oryza sativa
  Clone ID: PAT_MRT4530_22336C.1
atggatcggcaatggatgtacgctgaccggcggtccaaagagtttattgacggcgtgcactattttttgagagtggccgaagctaacaggcaaaggggttttatttgttgtccatgcaataagtgtaagaatcagaaggagtattctgcatccaggactattcatttccacttgtttgagtcggggttcatgccaagctataattgttggacatcccacggagagcaaggtgttgaaatggaagaagatgaagtggaagacgacaatattccggactttgctcagtatgttggatttgaaggaaatcaaacgggcgaggaggaaatagctgctgatggtaacgacgttgcggatgatcttggtcagatgttacaggacgccagggaggactgcgaaagtgaaaaggaggcccataaattggacaagatgttggaggaccacagaacttcgttgtacccaggttgcgagcaggggcacaaaaagttggataccactctggagttgttgcaatggaaggcaaaaaatggggttagtgacaaggcatttggcgatttattgaaactcgtcaagaacattcttccggggggaaacaaattgcccaagacaacgtacgaggctaagaagatagtctgcccgttaggactggaagttcataagattcacgcatgtccgaacgattgtatcctatatcgcggtgaggagtatgagaacctagaagcatgccctgtttgcaaagcactacgatacaagattagacgggacgatccaggagaagttgacgggcagctaacaaagaagagaattcctgctaaggtgatgtggtatttccatataataccacggctaaggcgtttgttcaggaacaagggaaatgctagaatgttgcgatggcacgctgaagagcgtcaacaggacgggatgctgagacaccccgccgatggttcgcagtggcgaaacatcgacagaaaatttaaagaatttggaaaggacgcacgaaacatacggtttggtttgagtacggatggcatgaatccttttggagagatgagcagcggccatagcacttggcccgttacgatgtgtatctataacctcccccctggctatgcatgaagaggaagtacataatgatgccgattattattcaaggccccaagcaacctggtaacgacatcgacgtgtacctaagaccactggtcgaagatcttaaacagttgtggaagaaggaaggtgtccccgtgtgggacgaggacaaacaggaggagtttaacctacgagcgctgctgttcgtaaccatcaacgattggtctgcacttagcaacctatccggacagtccaacaaggggtacaaggcttgcactcactgtatggatgaaacagaaagtacgtatcttaagcactgtaggaaggttgtatacatgggtcatcgtcgattccttgcagcaaaccacccggtacggaagaaaggcaagcacttcgaacataaggccgaccaccgtacgaagcctaaatatcgcagagggaaaacagtgtttgctatggttaaagatcttaaagtagtgttcggaaaggggcctggaagccagcatatagagcacgaaccaaaacagcgatgttcgtgtcgatgccatgggacacgatggaacaactgccacgtattacggtgccatcgaggacatatgggaacttgactatggtcctctcaaggttcctctgttccggtgccaatgggttccttaacaaggttggatactcggacgaaccttttgtccttgccaatgatgtaacgcaagtctttttcgtgaaggacatgtctagcaaaggaaagaagggcagagggcctgatgagcctaagcgtcaagtggttctcccaggcaaaagaaaaatcgtcggagttgaggacaagactgacgaggattacgatcagttggatgggcaaccccctttcacggtgacgattgaccctagcatcctcctatcaaatgaagacaccccttactcacgcagcgatcacaaggagggaacaatagtgaggagaaagtacgtgccgtaattattgtgtacacgatgtaaactattttggatgtattgattatccatataaatcaattgatgtatggcatatgttaattacgcacgattattagaggtttcaacaagtttaaatcatgtatatgctagttatatgtgatacttacaatttttaaaagttttaaatcacacaggtggcaatttcatatgtatgttaattagagtttttaacatttaatttactagcattcatatgctaattataattgactagaggatttttaaaagttttaaatcacgcaagtggcaatttcatatgttaattagagtttttaacatttaatttactatcattcataagctaattataattgactggagaatttttaaaagtattaaatttaatatatttttaaaactatcattcatatattagagtttttcacaatttaatttactatctttcatatgctacttatatatgactattcgaatttttaaaaggttaaaatcatgcatgtggcatttacatatgttaattagagtttttagcatttaatttaatataattcctacgctaagtacatatgatgattacaatttttattaattttaaatcatgcagtatgtacatacatatcttaattagagtttttaccaatataataatatcattcatatatatgctaagtatatatgattattggaatttttattaattatatttgcttattacgatttatccacttaatttattacagccaaaaataatttttcgaagtaattgtcattaatctttgtactttaaataatgttaatgcattaacttctattttataaacacatatgtaagcgaaaatcatatgcagtgctataatctttagtcccggttcttaaccctaaccgggtttaaaaagaatttcgaaatagcgggaaaagatatttactcccggttgttgagaacaaccgggactaaagatatctttagtcccggttgttgagaacaaccgggagtaaagatccaggggtatatatattcccggtgcgccctcgtcttcttcaccaacacttaaacgttttcagccgatcgatctctctcggcctctctccttcgccgccactgcctagggcaaatccccgcgccgacgccgccgtatctcgccgtcgtctcgagctcgtcgtcctcgccgccgcctccgcctcctccgctgccgccgcatctctcagatgtttcttgtatcaacagatggctgaccgcgatgaggaacagatattgtacgatacaatcgcggagggaagcagccagtactggaatgaagaagaggggaacgaggatccaaaccagtacttgaacgaggaagggaacgtggagagggatgcggaggggaaccagcaggggcacgtggaaagggatgtggagggtgaaccaggaggaggaggctagtggtagtcaaccctccgttagacagaagagggcacgcgggcaacgaggtgcagcgaagaagcttgagggtcggcacatcataacggaagtggaagaagatggacgtcctagtgccccggccgaagccgccaagaactatgtacgtcacagcggttgggttgtgcgggataacgtgcctgtcagtacggtgtactggcgaagaacaagggcacgcggagatcatgagagctttgtcccagattcggagaaagagatgctgtggaccacaatgctcgagacattcacccttcctgcgggtacagaggacaaagtgaaaaggtggactctgaagaaaatggcagaacagtttcaaagcttcaagggagatctgtaccagaagtatatactgaaggggcagacatcgaacttcgacacattcccaaagctaagggatcactgggacgagttcgttgcatataagacaggtgaacaagggcaggcgatgatggaaagaaacaaagaaaatgccgccaagaagaagtaccatcaccacttggggtcaggaggctatagcgtcgcgatgccgaagtgggagcagatggaggctagcttgattgagaggggtatcgaaccggcaacagccaattggccggaacgatcgaagttctggtactatgctcacggtggaacgctcaacccagctgatggctcactggtcttcggctatcagatacaagaggttgcgcgacgactaacagatgcagtggaagcctcctctcagggcacattccgaccagacagagatagggacgagctgacactcgccctgcagactccagagcatccaggacgaactcgagggaaaggggtgattccttggaagattggtttcaaggaggacatccacacgtacaggagtcggatgaggagcaagagagataccgaggcgaagattgcagacctagagttccgggtatcgagctacgaactcaacatgcaagaggaggtggcaaggaaggttgatgaatgcatggccgcacatcggtcccatgatccccagccgaccattcctcctgcaatggtgagcccgtcaggaaaccgtagcagctgcgcctcaacggggcaggtaggatcacagagcatggacgccatgcaaacacaggacgaatcgacctgtcccgttgatgacatcactcagcggacaccatgtgagctgcatattcctttcaagaacttatcaataaaggtggcgtcgggcatggccatcccaacggacccttcaggtacttaccactgcaggccgattccagcaggatactccaaggtcgaagttgagttggtcgaaggcgcgtacaaggacctcgagctggattaccctggaggagacggtgagacgcatctacgagacacatgccatgccattattctatggcgcaggcggtacatcatcctccctgggcgacaagcggcgtctcgtgcaccatctcctccggctccgccatctcctcctcaggatcctgcaccgtctcctcctcatgctccgccagcaccgtctccacctcaggctccagcatcgactcctcctcaggatcctgcaccgactcctcctcgtgctcctacacctactcccccgcaagctcctcttccggcaccttcaaagtcaagggcccccccagctccaccgcttgcccacacaagggcaacaaagaaggcgaaagttgacgccgacccggggtacgattgcacgcaagaggagcttgacgcttacgttgcatcagaagtcaagagacaattcaagcctcgaagtccagaaaagaagattcctatagaccccagtgtcaggaacttcttcaggggtatgtctgcatctgtcaaggaggccatcaagctatcggactatgagcgaacgctgaagaaagcatcttctggaaagtccaaaccagtccctcagcttggagagcaaccaaaccaggagatcgagccgttggtgaccggtaaagaaatgacgatagaacaatttattactgacaccggtctaactacggatcaattgctaggagtcgcaccaatcgaaaaggcggaagtgaaatacatgtacgaactcggtaaaccgcttgtcaagcctgagctgctgcagtccctacccacacaaatgtacaagttccatcagctgtacatggagatgagcgccaccggtagagagatgatcggagcgaggatcagggacacggacttcttgcaaggagatgacattctctggatcaatttcaggggaatctacgaactataccagctggacgccctcgacgtctctattatgagttgctggattttaatggagattcaaagggcccgacggcggagggttttagatactggattcatcgaccctcggaaagtaaacgtcgcaatgctcgaccaatatccacaagaaacagaggacaatctcgtccatctcctgaaggcgcagcattacaagacgttcatactgttgccatacaacacagaattccactgggtgcttttactcatcgacctggaggcctgcaccgtcaacgtatatgactcaatggataaaaaagagtctacgtttgacaaggttttcgaacttatagacagggcttggtatcggttccgtcatttggtccgcggcaaatggagagaaagacttaggcggaagttcaaatttccttttattcgcatgagggataacctgaccacacacaaggaatttaccgcggcggttcaagaacaactcatgggattcatcaacgaagaaatccttgatcccaagggtgaattctactacgacgaaaacacaattcaccggtccttagcttctgagctagcagcgagtactactacgtcgaaatcccgtgcggcagcggcgggcggcggtcgacgtcgaccatct

SEQ ID NO: 16604 - DNA, 191 bp, Oryza sativa
  Clone ID: PAT_MRT4530_22337C.1
ctgtacaaattctgcagagtctaaaaactaatcgattagccgtgctcgcggttatgagcggcatatggatatgtgttgagtatagacttgtgtttattcttctaaatgctgaaatttactttcaaattgtgatgagatttgagaatgatctccttgctgccatggatggcaatgaggtgcatattcataca

SEQ ID NO: 16605 - DNA, 2346 bp, Oryza sativa
  Clone ID: PAT_MRT4530_22338C.1
atggaagaagatgaagtggaagacgacaatattctagactttgctcagtacgctggatttgaaggaaatcaaacgggcgaggaggaaagggatgctgatggtaacaacgttgcggatgatcttggtcagatgttgcaggacgccaaggaggattgcgaaagtgaaaagagggcccataaattggacaagatgcaaaaaaatggtgttagtgacaaggcatttggcgatttattgaaactcgtcaagaacattcttccggagggaaacaaattgcccgagacaacgtacgaggctaagaagatagtctgccctataggactagaagttcagaagattcacgcatgtccgaatgattgtatcctatatcgcggtgaggagtacgagaacctagaagcatgccctgtttgcaaagcactacgatacaagattagacgagatgatccaggagaagatgacgggcagctaacgaagaagagaattcctgctaaggtgatgtggtatttccctataataccacggctaaggcgtttgttcaggaacaagtggaatgctagaatgatgcgatggcacgctgaagagcgtcaacaggacgggatgctgagacaccccgccgatggttcgcagtggcgaaacatcgacagaaaatttaaagactttggaaaggacgcacgaaacatacggtttggtttaagtacggatggcatgaatccttttggagagatgagcagcggccatagcacttggcccgttacaatgtgtatctacaacctacccccgtggctatgcacgaagaggaagtacataatgatgccgattataattcaaggccccaagcaacctagtaacgacatcgatgaaggtgtccccgtgtgggatgaggacaaacaggaggagtttaacctacgagcgctgctgttcataaccatcaatgattggcctgcacttagcaacctatccgggcagtccaacaaggggtataaggcttgcactcactgtatggatgaaacagaaagtacatatcttaagcactgtaggaaggttgtgtacatgggtcatcgtcgattccttgtagcaaaccacccggtacggaagaaaggcaagcactttgaacataaggcagaccaccgtacgaagcctaaacatcgcagcgggaaaacagtgattgctatggttaaagatcttaaagagttaccctattgggaattcttggacgtccgccacgcaatcgacgtgatgcacctcactaagaatcttttcgtaaaccttcttggcttcctaagtgtatatggaaagtcgaaagatacactggaagcacgtaatgatctgaagcatatggaacaacgcggtgaccttcacccggaaccaaaggagaaaggaagccattacttgagtccagccagctacactattagcaaggcagagaaggaaagtatgtttgaatgcttggagagcatcaagataccgtctggatactccacgaatataaagcgaataataagcacgaaggagaagaagttcacaaatctaaagtcttatgactgtcacgtgttgatgacacagctgctaccagttgtaataaggggtatcctcccagacaatgtccaggcaacaataacaaagctatgtgctttcatgaacgcaatttcgcagaaggtcatcgatcctgatagattagaagccctgcagaatgatgtggtgcaatgtcttgtcagctttgagttgatatttccaccttcatttttcaatataatgacgcatctgctttgtcaccttgtcaaagagatcggtattctcggtcctgtgtacctacacaacatgtttcctttcgagaggtacatgggcgttctaaagaagtatgttcgtaaccgtgctcgtccagaggcaagcatcgccaaggggtatggaacagaggaggtcattgaattccgcgtagaatttatcgaagaccttcgcccaattggggtacttgaatcacgccatgaagggagactacggggaaaggggactctcggaaggaaaacaataatgacggtagacaacaatttattccgtaaagcccatttcacggttctgcaacaatcttcattggtggctccctacatcgaggagtacttggctctagttcgcgccagaaacatcggtaagtctgatgcatggattacaaggcatcacattgatactttctccacgtggctgcgacaacatctcatgggtaacgagacgattaaccaacaactggccttcctggcgacgggaccatctggctcgatcgctactttccagggatatgaaatcaatgggtccacattctacacgagggcccaagacatgaagagcacggactag

SEQ ID NO: 16606 - DNA, 376 bp, Oryza sativa
  Clone ID: PAT_MRT4530_22339C.1
gattaacagtaaggaatgaggaactcaaaattgttaactagaaggaggacaccaaagctgagcatcagaacggagaagcggaaagccaacagtgaatcgatgcgttataagattttaaacattggggtcaaggtataggaacccaacgtgtaacaggcactatagcaaaaaggagcaggttgaaactaagaggtggtttggcgtggggccctaactgatggtaccggatatatgatattggggaacatggtatggacagaaccagtctccaaggcaagcagggccggtaagcagggtggaccccagctgggaccacctcagaaatacgacgagtgaattacggttcatgactggcacacaatgctgtggcgggtga

SEQ ID NO: 16607 - DNA, 405 bp, Oryza sativa
  Clone ID: PAT_MRT4530_2233C.1
gaatcatcttttcctatactaattactagcactactactccagtagagtaggagtcgtgctaagtaatattctgcaaataaagattttcttgtcgcctccggggcggaaaccaatcaacccgggccaacctctttctacctataaattctactactaccccggatagcggattcaccaagttcgcagcagcaatcgtcttcctcttcttcttgttgttgttggcgatgtcggcgatgtcggcggcgggcggcggcggcggcgtggggaaggtggagcggctgtcgtcgatcgacgcgcagtgcggcagctggtgccggcgaagtgttcggaggacgacaagctcatcgagtacgacgggcttctcctcgaccgattcctcgacgtcctccatggcctcacgggga

SEQ ID NO: 16608 - DNA, 916 bp, Oryza sativa
  Clone ID: PAT_MRT4530_22340C.1
cgctttccacgtcttgcagacggcgccaaacttgatccagtctgcgaggactaggcgggttacaaatgttagagtttgtgtcgaatatgtgtacgtagtcggttacagtttaggacttggagttgtaataggtattaggactagagtatgagtcggactctatcctaggatccctcataaatagaggggcgtgcctgttgtaaccgcatggcgacttagcatagcgagagggagcggctgccggcgtcgaccggccgtgagtcgttgtaactctgatacgctatatatgatggatcggggaggagcgcccgtaatcagtgccccggagatgtaggctacggctgaactccgttaccaaatatcgtgtctcggtgtcgtcatcgttttggatctcctatggagttttcttccgtatttagctatcgatgtcgatttcggggctggttttataacaagtggtatcagagcctgcgggaggtccatggtagaggcgcgatggaggtgctccacaccgcgtagcctgctataatgcccagggaggggcattggcgcaaggtggagcacggcggcgatcaacggagtcttgatcggtggatcgaacacttctggcggcggccggaaccgtcgatggctgccttcaacagggagatgactagacatggtgctcgggttgatggcggcggaagcgattggcgatccaatcggtgggtcggacacttcgggcgggtggctcggactttccgggagacggctagacgtagcgctcgggtcgttcggcggctgggaagacggcatgcgacttagatacgaagaagcccaggaggtcagggtcgcggcggtgtgcgcgtcctgcgtcgaagccgagccggcgacggagatcagggcgatgccgagaaggagctggctagggttttag

SEQ ID NO: 16609 - DNA, 5406 bp, Oryza sativa
  Clone ID: PAT_MRT4530_22341C.1
tggtataaaggaggatacggaagggtgattgttgagaaggttgaggttaggaaggataggaaaaagaaagaaagtgaaatatataagatggatcggcaatggatatacgctgaccggcggtccaaagagtttattgacggcgtgcactattttttgagagtggccgaagctaacaggcaaaggggttttatttgttgtccatgcaataagtgtaagaatcagaagaagtattctgcatctaggactattcatttccacttatttgagtcggggttcatgccaagctataattgttggacatcccacggagagcaaggtgttgaaatggaagaagatgaagtggaagacgacaatattccggactttgctcagtatgttggatttgaaggaaatcaaacgggcgaggaggaaatagctgctgatggtaacgacgttgcggatgatcttggtcagatgttgcaggacgccagggaagactgcgaaagtgaaaaggaggcccataaattggacaagatgttggaggaccacagaacttcgttgtacccaggttgcgagcaggggcacaaaaagttggataccactctggagttgttgcaatggaaggcaaaaaatggggttagtgacaagacatttggcgatttattgaaactcgtcaagaacattcttccggggggaaacaaattgcccgagacaacgtacgaggctaagaagatagtctgcccgttaggactggaagttcataagattcacgcatgtccgaacgattgtatcctatatcgcggtgaggagtatgagaacctagaagcatgccctgtttgcaaagcactacgatacaagattagacgggacgatccaggagaagttgacgggcagctaacaaagaagagaattcctgctaaggtgatgtggtatttccctataataccacggctaaggcatttgttcaggaacaaggggaatgctagaatgttacgatggcacgctgaagagcgtcaacaggacgggatgctgagacaccccgccgatggttcgcagtggcgaaacatcgacagaaaatttaaagaatttggaaaggacgcacgaaacatacggtttggccccaagcaacctggtaacgacatcgacgtgtacctaagaccactggtcgaagatcttaaacagttgtggaagaaggaaggtgtccccgtgtgggacgaggacaaacaggaggagtttaacctacgagcgctgctgttcgtaaccatcaacgattggcctgcacttagcaacctatccggacagtccaacaaggggtacaaggcttgcactcactgtatggatgaaacagaaagtacgtatcttaaccactgtaggaaggttgtatacatgggtcatcgtcgattccttgcagcaaaccacccggtacgaaagaaaggcaagcacttcgaacataaggccgaccaccgtacgaagcctaaacatcgcagcgggaaaacagtgtttgctatggttaaagatcttaaagtagtgttcggaaaggggcctggaagccagcatatagagagcgaagatggtcacgcggcgatgtggaaaaagaactctatattttgggagttaccatattgggaattcttggacgtacgccacgcaatcgacgtgatgcacctcactaagaacctttgcgtaaaccttcttggcttcctaggtgtatacggaaagtcgaaagatacactggaagcacgtaatgatctgaagcatatggaacaacgcggcgaccttcacccggaaccaaaggagaaaggaagccattacttgagtccagccagctacactcttagcaaggcagagaaggaaagtatgtttgaatgcttggagagcataaaggtaccgtctggatactccacgaatatcaagcgaataataagcacgaaggagaagaagttcacaaacctaaagtctcatgactgtcacgtgttgatgacacaactgctaccagttgtaataaggggtatccttccagacaatgtccgggcaacaataacaaagatatgtgcattcatgaatggaatttcgcagaaggtcatcgatccggatagattagaagcccttcagaatgaagtggtgcaatgtctcgtcagttttgagttgatatttccaccttcatttttcaatataatgacacatctgctttgtcaccttgtgaaagagatccgtattctcgggcctatgtacctacacaacatgtttcctttcgagaggtacatgggcgttctgaagaagtatgttcgtaaccgtgctcgtccagaggcaagcatcgccaagggttatggaacagaggaggtcatcgaattttgcgtagaatttatcgaagaccttcgcccaatcggggtacctgaatcacgccatgaagggagactacggggaaagggaactctcggaaggaaagcaataacgacggtagacaacaatttattccgtaaagcccatttcactgttctgcaacacacttcattggtagctccttacatcgaggagcacttggctctagttcacgccaggaacatcggtaagtccgatgtatggattacacggcatcacattgatactttccccgcgtggctacgacaacatctcatgggtaacgagtcgatcaaccaacaacttgccttcctggcgaggggaccgtctgggtcgatcgcgacattccagggatatgagatcaatgggtacacattctacacgagagcccaagacatgaagagcacgaaccacaacagcgctgttcgtgtcgatgccatgggacacgatggaacaactgccacgtattacggtgccatcgaggacatatgggaacttgactatggtcctctcaaggttcctctgttccggtgccaatgggttaggttgactggtggaggcgtaatgattgatgacagtgggatgacaactgttgaccttaacaaggttggatactcggacgaaccttttgtccttgccaatgatgtaacgcaagtctttttcgtgaaggacatgtctagcaaaggaaagaagggcagagggcctgatgagcctaagcgtcaagtggttctcccaggcaaaataaaaatcgtcggagttgaggacaagaccgacgaggattacgatcagttggatgggcaaccccctttcacggtgacgattgaccctagcatcctcctatcaaatgaagacaccccttactcacgcagcgatcacaaggagggaacaatagtgaggagaaaatatatggctgaccgcgatgaggaacagatattgtacgatacaatcgcggagggaagcagccagtactggaatgaagaagaggggaacgaggatccaaaccagtacttgaacgaggaagggaacgtggagagggatgcggaggggaaccagcaggggcacgtggaaaaggatgtggaggggaaccaggaggaggaggctagtggtagtcaaccctccgttggacaaaagagggcacgcgggcaacgaggtgcagcgaagaagcttgagggtcggcacatcataacggaagtggaagaagatggacgtcctagtgccccggccgaagccgccaagaactatgtacgtcacaacgatcatgagagctttgtcccagattcggagaaagagatgctgtggaccacaatgctcgagacattcacccttcctgcgggtacagaggacaaagtgaaaaggtggactctgaagaaaatggcagaacagtttcagagcttcaagggagatctgtaccagaagtatatactgaaggggcagacaccgaacttcgacacattcccaaagctaagggatcactgggacgagttcgttgcatataagacaggtgaacaagggcaggcgatgatggaaagaaacaaagaaaatgccgccaagaagaagtaccatcaccacttggggagtcggatgtggagcaagagagataccgaggcgaagattgcagacctagagttccgggtatcgagctacgaactcaacatgcaagaggaggtggcaaggaaggttgatgaacgcatggccgcacatcggtcccatgatccccagccgaccattcctcctgcaatggtggcgtcgggcatggccatcccaacggacccttcaggtacttaccactgcaggccgattccagcaggatactcgaaggtcgaagttgagttggtcgaaggcgcgtacgaggacctcgagctggattaccctggaggagacggtgagacgcatctacgagacacatgccatgccattattctatggcgcaggcggtacatcatcctccctgggcgacaagcggcgtctcgtgcaccatctcctccggctccgccatctcctcctcaggatcctgcaccgtctcctcctcatgctccgccagcaccgtctccacctcaggctccagcatctactcctcctcaggatcctgcaccgactcctcctcgtgctcctacacctactcccccgcaagctcctcttccggcaccttcaaagtcaagggcccccccagctccaccgcctgcccacacaagggcaacgaagaaggcgaaagttgacgccgccaagaacaaggacccggggtacgattgcacgcaagaggagcttgacgcttacgttgcatcagaagtcaagagacaattcaagcctcgaagtccagaaaagaagattcctatagacccccagtgtcaggaacttcttcaggggggaatctacgaactataccagctggacgccctcgacgtctctattatgagttgctggattttaatggagattcaaagggcccgacggcggagggttttcgatactggattcatcgaccctcgaaaagtaaacgtcgcaatgctcgaccaatatccacaagaaacagaggacaatctcgtccatctcctgaaggcgcagcattacaagacgttcatactgttgccatacaacatagaattccactgggtgcttttactcatcgacctggaggcctgcaccgtcaacgtatatgactcaatggataaaaaagagtctacgtttgacaaggttttcgaacttatagacagggcttggtatcggttccgtcatttggtccgcggcaaatggagagaaagacttaggcggaagttcaaattttcttgcgcaaagcaaaagcagggaactaacttgtgcggctattacgtgtgcgagtattgccactgccttgcagaccaaatcatcaccacaagagagctcgattttattcgcatgagggataacctgaccacacacaaggaatttatcgcggcggttcaagaacaactcatgggattcatcaacgaagaaatccttgatcccaagggtgaattctactacgacggaaacacaattcaccggtccttagcttctgagctagcagcgagtactactacgtcaaaatcgtag

SEQ ID NO: 16610 - DNA, 314 bp, Oryza sativa
  Clone ID: PAT_MRT4530_22342C.1
tctttaagctgcgacctccgttgcgcgagagagagaacgagtcgaacggaaggagttgggaaagggagacgcgagatttgctgttaccactaggaggccatggtggtggtggtggtgtgcgtgcgggggaattaggaggaggagcagttgatggtgattggcataccatggctttacccttgatagagttccttaaaagtttaacagcgtactcgtccatactcgtggagatactattaaacttgcttcgctgcatattatgtagcaacagttgggaaaggaatctagctgctgcggcggatactaaacatatt

SEQ ID NO: 16611 - DNA, 864 bp, Oryza sativa
  Clone ID: PAT_MRT4530_22343C.1
atgcgtcgccgcctctcgccgccgtatcgcgcctgcaccgccgctgccttgcgccgccggcccagcagggaaacgccgccttacgcactgggagccgccgccgccgaagtcaggcgtcggttcctcgccgggaactatcgcatccgccgccgcaagctcctgcgaaccccgacgaatgccgtgccgagctccacgccgccgcacaccgcctacaaggatgcgcctccagccgcccgtgacctcgccacccaaaccacctccgcctctgtgaaaatcagagggaaaaacaggttgaaccaaagcctctccagggttgaaccgctactggatgccggtctattcgccctaggctttgttcagccatatgccacaaaatacgccgcctttgaaacaattccatcgtgcaaatacctcgtcaacacctccaaacagcctatgggatccacccgctccgacttccgattgatcgccatcgatctagtcgcgagccgaagccgacaagtcgcatgccgtcttctcagccgccgaacgacccgagtgctatgtctagccatctccctgtcgaacgcaactcatcgaaaggcccgggccaccccgcccaaagtgttcgaatccaccgatcgagaacgccgatcgcctccaacttcaatcaacccgagcatgcggccgcacgtctccctgtcgagagtagctcaccggaaagtccgggccacctgcccgaagtgtccgacccgccgattggatcgccaatcgcttccgccaccatcaacccgagcaccacgtctagtcatctccctgttgaaagcagccatcgacggtttcggccgccgccagaagtgttcgatccaccgatcaagactccgt

SEQ ID NO: 16612 - DNA, 6337 bp, Oryza sativa
  Clone ID: PAT_MRT4530_22344C.1
atggatcggcaatggatgtacgctgaccggtggtccaaagagtttattgacggcgtgcattattttttgagagtggccgaagctaacatgcaaaagggttttatttgttgtccatgcaataagtgtaagaatcagaaggagtattctgcatgcaggactattcatttccacttgtttgagtcggggttcatgccaagctataattgttggacatcccacggagagcaaggtgttgaaatggaagaagatgaagtggaagacgacaatattccggactttgctcagtacgctggatttgaatgaaatcaaacgggcgaggaggaaagggatgctgatggtaacaacattgcggatgatcttggtcagatgttgcaggacgccatggaggattgcgaaagtgaaaagggggcccataaattggacaagatgttagaggaccatagaacgtcgttgtacccaggttgcgagcaggggcacaaaaagttggataccactctggagttcttgcaatggaaggcaaaaaatggtgttagtgacaaggcatttggcgatttattgaaactcgttaagaacattcttccggagggaaacaagttgcccgagacaacgtacgaggctaagaagatagtgtgccctctaggactgaaagttcagaagattcacgcatgtccgaatgattgtattctatatcgcggtgaggagtacgagaacctagaagcatgccttgtttgcaaagcactacgataaaagattagacgagatgatccaggagaagttgacgggcagctaacgaagaagagaattcctgctaaggtgatgtggtatttccctataatatcacggctaaggcgtttgttcaggaacaaggggaacgctagaatgatgcggtggcacgctgaagagcgtcaacaggacgggatgctgagacaccccgccgatggtttgcagtggcgaaacatcgatagaaaatttaaagactttggaaaggacgcacgaaacatacagtttggtttaagtacggatggcatgaatccttttggagagatgagcagcggccacagcacttggcccgttacgatatgtatctacaacctccccccgtggctatgcatgaagaggaagtacataatgatgccgattataattcaagggcccaagcaacctggtaacgacatcgatgtgtacctaagaccactggtcgaagatcttaaactgttgtggaagaaggaaggtgtccccgtgtgggatgaggacaaacagaaggagtttaacctacgagcgctgctgttcgtaaccatcaacgattggcctgcacttagcaacctatccgggcagtccaacaaggggtacaaggcttgcactcactgtatggatgaaacagaaattacgtatcttaagtactgtaggaaggttgtgtacatgggtcatcgtcgattccttgcagcaaaccatccggttcggaagaaaggcaagcactttgaacataaggcggaccaccgtacgaagcctaaacatcgcagcggaaaaacagtgtttgctatggttaaagatcttaaagtagtgtttggaaaggggcgtggcagccagcctatagagagcgaagatggtcacgcggcgatgtggaaaaagaactctatattttgggagttatcctattgggaattcttggacgtccgccacgcaatcgacgtgatgcacctcactaacaatctttgcgtaaaccttcttggcttcctaggtgtatatggaaagtcgaaagatacactggaagcacgtaatgatctaaagcatatggaacaacgcggtgaccttcacccagaaccaaaggagaaaggaagccattacttgagtctagccagctacactcttagcaaggcagagaaggaaagtacgtttgaatgcttggagagcatcaaggtaccgtctggatactccacgaatataaagcgaataataagcacgaaggagaagaagttcacaaacctaaagtctcatgactgtcacgtgttgatgacacagctgctaccagttgtaataaggggtatcctcccagacaatgtccgggcaataataacaaagctatgtgctttcatgaacgcaatttcgcagaaggtcatcgatcctcatagattagaagccctgcaaaatgatgtggtgcaatgtcttgtcagctttgagttgatatttccaccttcatttttcaatataatgacgcatctgctttgtcaccttgtcaaagagatcggtattctcggtcctgtgtacctacacaacatgtttcctttcgagaggtacatgggcgttctgaagaagtatgttcgtaaccgtgctcgtccagaggcaagcatcgccaaggggtatggaacagaggaggtcatcgaattctgcgtagaatttatcgaagaccttcgcccaatcgggatacctgaatcacgccatgaagggagactacggggaaaggggactctcggaaagaaagcaataatgacgttagacaacaatttattccgtaaagcccatttcacggttctgcaacaatcttcattggtggctctctacatcgaggagcacttggctctagtttgcaccaaaaacatcggtaagtccgatgcatggattacaaggcatcacattgatactttctccacatggctgcgacaacatctcatgggtaatgagacgattaaccaacaactggccttcctggcgaggggaccatctggctcgatcgcgacattccaggtatatgaaatcaatgggtacacattctacacgagggcccaagacatgaagagcacgaaccagaacagtgctgttcgtatcgatgccatgggacacgatggtacaactggcacgtattacggtgccatcgaggacatatgggaacttgactatggacctctcaaggtccctttgttccggtgccaatgggttaggttgactggtggaggcgtaacgattgatgacagtgggatgacaacggttgaccttaacaaggttggatactcggacgaaccttttgtccttgccaatgatgtaacccaagttttttacgtcaaggacatgtctagcaaagaaaaaaagggcaaagtgactgacgagccgaagcgccacgtggttctcccagtgcgccctcgtcttctccaccaacacttagccgtttttcgatcttgatcggcctctccttcgccgccaccgtgcctagggcaaccccgcgccgacaccgccgtcgtttctcgccgtcgcttggtggtcctcgccgcctccgccgcagacgccgccgccgcatctcttgggtgttttttgtatgcacagatggctgatcgcgatgaggaacagatactatacgaaacaatcgcagagggaagcagccagtattggaacgaggagggtaacgtggagagggagaacagatactatacgatacaatcgcagagggaagcagccagtattggaacgaggagggtaacgtggagagggatgcagaggggaacgatgcggaggaggctagtggaagtcaaccctctgctggacagaagagggcacgcggacaacgaggtgccgcgaagaagatagagggtcggcacatcataactgaggtggacgaagacgaccgacctagtgccccggcagaagcagccaggaattttgtacgccacagcggttgggttgtgagggacaacgtgcctatcagcacggtgtactggcgtagaacaagggcacgcggggatgatgacagctttgtcccggactcagagaaagagatgttgtggaccacattgctcgagacgttcacgctacccgcgggtacggataacttagtgaaatagtggactctgaagaaaatggcagaacagttctagagcttcaagggagatctctacaagaaatacatcctgaagggactaacacccgaacttcgacgtattcccaaagctaagggatcattgggacgagttcgttgcttacaagacagggcaacaagggcaagagatgatggccagaaacaaggaaaatgccgccaagaagaagtaccatcaccacttggggtcaggcggatatagcgtcgcgaagccgaagtgggaggagatggaggctagcttgcttgaggggggtatcgaaccggccaccgctaaatggccggatcgatcgaagttctggtactatgctcacggtggaacgcttaacccagttgatggctcccttgtcttcagcgatcagatatgcgaggctgccagtcgactaacggacgcagtggtggcctcttctcagggcacattccgacccgacagagagaaggatgagctgtcactcgccctacagactcccgagcatccaggacaaacacgagggaaaggcgtgattccctagaagattggatttaaggaggacatccacacgtacaggagtcggatgaggagcaagagagataccgaggcgaagattgcagatcttgagtacagggtatcgagctatgagctcagcatgcaagaggaggtggcaaggaaggtggatgaacgtatggccgcacatcggtcccaggatccccagccgtacattcatcctacaatggtcagcacatcaggcaatcgtagcagctgcgcctcaacggggcaggtcggatcacagagcatggacgccgtgcaaacctaggacgcaaccacctgccccgttgatgagatcacgcagcggacaccatgtgagttgcatattcccttcaagaacttatcaatcaaggtggcgtcgggaatggccatcccaacggacccttccgggacttaccactgcaggccgattccagcaggatactcgagggtcgaagttgagctggtggaagccgcgtacgaggacctcgagttggactacccaggaggggacggtgagacgcatctacgagacacaagccacgccatcatactatggcgcaagcggtacatcatccttcctgggcgacaagcggcgtcttgtgcaccatctcctccggctccgccatctcctcctgcaccatctcctcctgcaccatctcctccggttcctctgccacgtcctcctgcaccatctcctccggctcctccgccacctcctgctgcaccatctcctccggctcctccgcctccaccgtgtccgcctgcacctcccaagacaaggtcttgccaagctccaccgcctgcccgcacaagggcaacgaagaaggcgaaagtcgacgccaccaaaaacaaggagccaccatacgattgcagtcaagaggagcttgatgcttatgcggcagggaggtgaagaggcaactcaagcctcggagtcctgaaaagaagatacctattgacccgagcgtgaagaacttcttcaagggaatgtccaaaacaaacaaggaggcgttacagatatcggactatgaccgaacacttcagagagcctatcacaagaagtccaaaccagtccctcagcttggagaacaaccaaaccaagaggtcgagccgttggtgaccggcgaagattttggcataacggatttcattgcagacattggtctatctgtggatcagttggttggaggcgcaccaatcccgaaggcggaagtggcatacaagtttgaactcggtaaaccgcttgtcaaacctgaacagctggagtccctaccgacacagatgtacaaattccatgaacggtacatggaaatgagctccaacagtagagagatgttcggggcgaggatcagaaaccccgacttcttgcaaggagacgatgttctctggatccatttcaaggatctcttcgatctgtaccagttggatgccctcgacgtctctcttctgagcgcatggattttaatggagattcaaagggcccgacggcggagggtctatgatactgggttcatcgtccctcggaaaatcaacaccgaaatgatcgacaagtatgagaaagacacagaggacaatctcgtccatctcctaacgcagcagcatttcaagacgtacatactactgccgtacaacacagaattccactaggtcctgttattcttcgacttggatgcatgcagagtcactgtgtacgactcaatgaataaagaggagaagatttttgacatggtcttcaaactgatagacagggcttgggatcggttccgtcaattggtccgcgggacttggaaagaaaaacttggacggaggtttcattttccacgtattcacatgagggataatctcccacacaaggattttatcacggctgttcaagaacaactgatggtattcatcaacgaagaagtccttaatcccgacggtgaattctactacgacggatcaacaattcataatgtcggtccttcctcttc

SEQ ID NO: 16613 - DNA, 522 bp, Oryza sativa
  Clone ID: PAT_MRT4530_22345C.1
tgctccactttctcacctatcaccacagtcgtcttgccaagcgaaatttgaattccttcctagctgtcacatcatagacttcccgaagaccatgttcacctccatcttccattttcaatttgacttgaactaatcgattgatcagccgaagccgacaaatcgtcatgccgtcttcccagccgccgaacgacccgagcgctacgtctagccgtctccctgtcaaacgcagctcatcaaaaggcccgggccaccccgcccagagtgttcgatccaccgaccgagaacgccgatcgcctccagcttcaatcaacccgagcgtgtggccacacgtctccctgttgagagtagctcaccagaaagttcgagccacctgcctgaagtgtccaacccaccgattggatcgccaatcgcttccgccgccatcaacccgagcaccacatctagtcatctccctgttgattgcagccatcgaacggttcagaccgccgcctgaagtgtccgattccaccgatcaaattccgt

SEQ ID NO: 16614 - DNA, 523 bp, Oryza sativa
  unsure (1)..(523): unsure at all n locations
  Clone ID: PAT_MRT4530_22346C.1
tttttatttattttattttttttattttttttattttttttttttttttttttttggcaacaaagaaaaaaacactaccacaacaagatctgggtggggaaaaaaggaaaaggcaagttttttttcatccattcaaaattaaaaccaacggactaaaaagcaaaggcataggccttccattttaacaccaccaaatttgaaaaaaaaacgggcgaatccagtctccgacgcaaaaatgtaattcagctggggcccgggggacggaaccagcagcaaagctagctacctattggttgaacgggtacgggtgggggagcaaaaaggggccccgggggtcgtcgccgccgtcgagcaaccgttgcacccgttttttgggggagtcctgccggccgaagggcttcacccaggaggggcggctgctggtgacaaagttggggcgggactttttgcantcgggggggtagaggagccccaggggggggaacccggggggctttttggccgggggcttctccccccccgg

SEQ ID NO: 16615 - DNA, 511 bp, Oryza sativa
  Clone ID: PAT_MRT4530_22347C.1
tggtctcgccagcgtcgagtgcttcggccgccacaatagcaatccatcacgcaccacatcgtcagcacatcaaaaaacagcacgtagaaaccacccgctcctacttccgattgaacaccatcaatcaagtcacgagtcgaagccgacaagtcgtatgccgtattccagccatcgaacgacccgagcgctacgtctagccatctccctgtcgaacgcagctcatcgaaaggcccagaccaccccgcccagagtattcgaatccaccgatcgagaacgctgatcgcctctagcttcaatcaacccgagcatgcggccgcacgtctccctgtcgagagtagctcactggaaagttcgagccacccgcctgaagtgtccgatccaccgattgattcgccaatcgcttccgcggccatcaacccgagcaccacgtctggtcatctccctattgaaagcggccatcaacggttccggtcgcctccagaagtgttcgatccaccgatcaagacttcgt

SEQ ID NO: 16616 - DNA, 1059 bp, Oryza sativa
  Clone ID: PAT_MRT4530_22348C.1
atggccaaagcaacttgcatttccttgcttgtggtcgtggctctggccaccgcggcgtcggcgcagctgtcggcgacgttctacgacacgtcgtgccccagagccatgtccatcatcaagagcgccgtgaccgccgccggttgtgacgcgtctgttctgttgtcgggaaacgagcaggatgctcctccaaacaaggattctcttagaggctacggcgtcatcgacagcatcaaggcgcagatagaggccgtgtgcaatcagaccgtctcatgcgccgacatccttaccgtcgccgcccgtgactccgtcgtcgctctgggagggccaacgtggactgtcccgctggggagaagggactctacaggtgcaagcgcggcgctcgcgatcagcgacctccctccttttaccgctagcctccaagaactcgtagacgcattcgccaagaagggccttagcgtaaccgacatggttgctctctcaggcgcgcacacgatcgggcaggcgcagtgctcaaccttcaggggcaggatctacaacgagaccaacatcgactcggccttcgcgacgcaacgccaggccaactgcccacggacatccggcgacatgaacctggcgccgctggacacgacgacggcgaacgcgttcgacaacgcctactacaccaacctgctgtcgaacaagggcctcctgcactcggaccaggtgctcttcaacaacggcagcacggacaacacggggaggaacttcgcgtccaacgcggcggagttcagcagcgccttcgcgacggccatggtgaacatggggaacatcgcgcccaagacgggaacaaacggccaatcaggctcagctgctccaaggtgaactcgtaattaattagcggtgatcatcaacgaaaattctgagtgcatgaggggacaataataaggctatatatgccactgaaatcgatatttgtgctttgcactgatcagtgatcatgttcacgctttcttggatcaaattgtgtccgagaaagtggcgtgtttgcaaccatttgatcgtgtacactgaattctgaag

SEQ ID NO: 16617 - DNA, 407 bp, Oryza sativa
  Clone ID: PAT_MRT4530_22349C.1
aaaggaaaaatatcaaatattcgattatatataaaaataaaaaagcggacgggttccctcccttagaacctcaaaaccccccggattgaacatcaaaggtcccacccaggcggcagcagcatcagccagcagcaaacgacatgattccccacgctttgggatgaaaaacaagaagtcccagaagaaaaagacgatggccaaaccccttgatcgagctcaacaagggggatcgatcaccaatcacctacttggggaacccgagggcccaggcgttggccaaaatgtagggggccttgaaacccgggaatccgggggggcgggcgagctccctgaactccctctgggacctttccttgcccccggggttgggggccagcattaaacatgtttaacggggaacaccccct

SEQ ID NO: 16618 - DNA, 530 bp, Oryza sativa
  Clone ID: PAT_MRT4530_2234C.1
ggcaaaaaccaggggatttgaaagaaaaaaaacggggggcgtccaagttggcccattcaacaagggggagaaaaggaaaaggaaaacgggcaataaaaaactgaaaggccaaactagaagggggaattttaatctaaaaagatctcccgggggtaaaaaatttccccccagttggggaacaaacaggggggccggaacaactatgaaaaccaaggggggcccgggggggggggagccccaccagaaaaaaaaagggggggccgcaaaaaattatttaccctatatcaccacccctttgctatggggtaaaaagggcccggggattgggtccccattgacaacctttgggggcgcaacaaggaagtcataccccaccccttcctgggaaccaaggaatcgaagagccgcattctttgcaaaaggaaccccccccataaagacaaccaaacccggggaacggggcccaaccctggcaaaactttggggaagccccaaaccttggggaacatccaaggaagaataaagggccg

SEQ ID NO: 16619 - DNA, 458 bp, Oryza sativa
  Clone ID: PAT_MRT4530_22350C.1
cgtcatcaacacaactccatcagcaccacggatccacccgctccgacttccgattaacaacccgtcaatctagccgcgagccgaagccgacaaatcacatgccgtcttctcagccaccgaacgacccgagtgctacgtctagccatctccctgtcgaacgcagctcatcgaaaggcccaggccaccccgcccagaatgttcgattccactgatcgagaacgccgatctcctccagcttcaatcaaccccgagcgtgtggccacacgtctccctgttgagagtagctcaccggaaagttcgagccacccgcccgaagtgtccgacccaccgattagatcgccaatcgtttctaccgccatcaaaccgagcaccacgtctggtcatctccctgttgattgcagccatcgaacggttcaaaccgccgcctgaagtgtccgattccatcgatcaaattccgt

SEQ ID NO: 16620 - DNA, 1562 bp, Oryza sativa
  Clone ID: PAT_MRT4530_22351C.1
gccaagtgcagatagctcattgctaggcagagataaacgtatatatctttggttaattgttagtttagcgatggccaaagcaacttgcatttccttgcttgtggtcgtggctctggccaccgcggcgtcggcgcagctgtcggcgacgttctacgacacgtcgtgccccagagccatgtccatcatcaagagcgccgtgaccgccgccgtgaacagcgaaccccgcatgggcgcgtcgctgctcaggctgcacttccatgactgttttgtccaaggttgcgacgcgtctgttctgttgtcgggaaacgagcaggatgctcctccaaacaaggattctcttagaggctacggcgtcatcgacagcatcaaggcgcagatagaggccgtgtgcaatcagaccgtctcatgcgccgacatccttaccgtcgccgcccgtgactccgtcgtcgctctgggagggccaacgtggactgtcccgctggggagaagggactctacaggtgcaagcgcggcgctcgcgatcagcgacctccctccttttaccgctagcctccaagaactcgtagacgcattcgccaagaagggccttagcgtaaccgacatggttgctctctcaggcgcgcacacgatcgggcaggcgcagtgctcaaccttcaggggcaggatctacaacgagaccaacatcgactcggccttcgcgacgcaacgccaggccaactgcccacggacatccggcgacatgaacctggcgccgctggacacgacgacggcgaacgcgttcgacaacgcctactacaccaacctgctgtcgaacaagggcctcctgcactcggaccaggtgctcttcaacaacggcagcacggacaacacggtgaggaacttcgcgtccaacgcggcggcgttcagcagcgccttcgcgacggccatggtgaacatggggaacatcgcgcccaagacgggaacaaacggccagatcaggctcagctgctccaaggtgaactcgtaagcgagtaccctgcagacactgcagtaagtagtaacaacgtttgtagcagtatatgcagttatgcacgtataagacgatggagtgcgtgaaaaaataaggacccccacaaccaccacgactgaatgaatagcaatgtgtacgtggagatgtggtacatgcagatttgccttgctctgtttcttgttccatctgtatgtgcatggaatacagaggacagaggggcatatgcatggcgtatatgtaacgaaatttctggtgcaaaggcacggaggattatactatactcatcttctaaatattattcctacaagccaaatttctgctaataattaagtaaagaatcaacctggatgcaaaagcaaacccaaatttgggaataaggctgggccatatatgtcccagtagtagtattttcctagtctgaaatgtttgctaagagtgttttctctgatcagcacaaagtgtttgaaacagatcaggaagcccatgttatgtaccgatcagtatggttttgaagttatcaaggaatgcatgaatgataaaaaaaaaaaaacaa

SEQ ID NO: 16621 - DNA, 1048 bp, Oryza sativa
  Clone ID: PAT_MRT4530_22352C.1
acggagtcatgatcggtggatcgaacacttctggcggcggccggaaccgtcgatggctgctttcaacagggagatgactagacttggtgctcgggttgatggtggcggaagcgattggcaaatcaatcggtgggtcagacactttgggcgggtggcccggactttccggtgagctactctcgacagggagacgtgcggccgcacgctcgggttgattgaagctggaggcgatcggcgttctcgatcggtggattcaaacactctgggcggggtggcccaggcctttcgatgagttgcattcgacagggagacggctagacgtagcgctcgggtcgttcggcggctgggaagatggcatgcgacttgttggcttcggctcgcgactagattgatggcgttcaatcggaagtcggagcgggtggatcctataggctgttttggaggttttgacgaggtatttgcacggtagaattgcttcaaaggcggcgtattagcggtggatggcagaactaagcctagggcgtctagactggcatctggccctagagaggtctggttctagcgagatcttacctctgattttgtgggcagcgtggtttggggcggcgagttcacgggcgactggaggcgtcattgcaggcggcgcgcagcggcgtggtgctcggcgcggttttcgtcgcagctcgggcaggagcttgcggcggcggcggcggctcccggcggaggagtcggcgtcggggtcttcggcgacggcgctccaaggcggcgcggcgatttcttgcagggccggcggcttcccgaggtccagcggtgcagcggctcttcacggggttggcgcaggcgcagaacggcgagggaggcggcggtgtgcggtagcttcagcgaggacgtggcgcatcggggccggcggcccaaggcagcgacgggcgtagcacgtgcgcgacggcggcgcatcgggaggaagatgcgcatgcgcaagaggaggagcgtggaagccgaaggaaaaaggggatcggctcgatctgagccggtcttttaccactgttga

SEQ ID NO: 16622 - DNA, 515 bp, Oryza sativa
  Clone ID: PAT_MRT4530_22353C.1
atcaggcgccattcgccattcaggctgcgcaactaagtagcaatcctccatgcagtacttgtcgttaacacctccaaaacagcctgttggatccacccgctccgacttccgattgaacgccatcaatctagtcgcgagccgaagccgacaagtcgcatgccgtcttcccagccaccgaacgacccgagcgctacgtctagccatctccctgtcgaacgcagctcattgaaaggctcaggccaccccgcccagagtgttcgatccaccgaccaagaacgccgatcgcctccagcttcaatcaacccgagcatggggccccacgtctccttgttgagagtagctcaccggaaagtccgggccaccccgcccgaagtgtccgacccaccgattggatcgccaatcgcttccgccgccatcaacccgagcaccacgtctagtcatctccctgttgaaagcagccatctaatggttcagaccgccgcctgaagtgttcgatccaccgatcaaattccgtt

SEQ ID NO: 16623 - DNA, 471 bp, Oryza sativa
  Clone ID: PAT_MRT4530_22354C.1
atggatggcgtccggagcggtgctatctgggagagcccagacggcgagtcctctgacatcttcccctccctcgacctcaccacctccaccgactaccttgccgcggttgacgacggcatcccggagggtttcgaggcggccccatggcctcgcaggcctccgcaaccacgaggcctccttgacgacctcgcctccgcctccgcctcatcggtgctgtctggcggcaacgggcaggggcagtcgccggtggttccatcgctccgtccacccgcgcacccgcaggtgcgcctcgcttcgccatacccccagatgccctcgctggcagtggcgatgggctcatccggcggcgctgccagggctgccgccacggaaggggaaggatggaagggcaatttcgtcaaatcacccaccgaagaagcaaaaatgatttcgaaaatgcacaaaacggccaaaatggcaaagtggcggtga

SEQ ID NO: 16624 - DNA, 418 bp, Oryza sativa
  Clone ID: PAT_MRT4530_22355C.1
tttcaataacaaaatttgtaaaacactaattttcgatcaaatactatatatgactgaggctccaaacagaatagattgaaattgattaatgaaaagaaaagtcaatttactctcttaactatttcatcgggcatttaacagctatttatttatttttggcttatatatgttatttatttatttttacattgctccataatggtatttctcctttttgtgttcctctatgtaagttgtattttacactgaaatttaataggatgatagatgaatgcatttgaacttagagaaaatctaagaaatgccattcacaagtgcccaactctaagaaataccgccgataagtgtaagttcctcgaaatatcatcgtacaagtgattttgttccagaaacgctattgttgttagggttccgtcta

SEQ ID NO: 16625 - DNA, 1902 bp, Oryza sativa
  Clone ID: PAT_MRT4530_22356C.1
atgacaaggacgtattcgatgtgggcaaaaattatggctgccgaatcctcggaaacagtctcgacgacaaggatgtacccggaataattgagagaaaaaaatatgagcaaaaaggttcaaataaaagataaaaattctcttggttgttttgtgctaaagctaatttgagaaagaatgctaaatgcaataggtatatatatataaaactgtgaagtgtttcacgttggttgtgtaagggtaaaggtcctaatatataagtgggagagcccctcacctcatttgttagcttttggggtgggaaaagccctttacgattctgagcctgtatgcttgaggaaccatggggatacgatgaaggggcggggaatagctaaggaacaccaatgtgaagggggagattgtttaatagtcctacattggttaaggaaggcaacaggtgtgaatggtaactctgatcctgggaatggggatgatgatgttgatgacttgggtgatgataagaaggatgataagcaaaaggataagaagggggatgatagcgcaggggttgctagagtttgtgttgaatatgtgtacgtagtcggttacagtttaggacttggagttgtaataggtattaggactagagtatgagtcggactctatcctaggttctctcataaatagaggggcgtgcctgttgtaaccgcatagcgacttagcatagcgagagggagcggctgccggcatcgaccggccatgagtcgttgtaactctgatacgctgtatatgctggatcggggaggagagcccgtaatcagtgcctcggagatgtaggctacggctgaactccgttaccaaatattgtgtctcggtgtcgtcattgttttggatctccaatggcgttttcttccgcgttttagctaccgatgttgatttcagggctggttttataacaagtggtatcagagcctgcagaaggtccatggtagaggcgcgatggaggtgctccacaccgcgtagcctgctgtaatgcccagggaggggcattggcgcaaggtggagcacggcggcgatcaacggagtcttgatcggtggatcgaacacttctggcggcggccggaaccgtcgatggctgctttcaacagggagatgactagacgtggtgctcgggttgatggcggcggaagcgattggcgatccaatcggtgggtcggacacttcgggcgggtggctcggactttccggtgagctactctcgacagggagacgtgcggccgcacgctcgggttgattgaagctggaggcgatcggcgttctcgatcggtggattcgaacactctgggcggggtggcccgggcctttcgatgagctacgttcgacagggagacggctagacgtagcgctcgggtcgttcggcggctgggaagacggcatgcgacttgtcggctttggctcgtgactagattgatggcgttcaatcggaagtcggagggggtggatcctataggctgttttggaggtgttgacgaggtatttgcacttcaaaggcggcgtattagcggtggatggcaggactaagcctagggcgtctagactggcatctggtgctggttccaaccctagacaggtctagttcaactgtttctagcacagatcaagaaaatcacgatgacaacagatcagtggcactagtcattgctgtagtcggcaagtggtgtttggcggtggtgggcggcgtggtactcggcggcgtccgtcggagctcgagcaggggcttgcggcggcggttaccggcgtggaaccggcgccggactttggcgacgcggcggcctgaggcaggaggcggtgtttcttgcggggccggtggcgcagagcggcggcatgaggagcaggaggtggcggcgcatcgggagaagggga

SEQ ID NO: 16626 - DNA, 252 bp, Oryza sativa
  Clone ID: PAT_MRT4530_22357C.1
atgggcagcggccctgcggaagccgccgacgaggctgcgagcggtggcctcccctcaggtggtggctgtgcagcggccgggctgccaaagcggcagcggcagtgggttgggaggcagcgcacggctgggcggcctcccctcgtccagatttgtgcggtgggaggggaggccgggaggcgaatgggtgtcccggtttgcaacccgggacttagaggggttgcaaaccgggactacagagccattccccagtag

SEQ ID NO: 16627 - DNA, 1085 bp, Oryza sativa
  Clone ID: PAT_MRT4530_22358C.1
cggaacgagggtttttttttttttgttttttagacaaaatcatctctcaaatgtcattcctctctgtttccattgatgtacatgataaggttctagtacaaacgagaaatctcgactcgaatttcgccgaaaattttgaacacttttacaacgaaacaattaatttaacaacaactaccactagtaatcagttggtttggttattgaccaagtgattaaactaataggcggtgtggtgttgcgaccggccgagcgcgaagaggccgctgaacgccggtcggtacgtcaggtacgaggcttgctgcggccgccggtcgccgccggcgctggccttgctgtagaagagcctgtgcgcggtggccatgtccatctcggtgaccacgcccttcttcgccgccggcttcgtcttcacggcgctctgcttcttctgctgtggttgttgagggggaggaggagtcttcagtttggatgatggcggcgcggcggcgtggtggtgcaggaaggcgaacttgtccttgccgtcgctgcgggagcggccgccggcgccgacgaggtcgcgcaggcgccagcgccgcgatgacgacgacgactctccgccggtggacgcgctcttggggaacctgtcgcggccgggcgagcccggcgccgagcgcggcgtccacgcgcagtaggtgtcggcggagggcgccgccgtggaggcgtcgccgggcgagaggtcgaggaggctgcggtcgaacaccgggtacgccggcacgatgcggccgtgcgcgaagatgtcgtcggccggcgccagctcggccgccgacaccggcggcgcgaacgcgaagtcgaggtcgagcccggcgccctccgcgtcaccaacgtcgaccgacgcgggcgtggcctcatcgtcgtcgacgccgtcggcgccgcggccgaagctgatcagcgtgtggaggctgcgcggcgactgcgccatcgcggctgcggcggcggcgctgggtggcatcacgtcgtcttcgccggagacgagaggagaggagatcgcggggtggagtggagtggattggattcgactcgacgcgctcgatgttggcgcctcgtgc

SEQ ID NO: 16628 - DNA, 396 bp, Oryza sativa
  Clone ID: PAT_MRT4530_22359C.1
aaaaaggggaagaggattttatttaaatttatttgaccctaagtttcaacaggcacacatgatgggggatgactttatttttaacataccaactatttttttgttacaattcaggcccaaacaccaccaacaggggcaatgctcctgggagcccttttgttgttaggggagataccacttttggatgggaagttgaagggaaacaaagtttgggcttgaccttgagtctgaccaaagtacacacccctaaattgctgcatttgtatctggtgaacaaacgcttgaacaattctaatggtctggaagagaaattgttgcgctaccaacaagagctgtgggcaacactggtggtgaaagaataggttgtttataaatagaaacgtaactggtaaccaa

SEQ ID NO: 16629 - DNA, 385 bp, Oryza sativa
  Clone ID: PAT_MRT4530_2235C.1
aaaaggccaaatggaattgaaatttggttagaaatatatttgggttattacagaggttgggggaaatttttcctataaccaaagggggtcgatcaaaaaaaattacaggaaaagaacaattaatttggcgacgacgatgacgacaacaacaacaaggggaaaatgaaccggaaaaacgaaaaaaaaaaaggggatttttttacgggaaaaaatctcctttaattttattaggaacacataataaggggaataaaaaacgccggggaattaattaccatacggggccgaaaaaaagggcaagggttcgggcaccgccgtcgggggggggacaaacgggggcaaaaaaggggggccccccgcctacccgttgggccggaagccgggt

SEQ ID NO: 16630 - DNA, 397 bp, Oryza sativa
  unsure (1)..(397): unsure at all n locations
  Clone ID: PAT_MRT4530_22360C.1
atcaactgtgtgattagcatgccccagaccggaagtgaagctgctacactttcagatactccatatcaagattcaagagagagctaaagctataggagtgagcagcaatagcaagagccaagaacagctagctactccagctgagagccaagaaccggtcaagctttgcttcttgcacttcttgctagctaaagctactccggtcacttttctgctatagtagctcttnnctcttgcttatcacaagagaccacaatcttgatcgaagaaatttgagctagcgcttcgttctgattcttggagatactgggagatcgagctgtggttttgtggctcgtaggatgggagaggctaggagagggcagaatcctcatcatgttcttggctatgcttccat

SEQ ID NO: 16631 - DNA, 456 bp, Oryza sativa
  Clone ID: PAT_MRT4530_22361C.1
atggagtgctcatcaacagccagtgtctgcacaacatgggtcactggcaagaatcactcaacagttgccagtttggagacacctttatatcaacaactgtcatcttatgaccgtttattgacaaatgtagatactgtttttgatgaggaccgtggatttatttcaactatacttaagatggtggagactacaaaatggccaatcatactgaccagtaacaagaaagatccgccattgcctcatctcttggctcagctagtattggatttcacatacccatcatctgcagagttactttcacatgtcgacatgatatgcaagtctgaaggagtagaaatcactgttcctcaacagaagcatataattgatgcctttttaggtgatattaggagaacaatgatgcttttacagttttggtatcaaggcaagcagcaatactcaggttgggtgctttga

SEQ ID NO: 16632 - DNA, 465 bp, Oryza sativa
  Clone ID: PAT_MRT4530_22362C.1
cgatatgggtggcggcctgttgacgcaaaaaacacacacgggtctgggagatctgcttagctccagtgcaggtccaaaacttgatgagatgcggacgtgccagtcagtttgatccagccagtagcgatagggttttgagctatcggctatgtgtttgatgtagaatctgatataacaatataaaggcaatcgactggagataatatacaattgactgatgataatgcaagaaggcaataatataatccagtagaaaccagttgtatgtaatccttataagccgatgcaatgtctagataacttatcggctagcaccccgataaaaactagcatgacgagattgtaaaatcccggcctagggcttagtaggattaatagaatactcatatcaacaatttgcaacttcttttccggaagtcgatttccaaagaactccggggttaagtgtgcttggcctggagtaat

SEQ ID NO: 16633 - DNA, 679 bp, Oryza sativa
  Clone ID: PAT_MRT4530_22363C.1
atgacgatgatagccgacgcgacctcctgcaatggatatcctcatcacttctatatgaggacgtcgaggataaatccatggaagccaattttgagaaacaagttaggaactaatgagaatttggagctccaactggtgttgagaattcaactcatcaacaggccggcgcccgggcgaggccgggggaggagatccagcggccggcgacgtggcggcggtggcggcggcggcggacaccacgctgggtttgctgctctcggcgctgatgcagcactacgacccgtcgtagcgccacttcctactggagaaggacgtgccgtcgccgtggtggccggagcggacagaggcgtggaggagtcatcggcggcctggatgcgttgacggtggagcacccgtgcgtagcgacgtagtaggtccggagcacgtcctggcggacgcggagcttgccaaggtagtcgaggacggagaccatgttcgctgtagtttgagcactggatttgtgatttcttttctttttttttttttgccttttcatgatttgctcgatgtagatgggcatggagctctgatttgctcgctgcagtttgagcaggatctctgattttctaatttgatttttcatttgctcgcatgttgatattgaaggatttagcctaaaaaattaaaaaaaaaaaaaaaa

SEQ ID NO: 16634 - DNA, 723 bp, Oryza sativa
  Clone ID: PAT_MRT4530_22364C.1
gtagttacgatgacagacatagatttgaatatcttcaccacttaggaaacacatgtgaactacataaacttatggacatacaatcttctagcaccagcgcaatttttgtctattagattgcttggcagttctcatagcaacttgaacggacgcggcttgcttacttgatccgtcggcacgctcctgtacacatggcgcaagtcccgttcaagaacatgtaccgaagctaggtatgcaatttttatctgaacaagaagattatgacttttataataagtacactttcaagataggttttagcatcaaaagaggcattcaacacttggtaaaaaaactcttctacaataaaacaacgcgcattttgttgttctcgtgaaggtacacgtgctgaggataaaagagaagagacattcaattacaataggcctgaaactcgatgcaattgtgaagcgcgtatgaagataagtctcagaaattgattatatcgtgtttatgaatttgtagctgcacatatccacattcttgctcctcaagatcaggcccactatttaagatcccaaaggaaagttatagaagcacatattgcaaatgctgaacttgtaaaatctgttggcatttcaagtaaagcaaccattaatcttacagccaaagaagcagatggactgcacaaccttggatttactcgtgaacatacgaaaaatcgtttatattcgaagagaccac

SEQ ID NO: 16635 - DNA, 123 bp, Oryza sativa
  Clone ID: PAT_MRT4530_22365C.1
atgggttctatcggaatatcatcgttacggatcgtaacaactatcaccatcaccccgatcactccgataactgatacccagtgccgcgagtggaatgacaatgaagcgagtctagagatttga

SEQ ID NO: 16636 - DNA, 330 bp, Oryza sativa
  Clone ID: PAT_MRT4530_22366C.1
aattggggcaacaatcggccacgcatagagccaccgttcgcttaaacaggggcgcggtaagctgcaccagctagttggttcactgtacgccaggaggccatgagctacgatgaggagcacgtggtggctgtgtccctgtagctagactgatccatgcgggtgattcatctatgcccagacaccgacaacccgctgtccaagttctttctataaaagggcagcgaattcggtctgctggtattgtctgggtaggacacttcttgctcatctgatggcgaactacatagcgtagtgttacaatataggatccccatggggagtctcccattt

SEQ ID NO: 16637 - DNA, 171 bp, Oryza sativa
  Clone ID: PAT_MRT4530_22367C.1
atggctgtggtggcggcgcaaaacagtagcggcaaccatgtcaacagtggaggcagcaagagcgtaggacagcaggagcgtgcggctagggtttcaggagaaacagcaaaaacagcgctgctgcctgatgcagcaatgggggttcccgatctttcgatgagaggaggataa

SEQ ID NO: 16638 - DNA, 6606 bp, Oryza sativa
  Clone ID: PAT_MRT4530_22369C.1
atggtggagaggcgggcggcggcgctcgccattgtggcgctggcggagaggcgaagctcttttctcacagaaaattgcaaatcaaacataaaactaatgcgctcaagaaaggccattaagtgcttcttgccgcgatggtgcaaactctatgcgcgatgcatattgggaggccatgatgcccaacctgaagccaccggtgaccacgacggcacgagctttggagtacagggaggagatcctcagagcgctgcgccgctgcctccgggcctgtccgcatgcatggatcggcaatggatgtacgctgatcggcggtccaaagagtttattgacggcgtgcactattttttgagagtggccgaagctaacaggcaaaggggttttatttgttgtccatgcaataagtgtaagaatcagaaggagtattctgcatccaggactattcatttccacttgtttgagtcggggttcatgccaagctataattgttggacatcccacggagagcaaggtgttgaaatggaagaagatgaagtggaagacgacaatattccggactttgctcagtatgttggatttgaaggaaatcaaacgggcgaggaggaaatagctgctgatggtaacgacgttgcggatgatcttggtcagatgttgcaggacgccagggaagactgcgaaagtgaaaaggaggcccataaattggacaagatgttggaggaccacagaacttcgttgtacccaggttgcgagcaggggcacaaaaagttggataccactctggagttgttgcaatggaaggcaaaaaatggggttagtgacaaggcatttggcgatttattgaaactcgtcaagaacattcttccggggggaaacaaattgcccgagacaacgtacgaggctaagaagatagtctgcccgttaggactggaagttcataagattcacgcatgtccgaacgattgtatcctatatcgcggtgaggagtatgagaacctagaagcatgccctgtttgcaaagcactacgatacaagattagacgggacgatccaggagaagttgacgggcagctaacaaagaagagaattcctgctaaggtgatgtggtattttcctataataccacggctaaggcgtttgttcaggaacaaggggaatgctagaatgttgcgatggcacgctgaagagcgtcaacaggacgggatgctgagacaccccgccgatggttcgcagtggcgaaacatcgacagaaaatttaaagaatttggaaaggacgcacgaaacatacggtttggtttgagtacggatggcatgaatccttttggagagatgagcagcggccatagcacttggcccgttacgatgtgtatctacaacctccccccctggctatgcatgaagaggaagtacataatgatgccgattattattcaaggccccaagcaacctggtaacgacatcgacgtgtacctaagaccactggtcgaagatcttaaacagttgtggaagaaggaaggtgtccccgtgtgggacgaggacaaacaggaggagtttaacctacgagcgctgctgttcgtaaccatcaacgattggcctgcacttagcaacctatccggacagtccaacaaggggtacaaggcttgcactcactgtatggatgaaacaaaaagtacgtatcttaagcactgtaggaaggttgtatacatgggtcatcgtcgattccttgcagcaaaccacccggtacggaagaaaggcaagcacttcgaacataaggccgaccaccgtacgaagcctaaacatcgcagcgggaaaacagtgtttgctatggttaaagatcttaaagtagtgttcggaaaggggcctggaagccagcatatagagagcgaagatggtcacgcggcgatgtggaaaaagaactctatattttgggagttaccatattgggaattcttggacgtacgccacgcaatcgacgtgatgcacctcactaagaacctttgcgtaaaccttcttggcttcctaggtgtatacggaaagtcgaaagatacactggaagcacgtaatgatctgaagcatatggaacaacgcggcgaccttcacccggaaccaaaggagaaaggaagccattacttgagtccagccagctacactcttagcaaggcagagaaggaaagtatgtttgaatgcttggagagcataaaggtaccgtctggatactccacgaatatcaagcgaataataagcacgaaggagaagaagttcacaaacctaaagtctcatgactgtcacgtgttgatgacacaactgctaccagttgtaataaggggtatccttccagacaatgtccgggcaacaataacaaagatatgtgcattcatgaacgcaatttcgcagaaggtcatcgatccggatagattagaagcccttcagaatgaagtggtgcaatgtctcgtcagttttgagttgatatttccaccttcatttttcaatataatgacgcatctgctttgtcaccttgtgaaagagatccgtattctcgggcctatgtacctacacaacatgtttcctttcgagaggtacatgggcgttctgaagaagtatgttcgtaaccgtgctcgtccagaggcaagcatcgccaagggttatggaacagaggaggtcatcgaattttgcgtagaatttatcgaagaccttcgcccaatcggggtacctgaatcacgccatgaagggagactacggggaaagggaactctcggaaggaaagcaataacgacggtagacaacaatttattccgtaaagcccatttcactgttctgcaacactcttcattggtagctccttacatcgaggagcacttggctctagttcgcgccaggaacatcggtaagtccgatgcatggattacacggcatcacattgatactttccccgcgtggctacgacaacatctcatgggtaacgagtcgatcaaccaacaacttgccttcctggcgaggggaccgtctgggtcgatcgcgacattccagggatatgagatcaatgggtacacattctacacgagagcccaagacatgaagagcacgaaccaaaacagcgctgttcgtgtcgatgccatgggacacgatggaacaactgccacgtattacggtgccatcgaggacatatgggaacttgactatggtcctctcaaggttcctctgttccggtgccaatgggttaggttgactggtggaggcgtaatgattgatgacagtgggatgacaactgttgaccttaacaaggttggatactcggacgaaccttttgtccttgccaatgatgtaacgcaagtctttttcgtgaaggacatgtctagcaaaggaaagaagggcagagggcctgatgagcctaagcgtcaagtggttctcccaggcaaaagaaaaatcgtcggagttgaggacaagactgacgaggattacgatcagttggatgggcaaccccctttcacggtgacgattgaccctagcatcctcctatcaaatgaagacaccccttactcacgcagcgatcacaaggagggaacaataatggctgaccgcgatgaggaacagatattgtacgatacaatcgcggagggaagcagccagtactggaatgaagaagaggggaacgaggatccaaaccagtacttgaacgaggaaggaaacgtggagagggatgcggaagggaaccagcaggggcacgtggaaagggatgtggaggggaaccaggaggaggaggctagtggtagtcaaccctccgttggacagaagagggcacgcgggcaacgaggtgcagcgaagaagcttgagggtcggcacatcataacggaagtgcaagaagatggacgtccaagtgccccggccgaagccgccaagaactatgtacgtcacagcggttgggttgtgcgggataacgtgcctgtcagtacggtgtactggcgaagaacaagggcacgcggagatcatgagagctttgtcccagattcggagaaagagatgctgtggaccacaatgctcgagacattcacccttcctgcgggtacagaggacaaagtgaaaaggtggactctgaagaaaatggcagaacagtttcagagcttcaagggagatctgtaccagaagtatatactgaaggggcagacaccgaacttcgacacattcccaaagctaagggatcactgggacgagttcgttgcatataagacaggtgaacaagggcaggcgatgatggaaagaaacaaagaaaatgccgccaagaagaagtaccatcaccacttggggtcaggaggctatagcgtcgcgataccgaagtgggaggagatggaggctagcttgattgagaggggtatcgaaccggcaacagccaattggccggaacgattgaagttctggtactatgctcacggtggaacgctcaacccagctgatggctcactggtcttcggcgatcagatacgagaggctgcgcgacgactaacagatgcagtggaagcctcctctcagggcacgttccgaccagacagagatagggacgagctgacactcgccctgcagactccagagcatccaggacgaacacgagggaaaggggtgattccttggaagattggtttcaaggaggacatccacacgtacaggagtcggatgaggagcaagagagataccgaggcgaagattgcagacctagagttccgggtatcgagctacgaactcaacatgcaagaggaggtggcaaggaaggttgatgaacgcatggccgcacatcggtcccatgatccccagccgaccattcctcctgcaatggtgagcccgtcaggaaaccgtagcagctgcgcctcaacggggcaggtaggatcacagagcatggacgccatgcaaacacaggacgaatcgacctgtcccgttgatgacatcactcagcggacaccatgtgagctgcatattcctttcaagaacttatcaataaaggtggtgtcgggcatggccatcccaacggacccttcaggtacttaccactgcaggctgattccaccaggatactcgaaggtcgaagttgagttggtcgaaggcgcgtacgaggacctcgagctggattaccctggaggagacggatcctgcaccgtctcctcctcatgctccgccagcaccgtctccacctcaggctccagcatcgactcctcctcaggatcctgcaccgactcctcctcgtgctcctacacctactcctccgcaagctcctcttccggcaccttcaaagtcaagggccccccccccccagctccaccgcctgcccacacaagggcaacgaagaaggcgaaagttgacgccgccaagaacaaggacccggggtacgattgcacgcaagaggagcttgacgcttacgttgcatcagaagtcaagagacaattcaagcctcgaagtccagaaaagaagattcctatagaccctagtgtcaggaacttcttcaggggtatgtctgcacctgtcaaggaggccatcaagctatcggactatgagcgaacgctgaagaaagcatcttctggaaagtccaaaccagtccctcagcttggagagcaaccaaaccaggagatcgagccgttggtgaccggggaagacatgacgatagaagaatttattattgacaccggtctaactacggatcaattgctaggagtcgcaccaatcgaaaaggcggaattgaaatacatgtatgaactcggtaaaccgcttgtcaagcccgagctggtgcagtccctacccacacaaatgtacaagttccatcagctgtacgtggagatgagcgccaccggtagagagatgattggagcgaggatcagggacccggacttcttgcaaggagatgatattctctggatcaatttcaagggaatctacgaagtataccagctggacgccctcgacgtctctattatgagttgctggactttaatggagattcaaagggcccgacggcggagggttttcgatactggattcatcgaccctcggagagtaaacgttgcaatgctcgaccaatatccgcaggaaacagaggacaatctcgcccatctcctgaaggcgcagcattacaagacgttcatactgttaccgtacaacacagaattccactgggtgcttttactcttcgacctgtcggcctgcaccgtcaatgtatatgactcaatggataaaaaagagtctacgtttgacaaggttttcgaacttatagacagggcatggtttcggttccgtcatttggtccgcggcaactggagagaaagacttaggcggaggtttaaatttccttgcgcaaagcaaaagcagggaactaacttgtgcggctactacgtgtgtgagtattgccactgccttgcagaccaaatcatcaccacaagagagctcgattttattcgcatgagggataacctgaccacacacaaggaatttatcgcagcggttcaagaacaactcatgggattcatcaacgaagaaatccttgatcccaagggtgaattctactacgacggaaacataattcaccggtccttagcttctgagctagcagcgactactactacatcgaaatcgtag

SEQ ID NO: 16639 - DNA, 396 bp, Oryza sativa
  Clone ID: PAT_MRT4530_2236C.1
ttttttggttttttaaaattttgtgtttttttattttttttttttttttttttttttttttttttttttttttttttttttttttttttcccccaaaaaatttaaaaaattttttaataaaaaaaaaaggcccaatttttaaggccaggggggatcccatggttacccaaaaccggtttaaaaggggcaaaaggcttctccttaaaaaaaaaccggaaggcgggggcccccccgggtggacccaacaagcaatgtgcatgcaggcacttttgggcctgtaaaaaaaaaaaatctttaaaattggtcacttcctttaaatttaaaaggagaaaacacgtaaccgcccccctttctttcaaacccagggaaaacccgggggcggttaattaccaatgg

SEQ ID NO: 16640 - DNA, 2508 bp, Oryza sativa
  Clone ID: PAT_MRT4530_22370C.1
atggtgaagttctcgaagcaatttgaagggcagcttgtccctgagtggaagcatgcctttgtggactatagcttgctcaagaaagatcttaagaggatgcagcatgattattctccccaagggaccataattaccacctcaacacctcatgatcatcatcagcagcagcaatcagttgcggcgccatcaagttataatttgtctcactgcaggctcctgttgcacaagctcccggcggccttctttggctccaataatgctgatcatgctggagccatacaagtgcgccggagagtgggcaggggggaggtttacgagacggaggtgacgccggagatggagacgacggcggcgacggcggcgagggagttcttcgcgaggctggacgcgcagctgaacaaggtgaaccacttctacaaggccaaggaggaggagttcctccacagaggtcactccctccggaagcagatggacatactcctcgacctcaagtcgcggtcgtcgtcgtctctctccggccaccaccgcgccgccgccggcgacgacccctccatttcttcttcttccgccacctccggcgccgtgaccatggttagtgggaagctggtggtgagagaggatggagatgagctagcagaggatgagtccacgaggtacgtgacgtcagcaacagacacggacgagagccaacacgaaaccgcggtgatgagagaccctgaagagctttcggctgagcagggtctagaagattctggaagcttgtcaaggcagagcctagggaggacagtgagcagctgccagaggaagaacctgaagatcaacatccccctgacgacgccatgcaggacaatctctgcactcaccgacctcctccgggacgatctcgtcagccagcccaagaacaaatgcgactctgacgccggcatcacgttcacgaccatcaacaagacgaagctccggcacgccgagaagatgatcaagggcgccttcatcgagctctacaaaggtcttggatacctcacaacctaccggaacctgaacatgatggcgttcgtgaagatcctgaagaagttcgagaaggttagcgggaagcaggtgctgtccgtatacctcagggcggtggagagctcctacttcaacagctccggcgaggctctgaagctgatggacgaggtggaggacgtgttcgtcaggcacttcgccgccggcaacaggcgcaaggccatgaagtacctcaagcccacgcaacggaaggagtcacacactgtcacattcttcatcgggctcatgacgggatgcttcgtggcgctgttcttgggctactgcatcatggcgcacatcgccggaatgtacacgcagcggcgcgactccatctacatggagaccgtctaccctgttttcagcatgttcagcctaatgttcctgcacctgttcatgtacgggtgcaacatggtggcgtggaggaaggcccggatcaactacagcttcatcttcgagttcgcggccggaagagagctcaagtaccgggacgtcttcctcgtctgcaccgcatccatggccgtcatcgtcggcgtcatgttcgcgcacctctccctcgccgtcaggggattccacgcccaggccatccccggattcttgctcctggggttcctgctgctgctgttctgcccattcaacatggtgtatcgctccactcggtttcagttcctcaggatactgaggaacatcgttttctcaccactctacaaggttgtaatggtagacttcttcatggcagatcagctctgcagccaggtgcctatgctaagaagcctcgagtacgtcgcttgctactacatcagtggaagctacagaacacaggagtacggatactgcatcaacaccaagcatatcagagatttggcctatgcagtttccttcctgccctactactggagagccatgcagtgtgcaagacggtggttcgatgagagcgacacgggccacctggtaaacctgggcaagtacgtctcggcgatgctcgccgccggcgccaaagtggcctacgagaaggacaggagccttggatcactctcactcctcgtcatcgtctccagctctgcaacaatgtatcagctctactgggactttgtcaaggactggggcttgctccagcccaactccaagaatccatggctgaggaatgacctcatccttaagagcaagtccatatactacttgtcaatgggtctgaaccttgtgctaaggcttgcatggctacaaaccgtgatccatccaaactttgggagtttggactccagggtcacttcattctttctagctgctctcgaggtgatccggagagggcattggaatttctataggctggagaacgagcatctgaacaatgcaggcaaattcagggcgggttcagccttcagggaatggcaattgtatgcaactgaagacagtgatccgttcctagatgcattaacatgtataaaatacgcatcgcagtatcgcaaatga

SEQ ID NO: 16641 - DNA, 2073 bp, Oryza sativa
  Clone ID: PAT_MRT4530_22371C.1
atgctcgagacattcacccttcccgcgggtacagaggacaaagtgaaaacgtggactctgaagaaaatggcagaacagtttcagagcttcaagggagatctgtatcagaaatatatcatgaaggggcagacaccgaacttcgacacattcccaaagctaatggatcactgggacgagttcgttgcatataagacagctgatggctccctagtcttcggcgatcagatacgcgaggctgcgcgtcgactaacagacgcattgaaagcctcttctcagggcacgttccgaccggacagagagaaggacgagctgtcactcgccctgcagactccagagcatctaggacaaacacgagggaaaggggtgattccttggaagattgggttcaaggaggacaaccacacgtacaggagtcggatgaggattaagagagataccgaggcaaagattgcagatcttgagttcagggtatcgagctacgagctcagcttgcaagaggaggtggcaaggaaggtaggatcacagagcatggacgccatgcaaacccaggacgaaaccacctaccctgttgatgacatcactcagcggacaccatgtgagctgtatattcccttcaagaacttatcaataaaggtggcgtcgggcatggccatcccaacggaccctttaggtacttaccactgcaggccgattccagcaggatactccaaggctcctgcactgactcctcctcaggctcctacaccgactcctcctcaggctcctcttccggcaccttccaagtcaagggcccccaaggctcctccgcctacccctacaagggcaacgaagaaggcgaaagttgatgccgccaagaataaggacccggggtacgattgcacgcaagaggagcttgacgcttacgtggcatcagaagtcaggagacaattcaagcctcgtagtctagaaaagaagattcctatagacccgagtgtcaggaacttcttcaggggtatgtctgcacctgccaaggaggccataaagctatcggactatgagcgaacactcaagaaagcatcttctggaaagtccaaactagtccctcagcttggagagcaaccaaaccaggagatcgagccgttggtgaccggtgaagtttttggaatacaagactttattaatgacatcgggctaactacagatcaattgctacgagatgcaccaatcgaaaaggcggaagtgaaatacatgtgcgaactcggtaaaccgcttctcaagcctgagctgttgccgtccctacccacacaaatgtacaagttccatcagctgtacatggagatgagcgccaccggtagagagatgatcggagcgaggatcagggacacggacttcttgcaaggagatgacattctcttgatcaatttcaagggaatctacgaactataccagctggacgccctcgacgtctctattatgagtcgctggattttaatggagattcaaagggcccaacggcggggggtttttgattctggattcatcgaccctcggaaagtaaacgtcgcaatgctcgaccaatatccgcaagccacagaggacaatctcgtccatctcctgaaggcgcagcattacaagacgttcatactgttgccgtacaacacagaattccactgggtgcttttactcttcgacctggaggcctgcaccttcaacgtatatgactcaatggataaaaaagagtctacgtttgacaaggttttcgaacttatagacagggcttggtatcggttccgtcatttggtccgcggcaaatggagagaaagacttaggcagaagttcaaatttccttgtgcaaagcaaaagcagggaactaacttgtgcggctactacatgtgcgagtattgccactgccttgcagatcaaatcatcaccacaagagagctcgatgaatttatcgcggcggttcaagaacaactcatgagattcatcaacgaacaaatccttgatcccaagggtgaattctactacgacggaaatacaattcatatgtccttagcttctgagatagcgactactactacgtcaaaatcgtag

SEQ ID NO: 16642 - DNA, 6127 bp, Oryza sativa
  Clone ID: PAT_MRT4530_22372C.1
atggatcggcaatggatgtacgctgaccggtggtccaaagagtttattgacggcgtgcactattttttgagagtggccgaagctaacaggcaaaggggttttatttgttgtccatgcaataattgtaagaatcagaaggagtattctgcatctaggactattcatttccacttgtttgagtcggggttcatgccaagctataattgttggacatcccacggagagcaaggtgttgaaatggaagaagatgaagtggaagacgacaatattccggactttactcagtatgttggatttgaagaaaatcaaacgggcgaggaggaaatagctgctgatggtaacgacgttgcggatgatcttggtgagatgttgcaggatgccagggaggactgcgaaagtgaaaaggaggcccataaattggacaagatggtggaggaccacagaacttcgttgtacccaggttgcgagcaggggcacaaaacgttggataccactctggagttcttgcaatggaaggcaaaaaatggggttagtgacaaagcatttagcgatttattgaaactcgtcaagaacattcttccggggggaaacaaattgcccgagacaacgtacgaggctaagaagatagtctgtccgttaggactggaagttcataagattcacgcatgtccgaacgattgtatcctatatcgcggtgaggagtatgaaaacctagaagcataccgtgtttgcaaagcactacgatacaagattagacgagacgatccaggagaagttgacgggcagctaaaaaagaagagaattcctgctaaggtgatgtggtatttccctataataccacggctaaggcgtttgttcaggaacaaggggaatgctagaatgttgtgatggcacgctgaagagcgtcaacaggacgggatgctgagacaccccgccgatggttcgcagtggcgaaacatcgacagaaaaattaaagaatttggaaaggacgcacgaaacatacggtttggtttgagtacggatggcatgaatccttttggagagatgagcagcggccatagcacttggcccgttacgatgtgtatctacaacctccccccctggctatgcatgaagaggaagtacataatgatgccgattattattcaaggccccaagcaatttggtaacgacatcgatgtgtacctaagaccactgattaaagatcttaaacagttgtggaagaaggaaggtgtccccgtgtgggacgaggacaaacaggtggagtttaacctacgagcgctgctgttcgtaaccatcaacgattggcctgcccttagcaacctatccggacagtccaacaaggggtacaaggcttgcactcactgtatggatgaaacagaaagtatgtatcttaagcactgtaggaaggttgtatacatgggtcatcgtcgattccttgcagcaaaccactcggtacggaagaaaggcaagcacttccaacataaggccgaccaccgtacgaagcctaaacatcgcagcgggaaaacagtgtttgctatggttaaagatcttaaagtagtgttcggaaaggggcctggaagccagcctatagagagcgaagatggtcacgcggcgatgtggaaaaagaactctatattttgggagttaccatattgggaattcttggacgtacgccacgcaatcgacgtgatgcacctcactaagaacctttgcgtaaaccttcttggcttcctaggtgtatacggaaagttgaaagatacactggaagcacgtaatgatctgaagcatatggaacaacgcggcgaccttcacccggaaccataacaaagctatgtgcattcatgaacgcaatttcgcagaaggtcatcgatccggatagattagaagcccttcagaatgaagtggtgcaatgtctcgtcagttttgagttgatatttctaccttcatttttcaatataatgacgcatctgctttgtcaccttgtgaaagagatccgtattctcgggcctgtatacctacacaacatgtttcctttcgagaggtacatgggcgttctgaagaagtatgttcgtaaccgtgctcgtccagaggcaagcatcgccaagggttatggaacagatgaggtcatcgaattttgcgtagaatttatcgaagaccttcgcccaatcggggtacctgaatcacgccatgaagggagactacgggaaaagggaactctcggaaggaaagcaataatgacggtagataacaatttattccgtaaagcccatttcactgttctgcaacactcttcattggtagctccttacatcgaggagcacttggctctagttcgcgccaggaacatcggtaagtccgatgcatggattacacgacatcacattgatactttccccacgtggctacgacaacatctcatgggtaacgagtcgatcaaccaacaacttgccttcctggcgaggggaccgtctgggtcgatcgcgacattccagggatatgagatcaatgggtacacattctacatgagagcccaagacatgaagagcacgaaccaaaacagcgctgtttgtgtcgatgccatgggacacgatggaacaactgccacgtattacagtgccatcgaggatatatgggaacttgactatggtcctctcaaggttcctctgttccggtgccaatgggttaggttgactggtggaggcgtaatgattgatgacagtggtatgacaactgttgaccttaacaaggttggatactcggacgaaccttttgtccttgccaataatgtaacgcaagtatttttcgtgaaggacatgtctagcaaaggaaagaagggcagagggcctgacgagcctaagcgtcaagtggttctcccagtgcgccctcgtcttctccaccaacacttaacgttttcggccgatcgatctctctcggcctctctccttcgctgccactgtctagggcaaatccccgcgccgacgccgccgtatctcgccgtcgtctcgagctcgtcgtcctcgccgccgcctccgcctcttccgccgccaccgcatttttgggatgtttcttgtatcaacagatggctgaccgcgatgaggaacagatattgtacgatacaatcgcggagggaagcagccagtactggaatgaagaagaggggaacgaggatccaaaccagtacttgaacaaggaagggaacgtggagagggatgcggaggggaaccagcaggggcacgtggaaagggatgtggaggggaaccaggaggaggaggctagtggtagtcaaccctccgttggacagaagagggcacacgggcaacgaggtgcaccgaaaaagcttgagggtcggcacatcataataaaagtggaagaagatggacgtcctagtgccccgggccgaagccgccaagaactatgtacatcacagcggttgggttgtgcaggataacgtgcctgtcagtacggtgtactggcgaacaacaagggcacgcggagatcatgagagctttgtcccagattcggagaaagagatgttgtggaccacaatgctcaagacattcacccttcctgctggtacagaggacaaagtgaaaaggtggactctgaagaaaatggcagaacagtttcagagcttcaagagagatctgtaccagaagtatatcccgaaggggcagacaccgaacttcgacacattcccaaagctaagggatcactgggacgagttcgttgcatataagacaggtaaacaagggtaggcgatgatggaaagaaacaaagaaaatgccgccaagaagaagtactatcaccacttggggtcaggaggctatagcgtcgcgatgccgaagtgggaggagatggaggctagctttattgagcggggtatcgaaccggcaaccgccaattggccggaacgatcgaagttctggtactatgctcacggtggaacgctcaaaccagttgatggctcactggtctttggcgatcagatacgagaggctgtgcgacgactaacagatgcagtggaagcctcctctcagggcacgttccgaccgaacagagatagggacgagctgacactcaccctgcagactccagagcatccaggacgaacacgagggaaaggggtgattccttggaagattggtttcaaggaggacatccacacgtacaggagtcggatgaggagcaagagagataccgaggcgaagattgcagatctagagttccgggtatcgagctacgaactcagaatgcaagaggaggtggcaaggaaggttgatgaacgcatggccgcacatcggtcccatgatccccagccgaccattcctcctgcaatggtaagcccgtcaggaaaccatagcagctgcgcctcaacggggcaggtaggatcacagagcatggacgccatgcaaacacaggacgaatcgacctgtcccgttgatgacatcactcagcggacaccatgtgagctgcatattccttacaagaacttatcaataaaggtggcgtcgggcatggccatcccaacggacccttcaggtacttaccactacaggccgattccagcaggatactcgaaggtcgaagttgagttggtcgaaggcgcgtacgaggacctcgagctggattaccctggaggagacggtgagatgcatctatgagacacaagccatgccattattctatggcgcaggcggtacatcatcctcccagggcgacaagcggcgtctcgtgcaccatctcctccggctccgccatctcctcctcaggatcctgcaccgtctcctcctcatgctccaccagcaccgtctccacctcaggctctagcaccgactcctccttaggatcctgcatcgactcctcctcgggctcctacacctactcctccgcaagctcctcttccggcaccttcaaagtcaagggcccccctagctccaccgcctgcccacacaagggcaacgaagacggcgaatgttgacaccgccaagaacaaggacccggggtacgattgcacgcaagaggagctttgcatcagaagtcaagagacaattcaagcctcgaagtccagaaaagaagattcctatagaccccagtgtcaggaacttcttcaggggtatgtctgcacctgtcaaggaggccatcaagctatcggactatgagcgaatgctgaagaaagcatcttctgtaaagtccaaaccagtcctcagcttggagagcaaccaaaccaggagatcgagccgttggtgaccggggaagacatgacgatagaagaatttattattgacaccggtctaactacggatcaattgctaggagttgaaccaatagaaaaggcggaattgaaatacatgtacgaactcggtaaaccgcttgtcaagcccgagctggtgcagtccctacccacacaaatgtacaagttccatcagctgtacatggagatgagcgccaccggtagagagatgatcggagcgaggatcagggacccggacttcttgcaaggagatgatattctctggatcaatttcaagggaatctacgaagtataccagctggatgcccgcgacgtctctattatgagttgctggattttaatggagattcaaagggcccgacggcggagggttttcgatactggattcatcgaccctcggagagtaaacgtcgcaatgctcgaccaatatccacaagaaacagaggacaatctcgtccatctcctgaaggcgcagcattacatgacgttcatactgttgccgtacaacacagaattccactgggtgcttttactcttcgacctgtcggcctgcatcgtcaacgtatatgactcaatggataaaaaagagtctacgtttgacaaggttttcgaacttatagacagggcttggtatcggttccgtcatttggtccgcggcaactggagagaaagacttaggcggaggttcaaatttccttttattcgcatgagggataacctgaccacacacaaggaatttatcgtggcggttcaagaacaactcatgggattcatcaacgaagaaatccttgatcccaaaggtgaattctactacgacggaaacacaattcaccggtccttagcttctgagctagcagcgagtactactactac

SEQ ID NO: 16643 - DNA, 2583 bp, Oryza sativa
  Clone ID: PAT_MRT4530_22373C.1
atggcagaacagtttcagagctttaagggagatctgtaccagaaatatatcctgaaggggcagacactgaacttcgacacattcccaaagctaagggatcactgggacgagttcgttgcatataagacaggtgaacaagggcagtcgatgatggaaagaaacaaagaaaataccgccatgaagaagtaccatcaccacttggggtcaggcggctatagcgtcgcgatgccgaagtgggaggagatggaggctagcttgcttgagaggggtatcgaaccggccaccgctaattggccgaaacgatcgaagttctggtactatgctcacggtggaatgctcaacccagctgatggctccctggtcttcgacgatcagatacgtgaggctgcgcgtcgactaacagacacagtggaagcctcttctcagggcacgttccgaccggacagagagaaggacgagctgtcactcgccctgcagactccagagcatccaggacgaacacgagggaaaggggtgattccttggaagattgggttcaaggaggacatccacacatacaggagtcggatgaggagcaagagagataccgaggcgaagattgcagatcttaagttcagggtatcgagctacgagctcagcatgcaagaggaggtggcaaggaaggttgacgaacgcatggccgcacatcggtcccatgatccccagccgaccattcctcctacaatggtgagccggtcaggaaatcgtagtagctgcgcctcaacggggcaggtaggatcacagagcatggacgccatgcaaacccaggacgaaaccacctgccccgttgatgacatcactcagcagacaccatgtgagctgcatattcccttcaagaacttatcaataaaggtggcgtcgggcatggccatcccaacagacccttcaggtacttaccactgcaggccgattccaacaggatactccaaggtcgaagttgagttggtcgaaggcgcgtacgaggacctcgagctggattaccttggaggagacggtgagacgcatctacgagacacaagccacaccattattctatggcgcaagcgatacatcatcctccctgggcgacaagcggcgtctcgtgcaccatctcctctggctccgccatctcctcctcaggctcctgcaaagtctcctcctcatgctccagcaccgtctccacctcaggctcctgcaccgactcctcctcaggctcctacaccgactcctccgcaagctcctcttccggcaccttccaagtcaagggccccccaagctcctccgcctgcccccacaagggcaacgaagaaagcgaaagttgacaccgccaagaacaaggacccggggtacgattgcacgcaagaggagcttgacgcttacatggcatcagaagtcaggagacaattcaagcctcgaagtccagaaaagaagattcctatagacccgagtgtcaggaacttcttcaggggtatgtctgcacctgccacggatgccataaagctatcggactatgagcgaacactcaagaaagcatcttctggaaagtcgaaaccagtccctcggcttggagagcaaccaaaccaggagatcgagccgttggtgaccggtgaagattttggaatacaagactttattaatgacaccgggctaactacggatcaattgctacgagacgcaccaatcgaaaaggcggaagtgaaatacatgtatgaactcggtaaaccgcttgtcaagcctgagctactgcagtccctacccacacaaatgtacaagttccatcagctgtacatggagatgagcgccaccggtagagagatgatcggagcgaggatcagggacacggacttcttgcaaggagatgacattctctggatcaatttcaagggaatctacgaactataccaactggacgccctcgacgtctctattatgagttgctggattttaatggagattcaaagggcccgacggcgggaggttttcgatactggattcatcgaccctcggaaagtaaacgtcgcaatgctcgaccaatatccgcaagccacagaggacaatctcgtccatctcctgaaggcgcagcattacaagacgttcatactgttgccgtacaacacagaattccactgggtgcttttactcttcgacctggagacctgcaccgtcaacgtatatgactcaatgaataaaaaagagtctacgtttgacaagtttttcgaacttatagacagggcttggtatcggttccgttatttgtgcgtaaagcaaaagcagggaactaacttgtgcagctactacgtgtgcgagtattgccactgccttgcagaccaaatcatcaccagaagagagctcgattttattcacatgagggataacctgatcacacacaaggaatttatcgcggcggttcaagaacaactcatgggattcatcaacgaacaaatccttgattccaagggtgaattctactacgacggaaatacaattcataggtccttagcttctgagatagcgactactactacgtcgaaatcgtacctagctaggacatataatggattgtaa

SEQ ID NO: 16644 - DNA, 5556 bp, Oryza sativa
  Clone ID: PAT_MRT4530_22374C.1
gcggcggcgaggtcgtcgacgaagggggtgaggaggacgaagagcctgatatcgaggacgtctcattctttcgcagtgtttctttttcctgtctttgttgttgatttgcaggcaaaagcaaacctggaactcaagaaaaagaaagtcatggatgcttgcatggatcggcaatggatgtacgctgaccgacggtccaaagagtttattgacggcgtgcattattttttgagaatggccgaagctaacaggcataagggttttatttgttcatgcaataagtgtaagaatcagaaggagtattctgcatccaggactattcattttcacttgtttgagtcggggttcatgccaagctataactgttggacatcccacggagagcaaggggttgaaatggaagtagatgaagtggaagacgacaatattccggactttgatcagtacgctggatttgaaggaaatcaaacgggcgaggaggaaagggatgctgatggtaacgacgttgcggatgatcttggtcagatgttgtaggacgccaaggaggactgtgaaagtgaaaagggggcccataaattggacaagatgttagaggaccacagaacgtcgttgtacccaggttgcgagcaggggcacaaaaagttggataccactctggagttcttacaatggaaggcaaaaaatgatgttagtgacaaggcatttggcgatttattgaaactcgtcaagaacattcttccggagggaaacaaattgcctgagacaacgtacgagactatgaagatagtcttccctctaggactggaagttcaaaagattcacgcatatccgaatgattgtatcctatatcgcggtgaggagtacgagaacctagaagcatgccttgtttgcaaagcactacgatacaagattagacgagacgatccaggagaagttgacaggcagctaacaaagaagagaattcctgctaaggtgatgtggtatttccctataataccacggctaaggcgtttgttcaggaacaaggggaatgctagaatgatgcgatggcacgctgaagagcgtcaacaggacgggatgctgagacaccccgccgatggttcgcagtggcgaaacatcgacagaaaatttaaagactttggaaaggacgcacgaaacatacggtttggtttaagtatggatggcatgaatcctttcggagagatgagcagcggccatagcacttggcccgttacgatgtgtatctacaacctcccccctggctatgcatgaagaggaagtacaaaatgatgccgattattattcaaggccccaagcaacctggtaacgacatcgatgtgtatctaagaccactggtcgaagatcttaaactgttgtggaaaaaggaaggtgtccccttgtgggacgaggacaaacaggagaagtttaacctacgagcgctactgttcgtaaccatcaacgattggcctgcacttagcaacctttccggttagtccaacaaggggtacaaggcttgcactcactgtatggataaaacaaaaagtgtatatggaaagtcgaaagatatactagaagcacgtaatgatctgaagcatatggaacaacacggcgaccttcacccggaaccaaaggagaaaggaagccattacttgagtccagccagctacactcttagcaaggcagagaaggaaagtatgtttgaatgcttggagagcataaaggtaccgtctggatactccacgaataataagcacaaaggagaagaagttcacaaacctaaagtctcatgactgtcacgtgttgatgacacaactgctaccagttgtaataaggggtatccttccagacaatgtcccggcaataataacaaagctatgtgctttcatgaacgcaatttcgcagaaggtcatcgatccggatagattagaagcccttcagaatgatgtgaggtacatgggcgttctgaagaagtatgttcgtaaccgtgctcgtccagaggcaagcatcgccaaggggtatggaacagaggaggtcatcgaattttgcatggaatttattgaaaacattcgtccaatcggggtacctgaatcacaccatgaagggagactacggggaaagggaactctcggaaggaaagcaataatgacggtagacaacaatttattctgtaaagcccatttcacggttctacaacaatcttcattggtagctccttacatcgaggagcacttggctctagttcgcgccagaaacatcggtaagtccgatgcatggattacacggcatcacattgatactttccccgcgtggccacgacaacatctcatgggtaatgagacgatcaaccaacaactggccttcctggcgaggggaccatctgggttgatcacgacattccagggatatgagatcaatgggtacacattcaacacgagagcctaagacatgaagagcacgaaccaaaacagcgatgttcgtatcgatgccataggatacgatggaacaactggcacgtattatggtgccatcgaggacatatggaaacttgactatggtcctctcaaggtccctctgttctggtgccaatgggttaggttgactggtggaggcgtaatgattgatgacagtgggatgacaacggttgaccttaaaaaggttggatactcggacgaaccttttgtccttgccaatgatgtaacgcaagtcttttacatgaaggacatatctagcaaaggaaagaagggcaaagggcctgacgagccgaagcgtcacgtggttctcctaggcaaaagaaaaatcgtcggagttgaggacaagactgacgaggattatgatcagttggatgggcaaccccctttcacggtgacgattgaccctagcatcctcctatcaaatgaagacaccccttactcacgtagcgatcacaaggagggaacaatatacttgaacgaggaagggaacgtggagagcgatgcggaggggaaccaggaggggaacgtggagagggatgtggagaggaaccaggaggaggaggctagtggaagtcaaccctccgctggacagaagagggcacgcgggcaacgaggtgccgtgaataagctagagggtcggcacatcataacggaagtggacgaagacggccgacctagtgccccggcggaagcagccaagaactacgtacgacacagcggttgggttgtgcgggataacgtgcctgtcagtacggtgtactggcgcagaacaagggcacgcggagaacatgagagctttgtcccagattcggagaaagagatgctgtggaccacaatgctcgagacattcacccttcccgcgggtacagaggacaaagtgaaaaggtggactctaaaggaaatggcagaacagtttcagagcttcaagggagatctgtaccagaaatatatcctgaaggggcagacaccgaacttcgacacattcccaaagctaagggatcactgggacgagttcattgcatataagacaggtcaacaagggcaggcgatgatggaaagaaacaaataaaatgctgccaagaagaagtaccatcaccacatggggtcaggcgactatagcattgcgatgccgaagtgggaggagatggaggcaagcttgcttgagaggggtatcgaaccggccaccgctaaatggccgaatcgatcgaagttctggtactatgctcacggtggaacgctcaacccagctgatggctccctggtcttcagcgatcagatacgcgaggctgcgcgtcgactaacggacgcagtgaaagccttttctcagggcacgtttcgacccgacagagagaaggacgagctgagtcggatgaggagcaagagagataccgaggcgaagattgcagatcttgagtacagggtatcaagctacgagctcagcatgcaagaggaggtggcaaggaaggttgatgaacgcatggccgcacatcggtcccatgatccccagccgaccattcctcctgcaatggtgagccattcaggcaatcatagcaactgcgcctcaacggggcaggtggcgtcgggcatggccatcccaacgaacccttcaggtacttaccactgcaggccgattctagcaggatactccaaggtcgaagttgagttggtggaaggcgcgtacgaggacctcgagttggattaccctggaggagacggtgagacgcatctacgagacacaagccacgccattatactatggcgcaagcgatacatcatcctccctgggcgacaagcggcgtctcgtgcaccatctcctccggctccgccacctcaggctccttcaccgactcctcctcaggctcctacaccgactcctccgcaagctcctcgtccggcaccttccaagtcaaaggccccccaagctccagcgcctgcccccacaagggcaacgaagaaggcgaaacttgacgctacaaaaaacaaggacccggggtacgattgcacgcaagaggagcttgacgcttatgtggcatcagaagtcaggagacaattgaagcctcgaagtccagaaaagaagattcctatagacccgagtgccaggaacttcttcaggggtatgtctgcacctgccaaggaggccataaagctatcggactatgagcgaacacttaagaaagcatcttctggaaagtccaaaccagtccctcagcttggagagcaaccaaaccaagagatcgagccgttggtgaccggtgaagattttggaatacaagaatttattaatgacaccgggataactacggatcaattgctacgaggcgcaccaatcaaaaaggtggaagtgaaatacatataggaactcggtaaaccgcttgtcaagcctgagcagctgcagtccctacccacacaaatgtacaagttccatcaactgtacatggagatgagcgccaccggtagagagatgatcggagggaggatcagggacacggacttcttgcaaggagatggcattctctggatcaatttcaagggtatctacgaactataccagctggacgccctcgacgtctatattatgagttgctggattttaatggagattcaaagggcccgacggtggggggttttcaatactggattcatcgaccctcggaaagtaaacgtcacaatgctcgaccagtatccgcaagccacagaggacaatctcgtccatctcctgaaggcgcagcattacaagacgttcatactattgccgtacaacacagagttaaacgtatatgactcaatggataaaaaagagtctacgtttgacaaggttttcgaacttatagacagggcttggtatcggttctgtcatttggtccgcggcaaatggagagaaagacttaggcggaagttcaattttccttttattcccatgagggataacctgatcacacacaaggaatttatcgcggcggttcaagaacaactcatgggattcatcaacgaacaaatccttgatcccaagggtgaattctactacgacggaaatacaattcataggtcattagcttctgagataacgactactactacgtcgaaatcg

SEQ ID NO: 16645 - DNA, 234 bp, Oryza sativa
  Clone ID: PAT_MRT4530_22375C.1
atggctccggatgaaatggctagccttcgaagggcttgcagggcttcgaggagccattctccccagggagatgacctaggagcccaacgaggcttcggaggctgcccatggggctccggagatggtcaagaactccggagcatctgtggcttccggagcctcgcgagggcttcgcatgccggcaaggtttctggagctagcagcgtggcccggagggaatcaaggctagtttga

SEQ ID NO: 16646 - DNA, 5066 bp, Oryza sativa
  Clone ID: PAT_MRT4530_22376C.1
tacataatgatgccgattattattcaagaccccaagcaacctggtaacgacatcgatgtgtaccaagaccactggtcgaagatcttaaactgttgtggaaaaaggaaggtgtccccgtatgggacgaggacaaacaggaggagtttaacctacgagcgctgttgttcgtaaccatcaacgattggcctgcacttagcaacctatccgggcagtccaacaaggggtacaaggcttgcactcgctgtatggatgaaacagaaagtacgtatcttaagcaccgtaggaaggttgtgtacatgggtcatcgtctattccttgttgcaaaccacccagtacagaagaaaggcaagcactttgaacataaggcggaccaccgtacgaagtctaaacatcgcagtggaaaaacagtgtttgctatggttaaagatcttatagtagtgtttggaaaggggcctggcagccagcctatagagagcgaagatggtcacacggcaatgtggaaaaagaactctatattttgggagttaccttattaggaattcttggacgtccgccacgcaatcgatgtgatgcaccttactaaaaacctttgcgtaaaccttcttggcttcctaggtttatatggaaagtcgaaagatacactggaagcatgtaatgatctgaagcatatgaaacaacgcaaggagaaaggaagccattacttgagtctagccagctacactcttagcaaggtagagaaggaaagtatgtttgaatgcttggagagcatcaaggtaccgtctggatactccacgaatataaagtgaataataagcacgaaggagaagaagttcacaaacctaaagtctcatgactgtcacgtgttgatgacacaactgctaccagttataataaggggtatccttccagataatatccgggcaacaataacaaagctatgtgctttcataaacgtaatttcgcagaaggtcatcgatccggatagattagaagcccttcagaatgatgtggtgcaatgtcttgtcagctttgagttgatatttccaccttcatttttcaatataatgacgcatctgctttgtcaccttgtcaaagagatcggtattctcgagcctgtgtacctacacaacatgtttcctttcgagaggtacataggcgttctgaagaagtatgttcgtagccgtgctcatccagaggcaagcatagccaaggggtatggaacagaggaggtcattgaattttgcgtagaatttattgaagaccttcacccaatcgggtacctgaatcacgccatgaagggagactacgggaaaagaagactctcggaaggaaagcaataatgacggtagacaacaatttattccgtaaatcccatttcacggttctgcaacaatcttcattggtggctccttacatcaaagagcacttgtctctagttcgcgccagaaacatcggtaagtccgatgcatggattacacagcatcacattgatactttccctacgtggctacgacaacatctcatgggtaacgagacgattaaccaacaactggccttcctggcgaggggaccatctggctcaatcacgacattccagggatatgagatcaatgggtacacattctacacgagagcccaagacatgaagagcacgaaccaaaatagcgttgttcgtatcgatgccatgggacacgatggtacaactggcacgtattacggtgccatcgagaacatatgggaacttgactatggtcctctcaaggtccctctgttccggtgccaatgggttaggttgactggtggaggcgtaacgattgatgacagtgggatgacaatggttgaccttaacaaggttggatactcggacgaaccttttgtccttgctagtgatgtaacgcaagttttttacatgaaggacatgtctagcaaaggaaagaagggcaaagggactgacgagccgaagcgccacgtggttctcccgatgcgcccacgtcttctccaccaacacttagaagttttttccccgatctcggcttctcctttgccaccactgcctagggcatccccgcaccgacgctgccgccgtatctcgccgtcgtcttgtggtcgtcgtcgtcgccgcctccgtcgctgacgccgccgccgcatctccgggcaaatatttcttgtataaacagatggctgatcgtgatgaggaacagatactgtacgatacaattgcagagggaagcagccagtactggaacgaagaagaggggaacgaggatccaaaccagtacttgaacgaggaagggaacgtgcagagggatgtggaggggaacgaggaggggaacgtggagagggatgcggtggggaacgatgaggaggaggctagtggaagtcaaccctccgctagacagaagagggcacgcggataacgaggtgccgcgaagaagctagagggtcgacacatcataacagaagtggacgaagatggccgacctagtgccctggcagaagtagccaagaattacgtatgacacaacggttgggttgtgcgggataacgtgcctgtcagtacggtgtactggcgcagaacaagggcacgcggagatcatgagagctttgtcccatattcggagaaagagatgctgtggaccacaatgctcgagacattcacccttcctacgggtatagagaacatagtgaaaaggtggactctaaagaaaatggcagaacagtttcagagcttcaagggagatctctaccagaaatacatcatgaaggggcagacaccaaacttcaacacattcccgaagctaagggatcactgggacgagtttgtttcttacaagacagggcaacaagggcaggcgatgatggaaagaaacaaagaaaatgccgcccaagaagaagtaccatcaccacttggggtcaggcggctatagcgtcgcgatgccgaagtgggaggagatggaggcaagcttgcttgagaggggtatcgaaccggccaccgctaaatggccggatcgatcgaagttctggtactatgctcatggtgtggaacgcttaacccagttgatggctccctggtcttcagcgatcagatacgcgaggctgccagtcgactaacggacgcagtggaagcctcttctcagggcacgttccaacccgacagagagaaggacgagctgtcacttgccttgcagactcccgagcatccaggacgaacacgagggaaaggggtgattccttggaagattggattcaaggaggacatccacacgtacaggagtcggatgaggagcaagagagataccgaggcaaagattgcagatcttgagtacagggtatcgagctatgagctcagcatgcaagaggaggtggtaaggaaggtggatgaacgcatgtccgcacatcggtcccaggatccctagccgtacattcctcctgcaatggtcagcccatcaggcaatcgtagcagctgcgcctcaacggggcaggtaggatcacagagcatggacgccatgcaaactcaggatgaaaccacctgcccctttgatgagatcactcagcggacaccatgtgagctgcatattcccttcaagaacttatcaatcaaggtggcatcgggaatggccatcccaacggacccttaagggacttaccactgcaggccgattccagcaggatactcgaaggtcgaagttgacttggtggaagccgcgtatgaggacgttgagttggactaccctagaggagacggtgagacacatctacgagacacaagctatgccattatactatggcgcaagcggtacatcatcctccctgggcgacaagcggcgtctcgtgcaccatctcctccggctccgccatctcctcctcaggctcctgcaccgtctcctctccttaggctccagcaccgtctccacctcaggctcctgcaccgactcctcctcaagctcctgcaccgactcctcctcgggcccctgcgccgactcctcctcaagctcctcgtccggcgccttccaagtcaaggtcccaccaagctccaccgcctgcccgcacaagggcaacgaagaaggcgaaagttgacaccgccgaaaacaaggagctggggtacgattgcacgcaagaggagcttgacgcttatgtggcagcagaagtcaagaggcaattgaagcctcgaagtccggaaaagaagattcctatagacccgagtgccaggaacttcttcaggggtatgtctgcacctgctaaggaggccataaagctatcggactatgagcgaacacttaagaaagcatattctggaaagtccaaaccagtcccttagcttggagagcaaccaaaccgggagatcgagccgttggtgaccggtgaagaatttggaataaaagaatttatttttgacaccgtgctaactacggatcaattgctacgaggcgcaccaatcctaaagacggaagtgaaatacaagtacgaactcggtaaaccgcttgtcaagcctgagcagctgcagtccctaccgacacagatgtacaaattccatcaactgtacatggagatgagtgccaccggtagagagatgatcggagcgaggatcagggacacggacttcttgcaaggaaaagatattctctggatcaatttcaagggtatctatgaactataccagctggacgccctcgacgtctctattatgagttgttggattttaatggagattcaaagggcccgacggcggggggttttcgatactggattcatcgaccctcggaaagtaaacgtctcaatgatcgacaagtatccgcaagccatagaggacaatctcgtccatctcctgaaggcgcatcattacaaaacgttcatactattgccgtacaacacacaattccactaggtccttttactcttcgacttggaggcctacgcagtcaatgtatatgactcaatggataaaaaagagtctacgtttgaccaagtgtttgaacttatagacagggcttggtatcggttccgtcatttggtccgcggcaaatggaaagaaagacttaggtggaagtttaaatttcctgtgagta

SEQ ID NO: 16647 - DNA, 450 bp, Oryza sativa
  Clone ID: PAT_MRT4530_22377C.1
gacccacgcgtccggtgcagaatacacgaagcttctcatcatggaggagatgaagaagagctttgctcggagagtgagccagtgaggcagtcaagctagcattagcaagggcggcgacatggacggcgagtcgccggcggcggcggcggcggcgctgcggctggccgccgtggcgaggaggtggctggagaacccccgggactcgctggcgaggagcagagaggaaggctgcggcgacgcgttcaacacggtggtgatgcccgggttccgcgtctccctcgccgagcccggccgcctcgtctgctccttctgcgtccccgccgccttcgccgtacgacgcggacgggaggtgacacgccggggcgatggcggcggcggtggacaacctgtgcgccggcggggtgtacacggcggacggcgtgcacaggttcaccatcagccaggccatgt

SEQ ID NO: 16648 - DNA, 278 bp, Oryza sativa
  Clone ID: PAT_MRT4530_22378C.1
tcaggttgttaccacactgccataggcagattgccacctaggggccacacatttccttgccttgcagcctccaacatggctctaatccctgttgagcggtgcagatatgctaattaggtgcatcacaaactgtcatacttgccagttgcttgacaaaatgattgacttcttaaactttgaaccatttgtgcatgtactctgtccttctgctggataaactgtagtgcttgtgagagtgacgtggtaattccatttaacgtcaaaggtggagtctaggg

SEQ ID NO: 16649 - DNA, 3698 bp, Oryza sativa
  Clone ID: PAT_MRT4530_22379C.1
atggctgatcgcgatgaggaacagatattgtacgatacaatcgcggagggaagcagccagtactggaacgaagaagaggggaacgaggatccaaaccagtatatgaacgaggaagggaacgtggagagggatgcggaggggaaccaggaggggcacgtggaaagggatgtggaggggaaccaggaggaggaggctagtggaagtcaaccctccgttggacagaagagggcacgcgggcaacgaggtgccgcgaagaagcttgagggtcggcacatcataacggaagtggaagaaaatggacgacctagtgccccggcagaagccgccaagaactatgtacgtcacagcggttgggctgtgcgggataacgtgcctgtcagtacggtgtactggcgaagaacaagggcacgcggagatcatgagagctttgtcccagattcggagaaagagatgttgtggaccacaatgctcgagacattcacccttcccgcgggtacagaggacaaagtgaaaaggtggactctgaaaaaaatggcagaacagtttcagagcttcaagggagatctgtaccagaaatatatcctgaaggggcagacaccgaacttcgacacattcccaaagctaagggatcactgggacgagttcgttgcatataatacaggtgaacaagggcaagcgatgatggaaagaaacaaagaaaatgccgccaagaagaagtaccatcaccacttggggtcaggcggctatagcgtcgcgatgccgaagtgggaggagatggaggctagcttgcttgagaggggtatcaaaccggccaccgctaattggccggaacgattgaagttctggtactatggtcacggtggaacgctcaacccagctgatggctcactggtcttcggtgatcagatacgagaggctgcgcgtcgactaacagacgcagtggaagcctcttctcagggcacgttccgaccggacagagagagggacgagctgtcactcgccctgcagactccagagcatccaggacgaacacgagggaaaggggtgattccttggaagattgggttcaaggaggacatccacacgtacaggagtcggatgaggcgcaagagagataccgaggcgaagattgcagatctagagttcagggtatcgagctacgagctcagcatgcaagaggaggtggcaaggaaggctgatgaacgcatggccgcacatcggtcccatgatccccagccgaccattcctcctgcaatggtgagcccgtcaggaaaccgtagcagctgcgtctcaacggggcaggtaggatcacagagcatggacaccatgcaaacccaggacgaatccacctgccccgttgatgacatcactcagcggacaccatgtgagctgcatattcctttcaagaacttatcaataaaggtggcgtcgagcatggccatcccaacagacccttcaggtacttaccactgcaggccgattccagcaggatactccaaggtcgaagttgagttggtcgaaggtgcgtacgaggaccttgagctggattaccctagaggagacacaccgtctccacctcaggctcctgcaccgactcctcctcaggctcctacaccgactcctccgcaagctcctcttccggcaccttcaaagtcaagggccccccaagctccaccgcctgcccacacaagggcaacgaagaaggcgaaagttgacgccgccaagaacaaggactcggggtatgattgcacgcaagaggagcttgacgcttacgtagcatcagaagtcaagagacaattcaagcctcgaagtccagaaaagaagattcctatagacccgagtgtcatgaacttcttcaggggtatgtctgcacctgccaaggaggccattaagctatcggactatgagcgaatgctgaagaaagcatcttctggaaagtccaaaccagtccctcagcttggagagcaaccaaaccaggagatcgagccgttggtgaccggtaaagaaatgatgatagaagaatttattactgacaccggtctaactacggatcaattgctaggagtcgcaccaatcgaaaaggcggaagtgaaatacatgtacgaactcggtaaaccgcttgtcaagcctgagctgctgcagtccctacccacacaaatgtacaagttccatcagctgtacatggagatgagcgccaccggtagagagatgatcggagcgaggatcagggacacgaacttcttgcaaggagatgacattctctggatcaattttaagggaatctacgaactataccagctggatgccctcgatgtctctattatgagttgctggattttaatggagattcaaagggcccgacggtggggggttttcgatactggattcatcgaccctcggaaagtaaacgttgcaatgctcgaccaatatccgcaagccacagaggacaatctcgtccatctcctgaaggcgcagcattacaagacgttcatactgttgccgtacaacacagaattccactgggtgcttttactcttcgacctgtcgacctgcaccgtcaactgcgcaaagcaaaagcagggaactaacttgtacggctattacgtgtgcgagtattgccactgccttgcagaccaaatcatcaccacaagagagctcgatttcgtctcccccgttggtgttcgaccggtggttagatccatggaccgccgcccgccgctcgccgtctccccgcgcaggctccgtccgcgcccgcaccgcgctgccgccgccggcgccgccccgcgcccgcccgtggcttgctccgtccagaccccgccaggatcgatcaagaaagcaactaccccgatgcgctcctccttctgcgcgctcccgacgtcccgccttgagccgacgccgcgggcgaagctggacttcgccgcggcgccctcgccggcgagagcggcggtggcggcggggaaggagaaccgccacgtcgacgacgaggtgtccctggacctcaccgccatggccatgcccacgcccatgcccacctggacggcatctccgctgccgccgccgaccagcccgctgttcgagaggggcaggctctacgacctctactccgcgcggcgcaacgagcggctcaagcgcaagcacggcttccccgccggcgaggaggaagcggaggcgatggccgccgacccctgcgtcgccgtcgagctctccaagcgccgcggcgccaagaagatgaccggtgccgagtccgtgaggcggtccatgccggcggcggcggacttctccgccgccggccgtgccgccacatctactctgggtctcaggtcctccctgcgcagcagcaaggagatgaagaaaacctccgccgcgtcctcctccttcgccggcgccaagtcgccggcggccaaggagaggagagccagcactcgctcgtcggctcggaggttctgatctcatctgatggaattgatagaaacaaaaaaaacagtttgatctggtttgataggtggaatgttgatattctgaaactatctgcttcaatgtcagtatgaaaaatggctaggtattggtaatattgatactgttggtactgagtttggaggttggttttgggggagggaatatggcttcatatcttggattcttgatatagaattgctgaataagttggaccatatttgtagcaaaaaaaaaaaaaaaaa

SEQ ID NO: 16650 - DNA, 282 bp, Oryza sativa
  Clone ID: PAT_MRT4530_2237C.1
atggagaagaagagctctgcagcaccttgcgacattactcaattccagctactcatctttggcataaggagtaactatatgcaatactactcatctgcagataacatggcacctgataatttgattattgcattaacaccaaagaacgataggtggaaaatcaaagtaaaagttactaggctatgggatgcggttaatcctacaatggctgatgatttctatggtatacagatgattgtactagatgcagagggcaactcaattagagtaaaagtaaaataa

SEQ ID NO: 16651 - DNA, 3057 bp, Oryza sativa
  Clone ID: PAT_MRT4530_22380C.1
atggctgaagctgtgaaacatcatgtctcatatgaaaagaagctcttgagtctaatatccaatttgctatcagagcctcgttggctcgctggtgccatgtcggagcataccccaccgcggccatcctgctcgccgccgccaacaccgccgcgctcacgctctcccctcgttcgcccgtcacaaacaccgccatgccacaatcctgctgagtccccgccgtgccgtgggcgcgggcgtggcgagcgacagcccttcgctgcccagccacgcgtcgtcagggagtcgagcgccgccgtccactacccggtcctaacgaggaccaactacgaggaatgtgcgctcttcatgaccgtcaaccagcaagcacagggactttggcacgccgtggagccgtatgaagacgaggagatcgagtaccgcgacgatcggctggtgctggccgcgatcttgcgtgtggtgccaccggagatgcttcgctccctctccaccaagcgcacggtgaaatccgcatgggaagcgatcaagaccgtatgcgtcggcactcggcgcgtgcgagaggcgaatgagcagctacttcgccgggagtttgccgatgcgcggttcaaggatggcgagaacatcgacgacttctccatgcgcatcttcggcatcgcaaacagcattcgcactcttggaggcgatctccccgagatagatgttatagcaatctcgatcgaaacgctcctcgacatccgcgacctgtcaattaaggaggtcaccgtccggctccgctccgtcgagaaatgcaaggccaagccgaaggaggtcgttgacagtggcggccgtctcatgctcactgaggagcagtggctggcacggctcaagaaccgcgagcagggcggtgagagcagtggcaccacgcccggcgcggccgcgaacaacagcggcaagaaacgcgggaatcggcgcagacgtgggcgtggccaggagcaccctggcgacaagtgccataactgcagcaagatgggccactgggccaaggactgccgctccaaggccaagaaggccgaggctcacatcgccacgaaggacgacgacgagcccacgctgctgatggcgcgtgcgtgcttggtccagcggcgatgcccgccagccgaacccacgtcgaagatcacgccggtgctcgcgcatcttgatggcgaccccgatcccgcggatttgtggtacctcgacaccggcgtgacgaaccacatgaccggtgcccgctccgtcttctccgagctcaacacggcggtgactggatccgtcgtcacgatcgagggctacggcacgatcctcttcgcctgcaagaatggcgagcaccgcgggctgaccggcgtctactacattccccgcctcaccgtcaacctcataagcctcgggcagctcgacgagaatggctgcgagtccctgggtgacatggtgcgaggtctgccgctaatcgaccacgtcgaccaagtgtgcgatagctacctggccgggaaacaacgttgtgctccgttcccggcacatgcgaagcatttcgctgaacacctgctcgacctcgtgcacggctacctctgtgggccgatcttgccggcgatgctgggtgggaaccactacttcttgctactagtcgatgatgtgagccgctacatatggcttactctgctagcaagcaaggatcaagcaccggcggcgatcaagcgcttccaagcggcggccgagctggagtccgggtgcaagctcaaggtgctcaggactgatcgtggtgaggagacggcctcattcaaggaggccgagcaacacaagagctggcggcacgcgatgatggaggaaatggagtccatcacccacaacaaaacatgggttctcgtcgacccgccgccgtcgcaccgcccgatcagactgaagtgggtgtacaaagtcaagcaggacgagcgcggtgtcatcgtcaagtacaaggcgcgcctcatcgctaagggctacatccagcaagccggcattgacttcgaagaggtgtttgcgccggtggcacgcatggagtccgtgcggctcctgctcgccgtcgcggcgcacgccggctggggcgtccatcacatggacgtcaaaagtgctttcctaaacggagagcttgccgaggaggtccagggcgatgcgaagctgatcgtcggcgtctatgtggatgacctgatcatcaccggcgcgaatcaagcaaacatcggtgaattcaagaaggagatgtgcaacatcttcaagatgagtgacctcaggctcttgtcctactatcttgggctcgagtcggcgtatgccgacaagctgctctacaagagtggcatgggagactgcaactcatgcgccacgccgatggagatacacctgaagctgagtaaggcaagctcaagtccaccggtgagcgcgacaagctatcgcagcatcatcggtgggctgcgttatctggtgaacacgcgccccgacattgctcacgccgtcggctacctgagtcggttcatggaggaaccacatgaggatcatcaagcggcggtgaagcatgtgctgaggtacatcggcagaacgcgacaccatggtgttcattacgccagggggaaaggaggatggctggagctgcatggcttcagcgacagcgacatggccggcgatctggacacgcgccggagcacgagcggcgttctccttccacgactccagtcctgtctcttggcaatcagcgaaacagaaggtggtcacactatcatcttagctcggctcctgagcgacctgcttgactcggagcctggagcaccggagatcatggtggacaataagtctgccatagcaatcaccaagaatcccgttttccatgaccggagcaagcatatcgacacgagataccatttcatccgggagtgcgtggagaacgggaagatcgtcatcaactacattcgtatagaggagcagctggcggccgtactgatgaagccgctcggccgtgttccattccaggagttatgcaatgggatcggcatcgttgagctcaagggcgatggcgacaagaattag

SEQ ID NO: 16652 - DNA, 1338 bp, Oryza sativa
  Clone ID: PAT_MRT4530_22381C.1
atggctgatcgtgatgaggaacagatattgtacgatacaatcgcggagggaagcagccagtactggaacgaagaagaggggaacgaggatccaaaccagtatttgaacgaggaagggaacgtggagagggatgcggaggggaaccaggaggggcacgtggaaagggatgtggaggggaaccaggaggaggaggctagtggaagtcaacccttcgttggacagaagaggactcgcgggcaacgaggtgctgcgaagaagcttgagggttggcacatcataacggaagtggaagaagatggacgacctagtgcccaggcagaagccgccaagaactatgtccgtcacagcggttgggttgtgcgggataacgtgcctagcttcaagggagagctgtacaagaaatatatcctgaaggggcagacaccgaacttcgacacattcccaaagctaagggatcattgggacgagttcgttgcatataagacaggtgaacaagggcaggcgatgatggaaagaaacaaagaaaatgccatcaagaagaagtaccatcaccacttggtgtcaggcggctatagcgtcgcgatgccgaagtgggaggagatggaggctagcttgcttgagaggggtatcgaaccggccaccgctaattggccggaacgatcgaagttctggtactatgctcacggtggaacgctcaacccagctgatggctcactggtcttcggcgatcagatacgagaggctgcgcgtcgactaacagacgcagtggaagcctcttctcaaggcacgttccgaccggacagagagagggacgagctgtcactcgccctgcagactccagagcatccaggacgaacacgagggaaaggggtgattccttggaagattgggttcaagaaggacatccacacgtacaggagtcggatgagcaagagagataccgaggcgaagattgcagatcttgagttcagggtatcgagctacgagctcagcatgcaagcggaggtggcaaggaaggtaggatcacagagcatggacgccatgcaaacccaggacgaatccacctgccccgttgatgacatcactcagcggacaccatgtgagctgcatattcctttcaagaacttatcaataaaggtggcgtcgggcatggccatctcaacggacccttcaagtacttaccactgcaggccgattccagcaggatactccaaggtcaaagttgagttggtcgaaggcgcgtacgaggaccttgagctggattaccctggaggagacgtctgggacccggacaattccggggcccggacatgcccctatcctcactcaaaatgctaa

SEQ ID NO: 16653 - DNA, 5412 bp, Oryza sativa
  Clone ID: PAT_MRT4530_22382C.1
atggatcggcaatggatgtacgctgaccggcggtccaaagagtttattaacagcgtgcactattttttgagagtggccgaagctaacaggcaaaggggttttatttgttgtccatataataagtgtaataatcagaaggagtattctgcatccaggactattcatttccacttgtttgagtcggggttcatgccaagctataattgttggacatcccacggagagcaaggtgttgaaatggaagaagatgaagtggaagacgacaatattccggactttgctcagtacgttggatttgaaggaaatcaaacgggcgaggaggaaagggatgctgatggtaacgacgttgcggatgatcttggtcagatgttgcaggacgccaaggaggactgcaaaagtgaaaagggggcccataaattggacaagatgttagaggaccatagaacttcgttgtacccaggttgcgagcaggggcacaaaaagttggataccactctggagttcttgcaatggaaggtaaaaaatagggttagtgacaaggcatttggcgatttattgaaactcgtcaagaacattcttccggagggaaacaaattgcccgagacaacgtacgaggctaagaagatagtctgcccgctaggactggaagttcagaagattcacgcatgtccgaatgattgtatcctatatcgcggtgaggagtacgagaacctagaagcatgccctgtttgcaaagcactacgatacaagattagacgagacgatccaggagaagttgatgggcagctaacaaagaagagaattcctgctaaggtgatgtggtatttccctataataccacagctaaggcgtttgttcaggaacaaggggaatgctagaatgatgcgatggcacgctgaagagcgtcaacaggatgggatgctgagacaccccgccgatggttcgcagtggcgaaacatcgacagaaaatttaaagaatttggaaaggacgcacgaaacatacggtttggtttgagtacggatggcatgaatccttttggagagatgagtagcggccatagcacttggcccgttacgatgtgtatctacaacctcccccctggctatgcatgaagaggaagtacataatgataccgattattattcaaggccccaggcaacctggtaacgacatcgatgtgtacctaagaccactggtcgaagatcttaaactgttgtgcaagaaggaaggtgtccccgtgtgggacgaggacaaacaggaggagtttaacctacgagcgctgctgttcgtaaccatcaatgattggcctgcacttagcaacctatccgaacagtccaacaaggggtacaaggcttgcactcactgtatggatgaaacagaaagtgtatacggaaagtcgaaagatacactggaagcacgtaatgatctgaagcatatggaacaacgcggcgaccttcacccggaaccaaaggagaaaggaagccattacttgagtctagccagctacactcttagcaaggcagagaaggaaagtatgtttgaatgcttggagagcataaaggtaccgtctggatactccacgaatatcaagcgaataataagcacgaaggagaagaagttcacaaacctaaagtctcatgactgtcacgtgttgatgacacaactgctaccagttgtaataaggggtatccttccaaacaatgtccgggcaacaataacaaagctatgtgcattcatgaacgtaatttcgcagaaggtcatcgatccggatagattagaagcccttcagaatgatgtgagatacatgggcattctgaagaagtatgttcgtaaccgtgctcgtccagagtcaagcatcgccaagggttatggaacagaggaggtcatcgaattttgcgtagaatttatcgaagaccttcgcccaatcggggtacctgaatcacgccatgaagggagactacggggaaagggaactctcggaaggaaagcaataatgacggtagacaacaatttattccgtaaagcccatttcatggttctgcaacaatcttcattggtagctccttacatcgaggagcacttggctctagttcacgccaggaacatcggtaagtccgatgcatggattacacgacatcacattgatacttttcccgcgtggctacgacaacatctcatgggtaacgagtcgatcaactaacaacttgccttcctggcgaggggatcgtctgggtcgatcgcgacattccaggaatatgagatcaatgggtacacattctacacgagagcccaagatatgaagagcacgaaccaaaacagcgctgttcgtgtcgatgccatgggacatgatggaacaactggtacgtattacggtgccatcgaggacatatgggaacttgactatggttctctcaaggtccctctgttccggtgccaatgggttaggttgactggtggaggcgtaatgattgatgacagtgggatgacaacggttgaccttaacaaggttggatactcggacgaaccttttgtccttgccaatgatgtaacgcaagtcttttacgtgaaggacatgtctagcaaaggaaagaagggcagagggcctgacgagcctaagcgtcacgtggttctcccaggcaaaagaaaaatcgtcggagttgaagacaagactgacgataattacgatcagttggatgggcaaccccctttcacggtgacgattgaccctagcatcctcctatcaaatgaagacaccccttactcacgtagcgatcacaaggagggaacaatatatttcaacgaggaagggaacgtggagagggatgcggaggggaaccaggaggggcacgtggaaagggatgtggagtggaaccaggaggaggaggctagtggaagtcaaccctccgttggacagaagagggcatgcgggcaacgaggtgccgcgaagaagcttgagggtcggcacatcataacggaagtggacgaagacgaacgacctagtgccccggcagaagccgccaagaactatgtacgtcacagcggttgggttgtgcgggataacgtgcctgtcagtatggtgtactggcgcagaacaagggcacgcggagatcatgagagctttgtcccagattcggagaaagagatgctgtggaccacaatgctcgagatattcacccttcccgcgggtacagaggacaaagtgaaaaggtggactctgaagaaaatggcagaacagtttcagagcttcaagggagatctgtaccagaaatatatcctaaaggggcagacactgaacttcgacacattcccaaagctaagggatcactgggacgagttcgttgcatataagacaggtgaacaagggcaggcgatgatggaaagaaacaaagaaaatgccgccaagaagaagtaccatcaccacttggggttaggcggctatagcgtcgcgatgccgaagtgggaggagatggaggctagcttacttgagaggggtatcgaaccggccaccgctaattggccggaacgatcgaagttctggtactatgctcacggtggaacgctcaacccagctgatggctcactggtcttcggcgatcagatatgctctgcgcgtcgactaacagacgcagtggaagcctcttctcagggcacgttccgaccagacagagagagggacgatttgagtcggatgaggagcaagagagataccgaggcgaagattgcagatctagagttcagggtatcgagctacgagctcagcatgcaagaggaggtggcaaggaaggttgatgaacgcatggccgcacatcggtcccatgatccccagccgaccattcctcttgcaatggtgagcccgtcaggaaactgtagcagctgcgcctcaacggggcaggtggcgtcgggcatccatcccaacggacccttcagatacttaccactgcaggccgattccagcaggatactccaaggtcaaagttgagttggtcgaaggcgcgtatgaggacctcgagctggattaccctggaggagacggtgagacgcatctacgagacacaagccatgccattattctatggcgcaagcggtacatcatcctccctgggcgacaagcggcgtctcgtgcaccatctcctccggctccgccacctcaggctcctgcaccgactcctcctcaggctcctgcaccgactcctcctcaggctcctcttccggcaccttcaaagtcaacggccccccaagctccaccgcctgcccacacaagggcaacgaagaagacgaaagttgatgccgccaagaacaaggacccggggtacgattgcacgcaagaggagcttgacgcttacatggcatcagaagtcaagagacaattcaagcatcgaagtccagaaaagaagattcctatagacccgagtgtcaggaacttcttcaggggtatgtctgcacctgccaaggaggccataaagctatcggactatgagcgaacgctgaagaaagcatcttctggaaagtccaaaccagtccctcagcttggagagcaaccaaaccaggagatcgagccgttggtgaccggtgaagatattggaatggaagaatttattaatgacaccggcctaactacagatcaattgctaggagtcgcaccaatcgaaaaggaggaagtgaaatacatgtacgaactcggtaaaccgcttgtcaagcctgagctgccgcagtccctacccacacaaatgtacaagttccatcatctgtacatggagatgagcgccattggtagagagatgatcggagcgaggatcagggacacggacttcttgcaaggagatgacattctctggatcaatttcaagggaatctacgaactataccagctggatgccctcgacgtctctattatgagttgctggattttaatggagattcaaagggcccgacggcagggggttttcgatactggattcatcgaccctcggaaagtaaacgtcgcaatgctcgaccaatatccgcaagccacagtggacaatctcgtccatctcctgaaggcgcagcattacaagacgttcatactgttgccgtacaacacatacgtcaacgtatatgactcaatggataaaaaagagtctacgtttgacaaggttttcgaacttatagacagggcttggtatcggttccgtcatttggtccgcggcaactggagagaaagacttaggcggaagttcaaatttccttttattcgcatgagggataacctgaccacacacaaggaatttatcacggcggttcaagaacaacttatggaattcatcaacgaacaaatccttgatcccaagggtgaattctactacgacggaaatacaattcataggtccttagcttctgagctagcgactactactacgtcgaaatcgtagcta

SEQ ID NO: 16654 - DNA, 5430 bp, Oryza sativa
  Clone ID: PAT_MRT4530_22383C.1
ccgttttatggaaaatgttcttatggatcggcaatggatgtacgttgaccggcggtccaaagagtttattgacgacgtgcactattttttgagagtggctgaagctaacaggcaaagggttttatttgttgtccatacaataagtgtaagaatcagaaggagtattctgcatcaaggactattcatttccacttgtttgagtcggggttcatgccaagctataattgttggacatcccacgcagagcaaggtgttgaaatggaagaagatgaagtggaagatgacaatattccggactttgctcagtacgttggatttgaaggaaatcaaacgggcgaggaggaaagggatgctgatggtaacgacgttgcggatgatcttggtcagatgttgcaggacgccaaggaggactgcgaaagtgaaaagggggcccataaattggacaagatgttagaggaccacagaacgtcgttgtacccaggttgcgagcaggggcacaaaaagttggataccactctggagttcttgcaatggaaggcaaaaaatggggttagtgacaaggcatttggcgatttactgaaactcatcaagaacattctcccggagggaaacaaattgcccaagacaacgtacgaggctaagaagatagtctgcccgctaggactggaagttcagaagattcacgcatgtccgaatgattgtatcctatatcgcggtgaggagtatgagaacctagaagcatgccctgtttgcaaagcactacgatacaagattagacgagacgatccaggagaagttgacgggcagctaacaaagaagaaaattcctgctaaggtgatgtggtatttccctataataccacggctaaggcgtttgttcaggaacaaggggaatgctagtatgatgcgatggcacgctgaagagcgtcaacaggacgggatgctgagacaccccgccgatggttcgcagtggcgaaacatcgacagaaaatttaaagactttggaaaggacgcacgaaacatatagtttggtttgagtacggatggcatgaatccttttggagagatgagcagcggccatagcacttggctcgttacgatgtgtatctacaacctccccctggctatgcatgaagaggaagtacataatgatgccgatttttattcaaggccccaagcaacctggtaacgacatcgatgtgtacctaagaccactggtcgaagatcttaaactgttgtggaagaaggaaggtgtccccgtgtgggacgaggacaaacaggaggaatttaacctacgagcgctgctgtttgtaaccatcaacgattggcctgcacttagcaacctatccggacagtccaacaaggggtacaaggcttgcactcactgtatggatgaaacagaaagtgtatacggaaagtcgaaagatacactggaagcacgtaatgatctgaagcatatggaacaacgcgacgaccttcacccagaaccaaaggagaaaggaagccattacttgagtccagccagctacactcttagcaaggcagagaaggaaagtatgtttgaatgcttagagagcataaaggtaccgtctagatactccacgaatatcaagcgaataataagcacgaaggagaagaagttcacaaacctaaagtctcatgactgtcacgtgttgatgacacaactgctaccagttgtaataaggggtatccttccagacaatgtccgggcaacaataacaaagctatgtgtattcatgaacgcaatttcgcagaaggtcatcgatccggatagattagaagctcttcagaatgatgtgaggtacatgggcgttctgaagaagtatgttcgtaaccgtgctcgtccagaggcaagcatcgccaagggttatggaacagaggaggtcatcgaattttgcgtagaatttattgaagaccttcgcccaatcgggatacctgaatcacgccatgaagggagactacggggaaagggaactctcggaaggaaagcaataatgacggtagacaacaatttattccgtaaagcccatttcacggttctgcaacaatcttcattggtagctccttacatcgaggagcacttggctctagttcgcgctaggaacatcggtaagtccgatgcatggattacacggtatcacattgatactttccccgcgtggctacaacaacatctcatgggtaacgagtcgatcaaccaacaacttgccttcctggtgaggggaccgtctgggtcaatcgcgacattccagggatatgagatcaatggatacacattctacacgagagcccatgacatgaagagcacgaaccaaaacaacgctgttcgtgtcgatgccatgggacacgatggaacaactggcacgtattacggtggcatcgaggacatatgggaacttgactatggtcctctcaaggtccctctgttccggtgccaatgggttaggttgactggtggaggcgtaatgattgatgacagtgggatgacaactgttgaccttaacaaggttggatactcggacgaaccttttgtccttgccaatgatgtaacgcaagtcttttacgtgaaggacatgtctagcaaaggaaagaagggcagagggcctgatgagcctaagcgtcacgtggttctcccaggcaaaagaaaaatcgtcggagttgaggacaagactgacgaggattacgatcagttggatgggcaaccccctttcacggtgacgattgaccctagcatcctcctatcaaatgaagacaccccttactcatgtagcgatcacaaggatggaacaatatatttgaacgaggaagggaacgtggagagggatgcggaggggaactaggaggggcacgtggaaagggatgtggaggggaactaggaggaggaggctagtggaagtcaaccctccgctggacagaagggggcacgcggacaacgaggtgccgcgaagaagcttgagggtcggcacatcataacggaagtggacgaagatggccgacctagtgccccggcagaagccgccaagaactatgtacgtcacaacggttgggttgtgcgggataacgtgcctgtcagtacggtgtactggcgcagaacaagggcacgcggagatcatgagagctttgtcccagattcggagaaagagatgctgtggaccacaatgctcgagatattcacccttcctgcgggtacagaggacaaagtgaaaaggtggactctgaagaaaatggcagaacagtttcagagcttcaagggagatctgtaccagaaatatatcctgaaggggcagacaccgaacttcgacacattcccaaagctaagggatcactgggacgagttcgttgcatataagacaggtgaacaagggcaggcgatgatggaaaggaacaaagaaaatgccgccaagaagaagtaccatcaccacttggggtcaggcggctatagcgtcgcgatgccgaagtgggaggagatgaaggctagcttgcttgagaggggtatcgaaccggccaccgctaattggccggaacgattgaagttctggtactatgctcacggtggaacactcaacccagctgatggctccctggtcttcggcgatcagatacgcgaggctgcgcgtcgactaacagatgagtggaagcctcttctcagggcacgttccgaccggacagagagaaggacgagctgagtcggatgaggagcaagagagatactgaggagaagattgcagatctagagttcagggtatcgagctacgagctcagcatgcaacaggaggtggcaaggaaggttgatgaacgcatggccgcacatcggtcccatgatccccagccgaccattcttcctgcaatggtgagcccatcaggaaaccgtagcagttgcgcctcaacggggcaagtggcgtcgggcatggccatcccaacggacccttcagatacttaccactacaggctgattccagcaggatacttcaaggtcgaagttgagttggtcgaaggcgcgtacaaggacctcgagctggattaccctggaggagacggtgagacgcatctacgagacacaagccacgccattattctatggcgcaagcggtacatcatcctccctgggcaacaagcggtgtctcgtgcaccatctcctccggctaatcctcctcaggctcctgcaccaactcctcctcaggctcctacaccgactcctccgcaagctcctcttccagcaccttccaagtcaagggccccccaagctccaccgcctgcccccacaagggcaacgaagaaggcgaaagttgacaccgccaagaataaggacctggggtacgattgcacgcaagaggagcttgacgcttacgtggcatcagaagtcaagagacaattcaagcctcgaagtccagaaaagaagattcctatagacccgagtgtcaggaacttcttcaggggtatgtctgcacctgccaaggaggccataaagctatcggactatgagcgaacactcaagaaagcatcttctggaaagtccaaaccagtccctcagcttggagagtaaccaaaccaggagatcgagccgttggtgaccggtgaagattttggaatacaagaatttattaatgacaccgggctaactacggatcaattgctaagagacgcaccaatcgaaaaggcggaagtgaaatacatgtacgaactcggtaaaccgcttgtcaagcctgagctgctgcagtccctacccacacaaatgtacaagttccatcagctgtatatggagatgagcgccaccggtagagggatgatcggagcgaggatcagggacacggacttcttgcaaggagatgacattctctggatcaatttcaagggaatctacgaactatatcagctggacgccctcgacgtctctattatgagttgctggattttaatggagattcaaagggcccgacggcggggggttttcgatactggattcatcgaccctcggaaagtaaacgtcgcaatgctcgaccaatatccgcaagccacagaggacaatctcgtccatctcctgaaggcgcagcattacaagacgttcatactgttgccgtacaacatagagttaaacgtatatgactcaatggataaaaaagagtctacgtttgacaaggttttcaaacttatagacagggcttggtatcggttccgtcttttggtccgcggcaaatggagagaaagacttaggcggaagttcaaatttccttttattcgcatgagggataacctgatcacacacaaggaatttatcgcggcggttcaagaacaactcatgggattcatcaacgaacaaatccttgatcccaagggtgaattctactacgacggaaacacaattcatgggtccttagcttctgaggtagcgactactactacgtcgaaatcg

SEQ ID NO: 16655 - DNA, 315 bp, Oryza sativa
  Clone ID: PAT_MRT4530_22384C.1
atggtgtcagtgcccccacgtgcgggctcttatcaagctcgagcttgcagctgtggtgctaagcggcgacactcgtttggaccaacctcctcgcctatagctatatgccattggtccctcccagatttgaaggtgttagttccttctactcaaaaggacttcctcgagctccactacggcaagggcctcccctccattcaccccatggcaagggactcgtttgcccccctccctttgtgctggtggatcccgtgccctccattagaatcgtcactggtctgcatacatggtcaccgctaccaccccaagccctaa

SEQ ID NO: 16656 - DNA, 264 bp, Oryza sativa
  Clone ID: PAT_MRT4530_22385C.1
ccttctcctcttcttcgcgtgtatataaacccgcgcgcgcgaaagctttctttgcgggcccgatttggggggcggaagaaggaggaggagaagaaatggtggaaaccaagaagctcaaatgcttcttcttcgtcgtcttgccaggttcgagaccagccacgtcctcggtgcgctgctcgcctcctcgccgctgctggcgcgggcgtgggaccggtgcgcggccgcggccgacggcggcgcgtcgtcgctggggttcgtgcacgg

SEQ ID NO: 16657 - DNA, 522 bp, Oryza sativa
  Clone ID: PAT_MRT4530_22386C.1
atggtcaaaatgctaaacacgaatatctatggctacacttattttgggacggagatcaccgccgagttgcaaccagggcggcatctcatctccagaacctcgccgatgtattacggacatgctggtgctggtggaagagtaaaatctcaggccaacatgcagcaacaacaggcacgaataacacttgttcagaatgccactacgacagattctactccaacttcagtaggtggtaccgggtacacgggacacagggccccgggcatgcgtccggccggtgccgcgccctgcggaagaaaaggcgagaagcgtggtgccgaccaccgtggcggcggcggcgacatccgtgggcagcggctgggcagctcggcggcctcaggtggcgccgtcccgcgtggatccgacggcggggtggcccatcccagcgtggttctagtgccggcgacgatgacgggcggttgggatggagaatgcgatgttggtgacgagcgggcggtgggggtggcagatccagcgctttga

SEQ ID NO: 16658 - DNA, 467 bp, Oryza sativa
  Clone ID: PAT_MRT4530_22387C.1
aaacgagttattaatggacaaaacatcatatgcacgattgtgtcgtggatgttacatatatcattcctaggcatacaacaaataatgaagacaaaataatatatcctctcacccaaaataaaggcataatcagttatttcgatgtttcttaatacaagtcccacatgcatgcatgccactcgctagcggtatggtgatagagtcgtggatgcataactccattcactagagttcaaatactggtgctttcaataggattttagtgatattaggaatatatgtcatttgtttccgtatctttgagcatatgttatggggtgtattcgtgaaggtgcgagggtacagttgcgtgtgtgtttatcatgtaattgaaaaaacttatacatccccctctcaaaaattcattatttgtcaatcctccattctcaataactctattcccattgggtgcatgcattttatttatt

SEQ ID NO: 16659 - DNA, 220 bp, Oryza sativa
  Clone ID: PAT_MRT4530_22388C.1
ttcggtctctgtcattctctgcaaccactgcatatgggttggcggtctcctgataatactaccattagcaccatgcacgggggaatgcacgctgtggtcccacatgtcaggcttctgatgtctgttgccgtctgaaggatcgggtgctacaaagccatgtgttggacctgctgtccatcgacgctggaggtcagctttagatggtcatattcaggagagc

SEQ ID NO: 16660 - DNA, 698 bp, Oryza sativa
  unsure (1)..(698): unsure at all n locations
  Clone ID: PAT_MRT4530_22389C.1
ccaaaattctcacccccttcttttttatataagaatctgcccaacaccttatcttaatggtgcttaccccaacctccggctccggctccaaatccgtaacccgctccaaacccacctcctccacccataccaaaagtcggttgggctccggaaccgaatctgcttccaaccccttgcccaccacctaaacctgagcttgaggtagacccggacgtcgagcttgaccagttagaggatccagccccagagagtgtgccagtgtttgagccagcattagaccaagaacctgagctagagccagcattagaagcaacccctataccagatggcatagtcgagccggagttggagttggagttggaccatgcgcttgaatatgagcctgagtttgcaccggtgacagaggtggcggatccagagtttgattcagcagtagacgatgttcctgtacttgacggagcgtcaattcccgacattgtgccagagccagaattagaaccggaccatgaagaagagctggaacctgaacctgcaccagagttggacgacccacttccggaagcactaaccgatcctgagcttgaccctgaatccacatggagttttgatccactgcctgatgcaccatatgcactagagcttganaccgctgcttgatccactgaatgagccagcacctgatgaacatatgacatccc

SEQ ID NO: 16661 - DNA, 1092 bp, Oryza sativa
  Clone ID: PAT_MRT4530_2238C.1
cccgggctgcaggaattcggcacgaggtgactttcctcctcactctccgctgccccggcgcctgccccctgtccttcctctccccctccccggggccgccgcttcttctccccgcagccgctcggggcgtgcttccatttctcccacactccaccggctcccccttcttctgcccccttgcatttcaccaacgcttacctgctccatacgacctccagtgcagtgcagtgcctctgaggtctctctctctctctctctctcacacacacacgtcctctggtcaccgacgctcctcctactactagtacagtgtgatcgagcccctcctcacttaccttcgccgaagatccatggcggaggactaagctccggctgctgatttcttcgctttggacgcccgcaaaagttactgctgctactgccggtaccggctgccgaggaggggaatgaggatgaagacgctggcgtgctgccggcggcggccgcaggacttcagcatcgacatggaccaggagcctgacagggtgatgacgtacaatggccttgagagctgtattatcaacagttcctcttatgacgatgatagtggccttagtgcaacaacgggagcagatgggtgtgtaaccactgattccgttgatgatgaagtctcaagttgctcctcaagtaaagatgtttctagctcttcgttctcttcacaatgccatccactgagaaagcaagaggagcattcactttacgagttggatacactcagtgctgtccatctacttcctctcaaagggaagaagccaatcacgtataccttgagtcgcttcagacattgaaaccatgaaggagaagtttgggaagctactgcttggtgatgcatgcttcaggaggagctagaggtgtttgtgctgctctggcttcgtccaatgccattattaatctctcagccactatatttggagaactctggaagctggaaccactctgtgaagagaaaaaagtcaggtggcggaaggaaatggactggttgctttctactacaacctacatggttgagctggttcctacaaaaacaaaatggagcagacgggtgcacgtttg

SEQ ID NO: 16662 - DNA, 945 bp, Oryza sativa
  Clone ID: PAT_MRT4530_22390C.1
atggcgagcaacaagcaaggaggaggcaagcagcaggcagctgctgctagtcctggtcctgatcagaaagatgaagagcttgaccccaagttcgagtggctcgacaatgccaacaacttcctcctccgcctctacctcactggtttcaagaaggaagatttcagggtgcaagtagacggcacgggcaagctgaccgtccgggggcagcgccccgccgccggcagcaagcacaacacccgcttccacaaggtcttccagctgccctccaacgctaacatcgacgacatcaccggccgcttcgaggccagcgtcctcaccatcaccgtccccaagcgccccgccccgacctcctccgcgccagctcccacctccgtacaggagatcaagcagaaagcgcctaccgccaagcaggagccccaaccccaattcgacgaggcacccaacaagaagaaacaacaacaggaggaggaggaagaagcagccaagaagaagcagcagcagctgcaggaagaggaagaagcaaccaagaagaagcaacaggaggaggaggaagaagcagccgccaagaagacgaagaaactgcaggaggaagaggcgattgccaagcacaagcctgcaacgacgaccgagaggaagcaggcagagcctactactgctgcaccgctaccggggcatgtcgtcgatcgggagagcctggcggagaaggtgaagcggcgcgccgaggaagagtgcgccaaggcggcggctgcggcggaggagaagacggcgacggcgttgagcaggtggagagagcgcgtggcgggggagctggagcatctgggagacatgaggtgggcggagggcgtggtggagacggcgaggaggaacaaggatgtcatcgccaccgccgtcgccgccttctccctcggcttcttcgtctcccacaagttcttctgcaggaggtga

SEQ ID NO: 16663 - DNA, 468 bp, Oryza sativa
  Clone ID: PAT_MRT4530_22391C.1
gtagctatatcgtcgtcattaattggagctagctaggtatggcagcaggcagagcgcatgtgggcggccgttctgcgagggatctatgtgcaaaggtgctatcattttcgcttccacttgttctttttgttgtttttttttattatattttttttattttactattttttttttttttttttttattttttttctttttttttttttttattatttctttttttcttttttatttttcttttttatttttttatattttatgtcctttttttctttttttttttctttaccctatctatcttttttttttttatttttcttaaatttttttttatttgtttaattttcttaatttcttatatttcttttttttatttttttttttacaatttataatattatttaatttcttctattattatttttattttttttctttaaactttatcttatttttttttttctttt

SEQ ID NO: 16664 - DNA, 1156 bp, Oryza sativa
  Clone ID: PAT_MRT4530_22392C.1
gatcaaggcagcgagtagccccagctaaccattacacgggcattccatctccagccatccctagggctgtaattaacatggctccagccattgccaagcctctcctgagcgatctggtggcacaatccgggcaagtcccctcgagccacattcgtccggttggcgaccgcccggacctcgacaacgtcgaccacgagtccggcgccggcattccggtcatcgacctgaaacagctcgacggcccggatcgccgcaaggttgtcgaggccatcggttcggcgtgcgaaaccgacggttttttcatggtgaagaatcacgggatcccggaggaggtggtggaagggatgctgcgcgtggcgagggagttcttccacatgccggagtcggagcggctcaagtgctattccgacgaccccaagaaggcgatccggctgtcgacgagcttcaacgtgcgcaccgagaaggtgagcaactggcgcgacttcctgcgcttgcattgctaccctctcgagagcttcatcgaccagtggccctccaacccaccctccttcaggcaagtggtcggcacctactcgagggaggcgagggcgctggcgctgcggttgctggaggcgatatctgagagcctcgggctggagaggggccacatggtgtcggccatggggcggcaggcgcagcacatggcggtgaactactatccgccatgcccacagccggagctcacctacggcctgccggggcacaaggaccccaatgccatcacgctgctgctccaggacggcgtctccggcctgcaggtccagcgcaacggccgctgggtggccgtcaaccccgtgcccgacgccctggtcatcaacatcggagatcaaatccaggcgctgagcaacgaccggtataagagcgtgctccaccgggtgatcgtgaacagcgagagcgagaggatctccgtgccgacgttctactgcccgtccccggacgcggtgatcgcgccggccggcgcgctggtggacggcgccctgcacccgctggcgtaccggcccttcaagtaccaggcctactacgacgaattctggaacatgggcctccagtccgccagctgcttagaccggttccggcctaacgatcaggccgtctgattatggtccataaacttttc

SEQ ID NO: 16665 - DNA, 906 bp, Oryza sativa
  Clone ID: PAT_MRT4530_22393C.1
atggcacacagtagaggttcaagaaaacacgatggcatattattcaaattgacaaagttagtggtagattatagaagtggggaaaactcagtggatcagccagaagaaatcccagagtggaccgcaaaaccagccctgactccctccctccaatctttcatcgacatcattgatgatctccgaaaacggcggttgtcgggatacgaagtcgctgtcgacttcgtaggtctggacagcgacactgtgggacgtcacgttggtcagataatgatcagcgcatcctcgaaggcggacgatatccccatcgcactctgcaacaaggacgcgaccgaacgcgccgccgcgattaatgctctccctctgacgtacgccatcggacctctcgtggatcaccaggcggcaacatcgttgaaggagggcgttgccaaggaggcatctgacgctgttgctggtggcagtgttccgaagaaagggaggatattctcgtccgtggtcaggacccgctggaaagcgacaagctccgcgcctgcaccaacttgccagggagtgcggcgccatgactaccatcccggcgaacctgatgagttctcactgacgtcatcactcacggaactggctacgacgatgggggaggtttgtaaggagctccgagttccccgtggagaacccgaggagtcagcgactggttacatctcgtggttgaatagggcctgcacacagctcgaagggattggcaagcgcatcgatgaggccctgaagcaggagtgccgtcgagcgagccgctatgccggaggacatgtgatggcctgtatccgagatcaccacccgcagctgcacctcgagttcctttgtgaagggttctcgcattctcggaggacgcccgcggagatcgacggtcttgtgtag

SEQ ID NO: 16666 - DNA, 252 bp, Oryza sativa
  Clone ID: PAT_MRT4530_22394C.1
tgtgttgtacggccgctgccgccttctggaacattcgcttgcctccgccaaaaaaaaaaaaaaaaaatccctcctcccctctcccctcgagtggggcgcagccgcctcgctcgtcttccttcctcctccaccgccgcgcgtgcgcgagtgcgcagccgccatcgccgtgcgcttctctgcctcccgatctgcggtgcgaccggtgtgatcgcggagcggcggccgaccagaaggatttctttgagggagggg

SEQ ID NO: 16667 - DNA, 768 bp, Oryza sativa
  unsure (1)..(768): unsure at all n locations
  Clone ID: PAT_MRT4530_22395C.1
attcggctcgagtaaaacctctatttccacttgttctagtcatctctttgagtttcatttcagagaccaatttattttttgtgggcattttttttcaggaaggtaatgaaggattttgctgtggaactggaggaactggcagagctagttcttgacttgctgtgtgagaatcttgggctagagaaagggtatctgaagaaggtgttctatggatcaaagggcccaaattttggtaccaaagttagcaactaccctccttgtccgaagccagagctgataaaggggctcagagctcacacagatgctggtggcatcattctactcttccaagatcacaaggtcagtggattacagctcctcaaagatggccactggattgatgtcctcccaatgcgccactccattgtcatcaaccttggagaccaacttgaggtcatcaccaatggcaaatacaagagtgtgatgcaccgtgtgattactcaaacggatggtaacagaatgtccatagcctcgttttacaatccaggcaatgatgcattgatcgctccagcaccagccttggtgaaggaagatgagactagccaagtttatcccaagtttgtttttgatgattacatgaagctctatgctggccttaaatttcaagccaaagaaccaagatttcaagctatgaaagccacggagtcatccaacattaatttangccccatagcaacggtctaagcctcagattgaggcattattattaatataatatatatgtaaact

SEQ ID NO: 16668 - DNA, 1684 bp, Oryza sativa
  Clone ID: PAT_MRT4530_22396C.1
tgtgtataaaggaaaaaaaaacagccaagccgccgggcgcgcttagcacagcggctggggcgtcagcaagcgagcggcggcgcgcccccctcgtcacgcacgccgcactcggctgctacggtcctcacgccgcttcggcttcgcgagcggacgccggcgcgcgcgcgcgttcggcgagacgcggcggcccttctccccctcttgcacaccccccagaccatgcgcgtttccgaccacgctgctctcccgtcgcgctcctcccagcagcagcagcgcctgtccccgcatggcgagccccgacaaggtcggctgctcaccggagccgctgcccctcgaccgcctcctggccgagctcgccgccaacgccgagcggctcgggaggaggtgggaggcggcgctccgcaaacggggaagggagggagccagagcggcgggcgtggggttggaggagggtaggaaggcggattcggcggcgatgcagctgcacacgccgctgttctacgccacctgcgccctcggcgggctcctcagcaccggcctcacccacctcgccgtcactcccctcgacctcgtcaagtgcaacatgcaggttgaccctggtaagtacagggacatttcatctggatttggtgtcctgctccaagagcaaggtcttggtggattcttcaagggctggatggccacgctggttgggtacagcagccagggggcttgcaaatttgggttctacgagttctttaagaagtgctactcggccattgctggccccgagcatgctgagaagtggaagaccttcatctaccttgcagcgtcggcatcggctgagatgattgcagatgtagctctctgccccatggaggctgtgaaggttcgagtccaaactcagccaggatttgctcggtgcctgacggatgggtttccgaagattgtccaatctgaaggctttataaaggactacttcctctctggggtcgccaagttccttataggaccacatcttttaaaatatactatggtgaaatttgcttgctttgagacaattgttgaattagtatataagcatgcagttccaaagccaaaagatgaatgcagtaagccactccagctagcagtgagctttgcagggggatatattgcaggagtcttctgtgcagctatctctcatcctgcagacaacctggtgtctttcctcaacaatgcaaaggggggcactatggctgatgctgtaagaactctaggagtgtggggccttctcactcgtggccttccactccgtattattatggttggtactcttactggagctcaatgggcaacatatgatgcatttaaagtctttgttggactgccaacatctggtggattcattcctagtcctgctgccaccgatttgcgccaggtggatcatgaaaagcggagttgaccacatcgcgtaaatgttgtgctgagctactacccttaatcggagtagatgatggcaggcagttgctctgattttcatgagagcgggaacgtaggagatgacctgttgagcgaatttggaacacaattttaagatttagcagtaggaaattcacattcaaggggtttttgttgctacctcttgaatgacaggcaagtgcaaggaaggcaataagcttgagggatgtatttggcacattgccaaactgatctgatcatctga

SEQ ID NO: 16669 - DNA, 346 bp, Oryza sativa
  Clone ID: PAT_MRT4530_22397C.1
aaaagagacaagctagcaaatccatccatgcgaccattcatacaaatcagctacagcacaaatttacatgttacacccacaccctacacccatacataataatacattgtatatacttacgtacatacatacccctctcgatcacacgcaccattgatcgtacaaagttgcttacatacatacttacacacatatactcatacgcacgtacatacatacatatttaaaaactcgaaattaattaaattcccagttgatggcatttctaatacaacttgccacctgaaaagtgattgttgtctggggaatggagtccagggcctccacacagattgtagcatcatct

SEQ ID NO: 16670 - DNA, 200 bp, Oryza sativa
  Clone ID: PAT_MRT4530_22398C.1
ctacaccggactatccaccctccacaacaatactaaactacgaacaaatggccctctaaggactgcaagcccctcaaggctcctcttctttatgcgcgagcacaccccgagcactgctaccaccatcatatacaacctccaaatcaacatcccggacaaaactgttcataacatcagcaagcgccaactgatgaaccccc

SEQ ID NO: 16671 - DNA, 427 bp, Oryza sativa
  Clone ID: PAT_MRT4530_22399C.1
tttgtttttttaatttttttggttttttttttttttttttttttttttttttttttttttttttttttttttttttttttttttttttggggggccccaaaaaccaaaaaggtctaaaaccccggggccgggaacagggggccgcccccaaaaagaaaaaaaaaaccccaaaaaaaaaaaccccgccttctttaaaataaaaagggcccgccgaaacaaaagcaaaattgcatttaaaaagtccccggggggagggaaaaaaccccgcccaaagtaatttccaaaaaaaacccccgggttaaaaggagggccaaaaaacaaaaaggccccggcccctttggttaaaaaaaaaaaaggcccgagggttgaaccctcaacgggggggaaaaaaagccaaccctggccggggaaacaaaaaaccctccgg

SEQ ID NO: 16672 - DNA, 1088 bp, Oryza sativa
  Clone ID: PAT_MRT4530_2239C.1
gtccggattcccgggtcgaccacgcgtccggccgcctccgctgcgtctggcacgagcgtccccgagcaagcccagcttcagctctatgggctctacaagatcgccaccgaggggccctgcaccgcgccgcagccgtccgccctcaagctcaaggcccgcgccaagtggaatgcttggcataaattgggtgctatgccgacagaagaagctatgcagaagtacatcacagttgtggatgagctattccctaactggagcatgggttcgagcacgaaaaggaaagatgaagataccacagtatctgcttcaagttcgaagggaccaatgggacctgtatttagcagtttaatgtatgaggaggaagatcagggaaatgactctgaacttggcgatatccatgtttcagcaagggaaggagcaattgatgacatagcgaagcatctggctgctggtgtagaagtcaacatgagagatagtgaaggcagaactccactgcattgggctgtcgaccgtggccatctaaattctgttgagattcttgtcaatgcaaatgctgacgtgaatgctcaggacaatgaaggacaaacagcgcttcactatgctgtcctctgtgagcgagaagatattgctgagttgcttgtcaagcatcatgctgatgttcaaatcaaggatgaggatgggaacacggtgcgggagttatgcccttcaagctggtcttttatgaacctggcaaactgacgacacgatgccctctgcactcttttggttgcctaccagcaagaaaccgcactgtctatgttagccaaactagatgagttgttttacgaacctcatcgaataggtcactgtcaaaaggatatttctgtattagtgaaaggagattatcttgtactgcctatacagtttacactgctagtttgtttgtgctgaacatcaatgttggccaggtctgtaaatcatgggcacctaatttctgaatgagcatgatcggacttctcttcttttgaaaaaaaaaaaaaaaaaaacttaatgagcctcgtcaggcatttgcacccccactgttcctactatgtaaaaaaaaaaaaaaa

SEQ ID NO: 16673 - DNA, 587 bp, Oryza sativa
  Clone ID: PAT_MRT4530_223C.1
ccggccggatccaacacatccaattcaactcatggaggccaaggttgtagccactgtgttaatcgttctcttcctcacccttggtggtgaggcagctgccaagatatgccatgatcatagccaaaccttcaaagggatgtgcttccatacctccaactgcatcgcctgctgcaccaacgagggatacaccggcggctactgcaaaccatttacatatagatgcatgtgcactaaagattgtggaggggacagtccacctgatgatccaccaccggcgatgccgacatcgccggcggcgacgacgacggtggcctgatcgccggagaggacggcaacatatggttacattgtgtgttagttgtttgtggcaatatgaatcaattggtggaagtctaatgatgaactgaagagaataattggatgttgatgcacatatgttgcaactcaagtttcttggttgaagatagaatggcatgcaatggagaatagtgagatgtgtttgctgaaattgactcttaattaaacatcataaataaacaaagtaaatttgacttaaaaggaaaaaaaaaaaaaaaaaacccgcggcc

SEQ ID NO: 16674 - DNA, 350 bp, Oryza sativa
  unsure (1)..(350): unsure at all n locations
  Clone ID: PAT_MRT4530_22400C.1
tgcgttgtttctatgtactgtaaaagtgtcttatggtatcagttctgaatgctaaggacatccctcaaaaaaaaaaaaaaaaaaaaaaaaaaaaaaaaaaaaaaaaaaaaaaaaaaaaaaaaaaaaaaaaaaaaaaaggagcccaactctaaaaaaaccaaactaacattttcttgcatgagggggaggaactctaaaataaatncaccgaaattaaattcactgcccgncgttttacaacaccaatgactggaaaaaccctgacgttacccaactaaatcccctttgagcaaatccccttttcaccaaatagcgcaataccaaaaaagcctccccaaaaaaagcccttc

SEQ ID NO: 16675 - DNA, 695 bp, Oryza sativa
  Clone ID: PAT_MRT4530_22401C.1
aggatatccaatggcacatatatgttaaacaaatagcaagtatcaatacacacttttcttgactgagcaaagtagcagaagaaactaggcatgtgaattcttttacaacactccgaccggtcactgcagcaactacaacatttgaaaattttaaaataaaactattctaaagaaacaatcacgcaccaccatatatagtcattttgttatcagatgtaccgccggaacattctagaacatagaccaccaactctttttggtacccacatgtacttcagtggcacttggggatctacagtacagttgccttctaccactcctagcaggatttgtaaagcataaaactagagcgaaaccgataaggcttacgactggagcagcagcaataaaaagccatccactgcgcctgcgtgcactgcttggttgctcatcaacacgaacattgtgttcacttgtattagtctcttcgatagcaccaacagccatctgacgagttacctggacctcttgttcatcagaattttcttccacaacctgaatgtctcttacattggttgtggcttgcttggacctttcatactctgcatcatctgtaggaagctcatatcggcagacaggacatgtatttctagaactaaaccatggcaagatgcacgatgaatgataaagatgcatgcatggtagctgttttgctc

SEQ ID NO: 16676 - DNA, 381 bp, Oryza sativa
  Clone ID: PAT_MRT4530_22402C.1
atggacgctgagagcctgagaaggatgactccatctctatcggagcaaagctcggaacagctagatgaagccagctctcatccgatctctaccattgtgactcctctccctgtactgccgctagcaccgagcgcctctcgaaccaagtcacccagattggtccttgaccatcttgccaaggcctaccgagtactggagaccactgcccaggaagccccctttgaactcaatcatctttacgtggagatgggttcggcaggggacaagctcactcaacatcaaggagatgctaacgaagggtgggctgacgataggcgggaggatgtcatggctgagctggagaatgccgaggactcaatcattagtatttatggcgagtaa

SEQ ID NO: 16677 - DNA, 705 bp, Oryza sativa
  unsure (1)..(705): unsure at all n locations
  Clone ID: PAT_MRT4530_22403C.1
ccggccgggaaaatctcccgtctcggcgtctcggctcctccgctccttgcgccatctcgcggctgaacaggcgaggggagggcgcgccgatctccatccggcgagcaggggaggggagggtcgctgatctccatctggcgagtagagcaggcgaggggaggggaggggatccgatcgatgattccacaaaatgcagctttggaccatataagcacaccttcagaaagtggtgaaatacctttggttataaatgttgaaagtcagcacattttttgacgattctatggcatggaaggggatactttgttagctgacatacaactggcacttccaaataggtgctatttgttaccttcaggcatgcacaaatctaatacatcatcatgtcctactatcacatgtgaagaagctcttaagagggagttggagtatcggcaaaaaattgaaaggagtcatccacatctgctggttggccttaatggatcccctgcattgctgaatgaggttggatctggttcatcacctgatttgtcaatgaggaactcagcccatgacagctatatgccctcaccacaggcatgttttgttggttccactgtacaaagaccaccagcaaattggtacccctcaaagaaaaagttgaaagttctacagcatccttcacaggctttgcagggccccaggncaaatttgataccttccttt

SEQ ID NO: 16678 - DNA, 655 bp, Oryza sativa
  Clone ID: PAT_MRT4530_22404C.1
cggacgcgtgggcggacgcgtgggtgctaatgggggcagcagcggatattgtgcatatttctatttaaagatatcattcatggattatgagtcattgaatttatactatgttgaatcatacagccacctgtcaattggatggaacaggaagggagctaacagaaaatctgtttgcatttaagcaacttaagtaattaaagtcaagtttgcaaagtttgatccaagagttcacaaaattataatgatctcagtgcctatggcttaaatattgagcaaatctatatccagtgaattaccatacattctgaagagcctggagatgattcaggagctggaccttttctactttggattcttccgttctccccctgtagagtgctcagttgaaaagtagggttcacataaccttatgcgttagtctttttgactaataaatagcaacaagtcatgccgcactctacttgtgatactgatggcagcacacccggcggctgacacttgtaccatctagtctccaacttcagttctgatgtttaacggtaataacaacaatgaataattgaatatacagagcctacggatgattcaggagctggaccttttctactttggattccaccaatctccccctgtggagtgctcaattgaaaagcac

SEQ ID NO: 16679 - DNA, 340 bp, Oryza sativa
  Clone ID: PAT_MRT4530_22405C.1
ggggcatatttttttaaaaaataatttttttttgataactatttgggtatcatatgtccataacggggggaagttcctcgaaagtttaaaatccactcgttaataaaatacaacacaccttcctcaaagaggaatttgcaccctacatatgggaatgtattctaacattaccagttggatgtacgtttggggtgcaattccaccgttcaacatccaaatttttcatacctaacaaaattccagatttttcatccaaaggtccctaatcacaagtagatagcgatccggacgttgtacccaaatcgtctatgcaagattaaagtttgtcgcactgagcccc

SEQ ID NO: 16680 - DNA, 2453 bp, Oryza sativa
  Clone ID: PAT_MRT4530_22406C.1
atggccgcctccgctgccgccggcggggactccggcctcctcctcgccgcgcgccgccgcctccccgccgccgccctcgccgcggggggccaccgtatccggctgctccacgccttctccgccgcgagccggcgggggaggcacgaggtggcctgctgcgtcaggactgaacccgcgccgcggcccgccagccccgtcgccgttcgctccaggagtgttcattcaacggaaaactacaaaaagggttgcgagcagcgactaggacagttaattgagagactgaagaaagaaggaataagtccaaagcaatggaggcttggtacttatcaacgaatgatgtgcccaaagtgcaatgggggatctactgaggagccgagcctcagtgttatgatccgaatggatgggaaaaatgctgcatggcaatgttttagagctaattgtggttggaagggttttgtcgagcctgatggagttctcaaactatcacaagcaaaaaataatacagaatgtgaaacggaccaggatggtgaagctaatctggcagtcaataaggtttacagaaaaatttgtgaggaggacctccatcttgagccactttgcgatgagcttgtaacatacttctcagagagaatgatatcgccagaaacacttcggagaaacagcgtaatgcagcgtaactggagtaataagatagttattgctttcacctacaggcgtgatggggtcctcgttggctgcaaatacagggaagtctctaagaaattttcacaggttgagggtgaaattgataagctctcaatggaagaagctggctaccgtaattgtgtcagtgtaccagatggtgcaccaccgaaagtatccagcaagctcccagataaagatcaggcgtctaggataatactggcaacagatgctgatcctccagggcaggctctggctgaggaacttgctcgtcgtcttggtaaagaaagatgctggagggtcaattggccaaagaagaacgagaacgaaatttgcaaagacgcaaatgaggtactgatgtttttaggaccacaagcattgagaaaggttatagaagacgcggaactgtatcccataagaggtcttttctccttcaaagatttcttccctgagatcgataattattatcttggaatccgtggggatgagcttggtgttcctactggatggaaatccatggatgagctttacaaggttgttcctggggagttgactgtagtaacaggagtgccgaattctggtaaaagttgggtggaaattcgttctgtgctcaatggaaaacaaggcaagcaattactgatggtcagggagcatgctagaaagctcttagagaagcgcattaagaaaccattctttgatgctagatatgggggctctgcagaaagaatgagtctagacgaatttgaagaaggcaagcaatggctgaatgaaacattccatctgatccggtgtgaagatgattgccttccatctgttaattgggttctcgagcttgctaaagctgcagttctaagatatggagtgcgtggtcttgtgattgatccctacaatgaacttgatcaccaacgcccctcaaatcaaaccgaaacagaatatgtcagtcagatgcttaccaagattaagcggtttgctcagcaccattcttgtcatgtttggtttgttgcccaccctagacagcttcataactggaatggtggtcctcctaatatgtatgacatcagtggaagcgcacatttcataaacaaatgtgataatggaattgtcatccatcgaaacagggatccaaacagtggcccacttgatgttgtgcaggtttgtgtgaggaaggtgcgcaacaaagtgattggacaaataggagatgctttcttgtcatatgaacgggttagtggtgagttcagggatgctgataaagatactgcaaagaaggctgctgttgcagccgctaatgtagcaaaagccccacagaggaaaggatagatccgctgatttgatttactcactcactgaccgatcgcacaaggtggagcgatattgttcttgatgctgcacactactggagaccgtggccaacttcatatgctggagctgactggtcagtattttttttgcgacaagaccctttggaggtcacctgtctgctgcagaatttggtgggaagatggttaaccttgttacatggcctacaagacattatttgggcgatgtatatcaaagcatcaattgtagttaattttacaccaggtgctatgaacatattggtggattctatcagtagggaaacttcatcagattattatgtactatgcccttccaaaagttgtagttgctggaagggcgtttattaatccatcagatgtatttattccaggcttccacatctatgatcagaatctaatgattttttattacccaaaaaaaaaaaaaaaaaaaaa

SEQ ID NO: 16681 - DNA, 770 bp, Oryza sativa
  Clone ID: PAT_MRT4530_22407C.1
ggcgtgatggggtcctcgttggctgcaaatacagggaagtctctaagaaattttcacaggaagcaaacacagagaaaattttatatggtctggacgatataaagcgagcacgagatattatcattgttgagggtgaaattgataagctctcaatggaagaagctggctaccgtaattgtgtcagtgtaccagatggtgcaccaccgaaagtatccagcaagctcccagataaagatcaggataagaagtaccaatatctgtggaattgcaaagaatatcttgacccggcgtctaggataatactggcaacagatgctgatcctccagggcaggctctggctgaggaacttgctcgtcgtcttggtaaagaaagatgctggagggtcaattggccaaagaagaacgagaacgaaatttgcaaagacgcaaatgaggtactgatgtttttaggaccacaagcattgagaaaggttatagaagacgcggaactgtatcccataagaggtcttttctccttcaaagatttcttccctgagatcgataattattatcttggaatccgtggggatgagcttggtgttcctactggatggaaatccatggatgagctttacaaggttgttcctggggagttgactgtagtaacaggagtgccgaattctggtaaaagtgagtggattgatgctttactgtgcaatataaatgaccaggttgggtggaaatccgtctgtgctcaatggaaaacaaggtcagggagcatgctagaaagc

SEQ ID NO: 16682 - DNA, 2142 bp, Oryza sativa
  Clone ID: PAT_MRT4530_22408C.1
cccacgcgtccactccatcagctagcttagctcagctcaaccacatctcgaactaaccaactaagctaaagctaagctagcttcaccgtcatcctccactgacacatggggagcttggacgccaacccggccgccgcctacgccgcgttcgccgccgacgtcgagcccttccgcccgctcgacgccgacgacgtccgctcctacctccacaaggccgtcgacttcgtctacgactactacaagtcggtggagtcgctcccggtgctccctggcgtcgagccgggctacctcctgcggctgctgcagtcggcgccgccgtcgtcgtcggcgccgttcgatattgctatgaaggagctcagggaggcggttgtccccgggatgacccactgggcgagcccgaatttcttcgcgttctttccggcgacgaatagcgccgccgcgatcgccggtgagctcatcgcgtcggcgatgaacaccgtcggattcacgtggcaggcggcgccggcggcgaccgagctggaggtgctcgcgctggattggctcgcgcagctgctcgggttgccggcgagtttcatgaaccgcaccgtcgccggtgggcgcggcaccggcgggggcgtcattctggggaccaccagcgaggcgatgctcgtcacgctcgtcgccgcgcgcgacgccgcgctgcggcggagcgggtccaatggcgtggcgggcatcacgcggctgacggtgtacgccgccgaccagacgcactccacgttcttcaaggcgtgccgcctcgccgggttcgatccggcgaacatccggtcgatccccaccggggccgagaccgactacggcctcgacccggcgaggctgctggaggcgatgcaggccgacgccgacgccgggctggtgcccacctacgtgtgcgccacggtgggaaccacgtcgtccaacgccgtcgacccggtgggcgccgtggccgacgtcgcggcgaggttcgcggcgtgggtgcacgtcgacgcggcgtacgccggcagcgcgtgcatctgcccggagttccggcaccacctcgacggcgtggagcgtgtcgactccatcagcatgagcccccacaagtggctgatgacctgcctcgactgcacctgcctctacgtccgcgacacccaccgcctcaccggctccctcgagaccaacccggagtacctcaagaaccacgccagcgactccggcgaggtcaccgacctcaaggacatgcaggtcggcgtcggccgccgcttccgggggctcaagctctggatggtcatgcgcacctacggcgccggcaagctgcaggagcacatccggagcgacgtcgccatggccaagacgttcgaggacctcgtccgcggcgacgaccggttcgaggtcgtggtgccgaggaacttcgcgctcgtctgcttcaggatcaggccgaggaaatccggcgccgccatcgccgccggcgaggcggaggccgagaaggcgaaccgcgagctgatggagcggctgaacaagaccggaaaggcttacgtggcgcacacggtggtcggcggcaggttcgtgctgcgcttcgcggtggggtcgtcgctgcaggaggagcggcacgtgcgaagcgcgtgggagctcatcaagaagacgaccaccgagatcgtcgccgacgccggagaagacaagtagatcgagctcgacggcgacagtgtaaagccactgttatttgctgtgtcgtgtccgttcgatacatggattgattaattgtttactggtcgcagttggtagaagtaattaatggcgacaacgagaggtgcgtggaataataaatactctctccacgtaggcagtgtgtgtgtgtgattatattcatactgtgcattcaaaattactatggtccatcatataaatgttgggctttcaaaaaaaaaaaaaaaaaaggtaaggttctttttcttttttgttacttgtataccagcaagaaacatgccataagtcatgtgtagtacgggtaaaaaggaacaggtgatttgtttggccttaattgtatatcaaacttttgagtaagctggttgttggtgtgttgagctatatatgtactgttccctgaaaaaaaacactatacatttacagttgtaaaaaaaaaaaaaaaaa

SEQ ID NO: 16683 - DNA, 444 bp, Oryza sativa
  Clone ID: PAT_MRT4530_22409C.1
cccacagatcgaggcgggccgcagcggttcagcgagccgatgtcgagaattaggcccacaagaacgtatggaaactggaccgtcgatattgggccctcaaagattatttcggccgctcctgctccatgcagacgagaagacttgggctgttacctacggcccaacgctggacggacaagcaaaacagttgaacacaacataagaaaactaatcctgcacatgcaattgcttctgctcctgggcactgctgcccagcacttgcaacgatcgacattcaatatactgtttaacttctggcgcaattcacttgatgtgcccataaagacgatcgagcgaagcttcgccgtgagaaagacatccgagctgtccaacgtcgacaaacggacggcccagatcgagttgtatgtggtgctcgctcttctgtcacatcatcgccatccccct

SEQ ID NO: 16684 - DNA, 3936 bp, Oryza sativa
  Clone ID: PAT_MRT4530_2240C.1
atgcgtctgaattctgcaagctcacttctgctgcttctcaaactcagtcacctagccatcgtggccgccttggccgacggcgcggggttcaccttcaatggcttctccgccgcgaacctctccctcgacggcatggccgcggtcgcgccgggcggcctgctcatgctgaccaacggctccatggtgatgaaagggcacgcgtcctacccgactcctctgcgcttccacggctcgcgtgacgggaggagcgccgccgtgatgtccttctccacggcgttcgtcttcgccatcgttggccagtacgccgacgtgagcagccagggcatggcgttcttcatctccccgagcaagaacttatccacggccctgcctggtcacttcctgggcctcgtcaacgccggagacaatggcaacgcgagcaaccacctcttcgccgtcgagctcgacaccgtactgaacggggagttccaggacatcgacgacaaccatgtcggtgtcgacatcaacagccttacctccatcgaagccgcaaccgccggttactacgacgacgaggacatgggattgttccgcaacctgagcttgattagtcgcaaggcgatgcaagtgtggatagactacgatggcctgaccatggagctcaacgtgaccatggctcccgttgagataaccaagcccaagaaacctctgatctccaccattgtcaatctctcagcagtggtcactgaaccggcatatgttggtttctcgtcgtcgacagggataatcttctcacaccattatgtgcttggatggagcttcaagatgaatggcacagccccacctctcaacatttccattctgccggctttgccacttatgatcagcgagcgccgatcacaggtcctagtgattgttctgcccattgtatctctggtgcttgttctagcatcagccgcaatggctattgccgtagcaaaacagcgggctaagtttgctgagttgcgtgaggattgggatgttcccttcgggacacatcgcttttcatacaaggatttgttctatgctaccgagggttttaaagagagccagttgcttgggatgggaggatttgggaaggtgtacatgggcatgcttccaaagtctaagatgatggttgcggtgaagcggatttcacatgagtcaaggcaagggatgaaagagtttgttgctgaggttgtgagccttggtcgcctaaggcatcgcaatgtcgtgcaattgctcgattattgtcgaagaaagggagagctccttctggtttatgattacatgccgatgggtagtctcgacaagtatttatatgatcaagacaaacctactctagaatgggctcgaaggcttcagataatcaaaggcgtcgcatcaggtttgttgtacctccacgaagattgggagaaagtagtcatccaccgagacatcaaagccagcaacgtactgctcgatgctgagatgaacggtcggttgggcgattttggacttgcaagattatatgaccatggtactgaaccaaacaccactcatgtagttggcacaatgggttacctagctcctgagcttggacaccgcgccaaagctacaccatatacagatgtattcgcatttggcgcattccttctcgaggttacatgtgggcgtaggcctgttgagcaggaagctcctatggtgcttgtcgattgggtgctcgactattggcgcagcggttcaatcatggaaacagttgatccaaggctcagaaatggctatgccgaggaggaggttgagcttgtgctcaagcttggcctgctttgctcgcatccactggctagtgcaaggccgagcatgcgtcaggttgtgcagtacctcaacggcgacagcgatttcccggaactgagggcagcgcaaatgggcttcagcatggcgactctgctgaagaacaaggggcttaacccagatgctatgtcatacgcaatgacatcgtcatcaagcatcggtactatgtctagtactctctcgggaggaaggcccatctccagcttccttgtactcactgtcttccactgcatcaagctggtggcgccatctgctagcgaaaaccagttcgccttcgaaggcttcgccggagcaaacctcagcctcgatggcgccgccgccgtgacgccgagtggcctgctcaagctcaccaacgacaagcacatcaaaggccacgccttctatcctactcctgtcagtttccacttgacgccgaacagcagcgctactgcatccttctctgccaccttcgtgttcgccatcgtctccgagcatgcggagctaagcgaccacggcctcgcgttcctggtcgcgcccagcaagaacctctcggccaccacaggggcgcagcacttgggtctcatgaacatcagcgacaatggcaaggcgagcaaccacgtctttgccgtcgagctcgacaccgtcctcagcccggagctccacgacatagacagcaaccatgtcggcattgacgtgaacagcctgcaattcatacagtcccacaccgccggctactatgatgacagcaccggcgcgttcatgaacttgacactgataagccgcaaggccatgcaggtgtgggtggactacaatgggcaggccatggttctgaatgtgacgctagctccattgggtgtgtccaagcccaagaaacctctgctcccaaccggcctcgacctatcgagggtagtggaggatattgcctacatcggattctcgtcggcgacaggcctctccattgcctaccattatgttcttggctggagtttcagcttgaatggagctgcccctgctctcaacccatctaagctgcctgtgttgccaaaactagagcagaggcaccatcgatctgaaattttggtggttgtgctgccgatagccacggctgctcttgtcattggattgcttcttgtggggttcatgattgtcaagagatggtttaggcatgccgagctgagagaagattggaaggttgagtttggaccacaaaggttttcttacaaagatctgttcgatgccacacaagggtttgggagcaagcgtttgcttggaattggaggattcgggagagtgtacagaggagttctctctgtatccaactctaactcagagattgcggtgaagagagtgtcacatgactctaggcaaggggtgaaggaattcattgcagaggttgtcagcatggggcgccttcggcacaagaatctagttcagctacttggctattgccgacgcaagggtgaacttctcttggtctatgaatacatgtcaaatggtagcctcgacaagcacttacatgacaagaacaatcctgttctagactggaacctaaggtttcacatcatcaaagggattgcatctggcttattgtacctccatgaggaatgggaacaagtcgttgtacatcgagacatcaaggcaaataacgtgcttctcaacaatgagatgaatggatgcttgggcgacttcggccttgcaaggttgtacgaccatggcaccaacccaaggactacacatattgtggcctgtggccgaaggcctctggaacatgacctccaggacaaccaggtcgtgctactggattgggtgcttgagaactggaacagaggacaaattcttgacgtggtggatcccaggctcagcagtgagtatgttgccgaggaggcgaacttggtgctgaagctggggctcctctgcttgcagccgttgcctagtgcacggccgagcatgcggcaagtcctgcagtaccctaatggcactgtgctggcaccagagatgttgccgacagacttggactatgatacactaatgtttctgcagaatgaaagggttgagtcatacgccatgctggaagcatcctcattggcaacaacagttggccctgggtctgatctttcaggaggaagatga

SEQ ID NO: 16685 - DNA, 4090 bp, Oryza sativa
  Clone ID: PAT_MRT4530_22410C.1
atggccatgggagatggtgccccgacaatgggtggtttggtagcaaggatatgggatcctaacccgttagaagctacagttgcttgcttgctgtcgtcaattccgtcccctttcttccttgtcccctgcccaatctacaccaatgaggctagccctagtcaaccatccccttgctggaacgggattgacggatcgccggagagcaagggcgacgcggacctcggcgaggtccagcagcactccggtgctgtcgacgacatcctcgcctgggccttgcgggacggggagtcgtttccgatgtggtcgcgtgggaggaggatgccgaggagatcgaaggaaaaaccggagccgcccgtcatcgtcgcgcgggaaagcaccaacacgatgcggtcgcatatgatggagattgcggacggcgaggatgtcgccgaagccgtggctgatttcgcgcgccgccggcagagctgggtcgcctcgctgcgccagcccggcgagcctggctccgtcatcgagctctccggcccattggagatcctgtccctctccggagcatttatgccgccgccgagcctggccaacgccacggggctcaaggccctcctcgccggcgggcagggccaggtcatcggcggcaacgtcgtcggcgccctccgcgctagaggacatgtcacgatcctcgcggccgtcgtctccaacgttacctacgaatgcctctcgcccgaacacgatgttgttgacgaccctggcaaggtgccagccgccgttacagagagccatagtagaatggagccactcagctgcaccacaccggaaatgaaaatggaaaccgatgctgtacagctcaaatgtgattggcccatgcagcagtctgatgataccaatttacgtctccacagagacaaacagtgggcggtgcaggacaaacggcaggtgcttcagaggactctcactgaaatgcacacttttatcaaacatgctgaatggtggttccacaaggacgtctttgcccaggtcctgcaggatgctaaagatgcagtaaactgtgcagaggacctgttggatgagatcaattaccatgaactccagaataaagtcgagggtcatgcaattctatttcatgtccaagattatcatgaaacaaaaattgataaaatccaaggaaagctcgaacatctcgtaagacaaatggaacagctgggcttgtatgatgaacggcagcagtttattattgagtcaatcaaccgagaagacgatcttttcggagaggagcaaacaatctttgggcgtcagaaagagatgtcggaattgattgagttgattgttttgcaagagaacagtccaactgataagcaagtcactgaggtacatgcagtatctgactccaagagagcgaaattggaaaacgtttctgttttgccaatagtaggaagtggtggtgtggggaagacaacactagcaattcttgttttcaatgagaggagagtccgggatcattttgaccttctgatttggatatgtgtctcggatggctttgatgagaagaagctgatgaagaggctggcatggtctgttgccgaaaatgagatgaaaacggatgatttaggttgtctccagagaattctaactaatggcatcattcatcacacaaggagagtcctgcttgtacttgatgatgtgcagacggatgcatgccgagaagattgccatggatggaaaaatttccttgccccactaaaatatgctagatcaggaagcatggttttggtcacgacaagatatcatagggttgctgagcgtgttggcacgctgaagcacatgtttttggagggcttacctgaagaaactatctgggaattctttaggatgcttacatttggttctcgtaattccaacagcaatgcagtgctagagcctattggcagaagcatagttgcaaggttagatggttcttctctgggtattaaaattatcggacggctattaagtctgaaactggatgctaaatactggaaaatcatattggaaagtgaattgtggggatggcctcaccaggaggaagccagcattttcacagcccttcagttgagctaccaatatctgcccttccatttgaagcgttgcttctccttctgttctctgtaccccaggggttatgagtttgacgcagagacacttgtggatagctgggtggcagtgggcttcgtgatgccttctaggagcattcttgcagtagatattggacatgtgtacttcaaccaacttgtgagtcgatctttctttcagagatctccaacatcttccagatatgtcatacatgatttattacatgatatggcacagtatgttgcaaggaatgattgcttcatgatcaagtctagatgcggcatgtcgagaattcctcctaaagtgcgtcatgtgtcaattctcggcaacggtgaactcagcagcactgatatcgagtgcctgaacacatacaagacgctgcggtcaattgtgtgcatcggcgttggctgcgatattattactaattctgtacttgaaacatggttcgatcatctcactcgcattcgaatgctgagattcatatcgtgccggctgaaggagctcccttgcaatgttggcaaactaatacatcttcgctatcttgacatttctgcttgcgactttgacaagctgccgactgatttgttttgccgtctttacaagctggaaatcttagatgctcagaactgcacacttcatgctgtccccaaggatatcatcaagttagtaaacttgcagaggcttagactgaaggatgatcttatcagccaacttggacgtgtgcccgaagtaggtaagctcactctccttcaaaacatgccttactacgctgttgatgacaagcccggaaggggaattcaggagctgaagaacatgaaccaccttcatggaggattggagatcgacggccttcgcaacgtgacgagccgggaggaagttgctggagctgagctagccaagaagatttacctcgacacattggttctgaaatggcacgagtcaattaggcctcagaagcataacagcaccaaggagatggaagtgcttgaagctctacggcctagctcaaatatcaagcatctagaagtgaagttttacatgggagatggattgagtccaatgtggcttcgccatgatgagctgagcagcttggcatcactctctatcaactcctgccctaacactacaacactgttcttgatcgaaccctccgaaacgggcagcagcagaagcagctcagttagtttccaatcacttaccaagctatccattacctggtgcagaagtctaacgagccttgataatttcctacaaccagaatgtctgccaatgatcaaggtaatacagatctcaaattgcgaggaattagcgtcactgccaaccaacaaccttgtgcattttgttcatctggaagatctggagatctgccattgttggaatctcaattgggagccaggcttggccttgccaccctctttgaaatcgctcaagctggaagcatgtggggagttctccgattcgacgctcagctgcctgcacaacctcaccgctcttaccattctgaatttgcggttttgtccgagcatcgagtccatttctgcacaaatctggagtggcctctggtcaatagagaacttgaagatcgtctgttgccagggactggttacagttggaggatcagagtcgattgcagggataaagaatgtggacatcaggcactgctcgaagctgcaagacctggagcagccgtttcgtagtggtcaggctgacagtcagtagaaaacgttgttgtgcccatcatctgtaaagtatgcatatgagctcaactgtgtctatgaaatttctgctcaaaataaagtgtgcgtttgcattttgtaagctaactaagccaggaccatcttatgcccaagacttgtgcagatggtgatagacccccggtatttcaaatcttgtggagatgatgacaggcacaagaggaacattctgaattaatttgaagatggagatcagcagcagcttcagagctactccctccgtttcatattat

SEQ ID NO: 16686 - DNA, 1672 bp, Oryza sativa
  Clone ID: PAT_MRT4530_22411C.1
atgccggcggcgaagaggtcggcgtcggcggggtcggtgctggccctcacggtggccggacgccgcgccgcgcgggcccgcctctgcctccgcctggccgcgccgctctcgttcctgctcctcctcgccgcgctgctccgcacccagcccctcccggcgccgccttccgcgccgccgccctccgggggccccgctagggtcgccttcctcttcctcgtccgcgcgggcgtccccctcgacttcctctgggacgccttcttccgcaacggcgaggagggcaagttctcggtgtacgtccactcggcgcctggcttccagcttgaccgcaccaccacgggatcgtcgtacttctacgggcggcagctcgccaggagcgtaaaggtggcgtggggcgaacctaccatggtggaggcagagaggatgttgttcgccgccgccctcgaggatccagcgaaccagcgctttgttttgctctctgatagctgtgttcctctgtacaatttcagctacatatatacttacttgatggcttcgactaaaagttttgtagacagttttgttgacaagaccgagaagcgttacaatccaagcatgtctcctgttatcctaaaggacaaatggaggaaaggatcacagtgggtagcattgaccagaagacatgcagaagtagtcgttggcgacaaacttgtcttgcaagtattcagaaggcattgcaagatggtagtaactaaggctttgcttggacagaagcctaattatcgaagattaggatttggacttcgtcgaaagcagatatcgaaaggatctactcgaatggagcatgattgcattccagatgaacactatgtgcagacattattttcaatcaatggacatgaaaatgaactggaaagaagaactttgacatatacatcatggaaccagtcctcagatcctaaagacaaaatgacttggcatccaatgacatttgagtatgagtcagcaagtcctgagcaaatcaattcaattaagggtattgatcatgtgaattatcagatggagcacagaactgagtggtgccaatgcaatactacatccgttccatgtttcctatttgccaggaagttctcctacagtgcagccatgcatctattagaggctgggacggtcggtccactaaaatctgctctactggcttaactattactacaaaattttgatcacacgagttctcatttttagtttatcatggccggccatagtttatagtccatcagcatcattaggttcagtagcatctgcagctgaatctgcggagcgaccggagtaccatagtgtattattattgatagtgttcagatttgtgcatagaccactgggacagaagaggtttgatgtacagagcatcagttttggagcttgtcagctcggctacattgcaatatccaacgacagaatgaggcaggatcagatcaggtatcttgtgacgaagaatgaagaatgctcaacccttctcccgatggtatttactaattacaggataggaaagctgtaacaatatcttgataaatgatcatatacacattaacaaatttaataaagtacaaagaaaatattttttgttaaaaaaaaaaaaaaaaaaaacgctcgagactagttctccccgtccgaattcctgcagcccggggatcca

SEQ ID NO: 16687 - DNA, 504 bp, Oryza sativa
  Clone ID: PAT_MRT4530_22412C.1
aaaacgtgaacccaggaggaggcaggatttttttttaaactttggaacctttatactataacaattaaggcccaaacaccaccaacgggggaaatgctcctgggagcaagggagtagttaggaaaaaccccacatagggggggcaagttaaaggccaaaaaagctggacctggacctggagtctgacaaaagaaaacaacaccgacctgctgaagtggaagtggctgaaaaatcgccggaacgctacaaagggccgggaagggaaatggtggccctaccacccggagcggggggaaacacgggggcggaaggactgggtggttaataaatggaaacgaacctggtggccaaaaggggggggccactatgctaggggggggccttacaaactcacgggaggggcggaccacttgttgctgaaacaggaaaagcaatgggagtggatatggcctataacttggacaaaaagcataaaaccgggcaaaagcgttgcttgcaacattg

SEQ ID NO: 16688 - DNA, 111 bp, Oryza sativa
  Clone ID: PAT_MRT4530_22413C.1
gtgggttagagtttggtgtaaccatagcccaccggtgacaagctagagggggtacacgacaaatgatgggaacgctcttgtctaatctagaagccagatattctaggcacc

SEQ ID NO: 16689 - DNA, 918 bp, Oryza sativa
  Clone ID: PAT_MRT4530_22414C.1
gcacgaggctcaaatccacgcacgccgccggcgaaaatggccgtctacatccgcctcgacgacgccgtccgcgcgcggctccgcggggacgccgggtcgtcggcgagcagcggcagcgagcacgaggcctccgcgtgcctgtccgggctcgtgcaggcgtttcttgagacggagggcgccgcggcgggagaggacggcgccgggccggcgagcaagggcggcgaagggtatgactccgatgatggcgacggtccggaacgcgcggcggcggcggcggagtccgtgagggagctgctcgacccgccggtggaggaggacccgttccgggtcaggctggctgctgccgtggcggccgcgatggaggcggagccggcgctgaggaggtacggggcggcgttccggcgcgccgtggcgcggcggctgcgggccgccgggtacgacgccggcgtgtgcaagtcgcggtgggaggcttccggtggcatcacggccgggacgtacgagtacgtcgacgtggtcgcgccggcggcgagggggcagaagagcaggtacattgtggacgcggacttccgggcggggctggaggtcgcgcgcgcgacggcggagtacgccgtcgtcgtggccgccgtgccggcgtcggtggtggtggcgcgggaggaggccgtcgggcgcgccgtgcgcgtcgcggccgacgcggcgcggcggtcgctccgttcgcacggcctgcacgtcccgccgtggcgcaagacccggtacatgctcgccaagtggctcggcccctacaagaggtcgacggccacctcgccgtcggccgccggagcaatgccgatgcccgccgccgccgccgggatggacgtcaagtgccgcgccgtcgggttcttcacgccgccgccggccgctccggcggcgaggatcaagtag

SEQ ID NO: 16690 - DNA, 438 bp, Oryza sativa
  Clone ID: PAT_MRT4530_22415C.1
atggccgtggcgaagaggtttgttttgccactgatgatggtggtgcttctgctgtcggccgtgtcaggatcagcgcggccgatgggaggcgacaaatgggttggcatggccacctccggcgatcatcctctcatacagttcctccaaaatctgtatctgcaacagctttcacaaccagaaatgtatggattatttgctctcacaaaccttgcaagtactggaattgatggactaggtaccgatggaaaagcagccatgcatgtccacagaaatgtctacataaattgcatcgatggtcagaaatatctcacctatggaacacccgagagtcaagcagattgcatcattactctgttcttcccgtctctattttgcgagctgaggcgtctatctctgagaatgtgtatcaaacgaactggccggttgacttcgacttga

SEQ ID NO: 16691 - DNA, 1014 bp, Oryza sativa
  Clone ID: PAT_MRT4530_22416C.1
gcacgagggagagagagagagaactagtctcgagtttttttttttttttgttttttttttttaagaagcaaattcgatcggcaccagagataaggtcagcttcaaacatgtgctcaatccagtttttgagttacacccaactacgacggcaggcaaagcatgtgtgctccgttgagttacgtcgatctacgacggcaaattttcaatcgccggcagtgccgccgccgtgccggcgcgctctcaccgcagcaccggcacgccggcctggtggatcaggcggtcgctgcccacctcatcctcgccgccgcctaggaggtcgccgttgtccccgtagcagcacgactcggcgtctcccggctcggcgggcggcggcggcggcggtggaggctggagagcgcgctccagttcggcgcgcagcgcggtcgcctcggcccggttcgacagcgcggcgtcacgccacgccagcgcctgcgcctgcacgccgcgcagcctcgccaccagcgcgcggtttaggccccacgcgcgctcgatctccatgtccttcatcaccgcggcgcgcttcgcggcgtccaccagcgacgccatcgcgtgccgccgccaccgctcgagctccgcggcctccgccgtcctccgccggaggccgtgttgttgttgttgttgctggtgttggtggttggcttggttcacgacggggtcgaggtcgacgacgacgtgatccgcgccaagaaactggccttgcgctcgagcgcgtttcttggctggagccggagtcgtcgccgcgacgccgccgccgccgctggcgaaggcgacgacattgtccctcgccgtcgtcgtcgtcgccgccacgccaggcgcggcgtaggagaagggtgcggagtacgggcacggcccgacggcgcacggcggagagacgaaggccgcattgtcgccgtacctccgcttgctcttgacggcgttcgccatggtcttcgggggatcacaaccatggctgccgacttctgctccgacggccat

SEQ ID NO: 16692 - DNA, 441 bp, Oryza sativa
  Clone ID: PAT_MRT4530_22417C.1
atggggcgcagacaattgacaagttcagagatccgcaacgccatcgcgcgcgaacccttccctatatcggtagctgtcacgaccaccaatcgcggcctcgtccgcctctcacgtcgggaacgcggcggatcacgcgacgagcgcaggtgggtgttgtacgcagcagatgcttcgcttttgatgggaaagtcgcagatttggagggacgagacgagacaggcggggcaccgggacgaggcagcaagcaggagacgcgggcggcagcaaccagtcatccgccgcgaaatgccggggcttttgcgccacatctctcgatcggtcgcaccccgcaccaacaccgggatgtcatgtcactggcaacgccccggaatagccgcggggagagcggagaaaaagaaaggggagcggaaagccgcgtgccgcgtgcgggggtgggactag

SEQ ID NO: 16693 - DNA, 286 bp, Oryza sativa
  unsure (1)..(286): unsure at all n locations
  Clone ID: PAT_MRT4530_22418C.1
gtggtggtagggngcgtgcaatgctttaggggggtggggggtgttttgcgaggtcaaatggactngtattcatanagcttgctgttntccttatacttgatgtactgggatacatacanagaacctgagaaactgatgtcgttacctgagttggtgggctgcatgcgttgattacaggttgacttgtaaatgctgaactntgcttttgtcgattataattcaatcatgtggcctgctntattacattttgttaaaaaaaaaaaaaaaaaaaaaaaaaaaaaaaaaa

SEQ ID NO: 16694 - DNA, 247 bp, Oryza sativa
  Clone ID: PAT_MRT4530_22419C.1
caccactgcattgcattacggctcaatcactgctgctgtattaaatctaaatactctagaaccctggttgagcaggagagactaactaagctggggaggacacgcaacaaatgaccgtaaaccagccgggtttgaacacggggggggacggaggcgggggggagagagctacataggacagggtggggtttgtgttgaaattgggggatggacgtgagggagggtggaaggggggcccttttgcctt

SEQ ID NO: 16695 - DNA, 559 bp, Oryza sativa
  Clone ID: PAT_MRT4530_2241C.1
gttctagatcgcgagcgcccgcccttttttttttttttttttttttttttttttgggcccaaaactgttctgatttcatttggcaaatcttcttaagtaactagcaaagaacagcctaatccgggataaaaaaaaaagaaaccccgacgattcccagggttttttaaaaagaaaacaacccatcacagaagcttccgaggaccgaccttattgggaccccgccccaggggcttccttacaaattcccaatgggaaccaaacaaaaccctcctttttagggacggggcttaccaaatcacttccaagcttaaaatcgaaaagaaggggggattaccggggccaccaaaaggaaagggggggcctaaaaagggtcaaaatttgggagggaaagccaggcccttctttttgggagccctcaccgcgggcacccgggggtgggctttggggaacctgggaatgaaccggtttttcttcggcgaaccccccctcaggaaaaagccgaagaactttgcggccttggtcccataccaacccaacttgggcttggcccgcggggggg

SEQ ID NO: 16696 - DNA, 199 bp, Oryza sativa
  Clone ID: PAT_MRT4530_22420C.1
gttatctctacttgcaccacctgaaccagtatggaatcacgagacgtcgtatggttcggattgccacgtgcccacgaatgtgaacgccatttctaagatgatcgataagtccaaccaccagacagggtgatcaagctatgaagatgaaaaatagcagcatcaacatcaggatcaagcgtgatgacaggatgaccagaac

SEQ ID NO: 16697 - DNA, 123 bp, Oryza sativa
  Clone ID: PAT_MRT4530_22421C.1
catgggtgtactcggaagacccagccgagtcctctagctccggcgacctcatgtttcggacgttccggaggagagcgtttacgttgaggaaggttcagaagcgtttgaggaagctcaaggcaa

SEQ ID NO: 16698 - DNA, 1002 bp, Oryza sativa
  Clone ID: PAT_MRT4530_22422C.1
aaagaaaagaatgaaactccatcggaaaccccgttgaaacactttggtctaaaacaccaaaaagacacataggaggagggcacccgcggacgaagatattagagttccacctatgagtgtcatctccctagccatcggaggaccgcttgagaaaggcaccacagtctgcagtcgctgttgcctccttcagcctgcaagtcaccgccatgggctcaaccgcctcctcccgtgggcctcctcgcgcaagtcaccgaagctgccgccacagccgcaccctcctcacgtaggttgccgccaccaccgccttcttttgctcgtgattcaccgccgcctcctgttgtgggcctcctcgcacgggtggttgccgacacctcctcctgccgtgggagttgctgccaccgcaacctcttcgtcccgttggtgccgccgctactgccgctgctgccggatcaaagctttgggaatggtgagggatgcggcggcgcgcggacgtcgtcgtggagggaggcagccggcagcgaggagggatgcggcggcgcgcagacgtcgtcgtggagggatgcggcagcgcggacgtgggagaggagggagccggcggcgtgcggatctggagcggagggagccgtcggcggcgtcgcggtcatcgtcgtcgtcgaggagggaggccgctggcggcgtggagggaggcggcggctcgcggacgtgggagaggagggagccggcaaggagggaggcggcggctcgcggacgtgcggcggctcgcggacgtgggagaggagggagccggcggaccacataagcggcaaggctaatggggtggaggcctcctggacgcggtggccctcaacggcgaggctcctgggcatcgccccgagctcagccactagtaccgtcgttcatgacctgagctccactgccgccagctatgggaggaactacgcccatggctccccttgccgctgccggccaccacctccaaaggccagatacggcaagccttag

SEQ ID NO: 16699 - DNA, 241 bp, Oryza sativa
  Clone ID: PAT_MRT4530_22423C.1
ggaaatggaaggggaattaaacgggtttattactgggtccattaaaaccatcacactggggggcggggggaaaccgggaaaggtaaaaaacaaaaaccggggttgtagagggggggcccgctcggtgttccagggggggggcccgaaaaaccagcccacgggcaggggattcagcccaaacccagaaggggaaacggggggggatgccgccgcccccgccgggccgaatccgcccgcccgg

SEQ ID NO: 16700 - DNA, 303 bp, Oryza sativa
  Clone ID: PAT_MRT4530_22424C.1
aaaacagggcataaaaatttttttgtttgagcaacgaaagctttttttttttggaagtgaaattcccaaaactaaaaaactctgccgcccaaaactccacaaatgggaggctagggtgcccttttaacaaaaagatacaccccagatcctacaattttggggaacaaatttaaaactcgtgggaaaacgttccttaaaatttgggacctaaatactctcttgctaatggggtgtcggaaaaaccaggattgttgacattactttttttggcttatggttttttggatgggccaacaaaaccag

SEQ ID NO: 16701 - DNA, 507 bp, Oryza sativa
  Clone ID: PAT_MRT4530_22425C.1
atggtgccacccaggaagatcgccgtcactcatggcgccccaagaagctcgccgggctccctgctccttccccatcgcatgggcctcctcgccggtgatctcctcccttctcaccctcaagtaacgtcgtcgatcccccgctgctgccacaccttgtcacattccagtgcatgccctcgcccatatggccagatcgacttgtttggatcactcaagctggggtttgttgtgttcaacaagtctatgaaactcaattttttacgtgaagaatttatatggagtgctgcattaaaaaagggccacatggatatgttcgcataccggccacgcagtgcggtgtggcttcttcctctgaactggaccattggaatgccaggaatcttagtggcgacagtgatcaaagccaacttgaccctatctggaatgaggatctcaagctctctattccttagcagaaattgtattgaagagcttccctatgcagagctcattggtgctggagtttga

SEQ ID NO: 16702 - DNA, 2247 bp, Oryza sativa
  Clone ID: PAT_MRT4530_22426C.1
atggcctcctcctcctcctcctcttcacacctccacgcgcactcccttaagctgggcacgctcgctcacaccttcaacatgaatcacctcctcatctactacgctaggcggggccttctcgactcagcactcaaggtgttcgacgaaatgccgcaaaggaacctcgtctcctggacagccatggtctctgcctcaacgggcaatggcgcgccccacctgggctttcgtttcttcgtttccatgatcaggagcggcttctgccccaacgagttctcgctcgcaaccatgctcactgcctgccactccatggtggcccattcctccaataagctcctcatcgccctttcgctccacggtgttgccgtcagagctggcctggatagcaatccttttgtggggagctctctgctgctcatgtacgcaaagcatggccgcattgctgctgcacagcgtgcattcgcacatatcaggaacaaagatttgacgtgctggaatgccatgctcgaaggatatgttttgaatggttttgggcatcatgccattcgtacggtgctcctgatgcatcattctgggcttgcacctgaccggtacacctatatttctgctgttaaggcttgttcaatcagtgcgcagtgggatcttgggcgacagcttcactgtcttgtcatccacagcatgctcgagtccaatacctcggtcatgaattcccttgttgatatgtatttcagagccagacagaaggaaactgctgcttctgtctttcgcaagattagacaaaaagacaccgtgtcttggaataccatgatttcaggttttgcgcatgatgaagacgacaaggcagtttttggctgcttgattgacatgtcacgaatcggatgtaaacctaatgaggttactttctctgtcttgttgaggctgagtggtgctaaagagaatgaatcattgggccttcagatcgttgcccttgcctaccgtcatggctatactgacaatgttcttgtagcaaatgcagtaatcaacatgctatccagatgtggattgctcaaccgtgcatatggcttcttctgtagtctcacatccacaaacattgtgacatggaacgagatgattgcaggttatggtctcttcagtcactctgaagaaacaatgaagctcttccgcagtttggtttgctttggagaaagacctgatgagttcacctactcagctgttctgtctgccttccaggaagctcaaggtgcaagggatcatgagcaaatccacgcaactattctgaaacaaggttttgcctcctgtcagttcgtgtccacttcactgatcaaggcaaatgtagcagcgtttgggtcagttcagatttcactaaaaatcatcgaggacgctggcaagatggagctggtgtcatggggagtcgttatctcagcattcctgaagcatggcctgaacgatgaggtcattttccttttcaacttgtttagaggtgactccaccaacaagcctgatgagttcatcctggcaaccgtcctaaatgcctgtgcaaatgctgcattgatcaggcactgcagatgcatccattcgcttgttctcaagacaggtcattccaagcacttctgcgtagctagcgctgttgttgatgcctacgcgaaatgtggtgagattacctctgcagagagcgctttcaccgttgtttcatcaggaaccgacgatgccatcctgtacaacaccatgctgacagcttatgccaaccatggtttgatccacgaagctctcaacctctacgaagagatgacaaaggctaaattgagtccaacaccagccacattcgttgccattctgtcagcctgcagccatttggggctagtcgagcaggggaagcttgtgttcagcaccatgctgtctgcgtatggcatgcatccagcaagagccaactacgcctgcctggttgatctcctggcaagaaaggggctactcgacgaggcgaagggtgtgatcgatgcaatgccgttccaaccatggcctgcagtttggaggtcgctggtgatcggttgccggatacatgggaacaagcaacttggcgtgcttgcggcagagcagatcctgagaatggcgccgagcagcgatggcgcttatatttcgctgtcaaacgtgtatgctgacgatggagagtggcagtctgcagaggagaccaggaggaggatggttcagaatcacgttcagaagttgcaagggtacagcaggattgagatgtag

SEQ ID NO: 16703 - DNA, 844 bp, Oryza sativa
  Clone ID: PAT_MRT4530_22427C.1
atggccgagaaaccaccgccatcaccgtcctcggctagcccaggttctgttaaagaaaagattcagaagttaggtttgttagacgttaatgaagggaacatcatgaccatcgatccagaaaagttcacacctgatcaaaagaaagattttgaagagatgatgcagcaagcacgggatcagttcttgaactcattcatgcagacccgcaagggaacacttgttcagaagtataaaataaaggtagttgctgatgatcccgggactagttcttctaaggatgaagaagggaaacaagctccagatggcttggctcaaccaagtgacaaaggtgccacatatggttttccagcaaatcaaggtgacaactctcaaggaggagttcaaggtggaggtgttaatcaagacgacaatgcagcacagttgcagttcaacaactttcaagatcaggttgactatgctgtacaccatgctttgatcaaccaatctggaatattaaccaacactttggcaaacatggtgaagtcaatggttgatggttcaatggccgagtatcaagctacaggaccggtgtacctaccaggaggagtattccctaattatcgaccaataatcactgataatcaaccagtcgtccagttaatccctcttaatgcaccatcggctcagccgacggcaccagtatcggctcatgcacctgctccaacactttcggcttcaggccaagtaattaatccccgattgttggtgagagaacagccacagcacgctagatagaatgtgaatcgctaacgcaagaccaggttgcatctatgttcttacctcctcaacacaccattgatccaat

SEQ ID NO: 16704 - DNA, 134 bp, Oryza sativa
  Clone ID: PAT_MRT4530_22428C.1
ttgttgactcaaacacaacataacgtagaacgttacatttccaatatcaaatcaccatccgctccatcctccatgaccagggccacggcgggcgccggcgacatctgcatcgtgggcagctgcatatcccgatc

SEQ ID NO: 16705 - DNA, 252 bp, Oryza sativa
  Clone ID: PAT_MRT4530_22429C.1
atgaagaagggaaacaagctccagatggctcggctcaaccgagtgacaaaggtgctacagatggttttccagcaaatcaaggtgacaactctcaaggagtgcacggggttcaaggtgatggttctcaggggattcaaggtgatggttctcagggagttcaaggtggaggtgttaatcaagacggcaatgcagcacagttgcagttcaacaactttcaagattaggttgactatgctgtacaccatgctttga

SEQ ID NO: 16706 - DNA, 366 bp, Oryza sativa
  Clone ID: PAT_MRT4530_2242C.1
tcacccttgtggcctcactggcttgccgcctagcacaccgtccagcccgaccccttgccctgtcactgctcggcgccgccagccaccgccacccgttgcccctgccttgtttccgcccagcgccctcggccgcccctgcagcaccgcccggccaccgcagcccgcgtggtggcgcgccgccgtcacccgattgccgctgctcagccaccagccacccatgccatgcccacgccaccgccacccactgtcccttgaaccaagtgaaggtatatcagtccatgctggttcaatcttctcttccagctcctctaagccatgggaaggccctttcctttgttccgattgccgcgacaagaaggatgccat

SEQ ID NO: 16707 - DNA, 311 bp, Oryza sativa
  Clone ID: PAT_MRT4530_22430C.1
aaataagtatagacggagcggacatatatgtaatgcacataggctttacccaaaaccacatcgactatgcacacaccactgtcacatcatggcagtgcgagatcacgcgtgacaaactcaaacgcagagcgctggcggtataatcaaaagacgatgtacacactgttgacacacggaacaaggtggtagacatcttccaatcagggatgcacactcaaacaaggctgtatatgacgatgacggtttagatgacacgagactagtcgcagccggggggctagtaggcgatgaagctgatgagctggacccgc

SEQ ID NO: 16708 - DNA, 252 bp, Oryza sativa
  Clone ID: PAT_MRT4530_22431C.1
atgcagcgagaacttcagcttgatggcctgggttgctccatcgtcgagccgtctgatagagctggcacaggcttagccttcgatcgagctcgacgtcggtcgacatggaacagcacggagagaggaccgatcgacgacctgcttcttagcgtgctttggcgccacgacgtaacgtacgccagttggaagcggaagggctcccgcaagcctcgaccgcgcggcgttggcgccacccgaaaacgaagggcaaat

SEQ ID NO: 16709 - DNA, 466 bp, Oryza sativa
  Clone ID: PAT_MRT4530_22432C.1
caaacgagtaccgagcggcagggccagctcggctcccaaaaggcccaaccagactgacatttccgctgagaacgactgccgcgaagaccaccgcaccacccccaccaccaccggcgccgaagaagtgaccccgcgagaggaatacatggcgcgccgccgccggcgtcgagctccatcgattcctccggcgaccgccgcgtgcgtcaggcgaccgacccagcgagcgaacgaataatcaggggccctccaccggcgccttgagcgttactattatactattactgtattttctattttcagctgaagctgcgtgataattaaataagtgagacccgcagaaaccatgctttgtgttgtttgcatggtgacaactcataccgttgatttaccgtagtactctggtgaatgtgtgatcgataaatagctcccccagtgtgttgtggttttaaaaaaaaaaaaaaaaaaa

SEQ ID NO: 16710 - DNA, 538 bp, Oryza sativa
  unsure (1)..(538): unsure at all n locations
  Clone ID: PAT_MRT4530_22433C.1
cggaggaagaggcggaaggcgagtggnagatggtgactgcagaatcccctttggaggccgccgccgccgacgacgacgtggaggccgtggagagctcggcggcgcccgctgcgcgggtcgacgaaccggcggtccaagatgaggagaaagagaaggaggagggggtggagatgaagaaggtgatggagatggtggcggcgctgtgcgagcggagcgcgcagcagtgcgcggtgatcggcgcgctggcggagcgggtggacgcgctggagcgcgccgtgcggcgggtggaggagagcgaccggcggcgccgccgcaacaagaagctcaagaaggaagccaaggcgaacagctagtccatccgaagctgctacagcgattgaataaacaagagttttttttagttcttagcttttggagttggacagacaaaaaaaaatccgtaatattatttttggtttctttcgttttttgatttggtttgtagtcctttcgaatgcgaatcaaacgataacaattttgctaaaaaaaaaaaaaaaaa

SEQ ID NO: 16711 - DNA, 187 bp, Oryza sativa
  Clone ID: PAT_MRT4530_22434C.1
atctacccctaggttactattgggtgccaccccagtacccactgtagccacccctgtggcggtgttcgttgttaatgagttttaaccagttatagtggtttcggaagtttataataagtaagcctccagatatcatcatatggtgaccattgtgaaactttgggtgatatatatagaaataaagttg

SEQ ID NO: 16712 - DNA, 237 bp, Oryza sativa
  Clone ID: PAT_MRT4530_22435C.1
atggcggtggaagctcgtcgtcggcgacagaaatcaaagcatgatttgaacgttcatggccgtggtgagttcttggttggaaagcaccgtcaggagaggttgaagaaacaaagctctcgcatgtttttctcttatgaaaatggtatagtactggtatcacaaggtatcctggaacgcagaacaaagactgtacaggtgcttcatggaaaggtcgtgtactgcttggcgatgctgtga

SEQ ID NO: 16713 - DNA, 348 bp, Oryza sativa
  Clone ID: PAT_MRT4530_22436C.1
atggctactacagatacaaccattgcacacatcacggatgtacaagatgatatcaagatcaagtcctccaacctcatcgcaaaactccctctcagttggccgcaatcaaagaaacaagatgctgcatcacctatcatgggcctatgggcatgtaacttcgtctgggaccccagcccaagtggggcccatgtagggtgcgccccatctaggtggatcatgaccctagagtccctttggtcgtcctcccaccattataatgagccaggaataaggctgatttgcaccggcaagatcaataacccacggagaggtgtatcgatcgctaaggcgcaacacaacaacgtctag

SEQ ID NO: 16714 - DNA, 495 bp, Oryza sativa
  Clone ID: PAT_MRT4530_22437C.1
atggtgagttctaggtttgtggccgtgcttcttctggtggcgctggcgccggcggcgcgggggcagggaggaggagggggcaactcgagcgccccggcggcgtcgccgccggggccgttcgtgccgcgggacaacatcctgctcgactgcggcgcgacggggcaggccaacgacacggacgggcggctctggaccgggaacacgggctccaagtacctgccggcgaacctcgccgccgcggccgccaccgcgcaggacccttctgtgccgcaggtgccgtacctcaccgcgcgcttctccgcggcgcccttcacctactcgttcccggtcggcgccgggcgcaagttcctcaggctccacttctacccggcgaactactccaaccgcaacgccgccgacgcgcttttctccgtctccatccccgaccccaacatcacgcttctctccaacttcagcgcctaccagaccgccttcgccttcaacttcgactacctc

SEQ ID NO: 16715 - DNA, 488 bp, Oryza sativa
  Clone ID: PAT_MRT4530_22438C.1
caagtgctgccaagacaagctgcaaggacagtgacccagcgagtgccagctgcccagccatccgccggatgttgaggagctacgaggagagcatgccgatgcacactggagcaaggctggtcgtcgtcgtcgtcggagtactacggcggcgaggggtcagtcagtcggagcaggggtactacggcgaggggtcagtcggaggagggcatactacaggcgagcaagcaacagcagcacaggggatgacaccagcgtgaggcatgaccagggcagagcaagtacagcggcagcagcatgcacagtcagatgtgccagggttgagcacaccagcaagtgcaagcatcttcagccagccaggccaagtactaggctagctggcttccctcatagctagtaggatcacaccgttgctgtgttgcatgcaacgagatagtgatcaaaacaaataatgaataatgaaatgttttgaaaaaaaaaaaaaaaaaaaa

SEQ ID NO: 16716 - DNA, 1719 bp, Oryza sativa
  Clone ID: PAT_MRT4530_22439C.1
atggagaataatcagtcaggtcaagctcaggacggcatggccgatcaaagatttcgcagctggctaacagaacaacttaatatgcagcagcagaatgccggttgttcttccaacccagcaccagcagtaatgcagatgccagctctgccatctcacacagattatggtggcatatatcccaacccaactgaatatgatggctacaactggaggatgtgtgggcagaaattagttcagggtgggtgccatcagaaattctactatgaatgttctcaagcaaactgcggtgccgagaaatccgtgacgcgctccgcagatggacagatcaagaaaacagtatgggttatcaggccttcagttgcaatgcctaggaatgaggaggaagatgggctacaatctggttcgagtgacagcggggatgatgatgctagtgaagcaagagctgctgacatgttcctgcagctgcagctcaagataccaccgcgcataacacaattgacgttgatgttctgggtaacagctctcagcagcgtaagaattatcaccgaagtggtggaaaagttcaaagtgcagaatgtaaacattgtaaaaaatgcctcagtggaaaaacttcaggaggaacaagccatctgcgccgacatctcaagatatgtcctgcacaatttagaacgactagactgcagcaagaaggtgccaagcagtgcaaattttaggcagtttttggttgccatctgtcctgattataatatggtgccgcaggctgcttttgaagagaagttcctcagcttttttcataatgaaaagatgaagctaaaagagaaaatagaacttacacctggaggagttttcctgtcggtaacaaagcagtacgtcgagtttaaaaccttcgtctgtatcacagtacattttattgacaacgagtggaagatgaatagaaaaatcattagctacggctatggcggataccctgatggtgctgattactatgtggatcccaggttcaaactaaggtatcttgagcagtgcttcacacaagtttccagtagtggttgtgccaaattgttcgtccttgaagttcgtgcaaagatttatgagctctttcttcaatactcctgtaatgttgattggcaaactggtgagctacttaatcacaggagtaatgatctacagatggatagacacggtaatgattcattacatggaacagataagaatgacattgagcaaggatcaaatggagaattcagagaactaacttcgtacattgagggggaactttatcctcagaatgaccaatttgatatcctgaaatggtggaaggataatgcgtcaacgtatccaactcttgctaggcttgcacgcgacattttagcaatacctggaagtgcagtttctgctgaatatgcttttaacaaaactggtgaaagggcagcaggggttatcaggccttcagttgcaatgcctatgaatgaggaggaagatgagctacaatctggtttgggtgacagcgaggaagatgatgctaatgaagcaagagttgatggtgacgacatggtgcagctcaagatatcaccgctcaaactgcaactgaggttgatgttacgggtaacggctgtcagcaacgtaagaattattgccgaaggtttccttgcttgggaaggtatgtttcgggtttccattggtttctaccccgaattggacgtggaggaggacttgtag

SEQ ID NO: 16717 - DNA, 1656 bp, Oryza sativa
  Clone ID: PAT_MRT4530_2243C.1
atgatgagcgggaacgagatcatgccggtcacattggatgatttcgaaggagaagaccgcaaatccatggaggagtacatcaaggagatcacacaggaggcgttgatgagggcgtgcaataggactcgtcaaggcgtgatcatcaagcccgggccacttcctaagctcgctcccgatttggtaagcaatgacgaagtaatacaatctatccaacaacaagtagcatctataatagattcatctatgattgcttttaaaaataagttagatgtaatgtttaaggataaatttgatgggtttttaaggattaaattcggccctcttatggacgattacacgttaaaggataaagcctctatcactgctaaccaacctcctatagaacaaacaaatagtggaaccgatggagcggcgcatctagccggtccgaccgggcctgatggccggggatatcctccggatactagacaaggccaatataatcatattgcgccacagacacaacctattaggccaccaaacccaccgccaaatcaacaagggcctaataacatggaggatatgattagtgatattatgaggaatagattcgggattgaaactaggaatcgttctagaacttacaaaaagccatatcctgattattatgataatgtgccgtttcctcgaaactatagggttcccgaatttgccaagtttagtggtgaggatggtgcaagcttgatggagcaaagaccgattgatacttcatcggtcacttgtgaaacgatttcggttacatctatgcctaagaccggaattgttagtaatcctctccttattagtcctattgatgttgacaaaaagaaagggaaaagtgttattattggggatcctcggcccgagataattaggatcaataatgcaaaggctgaagatcataaagttgcaaatgatgagtcatctagtttccaaaggaccaaaaagccgaaactcacttttgagatgcttatggctaagtacgagaaaggattagccggtcaacgatttgataatcaaaatagtgattcaaaaagaccaagatcatctcgtaggaagagatttggtcaaacaccaaagcaatcggagccattaactataccaacttcatacaaacctccggttgtgatgccatggtatccatatccaatgtcactatatggttatccttttatgtattacatgtcgtggatgcatcaaccacctatgtcgtttcatcaaggatgggaggaattacctaggtcagcaccaagtcattcatttaactctcgtcaagaccgtttcccacaaaagaatcggtccggtagatcaaaggtgaaaaaggtgaagaaggtgtgggtgaggaaagaaaccaaagctcttgaggtcattgctgccaaagaggagtctcaagatgttcatgtacctactggagatgcggtggaaaccacgctggcaaaggagatcgaagccgacaccgtgactgccaacattgggggtctaaccgaaacagctggccggtctaaccgccagtctacggccggtctgaccgaccttactggccggtctgaccgacggcttgtggccggtctgatcgggcttgtggccggtctgaccgaggggcattggagaagaatgggaaaattgagagcaacatag

SEQ ID NO: 16718 - DNA, 2028 bp, Oryza sativa
  Clone ID: PAT_MRT4530_22440C.1
ccccgggctgcaggaattcggcgccttcgtcgccctcctccctggctaggcttccttgcttcctctccactcgcccaccggagaattccttcctctctctcgtcgcgcgcattgtttgctttgctcacatatgatctgagtcgcggaagactcagtcggtggcaaggatacggggatggcgggcggtggcaggtgcagctcgctgctccgtggcttcgtgtcactcttcttcctcctgttcatccacattggccatgccggttgctgcttctcgacgggatcttccacgcagacgctggaggaagatgacactggacatggggccgacgggaggggcggcggtggcggcggcagcaagaggaggaagatatcgccgctcgcgttctccccgtcggtgtcgtcttctacggtggctgacgagaggtccagagccaggcggaggcaggtgtcgtctctagccacaagcgtccgcttctacctccaccgcatcttctcctactcgtccggagccaagaacggcgctggcgctccagccgcggaggaggaagacgaggcggtgacgacgaccgtgtcgtcgccgctcgcgcagtcgtcgtcgtgcctgcctcagcgccaggcctcgtcgtcggtggtgctgtccacgccgtcgtcgccatgcgcgtcgccgttcctgtccccgctctcgccgcagtctctcagcattactcctgcggtgccgtcgtcgccgcacaacaggcagatccctcaggcgaccaccaggcagtcgtcgttcaggtcgttcgccgcccgcggcgacgtgttcccgtgcaaggtgtgcggcgaggtgctgagcaagccgcagcagctggagctccaccaggcgatgaagcactccctctccgagctctccagcctcgactccagcatgaacatcatccgcatgatcttcctcgccgggtggaagccggccgttatgcccggcgccggcgagccaccgtcggtgcggcgcatcctcaggatccaccacaacccccgcgtgctcacccgcttcgaggagtaccgcgacctcgtccgcgcccgcgccgcccgccgatgcgcgggcgccggcgcggcggcggtggaggagcggtgcgtcgcggacggcaacgagcggctgcggttctactgctccaccatgctctgcaccctgggcgcgggcgtgtgcgggagcccctactgctgcacctgcagcatcctgcgccacgggttcgccgggaagcaggccgacgtggacggcatcgccacctactcctccggccgggccgcgcacgcctctctccccgacgacgtggagcgcgagttcgcgttcctccaggtgcgccgcgccatgctggtgtgccgcgtcgtggccgggcgcgtcggccgcggcgccgcggacgacaaggtggcctacgactccatggttccactactgccaacctcctccttcgctgcagctacccgtggcgacgacgacgtcgagctgctcgtgttcaacccccgtgccgtgctcccatgcttcgtcatcatctacagttgctagttgcggcagcggcacgaggcggccagcctgcaatgtcgtactagtgtatagcccttctttttccctcgttaggtacgttgggctgtggtcacggcggcgcgtacagtgagatctcgttctcggttcaattatagcggcaaaatgcatggctcgctgctcgttgatctgtccgaccggttgggttctggccttctggtccttttggctacatcaagctatgagtgtactcgatcggcaatgcatggagctgggtgccactgcacattgcctgcctctggctggatcggatcgagcactcgacacatcatccagcacagtgatggtctcactgacgttgagtattgtcgagtgggttctaccacacgctgcacaatggtcgtaagttatgtagcttggttgccatgttcttatgtacctgctactactgttgttgttggtcctgcgtcaactatcgactgatgaatatggttcaatggtacattgatctt

SEQ ID NO: 16719 - DNA, 213 bp, Oryza sativa
  Clone ID: PAT_MRT4530_22441C.1
atggattcgacgacgacgacgacgccgaagccggtgtgcgcggaggaggcgcttgcgctgctgaactgcgcggccgagtccagctacgaccgcgacaagtgcctcgccgccctcgacgccctccgcgcctgcatcgcccagaagaaagtgaagaaattttccctggctgaggcaagctccacaggcacctctgaaactccaaaaggaaaatag

SEQ ID NO: 16720 - DNA, 609 bp, Oryza sativa
  Clone ID: PAT_MRT4530_22442C.1
atggaggacagcatgcaacaagtgacgacggccgccgcagccgccgccgccgccgccaccgccaccgccaccgccggcggcgagtgcgactgcggcggcggcggcggggttggctgcctgctgagcggcatcgcgtgctgctgcgccgccgcggccttctacttcgtgggcgcgaccgagctgcgtatggcgcgcaggttcacccgcatctccgacctgtctgcggccctggactcagaaggagccttgccactagtaaccctacgtggacaagttggatcagagacacgaatcgtcgctagccaaagcggttgtcaggctgtgatagctgagcaacaagtacgacaacattgcaagacaaagcatgtaacgaagtcagcaaagacaaagatcaacgagaaggatggtgaggaattcttggtgttaaggaggacaaaggcgacggacggcgatgaatacttggtcgtaaagaggacaagggtaaaggttggcaccgaacatagaccgaccaagagggtgagggacatagatgttgaacagtgggttcatggcaccaatgtggtttcttctaccaaaaacgaggttctttggtacttgcattggctttaa

SEQ ID NO: 16721 - DNA, 866 bp, Oryza sativa
  Clone ID: PAT_MRT4530_22443C.1
atccatcgatcagcagcagcagcagcttgcacactcgagcttagcttagcttttgcaagagagatcgagctagagatggagaagtcgagcaagatgatggcggtggcggcggtgctggtgctcgcggtggtcggcgcggcggaggcgaggaacatcaaggcggcggcggcggcggcggcggagagcaaggacacggtggtgcagccgacgacgttcccgccgttcgaccgcttcgggagcgcggtgccggcgttcggcggcatgcccggcagcagcatcccggggttcagcctccccggcagcagcggctccacccccggcggcctcggcggcttcggcagcatgcccatgttcggcggcctcggcggcggctcacctggcctcggcggcggcatgcccggctcccccgccgccgccgacaagcaggccaagaagccatgagagacctcgccgtcgccggcggcgtcgccgctgctgcgcgggtaatgtgctctatgtagcgcacggcgttgcatgcaatatggatggctatatgacgcgcgcgcgttatatcttcatatgtgcagttagcttgcactgtgtctagctagcgttctattatgagtagtgtctcttctatctcttttctttacatgcatttggaggaggattattctatctgtttgttggttggttgtgtttgtttgttttaattaggtcccttcttatattttgtgttttaattaagttcgtgatcatgtagtagtactaccactgtttcgagctcgaggcatgaataatgctaaatgtgatcattattgtgttaaaaaaaaaaaaaaaaaaaaaaaaatactatctctgcttcaaaaaaaaaaaaaaaaaaaaaa

SEQ ID NO: 16722 - DNA, 564 bp, Oryza sativa
  Clone ID: PAT_MRT4530_22444C.1
gaacactagtttaatatctgtatttcttaattgcaagctctccatgcagttgatggatgtattgacggcatacttttatgggtcgttagatttggaattttatatgagagtccctaaaggacacaagatcacaaattcaaaaggaaactgcaacatgtatagtgtgcacatgcagcgatcatggtatggattgaaacaatccggaaggttgtggttcaaagagttaagtagatatctctagaagagaggttattcaaacaattatgattgtccacatgtgttttcaaagaaatccctgaatggattttgtatatcatctcggtctatgtctatgatctaaatatcattgccaccatagaggacattacaatggcttgtcttaatatcgagcttgattgaaggacttggggaaaaccaagttttgcttgggccagcaactcgagcacctccatggaggagtatttatgcaccgatctccctacacaaagacagtccttggtaacttcaatatgaacaaatgccatcctttgaaaacccccatggtagttcgatccatagaagctt

SEQ ID NO: 16723 - DNA, 218 bp, Oryza sativa
  Clone ID: PAT_MRT4530_22445C.1
tcgaaaataaataattaaaaattgcaagcaaagtgcctctttggatcaagaatatactaaagggagaaaggtaaatatacaagtgagaaaacaatgattaaatagactggtgggcggttaatagaagatattagttgcagtaaagtgggtggggcctttttagggagccatatggcgccaccgttttcttaaatatttaaacttttttttaatggtgc

SEQ ID NO: 16724 - DNA, 264 bp, Oryza sativa
  Clone ID: PAT_MRT4530_22446C.1
atggtgcgcatgtctgatgtaagcgggcccggcctggggaaggcgggacgttatagccccttcgccgctgccgaagaccgccggagcaccgtcgccgtcgtcaagccgaaggtcgccgccgcttcttcttcgtctccgttgctcttccgccgacgttttggtcaccgcgccgttgttcgccggcgagtttgcgccgcccgagccgccgccggtggtgacgtcatcgacgacgtcatcggggccgtctgccgtgagccgccgtag

SEQ ID NO: 16725 - DNA, 1335 bp, Oryza sativa
  unsure (1)..(1335): unsure at all n locations
  Clone ID: PAT_MRT4530_22447C.1
tttttttnnnntttttgaactactttgcttttttttttttttgaaaagtttgcagtacaacgaattgaatttgaactagtactcacgcgggcgaaggaacaaaaaatacaatagagttacagagatcatatcatagtcaaacattaattcaaagctactgcatcatatatccatgagatcgttcgatcgatcgatcgatggaaggatcgtcgtcgacgtcaatggtggtagccgttgacggcgctgcacttggccctgatctcccccttgctccccgccggcatgggcagcttgctcagcttcaccagcgcgtcgccgaagtccacgttccacagcgtcgcgttcttggcgtactccacgacgtgcccgcgcgcctccttcccggtgagcagcgcccagtccgcgtggaacgtcaccgccatggcgaggttgttgtggtagtagctgttgtccaggtagtccctcgccttcctcaccctcgccgcaaaccccggcatgaccctcgccacggcggcgccgtcctcgtcgcgcacgttgttcaccacgacgtggttgttggccggcgtcggcgacacgccgccgcacttggagacgaggaggctgcggtagcccgggttgatctgggcgtccggggcggtgaggcggccggcgaaggaggtgcagtgggtgacgccgatggagtgcgcgccggagaggatgacgagctcctccacggtgaagttcttgcggcggaagttgcggacgaggtcggtgaggtttgcggcggcgtccgggaggaacgcgtcggcgtcgcggctgcgggagaccacgccgtcgaggcggccggcagggacggggaagtcgacgccgccgtggctgaggtacctggacgcgtcgcgcgccgcgtacgcgatgatgtcggcgcacgacaccgtgttggggcaccgcgcctccagcaccgccttgatcgcgtcgatcacgtccatcccccggatcccgatgttcgccggagattccttctccggctgcctgttcatctcgctcttctccagaagcacggaggcgtcacaccccctgacgaagcagtcgtggaagaggaggcggacgaggccagcgcccttgccgcggttgtccttgatggagttgacgacgatggagttcacgatcttctccacgtccttgcacgtcttctcgtagtacccaaccttcagctcgcgatcggctccggccatcgccgccgccgccgccatgaacaccaccacaacaaagcacacaagcttcaccatctccgatgatgatgatgatgatgatgtgtgcaaccaatcaagaagaagatccgagtgtgagagatcaatc

SEQ ID NO: 16726 - DNA, 437 bp, Oryza sativa
  Clone ID: PAT_MRT4530_22448C.1
aacaaaaaacaaaaaaccgggaggaaatcattactaaacaaacacaaaaacattggcaggcaaggaaaggcaggaggaacaaggaaaaaccacaaacaaagcagttggggggtcgagaaaacaaattcaggacaaaaaaaactaccccaaaaggaacagcccaacgaaaaaaggggcataggttcaattattaaaaagggtctagggggcgaccccattaaaacaaggaacgcgacgcctttccttccttccccctcaaaacggaagcccccaccattcaaagttgacagttacggggccttgccctaaaaagaaacttccatccctgaggcttccatgccctcggaggattttgggggaaagggagctttgctcaccaacctggcacggggtttctctagaaagccctaaagggagggccccctggcaagggggaa

SEQ ID NO: 16727 - DNA, 476 bp, Oryza sativa
  Clone ID: PAT_MRT4530_22449C.1
gcacgaggtgacccaagaggccggtgcgccgcagcgtcctccatctggtaatatatagtatgtgtgtggtgtattactcctatatatgtgctagctatcagtagaccagtacccagtcgtcatgcagttacacatagcttcgattttgtgtgctagctagctagctaagtacctttgcaattttcttttcttttattacttttggcagttcatttgggctttcaattgtgattcggtgtgattaagcaaagtccacttgctgattcacttgaattattgctcgttttagaataagagcatgcaagcacgtgtttttttctaagtgacaagtggatctcatgtcagtgagacttttgcggactatatatatgtacaggggtgccatcactgtaactgtaaaccagataaaatatttagtggtggataagcaaagaggtgcagacatgcatgcatggctacacttaagccttttctcg

SEQ ID NO: 16728 - DNA, 2919 bp, Oryza sativa
  Clone ID: PAT_MRT4530_2244C.1
atgatgagtgggaacgagatcatgccggtcacattggatgatttcgaaggagaagactgcaagtccatggaggagtacatcaaggagatcacacaggaggtgttgatgagggcgtgcactaggactcgtcaaggcgtgatcatcaagcccgggccacttcctaagctcgctcccgatttggtaagcaatgacgaggataaatttgatgggtttttaaggattaaattcggccctcctatggacgattacatgttaaaggataaagcatctatcactgctaaccaacctcctatagatcaaacaaatagtggaaccgatggagcggcgcatctagccggtccgaccgggcctgatggccggtcagaccacgacatcgccgtcggtccgaccggccaaacggccggtccgaccgggtattaccacggcggtcagaccgagactcaggccagtctgaccgcgccgctggatgtcggtcagaccgggccctgggccggtcagactggtgcaattattccgatacaggggatagatccaatgactaatgctagttgtttgtatcatcttagaacatttgatcctcctgtatctactgctgcaaatagtccccatgttcctccacatgtccctaatgcttacaatgatcctaatagggggtatcctcccgatactagacaaggccaatataaccatattgcgccgcaaacacaacctattaggacaccaaatccaccaccaaatcaacataggcctgataatatggaggaaataattagtgggattattagggataaattcggtattgaaactaggaatcgtgctaaggtttatcaaaagtcgtatcctgactattatgataatgtgccgtttcctcgtaattatagagttcctgaatttaccaaatttagtgctgaggatagtaggaccacatgggagcatgtaggtcaatttttagcgcaatgtggtgacgctaatagtgatacttttaaattgcgcttgttttctttatctttgttcggtactgcttttacatggtttacttctttaccggcaaattctatttatacttgggctcaattagaatttcatgatcatttttgcactggtaaaactgagcttaggttgtctgatttaacatcggttaagcacaaatacaatgagtctgttgctgattatattgaaaggtttagagatgttaaaaaccgatgtttcaatttgaaaataactaacaaagatttggccgacattgcatatgatggattgcttgattctattaaagggaaattgaatggccagatatttcttgatattgatcatgtgttgcatgaagctctggctcaggaaagccgagtggatgacaatagcttacaagctagtttagatgaaaatgcaatatcatgtatagtcgaaccaagcaatggttcggattgtggtaataatttgtgcaatgatgccgtaacgagtatagccaaaccaaatgttgattcagattgtcttactagtttagatgataacgcaataaccaatatagccgaaccaagtgttggttcggattgtgttactagtttaaacaatgatggaatagccgaaccaagtaatggttcggattgtgttgctagcttagagaataatgccatcgaagatatagccgaactaaatgacggttcggattgtatcacaagctcaagtgaaatagcattgtcacctaagaccgaattacaaatcggtcatgtggatgttggaaaagatagtgacaatgtcttgcgggatagtagtgagacagaatccaaagtaactgtacatacatatcaaagaccgtatcctgaacacatagattcggtcccatacccgcaaggatttgaggtgcccaacttcacaaaattcacaggtgagggtgatagaacaacaatggagcatatcggccaatttattgatcaatgtggtaaggccagtaatgatgattttcttaagttaaagttgtttcctctttctttgtcaaactttgcatctacatggtatagtttacttgctcccaatacaatttctacatggtcacaaatggagcgtgagtttcatgattactttaaagatgcaagcttgatggagagaagaccggttgatgattcatcggtcacttgtgaaactatttcggttacatctatgcctaagaccggaattgttagtgatcctctccctgttagtcctattgatgttgacaaaaagaaaggaaaaagtgttattattggggatactcggcccaagaataggataaaaaatgcgaaggccgaagatcgtaaagttgcaaagggtgagtcatctagttcccaaaagaccaaaaagccgaagctcacttttgagatgcttatggctaagtacaagaaaggattagccggtcaacaagttgataatcaaactagtgattcaaaaagaccaagatcatctcgtaggaagagatttggtcaaacatcaaagcaatcggagccatcaactataccaactccatgcaaacatccgattgtgatgccatggtatccatatccaatgtcactatatggttatccttttatgtattatatgccatggatgcttcaaccacctatgccgtgtcatcaaggatggaagcaatcacctaggacggtaccaagtcattctaactcaagacaagaccgtttcccacaaaagaatcagtccggtgaatcaaaggggaagaaggtgtgggtgagaaaagaagccaaagctccggaggtcgttgctatcaaagaggagtctcaagatgttcatgtacctactggagatgcggtggaaaccacgcaagcaaaggagatcgaagccgatgccgtgactgtcaacattggtggtctaaccgagacagctggccgctctaaccgccagtctacggccggtctgaccgacggcccctaa

SEQ ID NO: 16729 - DNA, 417 bp, Oryza sativa
  Clone ID: PAT_MRT4530_22450C.1
ggccgccccttttttttttttttttttatttttttattttttttttttttttttatttttttttttttttttttattttgttttttttttttttttttgtttttttttttaattttttttctttttttcttttacaacacaggaccagacaccaccaaaggggggaatgcaaacgggaaaaaaagaaacaggtaggatagagaccaaaaaaggaccccaactttaaggccaggggggccagaacttgagcgggaggcagagagaggagaaaacaccgaccgggggaagctgtagttgcagaacaacccccccggcgctactaaagggcaaaaaaaaaaacccccgcgcgaacatcctgagctgaagggcccacatgatggggggggcgggccggaagaggaaaaaaaccggaggggg

SEQ ID NO: 16730 - DNA, 1806 bp, Oryza sativa
  Clone ID: PAT_MRT4530_22451C.1
atggaggtgggagtctcactggaagcaggtaagccggcggcggcgccgtggggcatgctctactacggcgtcccggccctgctcgtgctaggcgcgctctaccgggcggcggagaggtgctggctggggccgcggcgggtcgccggcgcgctccaggggcaggggctccgcggcaccgcgtaccggttccccgccggcgacctaccggagaacgcccggcgcagcaaggaggcgcgggctaagcccatgccgccgtgccacgacattgtcccccgggtggccccgctccttcaggacatcgtcaaggagtacgtgaacacaagttcatatatacttcagaaagtatgcgcgtgctgttatgttcagtttacgctgttcatcgagctctatctgacggcacagaacactgaactgaatgtaggcaacgtgtgcatcacctggttcggcacaacgccgagagtggtcatcgctgagccagagctagtgaaggacatcctatccaacaagtttggccacttcgagaaattcaccctcaaaagtctcgggaaattgatcgccctcgggctcgcgagctacgaaggcgagaaatgggcgaggcacaggaggatcctgaaccctgctttccatctcgaaaagctcaagcacatgttgccggctttctcgacgtgctgcagcgagatgatcgaccgttgggacagtaaactagctggctctgatggaccgttcgagctagacatctggcaggagtttcagaacctcaccggagacgtgatctcccggacggcgttcggcagcagcttcatggaagggcgaaggatcttccagctgcaggaagagcaagctgatcgaatcatcaagaccatccagtatatctacatcccaggctacttgtactttccaactgaaaacaacaggaggatgaaggagaacagccgagagatagaagggctcctgaggggcatcatcgagaagaggagccgcgccgtcgagaacggcgagctcagcggcgacgacctgctcgggctgatgctcaagtccaacatggacagcggtgagccgtccaacctgaggatgagcacggaggacgtgatcgaggagtgcaagctgttctacttcgccggcatggagaccacgtcggtgctgctcacctggacgctcgtcgtgctatccatgcaccccgaatggcagcaccgcgccagggaagaggtcttgagcgcgttcggccgcgacaaacccaacttcgacggcttgagccgactgaaaacggcaagtgcttgtcaaaacctgaacatatttcttcatccatatttgatcacaagtggtagtacacatgttaacttgctcacgatgcctagatactctgtttatcttttgcaggtgacgatgatactgcatgaggtgctcaggctgtacccgccggcggtcacgttgagccgaagaacattcaaggagattcagattgggggcatcacgtacccggctggtgtgggccttgagctgcccataatcctgattcaccacaacaccgatgtgtgggggaaggatgcccatgagtttaagccagagaggttcgcggatgggatctccaaggcgaccaagaccaatcagcaggcgttcttcccgttcggttggggcccgaggatctgcattggccagaacttcgcgatgcttgaggccaagatggcgttatgcgtgatacttcagaactttgagtttcagttgtcgccctcgtacacccatgctccttacgccagtgtcacgctacatccgcagcatggtgcacaaattatactcacaagactatga

SEQ ID NO: 16731 - DNA, 1509 bp, Oryza sativa
  Clone ID: PAT_MRT4530_22452C.1
tggatccccccccggctgcaggccggccgggggctaagctcccccgcccctgccccctgccttttcctttgccgccggccgcccatcccccacgcatccgatccccgctcgcggtcggagctagcaacgatcgagctgaccttctctcttctctatctactgatagatcgatggcgaagcggcggcggcggtggcgccggcagcggtgctgctcgtcggacccgccgctagcagtggctgctgctgcgctcctcctcctcctactcgtcgtcgtcactgcggcgccggtggtggacgccgccgctgctggccgccacgtggtccagaggcatctggacaggatcaacaagccgggcgtgcggtccatccacagcgcggacggcgacatcatcgactgcgtgcctcgccacaagcagcgcgcgctcgaccatccgctcctcgccaaccacaccgtccagacgcagccgtcccagatgccggcgtcggcgtctctccttgaccggcgccagcaattaagccggcgggcgtggcagacgtggcaccactcgggccactgccccaggggcacggtggccgtccgcaggaccgccgcctcggacgtgcagcgcgctcgctccctcgccctcttcggccgcaagaagcagatgaggagcccgctgccggcgcccgacgtcgtcaccggcaacggccatgagttaacgatgcatgcgattgggaacctacgacagcacgcgatcgcgtacacggcggcggaggtgtacggggcgcgggcaaccatcagcgtgtgggcaccggagatcgacgaggccaatggcttcagcctctcccagctctggatcctctccggctatgatagagcactgtcatcattatgattcatgtcaatatgcaagtcaggtcagccctgagctgtatggggacaacaggccgaggctcttcacctactggacaagcgacgcttacgaggcgacggggtgctacaacgctctgtgcccggggttcgtgcagacgagctcgcggatcgccatcggagcctccatctcgccggtgtcgtcggtgggagggccacagtacgacatgacgctcctggtgtggaaggaccccaagctcggcaactggtggctcagctacggcgacggcgccggcggcctcgtcggctactggcccgccgagctcttcacccacctctccgaccacgccaccatggtcgagtggggcggcgaggtcgtcaacacccacccgcccggctccgcccacaccgccacgcagatgggctccggccacttcgccgccgagggcttcggccgggccgcctacttccgcaacctcgagacggtggacgccgacaacagcctcgccgcggtacccctcgacgccatccagacaatggcggaggacgccggctgctacgacatccgcaaggcctacgacgacgacgacggccgaggcggatggggcgcacacttctactacggcggcccaggccacaatacggcctcttgcccctaa

SEQ ID NO: 16732 - DNA, 762 bp, Oryza sativa
  unsure (1)..(762): unsure at all n locations
  Clone ID: PAT_MRT4530_22453C.1
agaggtcgaccnaccccgccgcttccccacaacgaggagaggaacagcagagcaaagccccacctcctcccctcctgcgcatctcctctcctccccggaatctgctctccgccgccgccgcccggcagaggagatggacggcagcagcctcaagtcggcgcagtcctcgagcagatgcgcctccacatggccaccgacgccggcaaggacatcgccaagaaggtcggcctcgtctaccagttcaacatcgcccccaagaaaatcggagtcgacgaggagatcttcgtcgtcgacctcaagaagggcgaggtcaccaaagggccgtacgaggggaagccagatgcgaccttctccttcacggattctgatttcctctcgatcgccacggggaagatgaacccacagatcgcgttcattcgaggcgcgataaagatcaaggggagcataagcgcggcgcagaagttcaccccggatatcttccccaagccttccaaactgtagaaggttagaggtatattgtttgggcgaggttggtaataataagggttgctagttgcaatactgtgtttgatagaatggggggagaaaactggaaacaggaacaacacacgagtgcctgatgttatggctggaaatcggatatcgctatggttaatgttatcactgatatcaagttcaatccttgtttgttgtgactttcttttatatatcataatatgatccaaatgtctgttgatgttaaaaaaaaaaaaaaaaaaaaaa

SEQ ID NO: 16733 - DNA, 531 bp, Oryza sativa
  Clone ID: PAT_MRT4530_22454C.1
atggacggcagcagcctcaagtcggcgcagctcctcgagcagatgcgcctccacatggccaccgacgccggcaaggacatcgccaagaaggtcggcctcgtctaccagttcaacatcgcccccaagaaaatcggagtcgacgaggagatcttcgtcgtcgacctcaagaagggcgaggtcaccaaagggccgtacgaggggaagccagatgcgaccttctccttcacggattctgatttcctctcgatcgccacggggaagatgaacccacagatcgcgttcattcgcttttgtaggtggctgatgaattatgaaaattgtgttcagaggcgcgataaagatcaaggggagcataagcgcggcgcagaagttcaccccggatatcttccccaagccttccaaactgtagaagaatggggggagaaaactggaaacaggaacaacacacgagtgcctgatgttatggctggaaatcggatatcgctatgggttatactggttcttgagtttgatggggttatgctgggttag

SEQ ID NO: 16734 - DNA, 783 bp, Oryza sativa
  Clone ID: PAT_MRT4530_22455C.1
attataacgttatatcactactaaaattaaacatgcatgcatggaaaaaaaatctaataagttcgcccgggcagtttttcacgggttaacatgcttgttaatcccatgtcattacacatttattacccagtaaaacgtacaacggctggtccaacatgtatgtacaaacaaacaaggtaaggagcagccactagctgctgcaactaaccaatatgcatgtcacacaggtacgtaataatacaatgtgtaaaaaaagtccttcttactaagttaaactatttaaccggagtattaacattctaaaacattttcgggcttattttgttcccctgaactacttaaaaagttcagctgatggtttttttttttgaaattttgaggcgtgatagaattacaaacttaattatgtcacaactcttttttttttagttttgaactatatattgtttgcaaagattgaaaacacccaatacctaaacttcatgatattaaaaataattgcgaactacccaaattctttttcttttttgaaaaatataggttacgttgtcatctatatatgactataaaatttcaacataaaaattatatttttattaagggaaaaataatgtttgtaaactaaagagggtgaatttttaagtaatttgaaaagtagattgataaaaaaacagtttagaaagtcaatactccaacaaaatatatagttttcctagtacaatggacttttcccttgacacgtacgtctacactcaccatgcaccactagtccggacgcgtggg

SEQ ID NO: 16735 - DNA, 336 bp, Oryza sativa
  Clone ID: PAT_MRT4530_22456C.1
agcgggaaaaagaaagacgaatctacataggatcaaaattggggccatcagcaggcccccattagcataatcctaaaaaaccgcccaaaatatatggaaccaaaagaatgggccatggcataaggggatagcttactccaaaggggggcagccatattcactggtatgaagaagggggccctggttggcactcccaaccaggtcctctatgaaaaggagaaaacagcgcaatttaatgggggacttagggcatgacaagccggggggaaactcatgccgacaggtctaattttttaaaaggatactgctggccagcaactacttttagaagctggg

SEQ ID NO: 16736 - DNA, 522 bp, Oryza sativa
  Clone ID: PAT_MRT4530_22457C.1
ctagcaccgtgagctcttgcaccgctgtcgctgccgcaagtccagccgtgcgacgccgtcgctccggtcgtcatcgtcgcttgggaaggacaacgccgggttcaccaagccgtcgccgtcctcgtccacccctccgtcgtcgccgaggatcgccggaagaccgccgtcgtcgtcaagccgaccgtcgccgccgcttcttcctcgtcgccgtccgccgccgttcgtgcctcggtaaggatcgctgcatcgtccactacgcatagaggccctccgtttgcgccaccgcgccgttgttcgccggcgagcatgcgcgcccgagccgccgccggtggtgacgtcatcgccgacgtcatcgtcgtcgtttcccgtgagccgcggtagaccgattagatctcggccgtctgttttggatagggttgatcccggccgttcgtttccgtagaccgccgctgtgcacccggtccaccgtgaacccgagccactgacgcaataatccccttttccttttaaaaaattattcat

SEQ ID NO: 16737 - DNA, 300 bp, Oryza sativa
  Clone ID: PAT_MRT4530_22458C.1
atgccgatgtggaagctgcggcagcggaagaggttgccagcggcgccgatctcccgcagcgcgcgcaagacaggttggagggggccagacagaagggcgttccaaatagcatcaatctcttcctgcccctgcccagcgggatccaaatccacgagaggaaaaaacttctcatcttcctctttcaattcctttgcccaccaaggtagtgggggcaaggcttgcgatgcgggagaggcagatgcggcggcgcaagacagcttcaaaccaacgactccattgccacgcttgctgcatcgaaga

SEQ ID NO: 16738 - DNA, 178 bp, Oryza sativa
  Clone ID: PAT_MRT4530_22459C.1
atggtgaggatgaaatacttgatctacaacatttgggccatgttccagatttggaatggctgcacctacgagggaagttacatggagcaggttgatcctcttcctgcaatctcacatttgtcgaacctagcagaactttaccttcagaaagcctatgatgaatatgatatctgtgcca

SEQ ID NO: 16739 - DNA, 1065 bp, Oryza sativa
  Clone ID: PAT_MRT4530_2245C.1
atgatgagcgggaacgacatcatgccggtcacattggatgattttgaaggagaagaccgtaagtccatggaggagtacatcaaggagatcacacaggaggtgttgatgagggcgtgcactaggactcgtcaaggcgtgatcatcaagcccgggccacgtcccaagctcgctcccgacgtgaagaatcggtccgatggatcaaaggtgaaaaagtttaagaaggtgtgggtgaggaaagaagccaaagctccggaggtcgttgctgccaaagatgagtctcaagatgttcatatacctactggagatgcagtggaaaccacgcaggcaaaggagatcgaagccgacgccgtgactgccaacattgggggtctagccgagacagctagccggtctaaccgccagtctacggccggtctgaccgaccttactggtcggggtggtctgaccggcattgcacgtcggtctgaccggtggtacccgcggtctgaccggctctgcatggccggtctgaccgggcagacagggtggtctgaccagcattgcgtggccgattacaagaccttgatttttgaagatgtcatcgacgagcgtttgaagactttgagggagatgaagacacttcaagacgccgtgtggctctacagcctgggcctactcccgcacctcaagagtcgcagaagcggccggggaacctcggggtgccacgtcgtgtccctcgggccctcgcgctgcctcgtcccgaggccctcgcccaactgccatgtggaggtctgtgacaggcctgttgctggtcgcgtccaattggacgggcggccgtgccaccacgtcgcctctgtatccggcggagtggaggtagggctgtcccccgtgtcaggtggggggcggcgctgggtcccactgaagggcggaccgtggcttagcttccgggcgaaggcacggatcgcggagaagaagagcgagagtgctctccggagtttaggaacccttggcggattcgcgatctccccaagcgagccttttcccccggcaaaactcacaaaaggggatctcacgatctcccgctag

SEQ ID NO: 16740 - DNA, 563 bp, Oryza sativa
  Clone ID: PAT_MRT4530_22460C.1
atgacctatgttgtgttgaagggatatctatatgatccgatcgattgcataagacccgcggtagcaatagaacggggaaagtatacagaaaagacagttcttttcaatttcttagtagtactattctattagttagcgatcccggctctgtgagttctttcttccgtgatgaactgtcggcaccagtcctccattttttctctgtggaccgaggagaaagggggctcagcaggaagaggattgtaccatgagagaagcacagaggtcaaccctcttcaaatatggaacatggattctggcaatgcaacgtagttgggtcctcatatcgatccgaatgaatcagtctttctacagaggtcaatctttgcctattaggcaagaggatagcaagttcgaaattctgtctcggtaggacatggatttctattactataaaattcataaatgaaaatgaagtagttaatgggagggctaccattatcctttttcttgtatgtgttcctaagagaaggaatttgaccatttcatgtttcgaggtctcaaaaaagggcgtggaaacagat

SEQ ID NO: 16741 - DNA, 162 bp, Oryza sativa
  Clone ID: PAT_MRT4530_22461C.1
atgaattttctgaagctgctgctgctgctgcaatattcttgtgcgagttgtgcttggggcagtgtggagatgaggttttcacctgacggtagtacttctgcaatgcagacctgcagctcaaactgtatccccagttcgtccaaatacacagacatgatctga

SEQ ID NO: 16742 - DNA, 483 bp, Oryza sativa
  unsure (1)..(483): unsure at all n locations
  Clone ID: PAT_MRT4530_22462C.1
aattcggcacgaaggttnttnntgtcntngttctaactgtcgtctgttgggcccccccttggtgaattactgtcgttgcatgatgcatcggcaattnaaaaaaaaaaacgaagnaggttgcatcccactnatcgctctttacaccctcatttgcaatctnagcggctnagggtggnaatcttatctggcaatccaacgggcccggggtggagaggtgatgggggtctctccgggtccacgccctgggttttaagggtagttagggggttgacctttgtaggtttatggtggggtagggtccttttcttatgcgcattattattattttttttagggatttactgtttctttaattccgccaaatatttaaaaaattattatttttcaaatttaattttaaaaaaatttggtttaatattttcctggggaccagaacgaaaaaaccaaaaccaattaaatccccccggtggtccctccgccaan

SEQ ID NO: 16743 - DNA, 488 bp, Oryza sativa
  Clone ID: PAT_MRT4530_22463C.1
cccacgcgtccgcgcctctcgccgccgcgccgccgcctgcgcagcacgtcgctcccgcgttccccaacctcccacggagccgccgccgccacctcctcggcctccagctccttctccgccgccaccgccccgtcagcgtcggccaccaccaccaccaccaccaccgccgccgccgccgcctcctcctcgccggcgcgtacgcgcccggcgatgggggcgcaggacaggatgttgatagttcggagagcacctctagtacaggatctgcatatattggcctctttgttcgaatgctaggcttggacaatgatcctcgtgatagagagcacgctgtttacacaatttggcaatactcccttggcggacggaagtgcattgatgagattatgcagttccatggctgtgtcgccctcatcgtcagcctcctaagatcagattctgtccgtgcctgtgaagcagctgcaggtcttttgcgtaatataacttca

SEQ ID NO: 16744 - DNA, 471 bp, Oryza sativa
  Clone ID: PAT_MRT4530_22464C.1
ggcagaattcctccattttttactgttctgtattgaaacgactgcgtgattaccactagggctttatacacattcctcattcattccttctctctccaccaatagctgacgcaaattgtttggcaaaaagaaaaaacaactagttctccacttttatcagaaatcaccacggaaagtgccaaggcagatgggctggcaccacaaaaacaatgacaacatcgatcgatgctacaccaacatggcggtcttctctattatccttccaccgcttcgtctcttgttttcaagtatactgtgcatatgtacagattcccgtgagtatacggattttttttggacttctaatgaatatataaagttccatcacccataattacgagaagttcatggttgaaaaacatctagttccccagggcgatttctcaacttcagtttccactttttcatcattccgagccccccttaaataac

SEQ ID NO: 16745 - DNA, 2483 bp, Oryza sativa
  Clone ID: PAT_MRT4530_22465C.1
cggacttttgggcggacgcgtgggcgacttccccactaggaaacacgacggaggcggagatgatcgacggcggagagagctacagaaacatcgatgcctcctgtccaatccccccatcccattcggtagttggattgaagactaccgaataagagaagcaggcaggcagacaaacccttgaaccaaggagtcctcgctggggaaggtggggatccacgacgcagctatggcctccccgcccaccaggccgccagccacaaccagctgactaggtaggcttcgcatgcatcatcagatttcaatctcccttcgttccctgtccctaatccaataccaatagggagcaatcagctgctcctcgacggcgagggagatgtcgtcggccgcgggccaagacaacggagataccgctggggactacatcaagtggatgtgcggcgccggtggccgtgcgggcggcgccatggccaacctccagcgcggcgttggctccctcgtccgtgacattggcgacccctgcctcaacccatcccccgttaaggggagcaaaatgctcaaaccggaaaaatggcacacatgttttgataatgatggaaaggtcataggtttccgtaaagccctaaaattcattgtcttagggggtgtggatcccactattcgagctgaagtttgggaatttcttcttggctgctatgccttgagtagtacctcagagtataggaggaaactaagagctgttagaagggaaaaatatcaaattttagttagacagtgccagagcatgcacccaagcattggtacaggtgagcttgcttacgctgttggatcaaagctaatggatgtcaggactatgtcaaaagaaacccacattgcagaagaagttagcacaagtcaacaaacttcacaaaatacagctggcagtttagtagaagattcagattatggccccggtggtgcacagcagtcacaaaaaagggaaagctgtagtaaatcagctgaactagttggtttcaacgtacataatgatacctctctttatgattcttccaattttattgtgtcttctacagaagtgaataattgctcaaaagattctcaggattacaatgacatgggtgaaccaagatatgacactgagaccttcgatgattatccttctctacctgttacaaattttttctcaactgatggtgtgggcagcaatggagttgataaaaatcattgtagtttctcagttcctgaagatagattaaggcaccgtgatgaacgtatgcacagcttccaaatcaataataacatagatctcattatagagtcaaattcatgctccagtgatgtgtttagggctagcaacagtgattcagccatctttcactcagatgcatacaagcaggatagatggttagatgataatggctataacagggaagttatagattccttgaggatatctgatgcaccagaagcagattttgttgatggaaccaaatccaacagtgtggttgccagcaaagatcgagtctctgaatggctttggacactgcaccgaattgtggttgatgtggttagaacggatagtcatcttgatttctatggagaatcaagaaatatggctaggatgtcagatatacttgcagtttatgcatgggttgatccttccaccgggtattgccaaggtatgagtgatctactttcaccttttgttgttctctatgaggatgatgcagatgccttttggtgctttgagatgctactgagaaggatgcgtgaaaatttccagatggagggaccaacaggagttatgaagcagttgcaagcattgtggaagatcatggaaataactgatgtagaattatttgaacatttgtcaacaattggtgctgaaagccttcattttgctttccggatgctgctagtgctttttcgtcgagagctgtcctttgaggagtcacttagcatgtgggagatgatgtgggctgctgactttaatgaagatgtgattttacatttggaagagaattgtctggagccattgctggtagatatgaggaatgatttatcatgtgagatgttcaatgataatatgctgaagatcaatgtaaaaagatgcgtacgcatggctatcaagctgaggaagaagtatatttacaaggtatatttacaagggaatctgtacatatgcacagtatacttgaaaacaagagacgaagcggtggaaggataataaaaaagaccgccatgttggtgtagcatcgatcgatgttgtcattgtttttgtggtgccagcccatctgccttggcactttccgtggtgatttctgataaaagtggagtactagttgttttttctttttgccaaacaatttgcgtcagctattggtggagagagaaggaatgaatgaggaatgtgtataaagcactagtggtaatcacgcagtcgtttcaatacagaacagtaaaaaatggaggaattctgccccccc

SEQ ID NO: 16746 - DNA, 2404 bp, Oryza sativa
  Clone ID: PAT_MRT4530_22466C.1
cccatcgccgacatgcctaggaaggagcgcgacagcgagagcagccgccgccggcggcggcggcggcagcgcagccggtcgccgtccgactcggaggaagcctccgactccagcggctcgccgcggcggagccggagccggaaccgccgcaagagccgccggagggacaccccttcgtccagcgacgcgagcgattcccaggcgtcggactccgggtcggactccggcggccgggtccggaggaggagcggaagccggaagaagggggaggtcaccgaagagcagatcgtggagtacatggctaagaaggcgcagaagaaggcagagaaggtagcgaagaagatgaaggcgaatgctgtgtcggggtactccaatgactcgaacccctttggcgatcccaacctgaccgagaaatttgtttggcgaaagaagattgagcgtgatgtatctcaagggcaaaaggtggacatttctgttaaaggtgaaaagaagaaacagagagaaagaatggctgaaatagagaaggttaagaaaagaagggaggaaagagcgatcgaaaaggcacagcatgaggaggaaatggcattgttagccagagaaagagcacgcgctgagtttcaggattgggagaagaaagaggaagagtttcattttgatcaaagcaaagttagatctgagatcaggttacgcgaggggcgcacaaaacctattgatgttctcctgaagaatctcaatttctcagaagaatttgatgttgagttaaacgagccctacttggtattcaagggattaacggtgaaggaaatggaagagctgcgcgatgacattaagatgcatcttgatctggacagggaaagccaaataaatgtcaaatactgggaggcactcatggtggtatgtgactgggagctaggtgaggctcggaaaagagatgccttggatcgggctagggtgcgtggtgaggaaccacctcctgatgttcttgcggaagagaggggcttacatgcaagtattgagggtgatgtaaaggatcttttggagggtaagacttccacagaactagaagagatgcaaagtcaaattgagtcccaaatgcgctctggaacagcaaaagttgttgaatactgggaggccattctgaaacgccttcatatttacaaagcaaaggcttgcctgagggaaatccatgcttcgatcttacggaagcatctacatcgtctggagcatcctgattccattgagcaggataaggaatctgaggatgaaatcgatgctaaagagaaggatgcaacacatattgacgatgatgatgatgatgatgatgaagatgataagcgatattcgcctgaacctatagcggagcaaacagagagtcatttggatgaagaagacggatccttttctcctgagctaatgcatggcaatgaagatgaagatgcaattgatcctgaggaggacaaggcagaactggatcgaaaacgtgaagctgtagttatggagcatcaaaagaaagttcagcaggccatcgcagtgaagacaagagtacccgatgagatggagatgaaagcaatgaaagcaatgggagctatggaggaaggagatgctgtgtttggttcaggagctgaagtgaaccttgattcacaggtatattggtggcacgacaagtatcgaccaagaaaaccgaagtacttcaatcgggtgcatactggatatgagtggaacaaatacaaccagactcactatgaccacgacaaccccccaccgaaaatcgtccagggctacaagttcaatatattttaccctgacctggtggataaatcaaaggcgccaacatacacgatagagaaagacgggagcaccggtgagacatgcctcataagattccatgcgggccctccatatgaggatatagctttccgtattgtcaacaaggagtgggaatactcacataagaagggcttcaagtgcacattcgaacgtgggattctccacctctatttcaacttcaagcgctaccgctacaggcgataaaatgccacgcaaggaagacgttttgatctccattgtgctgttagaagttggtcttgcttttcttacctgagagccctatgcaaataggtttgctcggataccaactctggagtcgactacacatgctcatccgagatcatatgtactaagtgagaacagggtagcatactagcatcccgtacttatgctgattaggctctttgttagcggtttgaaaatagcaacgaagtctcctgtgtacattgtaacttccttttttctgctttggaaattgagttcagatgtcaaaaatcaacacatctttttggtgccaaatcaaactaatagcgcgtatatcattaaacttcttgtttctggaaaaaaaaaaaaaaaa

SEQ ID NO: 16747 - DNA, 129 bp, Oryza sativa
  Clone ID: PAT_MRT4530_22467C.1
atgggcctagaggttttaggaaaggaaaaggtccaggagatgcgggcggcagtggcgcacgcgtcagacttcccggcgctgccgctagccctcgtatgggacgtgctccgcgccaacatcttcgactag

SEQ ID NO: 16748 - DNA, 1830 bp, Oryza sativa
  Clone ID: PAT_MRT4530_22468C.1
atggagacggagttgcacctcgccgccggctactgcgccgccacgggcgtctaccggagcggccaccctccgcagttcgccgccgccgccgcgctctccttcccggagtacatcctcccgcacatgctcctccccggccgccgagcccgcccggccttcgtcgacgcctccaccggcgccgcgctctccttcgccggcctccgcgcgctctcgctccgcgtcgcgcgcgcgctcgccgccgccggcctccgccgcggccgcgtcgcgctcctcctgtcgccgaactcgctccacttccccgcgctctcgctcgccgtgctctccctaggcgccgtgctctccgccgccaacccgctcctcacgcccgacgagctcgctcggcaagccgacgacgcgaagcctttcctcgcgctcgtcaccggcgaactcgcccccaagctccgctccatcgcgcccgacgtcaaacttgtcctcgtcgagcagctcctcgccgacgtcgccgcagaggtcgacgacgacgagacattggatctgccggcggcgaacattggccgcgacgacgcggcgctgctgttctactcgtcggggacgacggggaggagcaagggcgtggtgagcacgcacggcaacgcgatcgccatggccgcgtcgctggagcgcgcgtggggtggcggcggcggcggcggcgagaagccgcagcagtacgacgaccacgacgaggcgtacggctgcgtgctgcccatgttccacatgttcggcttctcgtcgttcgtgatggggacggcggcgctgggcgccacggcggtggtggtccccggcaggttctcggtggagaagacgatggcggcggtggaggagtacggggtgacgaggcttctggtcgtgccgccgatggtcgtgaagatggtcgcggcggcggccggcgacggcgagccgtcgcggcgtcgtctccggctgcggcaggtggtgtcgtccggcgcgccgttgcagcgcgagcacatggcgcgcttccgcagctgcttcccggcggtcaacctcggccagtgctacgggctaacggagacgacgggcattgtcaccatgtgcgatctgcagcacaacgacaacggcatcgacaaggtggaaatgccaccgtcatcgacggatatgacgttcgtcgctgttgcagcgacgacgacggaggtgaaggagagaagcaccggcggcggcggcggcggcggtggcgtctcgattgggcggctcatgccggatgtggaggccaagatcgtggacccggactccggcgagctcctcccgccccgccgcaccggcgagctctgggtccgaggcccctccaccatgcgaggctacctgaacaacgaggaggcgaccgccctggccctggtcgccgccgccggctctgtctccgtctccggcggcggcgagcggtggctgcggaccggtgacctgtgctacgtggactcgcgtgggctggtgtacgtggtagacagggtgaaggagctgatcaagtgcaacgcctaccaggtggctccggccgagctggaggacgtcttggccacccaccctgacatccacgacgcagccgtcgcgccgtatcccgacaaggaggccggcgagatcccgatggcatatgtggtcaagaaacaaggcagcggccatcttcaggaagatgaagtcatttcctttgtacagaacaaggtggcgccatacaagaagatcaggaaagtggtgttcgttgactccattccaaggtctccttcaggcaaaatcctcaggcgccagctgaaaaacttgctacaggggtctatcctgcatcgaagcaggatgtaa

SEQ ID NO: 16749 - DNA, 285 bp, Oryza sativa
  Clone ID: PAT_MRT4530_22469C.1
ccgacacgagggctatccgcaggacacgcaattgagagaagccgagcgaacgactcttgtatccatatatcgcggtcgagttgtcgatccatactctttcctggtactactcattcataaatggtactgtgtgagatgaggcctatgacgaccaatgaacgatggcggatctggacattaacatggcttatgactatcagcactctggggacgtcaatgctgaacactttggtgctggtggctgatcaaaggaacacgttgattggcacatggaggatgaagctg

SEQ ID NO: 16750 - DNA, 1305 bp, Oryza sativa
  Clone ID: PAT_MRT4530_2246C.1
gaattcggcacgaggaggcctccgtcgccgccgactcaccgctgcgccgcccgcgaaggccgaagcggcggagggggcctcgccggagcgctgctcaggaggatggcgcgcgccgccggcctgcgggctctggtcggcattgaggcggcggggcgtgggcgccgcgtcgccgcctccccctcccccggcggtactccagcggcctcccgcgggctccccggctggccggggttctgcggggtgggctgcggctcctcgtcgtcgtcgtcgtttgctccgccgcggatgcaggcccggcgggccgcggggtcggctgcgcgcacgcggtcgccgtcgcagtccaacggctggattaccggcggctccgcgagtgaggatggtagacttagctggggttattcaagtttcaaggggaggaggccttctatggaggatcggtttagcataaagatgactacgatcaacgaacagacagtcagcctatttggtgtatttgatggtcatggaggatcacttgctgctgaatatcttaaggaacatttgtttgaaaaccttgtgaatcaccctgagctccttagagacacaaagcttgctataagccaaacgttcctgaaaactgatgctgatttcctagagtcagtgtcttctaatccttttagggatgatggttcaacagctgtgactgctattttggttggcaaccacctatatgttggtaatgttggtgattcacgtgttgtcgctctaaaagctggcaaagctgtcccactgtcagaagatcataaacctaacagaaaagatgagcagaagagaattgaggatgccggaggtattgttgttttcgatgatacatggagggttaatggacttttggcaatgtcccgtgcatttggcaaccgtgcattgaagcactatgtgaaagcagaaccagatattcaggaaaaagtggtcgatgaaagcttggaatacctgattcttgctactgatggcctttgggatgttatgcgaaatgaggaagctgtttctcttttgaaagcgcaagatggacccaaagcagcagccatgaagctgacagaagtcgcccactctcggcttaccttagacaacatcacatgcatcgtgctgcagtttcaccatggaaaatcaaccaacagcaactgatgttaacaaagttttgtcaccagatatcttgaaacgagagttggtcccctgatccgcggttctacaagattattactagattggttgagtcgtttttttcgtcatgtaggaagcttttaaatctgacgtgcacagtttactagc

SEQ ID NO: 16751 - DNA, 371 bp, Oryza sativa
  Clone ID: PAT_MRT4530_22470C.1
gaaaataaaacttaataagcctgcatatctcgggagtacaaagctaggactgcttcatgcctagtggaaaaaaagggcaataacaggatcagagtccaacgaatgtatttctccagggttggtaccgttacacatgaatttactacagagaaaaaccccacaactgcctacatgtatgcctagtcgaaaactttataccgtgcatgagaaaatatccacaatataatacacaaatgtcttcattgataaggacaaactcaaacataaaaatcggcatgcattatataacttaaatagcatggacaaatgtataaccacaaagaggtaccatcaaatatcatgctatgagcatacattataatagagtcaca

SEQ ID NO: 16752 - DNA, 361 bp, Oryza sativa
  unsure (1)..(361): unsure at all n locations
  Clone ID: PAT_MRT4530_22471C.1
cctcttttttttttttttttttttntttttttttttttttcgtgttctttattttttttatgtgtttcttagcttaaatcatccttgataatcaaagtgactctattagattcttttnttttggggggnnnnnnnntttttnntnnnnnnnnntnttttttttttggtacccgtagaccgatttcgtgtcgtccgatcttctgtaccgagttgcagatccatatttagctgtctaacagctcattctgagtctggaaagccttccagagttccagttgtagaggctgtacagtcacagaaaaaaaaagcaggattattttttttcttgctttatcgaccgttgcaaattacgtgctcgatg

SEQ ID NO: 16753 - DNA, 447 bp, Oryza sativa
  Clone ID: PAT_MRT4530_22472C.1
gcacgagggttatatccgtgctacggagtacatccgatcgcctgtttcttgctcgttttttcgtggttctgaactttgtatggtttctgcgagcagtggagtaacaggaaaccttcatctgcgcgagcctcgccgcctccaatgttcatggacaccggcaaccccaactggggatggagctgggcggagcgatggatggcggcggcgagggcgtgggagagccagaccacgccggcgaacagcggccgtgcagccgcggcggtgaaaggcggcggcagcgggaggcgggtgcccatgtcggtgcagatacccacgtcgacgccggcgttggccaggttcacccgcccgccgagctgcccgtcgccgtcgacacccacgccgcggtcgccgtggaggacgtcggcggtgccgccgtcgagcccgggcgccagcccgttcccggaggtc

SEQ ID NO: 16754 - DNA, 3413 bp, Oryza sativa
  Clone ID: PAT_MRT4530_22473C.1
cggaacgaggcgaacggcggcggcgtgccctttccggcggcgcgcggggggcgcgatgctacagatgctcggcctccgcgggagccccagcgcgggggatgcgggcggcgacgcccccctcaggaacggcggcgagggtgggggtggaccggggcggccgctgcggctggtgttctgcgacgagaaggggaagttcgtgatggacccggaggcggtggcggcgctgcagctcgtcaagggccccgtcggcgtcgtttccgtctgcggccgcgcgcgccagggcaagagcttcgtgcttaaccagcttctaggccgaagcagtggttttcaagttgcgccaacacatcgtccttgtaccaagggactttggatgtggagtgcacctttgaagagaactggtcttgatgggactgaatacaaccttgtattgttggatactgaaggaattgatgcttatgaccaaacgggcacttacagtattcaaatattttctttagctgttctattatcaagtatgttcatatacaaccagatgggaggcatagatgaagctgcacttgatcgcctttcactggtgacagaaatgaccaaacatatacgtgtcagggcctcaggtggaaggtccactgcatctgaactagggcacttttcacctgtctttgtttggttgctgagggacttttacttggatttgacagaagacaacagaaaaattactccaagagattacctcgaactggctttgaggcctgtacaaggtggaggaagggatgtatcttctaagaatgcgatacgggagtccatccgtgcactttttccggatcgagaatgcattacacttgtgcgacctgtgaataatgagaaagatcttcagcgccttgatcaacttccgttgaataacttccgtccagagtttagatctggtctggatgctttgacaaaatttgtctttgaccgaacaaggcctaaacaacttggagctagcaccctgacaggccctgtcctttctggactgacacaatcatttctcgatgcgatcaatactggtgcagtacctacgatatcttcgtcatggcagagtgtggaggaagcagaatgtcgaagggcatatgattctgcaattgatacctacaattcttcttttgaccggagaaaaccagcagaagaggatgccatgagagaagcacatgaagatgcattgaaaaaggctgttagtgtcttcaatgcttctgctgttggtgccgggttagctcgttcaaaatttgagaagcttcttcaaacttctctcaagaaggcctttgaggactacaaaaggaatacttttctagaggctgatttgcaatgttcgaatagaattcagagcatggagtcaaagatacggacagcatgcaaccgtcctgatgcaaagttggatgacatagtcaggctcattgatggcctacttacagagtatgagtcaaaatcttatggtccagggaaatggaaaaaactagctacatttttacagcagtgtttggcgggccccgtgctttatcttttcagaagacagatagagcatatagatgcagaaagaaattccctaagattgaaatgcagttcaaatgatgataagttggcactacttaggaagcagctcgaagcaagtgaggggcatagggctgagtacctaaggcgctatgaggaatctatcaatgataaacagaaaatttcaagggattactccggacgtattgctgaacttcagaccaagagtagcaagttggaggaacgatgtgtgagcttgtcttctgctcttgacaatgcaaaacgggaatctgttgattggaagaacaaatacgaccacaatctgttacagcaaaaggcagatgaaagtaagttaaagtctcaaattgcttctctggaatccagggtaaatatcagtgagggcagattatctgctgtgcgagaacaggctgagtctgctcaagaagaggcatcggagtggaaacggaaatatgaagttgctgtaagtgaggcaaaaacagctctgcaaagagcagctgtagcacaagaacgcactaataagaaagtgcaagaaagggaagacgctttaagggcagaacttgctagccaactgtctgagaaggaagaggagatcgcaagattaaacacaaaaattaaccaaaccgaaattcatgccacaaatttgatctcaaggcttgaggctactgaagcaaagttgaagaaccatgagtcagattcgctggctttgaaagaagagatcagatcactgactgttagcttggagtcttttagaactgaagctcagtcacgtgagaaggaagtgaagatcttggaacaagaaaaaaaccatcttcaggagaagtatctaacagagtgcaagaggtttgatgaggcagacagccggtgcaaggaagctgaaagggaggctaaacgagcaacggaattggctgacgtagctcgtgcagaagctgttgcttcccagaaggataagggtgaagcgcagaggctagcaatggagagacttgcgttaatagaaagaatggagagacaggttgaaggtctggagagagagaagaataagatgctggaagaaattgagcgagttggtcagtctgagaaggatgctgtatgtaaggtttcatcgcttgaacaaagggttgacgagcgggaaaaggaaattgatgagatgatgcaacggagcaaccagcaaaggtccagtacagttcaagttcttgagagtctactggagacagaacgagaagcctgcgctgaggccaataggagagctgaggctctgtcactgcagttgcaggcaactcaaagcaagttagatatgctccaacaagagctgacatctgttcggttcaatgaaaccgcactggacagcaagcttaaggcctcacatgcaaggcgcctgaggggtgaagctactgagtctgtccatgatatggatatcgacgatgacaacactggcaggcgaaggaaacgatcaaaaagcacgacgagcccgtttaagagcaatcacaccgaggacggtggctctgtatttgtaggagaagacactaacaacgggagccagcaagcgcaggagacggagactgaagactacaccaagttcactgtgctgaagctgaagcaggagctcactaagcatgggtttggtgctcaactcctgcaactgaagaatcccaacaagaaggacatcgtcgccttatatgagaagcacgtagttggcaagtagcggttttctatttatgcgtgctagattttccctgttgcgatgaacgttgttgtcacggttgaggtgagagcgcgaaataactaatgtaacttagcctgaaactccagtttgtgttattgttaacttggtgcagtttattttgcatgcatcattggcaagtgtttgtagt

SEQ ID NO: 16755 - DNA, 1181 bp, Oryza sativa
  Clone ID: PAT_MRT4530_22474C.1
cccgggctgaggaatccgaggggacggccaaccaaaaccctcctcctctcatcatcgcccaaaaccccccaagaaaccagaaagaaacctctcctgctcctctctctctcttttcaccggcagagggagaggaagtggagagacagagaggaagaagcagagggaagaaaagaaaaggaaggagtttgctgcagctgtgaggagtagaggaggggggaagggtataaaggtttttgattggaatgcagcagcaacacctgatgcagatgaaccagggcatgatggggggatatgcttcccctaccaccgtcaccactgatctcattcagcagtatctggatgagaacaagcagctgatcctggccatccttgacaaccagaacaatgggaaggtggaagagtgcgctcggaaccaagctaagctccagcacaatctcatgtacctcgccgccatcgccgacagccagccgccgcagacggccgccatgtcccagtatccgtcgaacctgatgatgcagtccggggcgaggtacatgccgcagcagtcggcgcagatgatggcgccgcagtcgctgatggcggcgaggtcgtcgatgatgtacgcgcagccggcgctgtcgccgctccagcagcagcagcagcagcaggcggcggcggcgcacgggcagctgggcatgggctcgggaggcaccaccacgctgtccgtcaacgtccggggcgacaactccggcgcccacagcggcgacggggagtacctcaagggcaccgaggaggaaggcagctaggtggtttaacttagctatagctaagctaggcagctaggtagcccatgaggagggtagcaccgtggtagtagcagtagtagctaggagacggcggcaatggcggtgacggtgacggcgatgtcggtggcggtggtggctaaggtttaggtttggtaggtcgatccatggaacctgtgtggtggtggtggcctaatgcatgttgcatttggtatcatgcagaagtctcacttgttttggaaaacggattggcaggttcgtctaattaagatgtgttattagtaagggaatatatgtgtgtgttgctgcactgcaatggatgggttggttggtttgcgaaatctccccgtgctgctgaatgcgatctctttggggcccaaaaaaaaaaaaaaccacaaa

SEQ ID NO: 16756 - DNA, 789 bp, Oryza sativa
  Clone ID: PAT_MRT4530_22475C.1
cagcaacacctgatgcagatgaaccagggcatgatggggggatatgcttcccctaccaccgtcaccactgatctcattcagcagaaggacataccatacaagatctggtccttgttcatgttggtgagaaactgggaatgtaggttggcttgtgctgtactagaatgccacagattcaaccttgaaactgtgcagtatctggatgagaacaagcagctgatcctggccatccttgacaaccagaacaatgggaaggtggaagagtgcgctcggaaccaagctaagctccagcacaatctcatgtacctcgccgccatcgccgacagccagccgccgcagacggccgccatgtcccagtatccgtcgaacctgatgatgcagtccggggcgaggtacatgccgcagcagtcggcgcagatgatggcgccgcagtcgctgatggcggcgaggtcttcgatgatgtacgcgcagccggcgctgtcgccgctccagcagcagcagcagcagcaggcggcggcggcgcacgggcagctgggcatgggctcggggggcaccaccagcgggttcagcatcctccacggcgaggccagcatgggcggcggcggcggcggcggtggcgccggtaacagcatgatgaacgccggcgtgttctccgacttcggacgcggcggcggcggcggcggcaaggaggggtccacctcgctgtccgtcgacgtccggggcgccaactccggcgcccagagcggcgacggggagtacctcaagggcaccgaggaggaaggcagctag

SEQ ID NO: 16757 - DNA, 559 bp, Oryza sativa
  Clone ID: PAT_MRT4530_22476C.1
ccggccgggaacataaacgtaactccttcttaccactccgaagggcccagtacgatgatattcgtgcatggaagaagtcatctctacctcgaagaaaggcggttaccctgctgcaaagaatgccttcgttcccataatctggtgatcatgcggacgatctaagagagaaccccaccaccgcctctatggccactggctcccaccttgcctcgacgatcttcacaagaacgagatccccaagaactcatcagacagaccctgaataatccccttgacgactggttcatcaaggtcggcaacttcacccacctcttggccacccgctacaacttcaaccctcacctctgggatggcgccgagctttcctacccgctcgctgacaactgaaataaagtcgcctgatatgagtcacgaaagtctccactaggatcctgctgcagaacacgtaagaatcaacgtgactacccctacgtccaatgatgagatctctgctgaggtggcctccaactccatgatatgcctgtgaaggacgctgatcatcatcctctctcacgtgatc

SEQ ID NO: 16758 - DNA, 320 bp, Oryza sativa
  Clone ID: PAT_MRT4530_22477C.1
ggctgaatggcgggaatgcgcatgctcaaagggaggcaagcccgaaagcctgcaaagaacaaccaggggagaagagcacaggtggcctggcagctgccccgcagatgggcaaacagacaagactgacccaaggatgtgatgcgaatgggagtgccgaaagcgagacttgcagagtgaatgtgaattggagaactagtgatgcggcgtagagtgaatgaaacaccacaagtgatgacaccttgggtggtggattgctgatgtgcgatgatgcacgactaaatgaaagggttgacaaatgttgcttgaaaaaaaaaaaaaaa

SEQ ID NO: 16759 - DNA, 1216 bp, Oryza sativa
  Clone ID: PAT_MRT4530_22478C.1
ttacaacggacgttcgatacgacgcaaaaaaatcggacataccaccgagtggaggcgtcaaccactcattcttctctctttctatcccctcaataccgtagcactgtatctcactcgtgtcttcccccttcttcgccggacgcacgcctcccctcctcctcctcctcctccacatccggccatcgccgcctcccatcatcctcctcctctagccgccgcacctcccccctccccctctccttcggccgacgccgccttccctcctcctcctcctccggacgccgcgccacccctcctcctactccggctgccactcctccgccgacgtccgcaacgccaccaccgacctccaaaacaagggagggccatgaaatccaggtcaccttgtgcaccgccgcttgcccgccgctcgtctcctacgtgtgcgtccactctcccaccctcaaccctaaaaccaattacttcgccatggagccccagatcatcgccgcacacgatgacctcctcctcatccgccgaagaatcctccgggaggatggcccttgctggccatcacctcgtccatccacaccctcccgccgtctccgtctccgtctccgtcgcgcgccttcaccatgaactgcgccccgccgccgccgccgccggcgaaccaccagtcgtgcacgtcccacatcacctccaccaccgcgccgtccccgagcaccgccgtcctgttcccccggaagttccacttcacccgccgcgcctccaccaccttcttcccgtcgatgctcaccgccacctccccgtcccgagtcccccactcctccccgcggcacaccaccgccacctcgtgctccgccccgtcagcccggaacctgcaccgcgtgctgtgcgccaccgccgccgccgccatcgccgccggggaagccggcgccgcgcggagctgctcccgccggcttagcaacgcgcgccgcggcgcagcggcgaagcggcgtgcgagctcccgcgccgcctcgcccccgcccaggaggaccgcgagctccccctccttgcgcgaagacaaggcggccttgtagacggtcgccgtggccgcctgcagcgagcggtcgagcgcggcgcccgccccggccgcggcagctgaggccgcgaggctgacggcgccgtcgccgaagcaggagaagtctcgcattgctgccagctcgacggcgacagcgagctcaattcggagagatcg

SEQ ID NO: 16760 - DNA, 1062 bp, Oryza sativa
  Clone ID: PAT_MRT4530_22479C.1
atgcgagacttctcctgcttcggcgacggcgccgtcagcctcgcggcctcagctgccgcggccggggcgggcgccgcgctcgaccgctcgctgcaggcggccacggcgaccgtctacaaggccgccttgtcttcgcgcaaggagatcctcgtcagggtcatgtggaccaggaccgtcgccggtgccgcgcccggcggtgctactggcctcgccgtcgccgtcgacgaggcctcccggtcgtccccctcgcccgctgctggttcagcttcagcagcgacgcctcgccggtcggccgtcgcgctggcgagctcgccgcagttcctgcacaagaagcgcgggacccggtcgttcgtcaccgaggccggcacggtggtggccatctactgggacaccacggacgccaagcaccccgccgccgggtcgtcgtccccggagccgacgcgcgactactacctcgccgtcgtcgccgacggggagatagaggaggagatggaggaggaggaggtggagcaaagaaagaggtgcaggttccgggctgacggggcggagcacgaggtggcggtggtgtgccgcggggaggagtgggggactcgggacggggaggtggcggtgagcatcgacgggaagaaggtggtggaggcgcggcgggtgaagtggaacttccgggggaacaggacggcggtgctcggggacggcgcggtggtggaggtgatgtgggacgtgcacgactggtggttcgccggcggcggcggcggcggggcgcagttcatggtgaaggcgcgcgacggagacggagacggagacggcgggagggtgtggatggacgaggcggcctccattgctgatgatatcccgccgtctctcacgcgcatcacccatcccggccctatgatcaccttcactaaccacgaggtctccatcctgcactacatccctgaacctcaggacattaacgaacccctcatcagcaacaaacaacgctacatcgtcaccgcgctttctgtcaacaggtttaggccaccaggggaatacgagctccacctctacaactcccacacctag

SEQ ID NO: 16761 - DNA, 5214 bp, Oryza sativa
  Clone ID: PAT_MRT4530_2247C.1
atggaggttgcattcatgcctggcaagatgtacaagcgtttaattctatgccaactcatattccttggccacgaccttgcatccttcaccattgctgaggagcagttcatctactctggcttcagtcaagccaacctaagccttgatggcacagctacaataacaccagaagggctccttcagctgaccaatggcacctttaacctcaaaggtcatgcactctacccagctcctctgcaatttcgtaggcatcccactggtgacgtgcaatctttttcgctcaccttcatcttcagcatcctctctgctattcctgacaaaggtgcagatggcatggccttctttatctccacaaacaagagtttctccaacgcgctgccagcccagtatttagggatcctcaatgaccagaacaacggcaacacaagcaaccatatattcgcagttgagcttgacaccatccaaaacagtgagttccaggacatcagtgacaaccatgttggcatcaacattaatagtctccactctgtgcaatcccgggatgctggcttctatgatgacaaaaatggtgtgttcaagaacttgacgcttgttagccgtgacgtgatgcaagtgtgggttgagtatgatgcaggatccacacagattgatgtaaccttggctcccatcaaagtggctaaacctacactgccactagtctcagccatctacaatctttcaacagtgctcccaggtacagcatacattggcttctcatcagccactggggtgatcaactcaagatattatgtgcttggctggagcttcagcatgggtggaactgcttctgggattgacataaggaagctaccaaagttacctcatgttggaccaaggcctcgctcaaaggttttgaagatcattatgccagccactattgcagcatccatctttgttgcaggggctctcttagttcttcttgtgcggaggaaattgacatataccgagctacgggaagattgggagacagagtttgggccaaataggttctcatacaaggatttgttccttgctacagaaggatttaagaacaagaacctacttggtacaggaggatttggaaaggtgtataaaggcatacttccaacgaacaaattggaggttgcagttaaaaggttgtcacatgaatcaaggcaaggaacaaaggagttcatcactgagattgttagcattggccgccttcgacaccgaaaccttgttcagctacttggctactgcaggcgaaaaggtgaacttcttttggtctatgactacatgccaaatggcagtcttgacaagtacctatattctgaagacaaactgtcgctagattggaataagaggttccatatcatcaaaggagttgcatcttgcttgctctacctccatgaggagtgtgaaagtgttgtcatccaccgagatatcaaggccagcaatgtgctacttgatagtgaattgaatggacggttaggagattttggtcttgcaaagtcatacgatcatggttctgacccacagaccacacgtgtggtaggtaccatgggttacctagccccggaattggtacgaacagccaccgttcctccggcggcggccgccgccgacgagggcgtcgccatcgggcatagcaccggcggcagccggcaggctctgctgccgccggccggcgaagcagataaggcggcggcgcggtggaatcggcttgctcgccggcgcgttgaagctggttttttggtgaaacatgaagccatcatgctccttcacgtgaagctcatctgcctcctcctccttgccggagctagcctcgccgcgtgcaccgccggcgacggcaacgacgacgaccaccagttcgtttactcaggcttcaccggcagcaacctcaccctcgacggagccgccgtgatcacgcgcaccggccttctcgagctcaccaatggcacgctccgccagaaagcccacgccatccatccggccccgttccgcctccgcggcggctcgtcgtcgtcgtcgacggcgacggcgacggcgacggcgacggcgacggcgacacggtccttctcggcgtccttcgtgttcgccatcctatgccccgacgccgacgcctgcggccacggcatcgtcttcttcgtcgcaccggccaaccacagcttctccggcgcgttccccagccagtacatcggcctcttcaacggcagcagcgacggcgacgccgggaaccacctcgtcggcgtcgagctcgacaccgaccagaacaacgagttccgtgatatcgacggcaaccacatcggcgtcgacatcaacagcctcacctccattaactcaaccagcgccggctactacgacgacaacgacggcggcaactccggcgaccatggcttccacaacctgacgctggcgagccacggcgaggccatgcaagtgtgggtcgattacaacggcacggccaagcagatcaccgtcgccatggctcccctcaagatggccaagccttccaagccattgttgtcttctacctacgacctctccacggtgttcgtcgccgacgagccctacatggtgggcttctcgtcggcgacgggttctttcaactccagacactacgttctcggttggagcttcgccatggatggacctgctccggccatcgacatcgacaagctgcccaagctgcctcgcttcgcccccaagcacaagcccaagatggtagagataattccgccattggcgacggctacattcatcgtcgcattgggaaccgtctctgttcttctgatacggagacggatgaggtacaccgagttgcgggaagattgggaggttgagtttggaccgcatcggttctcctacaaggacttgttccgcgccacggatggattcaagagcatgaatctggttggtgtcggaggatttgggagagtatacaagggagtgcttcaatcatctaaattggagattgctgtcaagagggtatcacatgattcgaagcaaggcatgaaagagttcattgcggaggttgttagcataggtcgactacagcatcgtaatcttgttcagttacttggttattgcaggcgaaaaggtgaacttcttttggtgtatgagtatatggcgaatggaagtcttgataaacacttgtacagtgaaggtgataagcgggttttagattgggatcaaagacttcaaatcatcaaaggaattgcatctggtttgctctaccttcacgaggagtgggagaaagtgatcgtccaccgggatattaaaacaagcaatgtcctcctcgacagcgagatgaatagtcgattaggtgactttggcttggcaaggctttatgaccgtggtgcagacccactgaccactcatgtggttggtaccataggatacctagcgccagaactaggccgtagcagcaaggccactcctttgactgatatatttgcttttggcatatttattctcgaggttacttgtgggcgaagaccaatcatgcaagttccagagggcgaacaacatgtgttggttgactgggtgctcgagcattggcacaaaggatcaataactgagatagtggatacaaagctccatggaaactataatgtagatgagaggaacaattggcaaaaacaagtgcaccgtaccgcgcctttcatgaagattgcactctcctttcttctccatatcctgctgttccatggctttaatcttgtgctggccgtcagtgccagcgatgaccagttcgtcttctctggcttctccggtgccaacgtcaccctcgatggcacggccacggtcacagcaggcggcctccttgagctgaccaacggcacgacccagctcaaaggccatgccttcttcccagctcccttgagcttccgcgggtcactcaacggcacggtgcaatccttctcagcctcctttgtgtttgccatcctcacatcttaccccaacctgagctgccatggcatcgccttcgttgttgcgccgagcaacaatctatccacagcactggcagcacagtacatgggactcaccaacatcgacaacaatggcaacgcgagcaaccacatttttgctgcagagattgacaccatgcagaatgttgagttccaggacatcaacaacaaccatatcggtgttgacatcaatggcctccactcggtggaatcacactatgcaggctactacgacaagaatggaagcttccataacatgaatcttatcagcggcgatgttatgcaggcatgggtggattatgatggagatatcgctcaaattaacatcaccattggtccaattgatatgtctaaaccaggaaggtcactcatctctaccacatacaacctctcagatgttctcatggagccatcattcatcggattctcctctgcgacaggcccaatcaactctcggcactacattcttggttggagcttcggcatgaacaagcctgctccaaacattgatattgccaagttgccaaagctacctcgccttgccccaaagcctcaatccaaggtcttgagatatgctgaactgcgtgaagattgggaggatgagtttggaccgcatcggttcgcatacaaggatttactccatgctactgatggattcagtgacaagcatattcttggagcgggagggtttggcagagtatacaaaggaattctcccaaaatcaaaattggaggttgctgtgaagagggtgtcccatgaatcaaggcaaggaatgaaagagtttgttgctgaggtagctagtattggcaggattcgacaccgcaacctcgtgcaactacttggttattgccggagaaagggtgagctccttttggtatatgactacatgtcaaatggcagtcttgacagatatttgcattatgaagggaacaagccggtcttggattgggttcagaagttccaaattatcaaagatgttgcatctggtttactctaccttcatgagaagtgggataaagttgtcattcaccgggatatcaaagcaagcaatgtactactcgataaagaaatgaatgcacgactcggcgattttggcctagcaaggctgtatgaccatggcactgatgcacacacaacgcatatggttggcaccatgggttaccttgcaccagagctaattcacacagggaaggcatcaactcttacagatgtttttgcatttggcacattccttctcgagatgtaa

SEQ ID NO: 16762 - DNA, 1176 bp, Oryza sativa
  Clone ID: PAT_MRT4530_22480C.1
atgcgagacttctcctgcttcggcgacggcgccgtcagcctcgcggcctcagctgccgcggccggggcgggcgccgcgctcgaccgctcgctgcaggcggccacggcgaccgtctacaaggccgccttgtcttcgcgcaaggagatcctcgtcagggtcatgtggaccaggaccgtcgccggtgccgcgcccggcggtgctactggcctcgccgtcgccgtcgacgaggcctcccggtcgtccccctcgcccgctgctggttcagcttcagcagcgacgcctcgccggtcggccgtcgcgctggcgagctcgccgcagttcctgcacaagaagcgcgggacccggtcgttcgtcaccgaggccggcacggtggtggccatctactgggacaccacggacgccaagtaccccgccgccgggtcgtcgtccccggagccgacgcgcgactactacctcgccgtcgtcgccgacggggagctcgcggtcctcctgggcgggggcgaggcggcgcgggagctcgcacgccgcttcgccgctgcgccgcggcgcgcgttgctaagccggcgggagcagctccgcgcggcgccggcttccccggcggcgatggcggcggcggcggtggcgcacagcacgcggtgcaggttccgggctgacggggcggagcacgaggtggcggtggtgtgccgcggggaggagtgggggactcgggacggggaggtggcggtgagcatcgacgggaagaaggtggtggaggcgcggcgggtgaagtggaacttccgggggaacaggacggcggtgctcggggacggcgcggtggtggaggtgatgtgggacgtgcacgactggtggttcgccggcggcggcggcggcggggcgcagttcatggtgaaggcgcgcgacggagacggagacggagacggcgggagggtgtggatggacgaggcggcctccattgctgatgatatcccgccgtctctcacgcgcatcacccatcccggccctatgatcaccttcactaaccacgaggtctccatcctgcactacatccctgaacctcaggacattaacgaacccctcatcagcaacaaacaacgctacatcgtcaccgcgctttctgtcaacaggtttaggccaccaggggaatacgagctccacctctacaactcccacacctag

SEQ ID NO: 16763 - DNA, 268 bp, Oryza sativa
  Clone ID: PAT_MRT4530_22481C.1
tttttttttttttttttttttactgtagcataatattgtcaaatcatggcgtttttttgcttaaaaaaaaacaccaggcaacaggcatgcttatttgaataaaaagacattttcccgcatatagaaggccttcttcttttgttcaatcatttaacgggtacttggaacaactcccttgggctatctcttgaaaacagggaccttaataatcgcaaataccttggctggcccaaaatggcctgttttggacatggattaccgttggtac

SEQ ID NO: 16764 - DNA, 178 bp, Oryza sativa
  Clone ID: PAT_MRT4530_22482C.1
catgcgcgctgtcaccagagagattatcgagacaatgccaactttcactagacacagagtgaagaggggcctgtacagatcaactaacaacctcttgtgcagcctagataagccatacacaacagagtgtttcgtcatgccctgggcgctctccaagatggagcatgatactctgacc

SEQ ID NO: 16765 - DNA, 359 bp, Oryza sativa
  Clone ID: PAT_MRT4530_22483C.1
atggcgaggcaggcagagcgcggcggcggccgcttgccgttcctctcgcaccaccaccacccacaccacccagcgcctggcatcgagacgtcatcagcggccggcattgagacgtcggcggcggccgagcggcggcggcccgcgggcggcgtcgggcgggagaagcagtgggaggacgaggggaacagcggcgggcgggagaagcagtgggaggatgaggggaacggcggcgggcggaagaagcatgctggggcggcgactttctactttgactttggaaatggtgatagctatggccgcgtgggccggtggcggctccgttattttggttctcaaaaaagggttgcggaagttaccaa

SEQ ID NO: 16766 - DNA, 135 bp, Oryza sativa
  Clone ID: PAT_MRT4530_22484C.1
atggcgcgggttgccgctgtctccgtgcttcgcgctccgccgtcagcgcgcaccaccatgctcgccgacgccctcgtgcccctcgatgggattcactggatgcgacggtgccccgccggattcaagcatcgatga

SEQ ID NO: 16767 - DNA, 282 bp, Oryza sativa
  unsure (1)..(282): unsure at all n locations
  Clone ID: PAT_MRT4530_22485C.1
agaagtaggtagtgcttattaaaactagcgtttgatgtctgaanaaaaggggtgtaanctgctgatccattaggggggcnaaccnaatcctgatcagtgatcnctaactagtacgtcgtagaaaaggggactattacacgaaagggaattagaatttttcgggaanaaaanccgtgtaacccgaattgacggacnagcagagacctgatgcctggtatatgaacatgttgccnataatctgaataaaatagtggtgattgcgtggaaaaaaaaaaaaaaaaa

SEQ ID NO: 16768 - DNA, 780 bp, Oryza sativa
  Clone ID: PAT_MRT4530_22486C.1
atggccgagatggagaagacaagtgccgcccggtcatggaggcggccgaggcggcgcagcatggcatggcgcacggcggtgcggggaaggcagtggacggcgcggtcggcgcgcacggcggtgcggccgacggtgggcgagggcggtcggcgcggaacggcgcggataggcgggcagcggcggagaggcggcgcaacagctggccgacctggaggcgcagcggcggcgcaacgccgagaggccgacgagaaggttcgcgctctggagcgtgtagtccgactgcctgggcttaaacacgaggtagacgacgggggcgaaggccgtgagcgcgacgatgagcaagacgagcatgaggaggagccaggagcagacgcggacgcaggagcagcgggcgtggcgcctggcgcgcgcggcgggatctcggcggagataaccacggcgctgctgttcctccatcagaccaagccggagtcgctcccactcgtctactccggcgacgagtctaccgcccatccccatttgtccccgcctctccgccgcctcctgcctgtccgtgccgttccgcgccgatcgcccgcgcccaccgtcggccgcaccgccctccgctgccttccccgcaccgccatgcgccatgccatgctgcgccgcctcagccgcctccatggccgggcggcacttgtcttctccatctcggccatcgccagcgccgccgcctccgcgtgccacgcctcctccagctgccgctcatccccgtcgtccacgcttgtcaacttggagtaa

SEQ ID NO: 16769 - DNA, 239 bp, Oryza sativa
  unsure (1)..(239): unsure at all n locations
  Clone ID: PAT_MRT4530_22487C.1
gcgtcttcgtactcgcctctntccgcgccctcctccgccgccgctcgncgccgttcgtctccgccgccaccgccgccgncatgagggagtgcatctngatccacatcgggcaggccggtatccaggtngggaacgcgtgctgggagctctattgcctcgagcatggnatccagcctnatggacagatgcccggtgacangancgttgggggaggtgatgatgcttttaacacctnactt

SEQ ID NO: 16770 - DNA, 702 bp, Oryza sativa
  Clone ID: PAT_MRT4530_22488C.1
atggaggcggagcaagcgcctcagctggcggtgctaaggactggggcagcggcgcgagtagactggggaggaaggaggcgaggagcaggtgggggaacggcgggggccagcgccggcgctggagccagggccgctgcggaggggcgccgctgccaaagagagaggcagagaaaggcagcgatcgattcgatctggtctctggtcaaagagataagagagaagggtattttgatcaaatccaatgaatcacaaattcaaaaaaaaaatggcaacaaagaggatggcgccgccggcctcccggccaccgtcctcgcgagctcggccggccggccgccacgcccgcccgcctggccggccgccacgcccacccgcccggccaaccgccgcgccaggtcgcacggcggcggcctgcccgcccgcccgcttgccgcacccagacggccggccgccgccgctcccgtcgggcgccgctgctcccgcccggccgtcgcaaccactcgctcggccgccgctcaaagaggagaaggggaggaacgggaggggaaaggggagaggaaggggatggagggggagaggaagggatggaggagtaatgagaggggaggagatcgagaggagtgcgcgataatatctgagttggtggcgcgttcggggtactctttactcccggttggtataaacaacgggactaaagatcatctt

SEQ ID NO: 16771 - DNA, 252 bp, Oryza sativa
  Clone ID: PAT_MRT4530_22489C.1
atgcagttcgaggacgggggagatgttcatgttggtgccggtgagggtgaagatggtggcagggtcacagtggatgagcttaccagatgtctacgttgtggcatcagtgcaaatgcgacgcctcatatgcgccgtggaccagagggacggagaactttatgcaatgcttgtggtatagcatgggcaaagggaaaagtgcgaaaagttattgattctgatacccccatggataatgccatgtttgcacaaatg

SEQ ID NO: 16772 - DNA, 2859 bp, Oryza sativa
  Clone ID: PAT_MRT4530_2248C.1
atgacgaagccatcatccaaaacggaggtggagccatctaatgtgatgccagtcacattggatgacttcgaaggagaagatcgtaaagctatggaggagtacatcaacgagctcacacgggaggcgttgatgagagccactactaggactcgtcaaggcgtgatcatcaagcccgggccgcgtcccaagctagctcccgacgtggtaagcaatgacgaggtatcacaatctatccaacaacaaattgcatctacaatagattcatctatggctaattttaaagatagattagatgtaatgtttaaggataagattgatggatttttaaggagtaggctagattcttttatggatgattacacattaaaggataaagcctataccactgttgatcaatctcctatagatccaatgggtagtaaaaccgacgggacggcgttcacggtcggtccgaccgggcctgacggccggtcagaccgcaatatagccgtcggtccgaccaaccaaacggccggtcagaccgggtattaccccagaggtcagaccggccctcaggccggtccgaccgcgcataatgacaccggtcagaccgggccctcggccggtcagaccggcgcaattgtcccaatacagggtatagatccaatgactaatgctagttatttgtaccactttagaacatttgatcctcctgtatctactgctacaagtaatcctcaagttcccccacatattcctaatgcttataatgatgtttctaggggatatcctcccgatactaggcaaggccaatataatcatattgcgccgcaaacgcaacctattaggccaccaaacccaccaccaaatccacaagggcctaatagcatggaggatatgattagtgatattatgaggaatagattcaggattgaaactaggaatcgtgctagagcttataaaaagccatatcctgattattatgataatgtgccgtttcctcgaaattatagagttcccgaatttgccaagtttagtggtgaggatgttaggcataaatacaatgaatctgttgctgattatattaaaaggtttatagatgttaaaaaccgatgtttcaatttgaaaataactgacaaagatttggccaacattgcatatgatggattgcttgattctattaaagagaaattgaatggccagatatttcttgatattgatcatgtgttgcatgaagctctggctcaggaaagccgagtgaatgataatagcttgcaagctagtttagatgaaaatgcaatatcatgtatagccgaaccaagcaatggttcggattgtggtaataatttgtgcaatgatgctgtaacgagtatagctgaaccaaatgttgattcggattgtcttactagtttggacgataacgcaataaccaatatagccgaaccaagtgttggttcggattgtgttactagtttagacaatgatggaatagccgaaccaagtaatggttcggattgtgttgctagcttagagaataatgccatcgaagatatagccgaactaaatgacggttcggattgtatcacaagctcaagtgaaatagctttgtcacctaagaccgaattacaaatcggtcatgtggatgttggaaaagatagtgacaatgtcttgcgggatagtagtgagatagaatccaaagtagctgtacatacatatcaaagaccgtatcctgaacacatagattcggtcccatacccacaaggatttgaggtgctcaacttcacaaaattcataggagaggatgctagaacaacaatggagcataacggccaatttattgatcaatgtggtaaggccggtaatgatgatttgcttaagttaaagttgtttcctctttctttgtcaaactttgcatctacatggtatagtttacttgctcctaattcaatttctacatggtcacaaatggagcatgagtttcatggttatttcaaagatgcaagcttaatggagcaaagaccgattgatacttcatcggtcacttgtgaaactatttcggttacatctatggctaagatcgaaattgttagtgatcctctccctattaattctattgatgttgacaaaaagaaagggacaagtgttattattggggatcctcggcccaagaataggatcaaaaatgcgaaggccgaagatcgtaaagttgcaaaggatgagtcatctagttcccaaaagaccaaaaaactgaagctcacttttgagatgcttatggctaagtacaagaaaggattagctggtcaacgagttgataatcaaactagtgattcaaaaagaccaagatcatctcgtaggaagagatttggtcaaacatcaaagcaatcggagccatcaaccataccaactccatacaaacctccggttgtgatgccatggtatctatattcaatgtcactatatggttatccttttatgtattatatgccatggatgcctcaaccacctatgccgtattatcaaggatggaaggaatcacctaggacagtgctaaatcattcgtctaacccaaggcaggaccgtttcccacaaaagaatcggtccggtggatcaaaggtgaaaaaagtgaaaaaggtgaagaaggtgtgggtgaggaaagaagccaacgctccggaggtcattgctatgaaagaggagtctcaagatgtttatgtacctactggagatgcggtggaaaccacgcaagcaaaggagatcgaagacgacaccgtgactgtcaacattggtggtctaaccgggacagctggccggtctaaccgccagtctacgcgcagtcttaccgaccttactggccggtctgaccgggcccaaaggctggcctga

SEQ ID NO: 16773 - DNA, 961 bp, Oryza sativa
  Clone ID: PAT_MRT4530_22490C.1
atggccgacgacagcagcaacctggtcttgtccgacgcggccggccgtgttctttggaggactaatgtcaccgccggcggcgtgaactcgtcgggtgccgtggcggtgctcgtgaactccggcaacctcgtgctacggttgcccgacgacaccgccctgtggcagacgttcgagcaccccagcgacgtgttcatggccggcatgaagctcggcatcgactaccggtcgcactccggcatgcggatcgtctcctggaagggcgccggcgacccgtcgccggggagcttctcgttcggcgtcgacccggagaggccgctgcaggcgaagatctggaatgggtcgcgcgtgcactggcgcagctcgatgtggacgggttacatggtggacagcaactaccagaagggcggctcgtcggcgatctacaccgccgtcgtctacaccgacgacgagatctacgcctccttcaccctctccgccggagcgccgccgatgcactacctcatgtcctactccggcgacctccacctgcagagctggagcaacgtgtcgtcggcgtgggtcaccaacgccaggttccctcgccgcgactgcagcctcttcggctactgcggcgcgttcggctactgcggcaacagcaccggcggcggcggcggcgccgggcggcgtctcgacgtgccactgcctcgaagggaggcggcgcgctgcggcgacgggttcgcggagttcccggacatgaagctgcccgacgggtacgcgctcgtcgggaacatgaacgccggcgagtgcgcggcggcgtgccgccgcaactgctcctgcgtggcgtacgcctacgccgacctgagcaggagcacgaggagagatccgaccaggtgtttgatgtggggcggcgagctgctcgacatggagaaggtgaacgagagctggggtgacttaggcgagacgctgtacctccgaatggcag

SEQ ID NO: 16774 - DNA, 342 bp, Oryza sativa
  Clone ID: PAT_MRT4530_22491C.1
atggcggcgccctccgctctgccagatctggcaggaggggaggtggtgtcggtggcgcgacggtggaaggggatgcggcggcggcgggtcggctgcatgaggcgaggcggtggggccctcccctcctccagatctagcgggaggggagatggcggcagcggcggcaatggcggtggtgtcgcggcggcggcgatggtggttgtgtcgcggcagcggcgccctcctctccatccgacgatggcggcggcagtggagacgggaagtagcatatcgtccttgacggcgcgacaagctccatctcgattccttgaggacgtggccctcgacatcggtgctgaataa

SEQ ID NO: 16775 - DNA, 2685 bp, Oryza sativa
  Clone ID: PAT_MRT4530_22492C.1
atggaatatgcaggttgcacttgcactcaagctgccactgccatctttctcttcttgctttctttgccgttggctgcttccgatgaccggcttgccgtcggcaagacgctctcccctggcgccaccctcgtctccgatggcggcgccttcgccatgggcttcttctcgccgtccaactcatctggactgtaccttggcatatggtacaacaatgtccccaagctcaccgtggtgtgggtcgccgaccagctcgcccccatcaccgaccacccttcttcttccaagctcgccatggccgacgacagcagcaacctggtcttgtccgacgcggccggccgtgttctttggaggactaatgtcaccgccggcggcgtgaactcgtcgggtgccgtggcggtgctcgtgaactccggcaacctcgtgctacggttgcccgacgacaccgccctgtggcagacgttcgagcaccccagcgacgtgttcatggccggcatgaagctcggcatcgactaccggtcgcactccggcatgcggatcgtctcctggaagggcgccggcgacccgtcgccggggagcttctcgttcggcgtcgacccggagaggccgctgcaggcgaagatctggaatgggtcgcgcgtgcactggcgcagctcgatgtggacgggttacatggtggacagcaactaccagaagggcggctcgtcggcgatctacaccgccgtcgtctacaccgacgacgagatctacgcctccttcaccctctccgccggagcgccgccgatgcactacctcatgtcctactccggcgacctccacctgcagagctggagcaacgtgtcgtcggcgtgggtcaccaacgccaggttccctcgccgcgactgcagcctcttcggctactgcggcgcgttcggctactgcggcaacagcaccggcggcggcggcggcgccggcggcggcgtctcgacgtgccactgcctcgaagggttcgagccggcgagcggcgccgactggagccgcggcgacttctcgctggggtgtcgccggaaggaggcggcgcgctgcggcgacgggttcgcggagttcccggacatgaagctgcccgacgggtacgcgctcgtcgggaacatgaacgccggcgagtgcgcggcggcgtgccgccgcaactgctcctgcgtggcgtacgcctacgccgacctgagcaggagcacgaggagagatccgaccaggtgtttgatgtggggcggcgagctgctcgacatggagaaggtgaacgagagctggggtgacttaggcgagacgctgtacctccgaatggcaggtgcaggtagggggtcaaaaagaagtgcagtgaaatttgcacttccaatagtgttggcaagtattcttatacccacatgcatcctcatatgtgttcccaagttcaaagaagaaatgatcgtcaaacatgatgggaagaacaacaagaagcgagccttgagagtattgagtgtctctgatgaatttgggaaagaaatccctgcccaagatcttgattttccgtttgtagaatataacgagattgccactgcaacagaaaatttttctgacgcagctatgaatggaaaaggaggttttggcaaagtatataagggagtgataggtggtcgtgaagttgctatcaaaagacttagcaggtgttctgaacaaggagtagtggaattcagaaatgaggtgctcctaattgccaaattacagcacagaaaccttgttcgacttgtcggttgcagcatcgaaggagatgagaagttgctgatttatgagtttatggccaataagagcttagatgcttctcttttcaatagtgaaagaaaatcatcattgaactggtccacacggttcaagattataaaaggggttgcccggggcctgctttacctccatcaagattcaagattaacagtaatccatagagatctcaaggcaagcaacattttgctggatgcagaaatgaacccaaagatatcagattttggcatggcaaggatctttggggacaaccagcaaaatggaattactaggagagtcgtcggaacatatggctacatggctcctgaatatgctatgggaggtatcttttctatgaagtccgatgtctatagctttggtgtgctgcttttggagatcgtaagcggttctaggataagctctactgatttcattgaggacttcccaaatctttcaatatatgcgtggaacctatggaatgaagggaaggcaaaaaacatgattgacccatctattgtggcaagttgcctattagatgagcctatctccaaagccttgatgatgtcgtcgaagtgtgccaattctaggatgatgaagaagaaaagatgtatccccttctcaatgaactggaccttggagccttcacaaactgttcttcggctcttcattgattcggagatgttgatgatgatgatgatgatgacaatggaccttcacaaactgttcttcggtcctttgactgatgatgagacattgatgttgatgaaggcccttcacaaactgttcttcggaccttcactgagtgatgatgatcatgttgacaagctccgacatggagatgatgaagtgacaatgaaggccagctccgacggggaactggtgatgattaaagccaactctgacagcgagttggtgatgtag

SEQ ID NO: 16776 - DNA, 618 bp, Oryza sativa
  Clone ID: PAT_MRT4530_22493C.1
tcttttatttccttgaagacttacattaatagaagcataccttcatcatctccatgttctcaatgtaaagagactaaacaagataggttggtcaaaggagggtggacaagggaagaggatgaagttcttaggcaaatggtgagacaccatggagatcgcaagtgggcagagattgcaaagagcctcccaggtcgggttgggaagcagtgccgcgagagatggaccaaccatctgcacccggacatcaagaaagacatctggacagaagaagaggacaggatgctgatcgaagcacaccaaacttatgggaacagctggtcggcgattgccaagcagcttcctggacggtcggagaacaccataaaaaaccattggaatgcgaccaagcgaagcctgaactcaaagcggcgactgagaaagaaaaacagcgagcaaactgtgccagggcagccttccctccttgaaagttacatccgtagctgccagcacatgcttcccacgtcaagaaccactggaacccaaccaagcgaagcctaaactcaaagcagcgactaaggaagaaaaacagcgagaaagcagcgccggggcagccttcccaccttgaagagtgcatctgta

SEQ ID NO: 16777 - DNA, 1183 bp, Oryza sativa
  Clone ID: PAT_MRT4530_22494C.1
tctttttttttttttttttttaataaaatgttttttttttttttttttattccaatttttttcatttgtattacatatataaccataccttacagattctacattaacatcaagaataaattttaaaaactatacaccagaaatctgaaattagtagccactgaaatacaaaaagtaccaaacgtatttttctcataattcctgtaaaaaaacctggaccgcttttaattacaagaaatgttccagtttcgacttttcaggattctagtgaatattgcgagtaattaggccctcaaagatggtgtataggtccttgttatctggaccaaatatttcgtcagccttccttagtgtatcctctctggtctgtttgtgtgagttcaactcctttacattggctagaaatgcactgaactgctcataagacaaacggtttctgacttgacggaagaactcttttccatcaactcgtgttcgtcctgtgtgacttcctgcatcaaatggagatgtcactgaactatgaccagaataggccgaggacctgtcatcaaacaaattccttgatgtaattgaaattgaatgccgccttggaggtgatattgacgcgaaactccttggaggtgagtctgggggagtaacccttggtgtactgttgtacgatggcaaaaatacatgtggacggggtggcctgggtacatctggctcaacatgactactttcctctgagacttccaacagatgttgcagaggagaaatttgaagtttcgctgacccttgccttaggagtagtgttagcaggatcttcatcttcctggagtgactgcataagcgtcttcttgaacacttccaacttctcctcctcggcgcggcggaggcgtccggtggccaccgcgagcgcggcgtcgagctgctcgacgcgctcgctgaggtcctccgccgcggcgtcgcgctcggcgagctgcgcgcggagccgcgcgccctcggcctcgagccgcccgaggcgcgacgccagcgcgatggaggtgatcttccgcgccacgtccagctgctcgaacgggtcctccggcagcaccgccatcacctccgcggtcagcccgaactccgccgccgccaccatcgccgccggcgctggtgccgccgtcacctcctcctcctcctcctcctccaccacttccccctccat

SEQ ID NO: 16778 - DNA, 434 bp, Oryza sativa
  Clone ID: PAT_MRT4530_22495C.1
cgtcaggaggctgaacagagatgttgccaagttggaagtgttcaagaagacgcttatgcagtcactccaggaagatgaagatcctgctaacactactcctaaggcaagggtcagcgaaacttcaaatttctcctctgcaacatctgttggagatgaagattctgcatttccagtttccaaatcgtcacaattatcagaaaccgcaagttcagtctcagaggaaagtagtcatgttgagccagatgtacccaggccaccccgtccacatgtatttttgccatcgtacaacagtacaccaagggttactcccccagactcacctccaaggagtttcgcgtcaatatcacctccaaggcggcattcaatttcaattacatcaaggaatttgtttgatgacaggtcctcggcctattctggtcatagttcagtgacat

SEQ ID NO: 16779 - DNA, 452 bp, Oryza sativa
  Clone ID: PAT_MRT4530_22496C.1
tttttttttttttttgtttaatttcacactgaaactcagcagccaaatgtgtttaattccacaccgatataagattgggccagtagcatgtgtcggcaaacattttaattgcatttacaaactcgcagcttgagctgtataataatcccaggagggaatgtgcctaacaactaatgacagtatttatcacccccagctcacaaaagttgccaaaatgatcctgtgagtcatctgaaggccgtcaggtttttatttctgacttctgagtcggaaccgattctgtactttctgtatgcgtaatgctgcactatctatccaactttgtaaattacagccactttctgatggcatgttgttaccatgttatcaatagcaaacccaagggaagtggaaactggaaaaagaattgacattcatacagcttggaacagcaggagggttagatagtgagt

SEQ ID NO: 16780 - DNA, 1725 bp, Oryza sativa
  Clone ID: PAT_MRT4530_22497C.1
atggcgttgaacgcgttcgcccagcccgtcaccaactacctcatcaaacgttacaacatgaagccgaatgccgcaacaaacgtggccaacgtcttcagtggcacctacagcttctcgccggtggtcggagccttcgtcgccgatgcgttctgcggcaggttctggaccctcttgttcggagccgtcgccgcctttgttgcaatggtggtcatcacgctatcggcgacgatccgtcagctcaagccaccgtcgtgcagcgacgtggcacggcaagccggcacgtgcgcggggccgtcgggcctccaccgcgccgtgctctacatcggcatggcgctgctcgtcgtggccacgggcggcgcgaacccgaccagcctgccgttcggcgcggaccagttcgaccacgacgacgcgagcagcggcagcagcagcaacgaagccgacgagcgacgacggcgcgccgaggagcccgcggggctcaagcgcttctacaactggtactacgtggtcaccatgatggcctcgttcatggcgctcaccttcatcgcgtacatccaggacaaggtgagctggggcctcggcttcggcatccccacggcgctcgtggccgccaccttcgccgtgttcctcgccggcacgccgctgtacgtccgcgtgccggccgagggcagcatcttctcgagcgtcgcgcgggtggtcgtcgcgtcgtgccggaagcggaggctcacgctgcctcacccgcgcgacgcgcggcagcaggaggccgttctgtacaatcctcccgtcgtcgtcgcagctggaacgggaaccagccgcgtcttcaagctcccactcacgttgcagctgagctttctgaacaaggcggccattgtaaccgccgacgccgacgagatacggccggacggatctccggcgaggccgtggagcctgtgcagcgtgcagcaggtggaggaggtgaagtgcctcgtcaagatcgtccccgtgtggatctccggcgtgatgtggttcatctcggtggcggagctgaccaactacacgttcctgcaggccctgaccatggacctccacatgggcaggagcttcaccatcccgcccgtgtcgatcgccgccatattcaacctcgccatcgtgctcttcgtgccggtctacgatctgctcgtcgcccgcgcagcgcagcgcgtcaccggggtggagggcggcatcacggtgctgcagaggcagggcgtcggcgtggcgatcagcggcctggcgctcgtggtcgcggccgtcgtcgagcgcaggcgccgggcctccgccttggacaacggcgggacgtcgccgatgtcggtgttcgtgctcgcgccgcagctcgccgtgatgggcgtctcggcggcgttcaacatgatcgggcagatggagttctacaacacggagttcccggaccagatgcgcacgctcgccaacgcggcgttctactgcgcgcagggggcgagcagctacctggccacggcggttgtgaacgtcgtgaacgcgaggacgaggcggcgcggcggcgggcagggctgggtcgccgaggacatcaacgccgggaagctggaccacttctactacgccatggccgtgttcgcggcgatcaacttcgtctacttcctcgtctgctcctacttctaccgctacaagggcgagccagaggtggcggccgaggactcgccaccggccactccagaggccgtcctcctgaagcactag

SEQ ID NO: 16781 - DNA, 403 bp, Oryza sativa
  Clone ID: PAT_MRT4530_22498C.1
ataaggtttttaagatcctcccaaaatgatttggaatataaattaaaaccaaacttcttctatttacttgagagtgcttaccgtgtgcaatttctgggatcagcaacaaacttctccttcaaaatcatatggtcctcagatgcacaacccaagcaacattttcacggttggttgattcttcgccagaaagcactcacagcagaaaacctcctaatcaggcattggccatgctattggatttgctccttatgcgaaagcgcttttaaagacactgataacctgttttgggattgccccttcacaaggcaagtttggaattccgcatcagcatacttgggtttttcaaacgcttccactaaacaattgataccagaatggctcacttacctttactcgtcgataa

SEQ ID NO: 16782 - DNA, 166 bp, Oryza sativa
  Clone ID: PAT_MRT4530_22499C.1
cttttttagccccaccttcggcggtgtttgtggtaagtgactgacttctcgtcataccatatgatgctttaaacctgtagatttcccttctgttcacttagactttgactacacagtgtcgtccacacatccataattgttatttctctccagatatatgcattac

SEQ ID NO: 16783 - DNA, 282 bp, Oryza sativa
  unsure (1)..(282): unsure at all n locations
  Clone ID: PAT_MRT4530_2249C.1
ccatcctctgcgaggccgtagtgcgaggcgggacgggagaggagggcgtcggcagccggcgactggcgacgcgacggcggtgatggcggctactngcgacgnggcggcggtggggnaggagctgcgggcggncggccggggaggnacggcgcgcgggctcacccgccggcagccgnccacgaggcggcagcgaggggaggagctgcagacgggctncggggaagggntngcgcgcgngccggtagagaagcagcgtgcgggcggcccggaggaggatctggc

SEQ ID NO: 16784 - DNA, 300 bp, Oryza sativa
  Clone ID: PAT_MRT4530_224C.1
atggaggacaacgcgacttttgctgctaggcagctaagcaaactaggagcctctccacattcccttgagatgaaggtatcggcatatagttttcatcgttatcacaccaatcaaactcttcgtcactatggaatggcggcggcgcatggcctggggaaggagccggggcgcggcagcggcgcggatcgggcaagaagccgagtgcagagtgggaaaggtggcgacacggccgggaaggaggagggcaatgcgtgcgcgaccacgggaggaagtggtggcgcggcccgaggaggaggaggc

SEQ ID NO: 16785 - DNA, 332 bp, Oryza sativa
  unsure (1)..(332): unsure at all n locations
  Clone ID: PAT_MRT4530_22500C.1
cccgggtcgcccagctttcgatctgtcagtggagcagggcgggcagactcctccaccctccactattcactgaagctgaggcantgcaaaacccaaacggagaatagcttggctaagattttgtatcaaatttgaatgcttattgtggcacgcaagggaagaggaccggaaaggaaataggaaggtggggaagcaaaaaaaaaaaaaaaaaaaaaaaaaaaaaaaaaaaaaaaaaaaaaaaaaaaaaaaaaaaaaaaaaaaaaaaaaaaaaaaaaaaaaaaaaaaaaaaaagggnagaaaggtttagaggatccaaaattaaaaaaccactt

SEQ ID NO: 16786 - DNA, 418 bp, Oryza sativa
  Clone ID: PAT_MRT4530_22501C.1
tgttttttttttgtgaatggtagttagagtgctagattaagttaggcattgctatgacaagaatcctgtacaaacttaaacaagaatcgatgagaaaaacacaagaatttgcatattggcacatcgatcggcaacatcgcagtgtgccttcagtgacgcaaaaacatatacttcagactactgaccgcctgatggcacgcagcgacgcgaaaacccgagtgcttgacaacatctcgagatgtcaaatgtatggctcttgagatgctagacatgatcttgccaacccggtcgcgcaccctcacccgcaccgcccgcttcttgaccggcccgtcgtcggcgccggcgccggccaacgcagggcgccccgccgaccgggcgaagacggcggcggagcgctcctcgttgttctctatccatg

SEQ ID NO: 16787 - DNA, 554 bp, Oryza sativa
  Clone ID: PAT_MRT4530_22502C.1
gtctaatatgatcccgggctgaggatcggacgaggaggaaagcgcgccgtacgtcagcggaggcgagaaaaatgggcgcgctctgcctgctcccgtccacgccgccgtgctgctcttgcggcgcggccggcggcggcgggtcgccctcgcggacgcccaggctcgcgaggaccgcagcgcctttcgcctcctcctcctcctcctcctctggcgccgcttcttccggtggaggtttgcagctcgcgtgcaggcggcggcggcaagggggacgggggcgcgagcggaggggcggagttcttcggggaggacggcgtggtggaggacatggacgggtacctcaactacctgtcgctcgagtacgactccgtctgggacaccaagccttcttggtgtcagccttggacaatcttactttcaggggctgttgcaattgccgagaacgaagtagaactaaccatctgaattgtcaggcatacaccgaaatgatagctgagaggaggcggaaggttgccagtggtgctgaagatacctacgggatggagaagagccagtga

SEQ ID NO: 16788 - DNA, 455 bp, Oryza sativa
  Clone ID: PAT_MRT4530_22503C.1
tgtcgacgtgcagtaaatgaaatacgtcatcttgttctcggttgttctggcagcagtgggtgtatggtttcagctccaaacaaacaataaacaccctagtgaatatttgaaagaagattttagtactcctcctccatggtttctcttgaaagcagtgcagttggtggactctatcaccaagaaattctcaattgttcctcctctattccaggtgttagatgatgtcctcattttcgaaaaatcccaactggtgcacacaagtgccattttggctatcccagatttgattggtgatcaagtgttatccaatattgatctggctgatcgtttagctccggctagtgctgacaagaagaaggtacaaatgaacttgtgcagattcttgagagccctcgccgcttatggttactttgaagaggtttcctcggatcgttctagatttgactattgtgatt

SEQ ID NO: 16789 - DNA, 783 bp, Oryza sativa
  Clone ID: PAT_MRT4530_22504C.1
atgcctgatatccagttagggtgccacactataaggtcccatggaaccagtgtggcaagactccacatgtatgactggataatacttctctttcttgctgttgttgatgggctgctaaacataattgagccttttcaccgctttgttggacgtgacatgatgacagacttgagatatccactaaagggcaacacaattccattttgggccgttccaaagtttgataatgtcactacaaatgtcatatgccatggagaaaagagtgttatcaaggaaggccacaagagctttccaagtgggcattcttcatggtcttttgctggtctaggttttcttgcgtggtacttggctggtaaacttaaggcttttgatcgcaaaggccacattgcaaagttatgcatagtatttctgcctctacttgttgcgtcccttgtggcagtctctcgagttgatgattactggcatcactggcaagacgtatttgcaggtggcattataggtcttacggtttcttcgttttgttatctgcagttcttcccatatccatttgatgctgatgctgtatggccccatgcatacttccaacagctagctgacacacaaagcaacggcattgcaaactcatacaacatgggaccaacagacattgagattgctgacgaaggccatggtgccatttccctgagagacaccagtcctattttagacacgatggagtctggtgatcgtctcatcattgagagttccttgcaactcggtgctggccgttatatgctgacttaa

SEQ ID NO: 16790 - DNA, 377 bp, Oryza sativa
  Clone ID: PAT_MRT4530_22505C.1
gtcgtttgcgtgcataccggctagacactgatgcctgggcatattgaatgcgcgagcgtgtgatttaaactggtatatatatgcatcttttcgacggggatgctggagaaccggtgtcacgagctgagcatcctagagcggagcaggaacgagcatagctagaggatcccctgtgtgacggccccatgccccgcggcgggtggtgggctggtaggggactggcacgggaacggaccggcttcaccgtcgcttccagggccacaggccaccaagacggcgggccggccgagctcttctcctttaagtggaccaccctgctcatgctgatcgccacgctgctcatgctcatcagaagtctctcagtcacacggatagtt

SEQ ID NO: 16791 - DNA, 874 bp, Oryza sativa
  Clone ID: PAT_MRT4530_22506C.1
agtgatgccagtaatcatcaactcgagagactgccacaaggggcgcaacaagtagaggcagaaatactatgcataactttgcaatgtggctttgcgatcaaaagccttaagtttaccagccaagtgccacgcaagaaaacctagaccagcaaaagaccatgaagaatgcccacttggaaagctcttgtggccttccttgataacactcttttctccatggcatatgacatttgtagtgacattatcaaacttaggtattccatcagggaaacaacgccaaaagaaatctgggcgaggacgaccaacaccatccttaattgcatcagtaatcacagcagttataagtaccgaatatagaatccccagtatgccatggtgtaaatcatagacatttttctttttgaagtaaattccaccaaagacaacccagggcagcacaattgcaataagtggaacggcccaaaatggaattgtgttgccctttagtggatatctcaagtctgtcatcatgtcacgtccaacaaagcggtgaaaaggctcaattatgtttagcagcccatcaacaacagcaagaaagagaagtattatccagtcatacatgtggagtcttgccacactggttccatgggaccttatagtgtggcaccctaactggatatcaggcatttttccagcttcaccggtcccttggtcgatatgactaacaacgagccctacagatcggcgcctcctcctcgtgctcttcctagataatcccggagtgccgcgcgcgaggtcacattaccgcggcggcggcgctggagacgcgggggagtgtggggaggggagtggagtggaggcgctggccggagagtgacggggacaccccggccgg

SEQ ID NO: 16792 - DNA, 570 bp, Oryza sativa
  Clone ID: PAT_MRT4530_22507C.1
gtgattcttaacacctttcatcttgtctcttctctttgttttgttttcgttggcgtaataacagataataagtaaatatagtgataacaataataatttacgctgggatgtggcattcaatgcgtgcttaagcaagaacttcgatagcccagtctgctccctttctaacttgctcgttagaggagttgcgaagttgttgtaaggcttcaactgctccagctgccttgaattccttctttctcttggagctcttgcgcgcgagagcccagatggctccttcggcgaggtattgcaaaactttgttctctgagtgcaggcagttaaccagtggttgaattgcgccagcagcaccgatagcatcttggtttttaggattctctctagcgagttccataagcgcaccgactgcgtgaatacgcacgttgtcactctcagaggcaatgcagtcggtcaagagcttgatgcagtttccttcacggagatcgttttgaatcttagtgcaacccttcaccagagaacgaacggctgcggcagcttgttccttgacgggatcgctagatgacttgaaga

SEQ ID NO: 16793 - DNA, 157 bp, Oryza sativa
  Clone ID: PAT_MRT4530_22508C.1
cgggctgcaggctaattcacagaacatgttttgttggcacctcatgctcatttaagcttatctagtgctattcttttatgctatctttttccactgatatttaagttgatgctgtacaggtttcagtaattggttacataccttactttgggaagcc

SEQ ID NO: 16794 - DNA, 192 bp, Oryza sativa
  Clone ID: PAT_MRT4530_22509C.1
atggctggtaagttttcaagatattttgtcctcttcatgctcaatcaggcgcaaattctgaactgcgttccagacttcgatgaagaacattcagttatgcaaaaaagagatttaattttgaaaataagagatggtctcctgaaggctgaagtcgcagtccgtccaactatattatatggatactctaattaa

SEQ ID NO: 16795 - DNA, 312 bp, Oryza sativa
  Clone ID: PAT_MRT4530_2250C.1
atgatcaagagcgtatcttcgccgtgggattacgctaacgtggtggatggcgatcgagaaggagacagaggatttatccaggagaggcaccaattgtacattggtctccgagcgttgatgggacggggcatacctgcccccacgctgcctgacacaaggcggggcgtgggtgcgctgccgcccatcccatccacctgcggccgcgccccttcctccacccactcagctgcgacgtggcagccgagcgtgggccccggggcgacgcagcccctcgggcccgaggggtgcaacgggataccccgagacccctag

SEQ ID NO: 16796 - DNA, 318 bp, Oryza sativa
  Clone ID: PAT_MRT4530_22510C.1
cggacgcgtgggcggacgcgtgggcggacgcgtgggcggacgcgtgggcggacgcgtgggaaatgatccatgtaaattcttgtattcaatatatatgctcatagtggtcaccatgccccatgtctccttgtttcacatgcctttgcgctgctgcctgctgtcttgtaggttgtgtgagtcgtggaaggtgaggattgtgtgtggttcacctgcttgcttgtgtatatacggagtactagtttgagtcttttgcctctttgaactcaaagaagtagcacgccattttttttttggatccagtcgtttccgttgattgtc

SEQ ID NO: 16797 - DNA, 393 bp, Oryza sativa
  Clone ID: PAT_MRT4530_22511C.1
atggcgagttgcgccacaccctccatcacattcttcttcaactcttcatactcgtcactgaaaagcctcgtcgctattcctctcttcggcaaacttggcctccaactcatcgcgcgagagcagcagctactgctacctttccttaccatgacgttggtgtatgaagcatctttggcagggcaatgtcgttgcaaggaaagggagcagcagctgctgctcacgcgcgccgagtggaaggccaagtttgaagagaggaagagcaatgaggcctatggtagcaatgccaagaagtaccatagcagattcgataagtcaaagattgattgccgaaagtgtggcaaatttggacacttcaccaacgagtgcgaagagtcgaagaagaaagtgatgtag

SEQ ID NO: 16798 - DNA, 1816 bp, Oryza sativa
  Clone ID: PAT_MRT4530_22512C.1
atggaccgaagttggatgtacgatattcaccgttcaacctagggagggggtcactgaattcgtaaattttgcggataatgataggaaaaatacgatgagcaaatatatgttgtgtccatatgtagattgtaaaaatgagaaaatgttcgaagagagttcatgggtacattctcacctgatcagtagaggattcatggatcactacaaatgttggaggaagcatggagaccaagagacacatgatgttgcaactgatgaagtgccggatatagtgaacaatgcaacagctagagatgtcatgtttgtcccgtctccattaggcggagataccatatatttagaccctgaaactgtctaatatgttgcgtgatgttgaagacccatatcacaacgagagagattttgaaaagtttagtaaatcggtggtagattctgagatgtctttgtatgttgggtgtaagccaaagcacaccaagttatccgctgtcttgaaactcatgaagcttaagacaagtaatggttggtcaacaaaagttctacataacttcttgagttgttgaaggacttattgccagaggggaacaaaatcctgtagatgacatatgaagcaaagcaagtcctatgcccattgggtctggaggtcagaagacttcatgcttgtcggaacaactgcatattgtattacaaacagtatgccgacttggatgcttgccctatttgtgaggcttctagatataagtgagacttaagtgaaggtgaaggtcgtaagtcaaataggggtggctccgcaaaggtggtgtggtatcttccaattgccgagcgcatgaacataatgtttgcaaatctgaagcaagctaagttagtgcgatggcatgctaaagaacggaaggtcgacggtaagcttaggcacctagtatattcaatacaatggagaacaattgatagaatttaccccaaatttgcaaaggacccgaggaacatgcatctcgccatgtgtacatacgacattaatatattcagtgatttgagcagtcgtcatagtatatagccagttcttgtgaactacaatcttcctccttggttgtgcttcaagaggaagtacattatgcctgcaatgctcgttcaaagactgacataacctggtaatgatatcgatatgttcatagaaccaataatcaatgacttagaaaggctatggcacacgaacttgggatgcatctaggtgggagtgcttcagcctccaagtgttgttgttttgcaccataaacgattatacgacccttggtatcctttccgggtaaactgtcataggatggagggcttgtgtcggagtgtatggatgaaacaaaaagtcaatgttgaagcattcatgcaagatggtctacatggggcacatgagatttctcctaaggtatcacccttacagaaatatgtggaagaatttcagtggacacagagaggtagctagtcccccgcaggatcaaacagggctacaagtgcatgacttagtctggattataataatcccaagttaaaagaaacagggccttagtgaggggaatcaccaacgattttgcaaagagaagaaagctagtagcactaaagataagagcatgtggaagaagaagtcaatattctggagtaccatacttggagcatcttgaggtccgccattgcatagatttatggatggtataggcgattgtgaataatgtgaatggatttttaataagaccgggtggaggagcgcggtggcggcggagctcgccgtgacggggagcacgacggtctgcgtctgcaggaaccggatgtggca

SEQ ID NO: 16799 - DNA, 286 bp, Oryza sativa
  Clone ID: PAT_MRT4530_22513C.1
gaacacactgctcagtacatcctaacctcttgttctccacaatagctgataatttgcttgatctttttttgcaaagaggagtggaggttttggtggtgcacatgatggctgacttgcaaagatcaccgacaacatgcagaaggtccggttagtcaggcctggtctgggacgagcggtacttgaccgatgacgcagaggctgcctaggacagcgatggcgacggcggtggccgtacataagagcctcatccggatcttcggcattccaagagcgtggatacgcattt

SEQ ID NO: 16800 - DNA, 526 bp, Oryza sativa
  Clone ID: PAT_MRT4530_22514C.1
gatcaacaatgaacaaaattatatatattacttcatgaaatactgtgtacacgagctgaacgaatacatcaatctatcagcttacattatatatatccaacaacaacagacacaattgcaaaagaaaaaaaaaagagaaaaagaaaaacatttatcaattaatgcatataacctccgcggcgagagcgcaaccggtccagaccgaactgacgcgctcgcgagctcagcagaagaggtacccaacggcggcggcggcgagcgtgccgagggcgacggccggggcggcgttcgtcgcggcggcgccggcggaagctccggacgggccaggagccggggcctcggtcgcggtggccacgccgaccaaggacgacgccacgacggcggcggtggcagccgcggcgaggatcctgagcttgagggtggccgccatttcgatcgctagctatgaatcgactggagatgctggcaacggagaattaacgagaaagctagcgagggcttggggggggggggggcggacgcgtgg

SEQ ID NO: 16801 - DNA, 324 bp, Oryza sativa
  Clone ID: PAT_MRT4530_22515C.1
tcgtcgctggtggcgtagggagcggcggcggcggcagcggccgtgcgctggggagcggtggcgtcggcgcgctgaaggaggaagcggcagcgtcggctgtggccgttcttggagcggaggaatggagctgcgcaagatccagccgctgttgattgaagcaagcaatgatctggaagaatggtctgcagttttgctgtaggcttggattttttggagataattgtaggcctggatttggggatattttttctcttcgcaccttttttttctagcttgtttaattgttctgggtgtatatgcaattatgcaaagttctttgtttgc

SEQ ID NO: 16802 - DNA, 1635 bp, Oryza sativa
  Clone ID: PAT_MRT4530_22516C.1
atggatctcggcaagtcgacttccactagcgcgaccctaaagaagctccaggaggatggcgcccttcctggccgtggaaacgcggagagggaagcaggaggtactgatcctcagcccatcttaggttgcatggttgcgatcgaagattatgttgtctgcgggtttctccctccaccctccgaattccttctgctggcctacattggggtagagccctttcttgatctgttccgcttttattacgagttgcgctggatggaatccaatagggtgtccggttccgttgggttccgacttcgtgacgggatgaagtcgcgctatgtccccttccagtgcccctcttctcgcagtaaatggcggaacaggtggttttaccttgaaatcaaggactcaaatccggtcctcgttgttcccgaggaacaactggacaagattccagtctggaccgccaagccccccttggccccctctctccaatcgtttatcgacatcatcgataatctccgagaacggggtttatcgggatatgaagtcgttgcagacttcgtcggtctgagcagcgaaatcgtggagcggcgtgttggtcaggtgatgatcagcggcccgaccacggcgagcgacatccccgtgcccctttgtgaaaagggagcggcggagcgtgacgaagcaatcaatgtggcggcatctctgaaagagaaggtcgtcaaggaggcgtctgacgctgccactactagtggtggcaaagctccgactaaggcgaggaaattctcgtctgtgctcggacaccgccgcaaggcggagactccctcggcttccgacacatctcctccgcctgcgcgacgtcagcgcattgtgacgatcggcgagaaggaggcgcgggcgaaagcagctcgggccaaggccgggggaacatccagtgcatcccctgccacggcatcaacagatgtcgttcccgtggtcgggagtcgggaggtgacgccgagcggccccgtcagcgaccctgctggaggtcgtggtctgccagagaccgtcctctcctgggaggagctccaagccaagatgaggcgccttctcgaagccggtgctcgcggcatcggccgcgagatctcagaggcgagggcggagacggcagcggcaaacgcgtgtgctgagcggttggtgcgggaactggctgaggcccgcgaggacctcacgaagatgagggagctggtggccgggaacgagcgtcaacgcaaagggctcgaggtctgcatgtcggaacttggagacaatctctccgagatccgtggttcgctgcgggtcacctacaccggcctccaccagctcgccagggagtgcggcgtcgagtccacgatcccggtgaaccccgatgagttctcgttgacttcttctcttgcggagctggcgacggcgataggggaaatcccctccaagcatacggccaggatcgcggaggagacgtccaacggtatcttcaccggggcgtgtcacgtccttgcgtgtgtaaggttgtcgcgccctgaacttgatctgcgtgagatcttggatcagggggcggcaagcgacacgcgtagagaggtgatggaagaagtcagtgacctgggggagtctgtcctccctctttttgaagaatag

SEQ ID NO: 16803 - DNA, 1413 bp, Oryza sativa
  Clone ID: PAT_MRT4530_22517C.1
gaatgctcacgcacgcaacacgcacgcacccctagctcatgtgcaagacgagccggcgagctgtatacgtagcagctggactctggagaagcatcagctaagctgtacgtactactgtagttcgatcgatggatgctggtaataacgcaatcgctgcggcgtccttcgccatcgtcgtccttgtcgccgccgccgcctcgtctttagcggcggcggtgccggcggtgtacgtgctcggcgactcgctggcggacgtggggaacaacaaccacctgctgacgctgctcaaggcggacttcccgcacaacgggatcgactacccgggggggaaggccaccggccgcttcagcaacggcaagaacttccccgatttcctcgctgagaaccttgggttggcgacatctccaccgtacctcgccatatcgtcaagcagcagtgctaactacgtgaatggcgtcaactttgcttcaggtggcgccggagttttcaactctacaaacaaggatcagtgcatcagcttcgacaagcagatcgagtactactccaaggtgcaggcgtcgctggtgcagagcctcggcgaggcccaggcggcgagccacctggcgaaatccctcttcgccatcaccatcggcagcaacgacatcatcggctacgtcaggtccagcgccgccgccaaggccaccaaccctatggagcagttcgtcgacgccctcatccagtcgctcaccggccagctacagaggctgtacgacctcggggcgcgcagggtgctgttcctggggacggggccggtgggctgctgcccgtcgctgcgggagctgagcgccgacaggggctgcagcggcgaggccaacgacgcgtcggcgcggtacaacgcggcggcggcgtcgctgctgcgcgggatggccgagcggcgcgcgggcctccgctacgcggtgttcgactccagcgcggcgctgctccggtacatcgagcggccggcggcgtacgggttcgcggaggcgcgggcggcgtgctgcggcctcggggacatgaacgccaagatcggctgcaccccggtcagcttctactgcgccaaccggacgggctacgtgttctgggacttctaccacccgaccgaggccaccgcgcggatgctcaccgccgtcgcgttcgacggctcgccgccgctcgtcttccccgtgaacattaggcagctcgctgctatgtaggcttcatctcatcttcacggtgtactgatcgatcgagctgcttgtgagattccacttttttcaagcttcaagtacagccatagaaatatactactatataccatgtaaagtatactagtgtatttacttacgattggtacatatagcggtagaatcatataatatagcaaattcataataagtgattgttgaagttcatcag

SEQ ID NO: 16804 - DNA, 1074 bp, Oryza sativa
  Clone ID: PAT_MRT4530_22518C.1
atgagtagggtgtccactagttgaggttttgtttattctagggtgaacaagccgaggggagagggcgcgcggaccgggtccacgggagtggggcccacgcggcagccccacggtccacggtggaccgggtgcacgcggctcacgccggccggcgccgtgggtcccacgcgtcagccgcacccgagggcgtgggcggctgacggccgggccccacatggcagccgcggggcgcgcccgaaggcgacctcaccggcacggccgacgggaggcggcgcgcccgcgcctcgatggtcaccgccggcgaccaccggcgcaacggagcggcgcccgagagagaggagagaacacggagcgaagcggcggtcttcggctcaccacgggtcgacggcgacgacgggaacggcggccgaagcggaggaaggcgccggcgcggctcgggacgacgaggacgatggcgctccgatggtcggcgggcgaaaccgaggagcggacgaggtcggcgaggacgcggcgaagccgaagggggcgatgccgaagcgggaggaggtccggggcgacgacggcggcgaaccggagctcggcggcgacggcggagagagaggacgacggcgcgggcacgattccgactgggagagtgagcggtgagcggcggaaacggaggagcggagcacggtgatcgattatatagggacgggagcgagagagggcggccggggaggaaggaaaccggcgcggcgatctcgggctccattgatgcgccggcgaactttgcgggattaaatccgagcgaatccgagggagagagatagggaaagaggggaaaaagaggaagggaatcacggggagtgatttccccctctttattgcgcgcggggacggccggatgcggcggaatccgcggcggcgccggcgctagggcacggcggggccgctgtctgcggcgcgcgcgcgggggagaagcccgatggcccgcgggggagaggagagagagggagagaactgggccgagccggcccaagaagggaaggggggaaaagaagactttttagggtttttctttttataaaacctttt

SEQ ID NO: 16805 - DNA, 2442 bp, Oryza sativa
  Clone ID: PAT_MRT4530_22519C.1
atggatcttggcaagtcggcttccaccagcgcaaccctgaagaagctccaagaggatggcgcccttcctggccgtgaaaaggcagagagggaagcaggaggtactaatccacagcccctcttaggtcgcatggttgcgatcgaagactatgttgtctgcgggtttcttcctcccccctctgaattccttctgctagtctttaatttctatgggctttcacttctgcacttgaaccccaactccattgctttccttagtgtctttgtgcatctttatgaggcctacattggggtagagccctttcttgacctgttccgcttctactacgagttgcgctggatggaatccaatagggtgtctggatgcgtcgggttccgacttcgtgacggaatgaagtcgcggtatgtccccttccagtgtccctcttctcgcagtaaatggcggaacaggtggttttatcttgaggtcaaggattcggatccagtccttgttgttcccgaggagcaaccggacaaaattccggtttggaccgccaagccccctttgaccccctctctcgaatcgtttatcgacatcatcgatgatctccgagaacggggcttatcgggatatgaagtcgttgcagacttcgtcgggaggcgaatccagccgctccaggctcgggcccacccggcttataactattccggggcagatgacgcgacccgggtttctcctcggggtctgagcggcgaagtcgtgggacggcgcgtgagtcaagtaatgatcagcggcccgacaacagcgagcgacatccccgcgcccctttgtgaaagggaagcagcggagcgcgacgaggcaatcaatgtggcggcgtctctgaaggagaaggtcatccaggaggcgtccgatgctgccaccactagtggtggcaaagctccgactaagacgaggaaattctcatctgtactcggaaatcgccgcaaggcagaaactcccttggcttccgacgtgtctcctccgcccgcgcgacgtcagcgtattgtgacgatccgcgagaaggaggcgcggtcgaaagctgctcggggcaagtctggggaaacgtccggcgcgtcccctgtcacggcgtcaacagatgttgtgcccgtggtcgggagtcgggaggcgacaccgaacggccccgtgggagatcccgtcgagggctgcggtctgtcagaggccgtcctcacctgggaggagcgccacgtcgagatgaggcgccttctcaaagccggtgcttgcggcgtggggcgcgaggtctcggaggcgagggcggagacggcggcggccaatgcgcgtgcggagctcttggtgcgggaactggctgaagcccgcgaggacctcacgaagatgagggagctggtggccggcaacgagcgccagcgcaaagggctcgaggaccgcatgtcggaactcggggataacctctccgagatccgtggttcgctgcgggtcacctacaccggtctccaccaacttgctgaggagtgcggcgtcaagtcctcgatcccggcgaaccccgacgagttctcgttgacctcttctcttgcggagctggcgacggcgatgggggaaatcccctccaggcacgtggccaggatcgcggaggagacgtccaacggtatctataccggggcgtgtcacgtcctcgcatgcgtgaagttgtcgtgtcctgaactcgatctgcgcgagatcttggatcagggagcggcaagcgacgcgcgcaaggaggtgatggaggaagtcggtgacctgggggaagatgctgatgacgaggatgtccggcaacgtgggcagcctgagtcactggcgataattccggtactcgagtttgaactgcacgcctcacatgacgtcgaggaccaaactcctgatgcggaggttgaagtgacgacaactgcctcaaatctcgaggatgcccttgcgacccaaaatcgtcgtatccaatactggaagacgaaatttgaagtggcggaactcgagagagcaatgctagccgtaaagaatgagaaagctgtggaaacgctccgaggccgcgaggtgtggttctcgtcttacttgcagagttgctgcaccacgatggctaggggtgtgccgggagttcgggtagtccgcggtgatcctaaggaatcggcggccgggtacatctcgtggctcaacggggcctgtgcccaactcaatggcattggcaagcgaatcgacgaggccttgaagcaagagtgtcgtcgagcgagccgatatgccggaggacacatgctggcttgcctgcgagatcaccgcccgcgcttggatctcgaatttttacgtgaaggttttttacattctcggaggaacccggcggagatagatcaccttgcgaggtcgatgtcgccgttggccgagaagattttccaatcaatggactggcgttggccgtcttggtaa

SEQ ID NO: 16806 - DNA, 504 bp, Oryza sativa
  Clone ID: PAT_MRT4530_2251C.1
atggcggccggcgttcttggccggtgtggaaggacgtggagggctgcagggtggatgaactccgacgacggtgttactgatctgcaagtttctgcaactacatccccttacaaagaagttttggcaactgcaaggcggcaatcggcctgcaagtttttgcaactgcaactctgcaagactgcaactgcaagtgacaatcttgaagggttgatgtgggaagaaatcaatgatcctatggaggctgagattgaagctgagatggaagctcaaattgaagctgaacttctagcgcatgtccttcctcaaggcgctgacgcggaggagcacggcaacgtggacctcgttcagcaaggcgaccaccgccagaccatcaggctccatgagcacgacgccatctgcaggcaaggccatggtggcacaaggtcggagttgcggcacggcgaggtgctcccgccggtcgcagatctcggcgaccggataaggcatgggcaggagcagctgtga

SEQ ID NO: 16807 - DNA, 2379 bp, Oryza sativa
  Clone ID: PAT_MRT4530_22520C.1
atggatctcggcaagtcggcttccaccagcgcgaccctgaagaagctccaagaggacggcgcccttcctggccgtgaaaaggcagagagggaagcaggaggtactaatcctcagcccatcttaggtcgtatggttacgatcgaagattatgttgtctgcgggtttctccctccaccctccgaattccttctactggttttgaatttctatgggctttctcttctacacttgaaccccaattccattgctttccttagcgtctttgtgcatctttgtgaggcctacattggggtagagccctttcttgatctgttccgcttttattacgagttgcgctggatggaatccaatagggtatccggttgcgtcgggttccgacttcgtgatggcatgaagtcgcgttatgtccccttccagtgtccctcttctctcagcaaatggcggaacaggtggttttaccttgagatcaaggattcaaatccggtcctcgttattcccgaggaacaaccggacaagattccggtctggaccgccaagccccccttgaccccctctctccaatcatttatcgacatcatcgatgatctccgagaacggggcttatcgggatatgaagtcgtcgcagacttcgtcggtctgagcggcgaagccgtggagcggcgtgttggtcaggtgatgatcagcggcccgaccacggcgagcgacatccccgcgcccctttgtgaaaagggagcgacggagcgcgatgaagcgatcaatgtggcggcacctctgaaggagaaggtcgtcaaggaggcgtctgacgctgccaccactagtggtggcgaagctccgaccaaggcgaggaaattctcgtctgtgctcggacatcgccgcaaggcagcaactccctcggcttccgacgcgtctcctccacctccgcgacgtcagcgcattgtgacgatcggcgagaaggaggcgcgggcgaaggctgcttgggccaaatttgggggaacgtccagcgcatcccctaccacggtgtcgacagatgtcgtgcccgtggtcgggagtcgggaggcgacgccaagcggccctgtcagcgatcccgctgggggtcgtagtctgccagaggccgtcctcacctgggaggagctccaagttgaaatggggcgccttctcgaagctggtgctcgaggcatcggccgcgagatctcagaggcgagggcggagacggcggcggcaaacgcgcgtgccgagcggttggtgcgggaactggctaaagcccgcgaggacctcgccaagatgagggagctggtggccgggaacgagcgccatcgcaaagggctcgaggaccgcatgtcggaacttggagacaatctctccgagatccgtggttcgctgcaggtcacctacaccggcctccaccagctcgccagggagtgcggcgttaagtctacgatcccggtgaaccccgatgagttctcgttgacttcttctcttgcggagctggcgacggcgatgggggaaatcccctccaagcatatggccaggatcgcggaggagacgtccaacggtatctacaccggggcgtgtcacgtcctcgcatgtgtaaagttgtcgcgccctgaactcgatctgtgtgagatcttggatcagggggtggcaagcgacacacgtaaggaggtgatggaagaagtcagtgacctgggggagtctgtcctccccctttttgaagaagatgctgatgacgaggatgtccagcagcgcgggcagcctgagtcactggcgataattccggtattcgaatttgaaccacacgtctcacatgatgtcgaggaccaaactcttgatgtggaggtcgagatgacgacaaccacctcaagtctcgaggatgcccttgcaacccaagatcgtcgcatccaatattggaagacgaaatttgaagtggcggaactcgagagaaccatgctagtcatgaagaaagagcaagccgtggaaacgctccgaggccgcgaggtgtggtttgcgtcatatttaaagagttgctgtacctcaatggcccgggtatgcagggagcttcgagtagtccgcagcgatcctgaggaatcggcggccaggtacatctcgttgctcaacggggcctgtgcccaactcgatggcatcgacaagtgtattgacgaggccttgaagcaagagtgtcgtcgagcaagccgatatgccggaggacatgtactagcttgcctgcgagatcaccgcccgcgcctggatcttgaattcctccatgaagggtttgctcgttctcggaggactccggcggagatagaccaccttgcgaggtcgatgtcgccattagccgagaaggtattccagtctatggactggcattggccctcttggtag

SEQ ID NO: 16808 - DNA, 2284 bp, Oryza sativa
  unsure (1)..(2284): unsure at all n locations
  Clone ID: PAT_MRT4530_22521C.1
tttctccctccaccctccgaattccttctgctggttttgaatttctatgggctttctcttctgcatttgaaccccaattccattgctttccttagcgtctttgtgcatctttgcgaggcctacattggggtagagccctttcttgatctgttccgcttttactacgagttgcgctggatggaatccaatagggtatccggttgcgtcgggttccgacttcgtgatggcatgaagtcgcattatgtccccttccaatgtccctcttctcgcaacaaatggcggaacaggtggttttaccttgaaatcaaggattcaaatccggtcctcgttgttcccgaggaacaaccggacaagattccggtctggaccgccaaaccctccttgaccccctctctccaaccgtttatcgacatcatcgatgatctccgagaacagggcttattgggatatgaagtcgttgcagacttcatcggtaggcgaatccagccgctccaggctcgggcccatccggcttatgactattccgggccagacgacgcgacctgngtttctcctcggggtctgagcagcgaagccgtggagcagtgtgttggtcaggtgatgatcagcggcccgaccacggcgagcgacatccccgcacccctttgtgaaaagtgcgacggagcgcgacgaagcaatcaatgtggcggcatctctgaaggagaaggtcgtcaaggaggcgtctgacgctgctaccaccagtgatggcaaagctccgaccaaggcgaggaaattctcgtatgtgctcggacatcgccgcaaggcagcgactccctcggcttccgacgcgtctcctccacctccgcgacgttagcgcattgtgacgatcggcgagaaggaggcgcgggcgaaggctgcgcgggccaaatccagaggaacgtccagcgcatcccctgccacggtgtcgacagatgtcgtgcccgtggtcgggagtcgggaggcgacgccaagcggccctgttagcgatcccgctgagggtcgtagtctggcagaggccgtcctcacctaggaagagctccaagtcgaaatggggcgccttctcgaagctggtgctcgcggcaccggccgcgagatctcagaggcgagggtggagacggcggtggcaaacgcgcgtgccgagcggttggtgcgggaactggctgaggcctgtgaggacctcacgaagatgagggagctggtggccgggaacgagcgccaacgcaaagggctcgaggaccgcatgtcggaacttggagacaatctctctgagatccgtggttcgctgcgggtcacctacaccggccttcaccagctcgccgaggagtgcggcgtcaagtccacgatcccggtgaaccccgacgagttcttgttgacttcttctcttgcggagctggcgacggtgataggggaaatcccctccaagcattcggccaggatcgcggaggagacgtccaacggtatctacaccggggcgtgtcacatcctcgcgtgtgtaaggttgtcgcgccctgaactcgatctgcgtgatatcttggatcagggggcggcaagcgacacgcgtaaggaggtgatggaagaagtcagtgacctgggggaagatgctggtgacgaggatgttcagcagcgcgggtagcccgagtcactagcgataatcccggtacttgagtttgaaccacgcgtctcacatgacgtcgaggaccaaactcttgatgtggaggtcgagatggggacaaccacctcaaatctcgaggatgcccttgcaacccaagatcgtcgtatccaatattagaagacaaaatttgaagtggcggaactctcgagaaccatgctagccgtgaagaaagagcaagccatggaaacgctccgaggacgcgagggtatgcggggagcttcgagtagtccgcaacactcctgaggaatcggcgccgggtacatctcgtggctcaacggggcctgtgcccaactcgatggcatcggcaggcgtatcgatgaggccttaacaagagtgtcgtcgagcgagtcgatatgccggaggacatgtgctagcttgcctgcgagatcaccgcccgcgcctggatctcgaattcctccatgaagggtttgctcgttctcggaggactccggcggagatagaccaccttgcgaggtcgatgacgccgttagccgagaaggtattccagtatggtctttcgtctctgaaggatctgacaaggccttatcggttctgggcatccccagccgaagatcccttaggttcctcggaggc

SEQ ID NO: 16809 - DNA, 493 bp, Oryza sativa
  Clone ID: PAT_MRT4530_22522C.1
tcttttttatttttttgttgttttttttttttttttttttttttttgttttttttttttttttattgtccatttgattttttgttctaacttttaatttgtgtgtgttttctcatacgtttattgtttttataggcccctttttttcggaggcccccactggggtgggctcaccccacaaaaaaagggggggaacaacaaaaaacgaagggttaaacccccgtagggaaaggggggccaactccagggggggtcggttaaaaaaaaaaatagggggggaaacgggcaacactttttggccaaaggtaaaaagagggggggggaaaaaccagagcctggaggggtgccagcgcgaacataaaaaacgcccaggcgtttgataccccaaagaaaataggggggcccgaacgaaaatcggcccgggaggatttgtaaacaaaaacaaaaaaaaaaggggttttttatacggggggccgaggaaaagggcggcccac

SEQ ID NO: 16810 - DNA, 216 bp, Oryza sativa
  Clone ID: PAT_MRT4530_22523C.1
atggaagaggcagtcaacggcaacgaccttgcatggctgttccaggaggccgtcctcaacctcaagcgcaacgccaatgagggaattgtcgtcaaggcgatagtggcggcttgcgacagtagtgctggctacaccaggtacttcgaggcctgctaccccgtcatcagtagcaaagccggtgaaggaagggacctgttgagcgtgcatatgttgtga

SEQ ID NO: 16811 - DNA, 1037 bp, Oryza sativa
  unsure (1)..(1037): unsure at all n locations
  Clone ID: PAT_MRT4530_22524C.1
atggcagctcaggcaagcagcaagcgcggcatgctgctgccacgggaggcggtgctctacgacgacgagccctccatgccgctggagatcttgggctaccacggcaatggcgtcggcggcggtggctgcgttgacgccgattactactacagctggtcggggtccagctccagctccagctcgtcggtgctcagctttgaccaggcggcggtcggcggcagcggcggcggctgcgcccggcagctggctttccatcccggcggcgacgacgacgactgcgccatgtggatggacgccgccgccggcgccatggtcgagaacacgtctgtcgtcgccggcggcggcaacaactactgtcatcgcctgcagttccacggcggcgccgccggtttcggactcgcgagcccaggctcgtcggtcgttgacaacggcctcgaaatccacgagagcaacgtcagcaagccgccaccgccggcagccaagaagcgcgcatgcccgagcggcgaggcgagagcagcggggaagaagcagtgcaggaaagggagcaagccaaacaaggctgcttctgcttcttctccttctccttctccttctccttctccttctcctaacaaggaacaacctcaaagcgccgctgcaaaggtaagaagagagcggatcagtgagaggctcaaagttcttcaggatctcgtgcctaatggcacaaaggtagacttggtcaccatgctagaaaaggcgatcaactacgtcaaattcctccagctgcaagtgaaggttttggctactgatgagttctggccggcacaaggagggaaagcaccagagctctctcaagtcaaggacgccttggacgccatcctatcttctcagcatccaaacaaatgatgttgtgctgctgacacaaaatgcatcaaatttcacaaagctaatattaagtttgatgcatgtaagatctttagaacagaggcaatgtaacagggcttctgctctgaaaagatgagagaattgttctnaaaaaaaaaaaaaanaanaaaaat

SEQ ID NO: 16812 - DNA, 255 bp, Oryza sativa
  Clone ID: PAT_MRT4530_22525C.1
atggagcgctcgctcctcgccgccgtcctcctcggcgtgctcgccgtcgccttccccggcgccgcggccgcggtcgggacccagccgggagccatggcgaaggcgtcccgcgagccctccccccacgtctccctatcctgcgcgcccctcttcctttgcaggagaggcgccgtccaccgggaagccgcctccacagctcagcggtgcggacggtatcgccagggatcgccttgccgctgtctccggaggtactaa

SEQ ID NO: 16813 - DNA, 137 bp, Oryza sativa
  unsure (1)..(137): unsure at all n locations
  Clone ID: PAT_MRT4530_22526C.1
gttttgtgtttttacaaaatcattcccaatccataggaaccggatatagcgtatcccccaacttacaaaaccagtacaaactaattttagccctggttttatccaacgtggcggctgagtcagagngggaccctttt

SEQ ID NO: 16814 - DNA, 1169 bp, Oryza sativa
  Clone ID: PAT_MRT4530_22527C.1
gtgcaatgccctatcccggcatcgaatcccaatccacctgagcgagagagagagaaagggtctcctcctcaacatcaacaatggcggtcgcaacctccttcgccacactcgccatcgcgcggccggcggcggagcgggccctcctcgcctccaaaaccccctcgccgctcctctccatccgcaccggcaccggcaccgcacgcctcccctcatcggccgtctttggaggtttcactcctgcgctttccgctgctcacagccgcgcgcgcttcgtctcctccgccaccgctgaccccaaggaagtggacctccagtccaaaatcacaaacaaggtgtactttgacataagcatcggaaaccctgttgggaagaacgttgggagggtcgttattggcctatacggggatgatgttccccagaccgcagagaacttccgtgctctttgcactggagaaaaagggtttggttacaaggggtccagtttccaccgtgtcattaaggacttcatgattcagggaggagactttgacaagggcaacggtactggagggaaaagcatatatggccggaccttcaaagacgagaacttcaaattggttcatactggacctggagtggtcagcatggccaatgctgggccaaacaccaatggcagccagttcttcatctgcactgtcaagacaccttggttggatgggaggcacgtcgtgtttgggcaggttattgaaggcatggacatcgttaagatgatcgaatcgcaggagactgacagaggggaccgcccgaagaagaaggtggtcatcagtgagtgtggggagcttccagtggtctaataggtgccagagggctaatcttcttcccccggagactttgctgtttttggtttcatagtaagctgtgaacttatcgcatgttctccgcgcagtcagagatcatgctgagttgaggccaagatttctaagttgagaagaatcctctattgttcggctggaataaaacgttcttacctgtcgagggtcaggaaataatgttgtggttcatgaaagatcaaaaaaaaatcttttcgtgcatacgcagactaaagttactcctttcccaaaaaaaaaaaaaaaaaaaaaaaaaaaaaaaaaaaaaaaaaaaaaaaaaaaaaaaaaaaaaaaaaaaaaaaa

SEQ ID NO: 16815 - DNA, 1194 bp, Oryza sativa
  Clone ID: PAT_MRT4530_22528C.1
atggcctcatcaagcgacgtcgacctcgccgaccgcttcgacatgtccggcccgacgcatatgatgaaggaaaaaattattcattgggacaaggaggagcaccgccgttgcgtcgctgcttgccttgtcaaaggcgcctacgtagtggagaacgacctcaacaggcgcaggatgtggggtaaggagctagcgccggcgtggtgggagaacttcggcttccgcaccgtcgacgtgatcaacgacgacgtaatcgacgataacgatcaaatcgtcacaggtacaatatacgagcacgaaacgccacctggtggtggcgagccccgacacccgttatctccccgctatgtggtcgccttccgtggcaccatgacatggcaccccaaggcgttcgtggatctgtacctcgacctgcaggtcctcttcaacaccctgcaggactcccagcgcttccgcctagcgaaggcggcggttcagaagctagttgacaccatccacaagggcacgggagtctgtgatcatgctgttggtggtagatgcgttgtctggctcgtgggtcactcgctcggtgcttccgtggcgctggaggtaggccgggtcatgatgacggagcaaggttacaacctcccgaccttcctcttcaatccgccgcaggtgtcaccggctccggtgatcaacttgctgcacccgaatgagaaggcaaaaaggcacctgcacgccgcgagctccctcctcaaggtaggcctaggcaagatcatgaactcccacgaggagcacatggagaagctattcgaacggctttctccgtggacgccggaactgtacgtgcacgagagccaccccatctgccagggttacatcgactacttcgagcagcggcaactagtgcaggaacgcttccgtggcatcggcaattcggcaatgaagctgtcgtaccgagacatgttcttttcagtgctcgggaaaaacaaggagcggccacacctcctgccgtcagcactgctgtggaagaactcgagggtggacgatgacgtggaggatcacaagaaattgtccaagtgtaagatgctccaggaacaactgcaccaatacaagaagctggccttcaacgcgcacagcctcgagcactggtggaagccggacaatgagctgagcttgaccaagacgcagtacatgtacagctatccttcagcatag

SEQ ID NO: 16816 - DNA, 327 bp, Oryza sativa
  Clone ID: PAT_MRT4530_22529C.1
atgccccccatcgtcatgttccgtagcggtggcgagcgctggagctgcgctgggcggcaaggggaggctgcagcaaaagaagcggcgccgtccctcgcgccactccccaccccgttcctcgaccgtatcccgccgccgttgtgggaggaggcgaatggaagcggcaccggcctaaggaggagcggcggcttggccgtccgcgtcggggcgccaaagcgaaggctgcggcgtctagcgccgtcccgcggcgacattgcgccgctcaccacccctctcccgaccgcatcatgccaccgccgtgggaggaagcgagtggaagtggcatga

SEQ ID NO: 16817 - DNA, 222 bp, Oryza sativa
  Clone ID: PAT_MRT4530_2252C.1
atgagcatgaggaagctgatcaggcttaccgtgatcttggcgttgctcgtcgccgccgtcgcggtctcgcaatgcgccgccgcagaagcagcggcggcggccggagggatgatgaggccgcggccgccgcggcgcgcggctgcggattggcatgtggccgccgtgagcgcgtcgccgccggcgaatgtgacggccaacttgggcgccgatgtattgttgtaa

SEQ ID NO: 16818 - DNA, 261 bp, Oryza sativa
  Clone ID: PAT_MRT4530_22530C.1
agagagagtggggcgggaacaccatcatacgccaagtggcggatcgacatcagctgcttgatacgaggccgagcagaggcatccgtctgcgcacctgctttgctttacggaggagattatctgagctacgcaaggacaggaaggccaggaagtacgatctcagctctcgtaaggacatcgtctccggtgacgcgcagctcggcaaggatgtgatcgaagtcgcggataaaaaattcgccgacagagagattgctcagtgct

SEQ ID NO: 16819 - DNA, 360 bp, Oryza sativa
  Clone ID: PAT_MRT4530_22531C.1
gtggcgagcgctggagctgcgctgggcggcaaggggaggctgcagcaaaagaagcgggtgcgcgacctggacgccgcaaagaacaccaggagccgctccccggcagcgcggcggtcggcgccgtccctcgcgccactccccaccccgttcctcgaccgtatcccgccgccgttgtgggaggaggcgaatggaagcggcaccggcctaaggaggagcggcggcttggccgtccgcgtcggggcgccaaagcgaaggctgcggcgtctagcgccgtcccgcggcgacattgcgccgctcaccacccctctcccgaccgcatcatgccaccgccgtgggaggaagcgagtggaagtggcatga

SEQ ID NO: 16820 - DNA, 568 bp, Oryza sativa
  unsure (1)..(568): unsure at all n locations
  Clone ID: PAT_MRT4530_22532C.1
tctcgccacgcctatggcgggttacaacaatggaatgggagcttacaacnatggaatggcacctagcacttccaccaggcgttatctaccggtaggatcacngtcaggaaaggtgcgcctggatggagatgacatgactcaatagactgatggatgtcgacgacaactgcaatgctggcaccnatggctgcatgatttgttgttagtgactggagctgactataccgggttagggttgggggttatctgctatgctgtgatgctggtggctgtgactganaggttnaccactgactactgagatggcactgcgtgactgctgccttggtgttgaggttgatgctcatggccttagatgcactactttggtactgaccctgaagaaacctgggatgtgaaattatggtgacggctgacccttgagactggtgactggcattgatgtgaatgtctggttcagaaacatgaaaaaaacaccccaagaaaataaactatcatgtaatccttcggccccttgatggaccacttaatccaagacattcttagtttagcaaaaaaaaaaaaaaaa

SEQ ID NO: 16821 - DNA, 1056 bp, Oryza sativa
  Clone ID: PAT_MRT4530_22533C.1
atgccacaaggtgtaaatgacactgccattgtgttaattctgaaaaagaaagagccaaaggatttgaaagattacagaccaataagcctttgtaatgtgatttacaaggatgttatcgcgctagcgcaaagcgccttcattcccggccggatgatcactgacaatgctatcatagcttttgagtgcttccatgccatcaatcggtgtaaatcagttgagtctcaattctgtgcttataagttggaccttacaaaggcgtatgatagggtggattggagatacccggagggagctcttcttaaggttggtttttgttctcaatgggttcagctattgatgacctgtgttacctctgttagctatgctgttcgcttcaacggatccatgcttgaatccttcaaactgaccagaggcctccgacagggtgatcccctgtcgccctatttgttcctctttgtggcagacggtttatcaatggcgctgagtgaagctgaaagatcaggacggttacaacctctgaaagtctgcaggagagcccctggaatttcccatctcttgtttgcagatgatagcctgttgttctttaaatcaaatatggaacagactaatgtggttaagagtgctcttactttgtatgagcaaagcacaagccaactcctgagcccggccaaatgttctttgatgtttggaaagcattgtggggatgctctgcagtctgacatcagatcacttttgcatgttcagcacacttcctttgaagataaatatcttggtctgcctactccgatgggtagactgaaggcaggaagataccaatctttgaaggagagatttgagaaaagattaacggattggaatgagaaatacctctctatgggagggaaggaagttttaattaaatcagtcctacaggctattccgacctacgtgatgagtgtgtttaagcttccagcagggctctgtgaggaatatatgcagctgatccggaaattttggtgggggagaagaccgtcagaaaaggaaagtccattggatctcatggcagcaactgattaa

SEQ ID NO: 16822 - DNA, 630 bp, Oryza sativa
  Clone ID: PAT_MRT4530_22534C.1
atgtcgccgcgggacggcgctagacgccgcagccttcgctttggcgccccgacgcggacggccaagccgccgctcctccttaggccggtgccgcttccattcgcctcctcccacaacggcggcgggatacggtcgaggaacggggtggggagtggcgcgagggacggcgctggccaaaggagttgctgccgggggacgcaacggcgaccaccacgacgtcgccgtcctcgcctttcgacccgaccgccgcgctgccggggagcggctcctggtgttctttgcggcgtccaggtcgcgcacccgcttcttttgctgcagcctccccttgccgcccagcgcagctccagcgctcgccacctgccgccggcagaagggggagaatggatgagaaagggagagaaagagagagaaaagggagagaagaagggatttatgtggagaatagaaatggaatccatggcggcggctccggcttgctcccacccgccgccatccatggcgaccgccggtgccggaaaggagaatagaaaggggaagaagaagggggagagagagagaaggaagggaggaggaagaaggaagaatccgagggagcgatgcctatccagattttgtttggatgggaaatag

SEQ ID NO: 16823 - DNA, 331 bp, Oryza sativa
  Clone ID: PAT_MRT4530_22535C.1
gatgcggccgttacttcaggatgttatcgtgccagcgcaaagcgccttcattcccggccagatgttcactgacaatgctctcatagcttttgagtgcttccatgccatcaatcggtgtaaatcggttgagtctcaattctgtgcttacaagttggaccttacaaaggcctatgctgttcgcttcaacggatctatgcttgaatccttcaaaccgaccagaggcctccgacagggtgatcccctgtcgccctatttgttcctctttgtggcagacggtttatcaacggcgctgagtgaagctgaaagatcaggacggttacaacctctaaaa

SEQ ID NO: 16824 - DNA, 4989 bp, Oryza sativa
  Clone ID: PAT_MRT4530_22536C.1
atggcatcccatgaagatccgcgcgatcgtcatcgtgatgaaggtggtgcaacaaccgatgaggaaccgattgaagatctgggcggggcttcggaggaggaagacgatgaagatgcaattgtggtagactttgatgaggctaaaaagcatattgatacacagtatgtggccattgggaagttcttctcaaggaggactttcagcgcaaagggactgtttgaagccatgcaaaaggcatggggcttgagacaaggcatggagtacaaacgcctgcatgataaccgatttctactggaattccaatctgcaggggatttcaggtttgcgactggaggcggtccttggatctatcaaggggatgctttcctgatcacggagtatgatggcaagtctagaccttcggatgtgaaactgaactcgctaccagtttgggtgagaatttacgatctacccctgtctatgatgactgaaacaatgggtaaattgattggtgcaaggctgggtgaggttcgtaaggtggcggtggatgatcagggaagagcatgggatgattttatgagagttcgggcggagcaccctgtggataaaccactgacgtgttggctgaaactgaaagacaaggagtcatcttcggtggttcagaggtatgatgtcaagtatgagaggatccctcggttttgcttttactgtggccacattggtcacatggagagggaatgtgatttaccctcggataagcaaacggtgaggtttggccttaatctcagggcgtcaccttataagcagtttgaacatcgtagctgggctctgcctggtaaagttgacaacaacgcgaagagaaatctatggttcccaggtgagaaccagtccaagccagctcctgcgggaagccaaaataaagatggcccatcaggcaaggaagataggaagaagaactcgccagaggaaaatgctccagtaaaggaaaattttgctaaccgggatgagatagaggcagagatccctacggtgcaggaagagttgaagggtttaaatgctaggaacccaggaaaatccagggaggatggtgaggtcaggaagctagctgaacagtgggagcatatggggaaaactcaagaagatcagcctaccttccacgcagcttcacagcaagctaaggagggacaaataaggagtgagactgcaggggagacttgggtgtctagcaaagattcaatcaatcagtacgaacagcttgatgaaggtgctgggaatggccgtgaggaggtggacgaacatgttccacccctatcaacgatccatgaagatatctctcttataaaccagcttagagatgaggaacttggtgagggacataaggaaaatatcgatgatggggtaaaacctgtgctaggaaagaggagtatggataaatctctccttggcccaggatatgatggaccttcgtttgatgttctagttggaggtgataagattggggctgcggaattgtgtagcagtgcctggagaaggaacggggaggggggggatggactagccctcttttgggatgacacagtacaagtggatcttctatcctacaacttcagatatattgatgtgctcattaaggacgaaagctgccctgtgcaatggcgatgcacctttgtgtatggtgagcccaaagctagcgaaaggcataacatgtggactcttcttcgtcgcatcaaatcaaattctactgctccatggtgcttagtgggcgactttaatgaagctatgtggcagtttgagcatttttctgaccacaagagaagggagaagcagattatggatttccgggaagtcttgtcgcactgcgatgtgtttgatttaggtttcacgggtgccccctggacttttgataacaagcaaaaaggaaggaataatgtgcgagttcgactggatcgtgcagtagcaagccagagttggtcttctctctttcctgctgcagaagtgattcaccttactgtgtccagttctgatcacagtcctattcttctccaagcctcccgagtggatcgcatcaagaaaggggatcggtgtctgcgacttggagccgtgataaatttggttaagttagcaaagatattaaagaaacaaggaatcgattggcagagcttcagatggcaggcaggtgtgctagtgatcaagactatctcgatatatccaggaagctggatactcttgtatagggaggaaatgcaatggctgcagagatcaagaatctcttggttgaaggaaggtgaccgaaacacatccttttttcataggaaagcggcttggcgccacaagaaaaacaagattaataggctgcagagaagtgatggaacctggtgtgataagagggaggagatggaagatatgacatcaaatttcttcaaagagctttacactaatgacccttctgtcgagccagaaccattacttgatttggtacagcccagagtcacgtcggagatgaataagctgctttgtaaagaattctctgatgacgaaatttcaaatgctttgttccagatgggtccgttaaaagcgccggggccagatggttttccggcaaggttctttcagaagaattgggatgtattgaaacgggacattattgcggctgttaagctgttctttgaacagagaagaatgccacaaggtgtaaatgacactgccattgtgttaattccgaaaaagaaagagccaaaggatttgaaagattacagaccaataagcctttgtaatgtgatttacaaggtgattgctaagtgtttggtgaataggatgcggccgttacttcaggatgttatcgtgccagcgcaaagcgccttcattcccggccagatgttcactgacaatgctctcatagcttttgagtgcttccatgccatcaatcggtgtaaatcggttgagtctcaattctgtgcttacaagttggaccttacaaaggcgtatgatagggtggattggagatacctagagggagctcttcttaaggttggtttttgttctcaatgggttcagctattgatgacatgtgttacctctgttagctatgctgttcgcttcaacggatctatgcttgaatccttcaaaccgaccagaggcctccgacagggtgatcccctgtcgccctatttgttcctctttgtggcagacggtttatcaacggcgctgagtgaagctgaaagatcaggacggttacaacctctaaaagtctgcaggagagcccctggaatttcccatctcttgtttgcagatgatagcctgttgttctttaaatcaaatatggaacagactaatgtggttaagagtgctcttactttgtatgagcaaagcacaggccaactcctgagcccggccaaatgttctttgatgtttggaaagcattgtggggatgctctgcagtctgacatcagatcccttttgcaagttcaacacacttcctttgaagataaatatcttggtctgcctacaccgatgggtagactgaaggcaggaagacaccaatctttgaaggagagatttgagaaaagattaacggattggaatgagaaatacctctctatgggagggaaggaagttttaattaaatcagtcctacaggccattccgacctatgtgatgagtgtgtttaagcttccagcagggctctgtgaggaatatatgcagctgatccggaaattttgggacttaaagctttttaaccaggctctgctagcttggcaagcatggcggctgatccagtttcccaacagtttgtgtgctcaaattttaaaggcaaaatattaccccaatggggacttgtgtgatactactttccttgtggactcttcagaaacttggaagggggtggtccacgggttagagctgctgaaacaaggtctaatttggtggattggatcaggaagcaaagttagaatctggagggataactggataccgagagagcataccctaagggttttgggaaagactgttagattgagaatcaaatgggtctcggatcttatggttccacatcagcaaatttggaatgaagagctagttcgtcgaatcttctatcccccggatgctgaggaaattttgaggatccaattgccacatagccctgaagaggacttcattgcttggcactatgataaggtgggtatgttcactgttttttctgcttacaaattagccctacaggcccagatcagagctgacgaagaggttgcacaatgctcaaatggcgatggtgataggaagttgtggaagaacatttggaatgtgcaagtgccgcagaaaataaggatttttgcctggagagtatcaagagattgtctagccacacaacataataaacatcgacgacagattgtacaaaagccaaactgtgagatatgtggggcagaagtggaagatgcgtttcatgctacggttgcatgcacgaaagcagctgcgctgagggcagagatgcggcagaatcggtggctaccgggggaacaggagttctctcagttaggacctgactggctgctacatcttataaaccgtgccgacgatcagacgagggcgttaatattcctgctgttatggaattcgaggggcgaagttctgttgtcttcttggaagtttctcaggcgatgtgtgtcagcggaggaagcagagctgcttgcgtgctatgaagggctgaagctagctgctgaatggattcccatgccagttatgcttgaatatgactgtgccacagcgattgcgaggttgttgtccactactgaagagagatcaagatggtcttttctgctgcgagcagcaagatcagttatagggttaattaaggaagtgcgtttgatgcactgtaatagagagtgtaatagggtcgcacatgaacttgctcagattgctatccgttcggggcaaagcgcggtttggcgtaataatgcaccgaattgtgttatgcaatgtctgcagcatgactgtaatcctgttacgtaa

SEQ ID NO: 16825 - DNA, 172 bp, Oryza sativa
  Clone ID: PAT_MRT4530_22537C.1
gcacgaaaccttgacatgccattagaactattaaatatgcaccccccggactggacaatacaacactcaaatgcttgacccctggcaaccttaatcgccttaaaccaaccaggtcacataacagtagaataactgtctattctcctacattgttaaattaacccatgactgc

SEQ ID NO: 16826 - DNA, 1583 bp, Oryza sativa
  Clone ID: PAT_MRT4530_22538C.1
atggcttcttcctccccttcctcctcctcctcccccccttccgccgccggtgcctcctcctactggtgctacagctgcgaccgcttcgtgcgcgcccccgccccccacgacgactccgccgtcgcctgcccggactgcggcggcggcttcctcgaggagatgagcgcgcccccgccgcgcgccgcctacctccgccgcccgcgcgcgcaccacgccaacgacctgcgcctgcgccgcacgcgccgcgccgcggcggcggcggcggccggcgaccgctcgccgttcaaccccgtcatcgtgcttcgccgctcccccgccgccgccggcgacgacgactccctcgccgccgccaccagcttcgagctcttctacgacgacggcgcgggctccggcctccgcccgctcccggagaccatgtcggacttcctcatgggctccggcttcgagcgcctcctcgaccagctcacccagatcgaggccggcggcctcgcccgcgccagggagaacccaccggcctccaaggcctccgtcgagtccatgcccaccgtcaccatcgccgcctcccacgtcggcgcagactcccactgcgccgtctgcaaggagcccttcgagctcggcgacgaggccagggagatgccctgcagccacatctaccaccaggactgcatcctcccatggctcgcgctccgcaactcctgcccggtctgccgccacgagatgcccaccgacgccgcccgcccgcggcccagcaatgccggcacagaggaggagacggtcggcctcaccatctggaggctgcccggaggcggcttcgccgtcggtaggttcgccggagggaggaggcccgaggagagggagcttccagttgtgtacaccgagatggatggagggttcaacaacggcggcgcgccgaggaggatctcctggggttcgaggcagagccgatcgacggagaggagtgccattaggcgcatcttccgcaatgtgttctcgtgctttggtcgcagccattcatcgaattctcaggcctcgtcttcgcattcgaggccggagttgaacgatgcgtctgaccggagcgccgtgttcagccatggctcaagaagccggagcacgagctggaggctcgaagatggccatgccgacgccatggtgcaaagataggcctcaactgaagtaaggaaggtcgtcgattgtttccatttcgcgcatatgtatttagaggaaaagaaatttgtagtagaacagaattgagaattggtgttgtacataggagcagcatcacatctactagtagatgataacttgcagggaagaagatgcccacgatggtgattctgaaatgagcatttgttgtttagagtgatgaatttgctcttgctggtagcaaatgtcgcttggaattctatgattcattcaaattcattgtggcgatgattctttgcatctgtgagaacggaatgaatgaaaccattttgatgtttgcagtcttgccggactccaataaaaatcttgctctccagaaaaaaaaaaaaaaaaaaaaaaaaaaaaaaaaaaaaaactcgagactagcctcgtccgaattc

SEQ ID NO: 16827 - DNA, 1341 bp, Oryza sativa
  Clone ID: PAT_MRT4530_22539C.1
gttgctgtcggccaaacactgcacacaccagctagctttccctccttatataaagccatgctcccaccgcttcccggccgggactgcaactcagcagcaagcaagctaactccattttgctttgcattgccaccatgagagcgctcgccgtggtcgtggtggccacggcctttgcggtggtggccgtgcgcggcgagcagtgcggcagccaggccggcggcgcgctctgccccaactgcctctgctgcagccagtacggctggtgcggatccacctccgcctactgcggctccggctgccagagccagtgctccggcagctgcggcggcggcggcccgaccccgccctccggcggtggcggcagcggcgtcgcctccatcgtgtcgcgctcgctcttcgaccagatgcttctccaccgcaacgacgcggcgtgcccggccaagaacttctacacctacgacgccttcgtcgccgccgccaacgccttcccgagcttcgccacaaccggcgacgccgccacccgcaagcgcgaggtcgccgcgttcctggcgcagacgtcgcacgagaccacgggcgggtgggcgacggcgcccgatggcccctactcgtggggctactgcttcaaggaggagaacaacggcaacgttgggtccgactactgtgtccagagctcgcagtggccgtgcgccgccggcaagaagtactacggccggggacccatccagatctcctacaactacaactacggcccggcggggcaggccatcggctccaacctgctgagcaacccggacctggtggcgtcggacgccaccgtctccttcaagacggcgttctggttctggatgacgccgcagtcgcccaagccgtcgtgccacgcggtgatgacagggcagtggacgcccaacggcaacgaccaggcggcggggcgcgtgccgggctacggcgtggtgaccaacatcatcaacggcggcgtggagtgcggccacggcgcggacagcagagtcgccgaccggattgggttctacaagcgctactgcgacatgttgggcgtcagctacggcgccaacttggactgctacaaccagaggcctttcaactcctaatagctcgttctagcttcaagcttgcactgataaccactgatcggatgctttacatcgatgaataagaattcatccgagcagacaaataatacaatcatcagtaatgcccacaatggctgatggaaaatatattgtgcttccgattattaataattaatacttctacataataaacaaaaaaaaaaaaaaaaaaaaaaaaaaaaaaaaaaaaaaaaaaaaaaaaaaaaaaaaaaaa

SEQ ID NO: 16828 - DNA, 1821 bp, Oryza sativa
  Clone ID: PAT_MRT4530_2253C.1
atggcggacggcgcgcgggacgccgtggtggaggtcgcgaagcacatggggaagagcctcgcggtgtccaagaacgcggccgatgacatgatgcgcgttctgtccaggtacgaaggtgaggcgcccatgttccccttgtcacatccggaggtggatcaggcggaggaggaggaggtgttcgcggcggcggaggacatcatccgccggtgcaactcggtgtcgtcgccgtccgagatggttgattatctttacgccgtggacgacgcgatcgccgcgacggcgctccagggcgagctggcgtcccgcgccgcggagaccgtgcaggccgccatgccgcggctcgaggaggaggtgcgcgcgctgctgggctcctccgcgcggcgcctctcgctcgactcgttcgaggacctcgacgacgcgggcgcggcgacgacccccgacgggtcgccgccgcgccgcgacgcgctctcgccggaggcggccgcctccgccagcggcgtcgcggaccgcatgctgcgcgccgggtacggcccggagctcgcgcaggtgtacgtcgccgtccgccgcgacgcgctcgcggagtccgcggcgcacctcggcgtcgaggccgtcgccatcgaggaggtgctcaggatggagtggggggtgctcaaccagaggatacggcggtggagccacgccgtcagagccgtggtcaagaccctcctcgccggcgagcgccgcctctgcgacgaggtgttcgcctccgacgaggagctcggccacgagtgcttcgccgacgtcgccaggggctgcctcctgcagctcatcggcttcgcggacgccgtcgccatgtccaccccggcgacggagaagctctaccgcatgctcggcatgtacgaggcgctcaccgccgtcgagccggacattgaatccctcttcaccggagacgcccgcgacttcttctcctccgaggtcgccggcgtcgcggcgcagctgggcagcaccatccgccacacgatcgaccagttcgtcaacgtcatccacggcgagtcgtcgcggcgaccagtcctcggcggcgagatccaccccatgacacgctacgtgctcaactactgcggcctcctcgccgagtgccgcgtcacgctcgacatggtcctcgccgacaacaacaccagcaaccacgacaccaacgacgacgaccacgacggcggcggcggcggtggcgcctcgtcgacgccgtcggggcggtgcatgagggagatcctcacccacctcctccgcaacctcgacgagaaatcgaggctctacgacgacgccgggctgaagaacatcttcctcatgaacaacatctactacatcgtgcagaagatgatggtggagttcccggcgctgcgcgagctcctcggcgacgactgggtgcgccgccaccgcggccagatcaggcagtacgagacaggctacctccgggcgtcgtggatgtccgtgctggcctcgctccgcgacgacgcctcgccggcggcggcgcacgggcacggcggcagggcggcgctgaaggagaaggcgaggagcttcaacgcggcgttcgaggagctgtaccggagccagacggcgtggaaggtgaccgacccgcagctccgggaggagctccggatcgccgtgtcggagcggctcatcccggcgtaccgctcgttcgtcggccggtcgaggcagctgctggagtccggcagcagcagcggccgccactcctcgtcggcggcgaagcacatcaagtacagcctcgaggatctcgaggactacatgctcgatttcttcgaaggcgttcagaagttcgtcaggtga

SEQ ID NO: 16829 - DNA, 162 bp, Oryza sativa
  Clone ID: PAT_MRT4530_22540C.1
atggcggcggtggagagcttcgggtcgacggtgtcggcggcgctccggagacggcgaccgacggcgatgaccgaagggacggcggcgcccgactggacacccactggctgcggcgacacaaagaaccacgcggaggcgacgctagagaaggcggcaggctag

SEQ ID NO: 16830 - DNA, 631 bp, Oryza sativa
  unsure (1)..(631): unsure at all n locations
  Clone ID: PAT_MRT4530_22541C.1
ccacgcgtccgggcttggcgacgaggaggagcggcggtggcggttcagggatgaggaggagtgacgaggaggagcggcggatccagtggcgccaaggtgcgtggacgggcgtgatggtggcatgttcgacgtcgacgggtgactgtcggcgggaggcgatgcggcggcggatccggctgccactttgcgccccatgcgcgcggatccggctatggcggcatggatccggcgcggttgcgggcttcgccgtccgcggatccggcgcccccttcctcccgcgtggattctgcacgggtgaagactacgggcaggaggcgagacagcggcgaccttcgcggcggtgagcttgtcctccagcatccatggagcagccgagacggcggcatcgagcatgcctctctccgagttttccattttcatcttcttcaccggcggaaggagcggccactacccattgtttctgttgtcaatctggaaaccaccgagagccacctttttttccattcaacgaatccagtaggagaagaaagctaccaggatcaacaacaccatcaatcaattatttttcctgattttggttggacgttgtnctgttatttgatctcaccgatgtgttatttgattatttgtg

SEQ ID NO: 16831 - DNA, 241 bp, Oryza sativa
  Clone ID: PAT_MRT4530_22542C.1
aagcttaacgagggaaccattggagggcaagtctggtgccagcagccgcggtaattccagctccaatagcgtatattatctttgctgcagttaaaaagctcgtagttggattttgggcgaacacgtctggtccgccgcaaggtgtgtactggatgagtttgcttcttttctggagatctggtgtgctctttactgagtgtgtcagggattcaggacttttactgtgaaaaaaaaaaagctt

SEQ ID NO: 16832 - DNA, 1005 bp, Oryza sativa
  unsure (1)..(1005): unsure at all n locations
  Clone ID: PAT_MRT4530_22544C.1
actcggctcgagctcgagccgaatcggctcgagcggctcgaggcttcattcctcngccaaagaatcccaaagtagagaaacagcacactctcacctcactcacttgtccttgttatatttgttttatatcttgtcacaatctgtgactgttcgagttatccgaggcccctcttttatatggtcgttgataaaaaggcttcgacccttttaacaaagatgcttttgggtcaccgattgatacacccttcttcgttcctcactcaccagccacagattctctcttctctattcagtaaacggctgttttgtatacgagctgtcccggtctcagcctctacatcccaaaacatcaaaacaactggttgggctccttgtatggcttcttcctcagttggtagaagagctacatattcaacacaatctgtatcgacaaatgagccagttgtatctgtagattggctttatgataacctgaaggagccagatatcaaggtactagatgcttcgtggtacatgccggatgagcagaggaatccaattcaagaatatcaggttgctcacattcctggtgcccttttctttgatgtagatggaatagcagatcggactacaaaattaccacacatgctgccatcagcggaagcgtttgctgctgctgtttctgctcttggcatagagaacaaagatgatttggttgtttatgatggaaaaggattatttagtgcagctcgtgtttggtggatgttccgagtatttgggcatgacagagtttgggtattagatggtggcctgccgagatggcgtgcatcaggttatgatgttgaatccagtgcttcaagtgatgctattcttaaagccagtgctgctactgaggctatagagaaagtatataagggacaaacagttggcccactcacatttcagactaaatttcagccacatcttgtttggaacattgatcaggtaaaaaaaaaaaaaaaggagagaccgcaaaatagtgagctc

SEQ ID NO: 16833 - DNA, 145 bp, Oryza sativa
  Clone ID: PAT_MRT4530_22545C.1
cactctatacactcagaccacgcacgcgttctagccgggtgttcttaataaccctactgggggctcttcaaaacccaccacccaaagatctcgccctactctcgtaaatctcccactcttctggccctacggggattagagcgcg

SEQ ID NO: 16834 - DNA, 165 bp, Oryza sativa
  Clone ID: PAT_MRT4530_22546C.1
cccacgcgtacgatcgcttgctgcattcgaagcccaataccctatcggattacgaccactaactcctcgccgtgctaagccggcggtatcgggatatttgacaaaggggatgggctggggccggcgctgatgctgcgcccgaacacggcggaggcagccttctag

SEQ ID NO: 16835 - DNA, 257 bp, Oryza sativa
  Clone ID: PAT_MRT4530_22547C.1
cattgcgccactgacgtcgcctaggtcccaggagaacgacgcccacatatgatcaagccaatacgccgccacgaacgcggtcggtcgccgttgctctcctactgcctctgcttctcttgccgccgagtcaccgacatgtgggcctggcgaatctttaattttgggacccgacatggtgtgtgggtgggggcccctgcgatttgggagcctagagcggccgtaccgcttgcgccccctcccccctgaggcggccctaa

SEQ ID NO: 16836 - DNA, 101 bp, Oryza sativa
  Clone ID: PAT_MRT4530_22548C.1
tgtatatcctccttcggcggctacttatacagagggagtcatgagagctctctggtttacatcacctagattcccttcgcattgtcgggcagactactaat

SEQ ID NO: 16837 - DNA, 137 bp, Oryza sativa
  Clone ID: PAT_MRT4530_22549C.1
tcgtactctgactgaaccttcataacgtaatatgattatcagtgcagtgaaaaattcattggcgacgcatgtgtgatcatatgctaactctcaggggagaactccgaacatgcagcatccatgcatatcatggatga

SEQ ID NO: 16838 - DNA, 515 bp, Oryza sativa
  Clone ID: PAT_MRT4530_2254C.1
cactactcgtccgcctgctacaccaacctggacagtacaagggtgcgaacaaggtgctcattgaggatcgtaggttgacatgacaggtgagcaacacactacctgacagtgctcgctacatgctttgctagatgctctgcaactacgcctgcaggctctcctacaagctcatctacacgctcattgaggcctttgatgtcggaggaaaggcgtatgtaaaggggtggattactggtgatgagactgctgactgatctgacaacattgacctgaataaaggatcgcgtaaaaggtctcttggaccgtttctacaaccttgctcatattgcaattcttatgcaaatgctggcttaaagtgctgttagaacccatatcacaaagcgaccgacattcctaccaaagatgatgaaattagagaagaaatcttcagggcaaaaggatctacaatactgacaacactgcatacagagattcatgaatatacagctggagctgcaaaaggaaaactgaaaaga

SEQ ID NO: 16839 - DNA, 328 bp, Oryza sativa
  unsure (1)..(328): unsure at all n locations
  Clone ID: PAT_MRT4530_22550C.1
tgtatgttacggtatgtaatagaaagggaagcttacaagggtacanaaagtacgggtacgccgtggtgggtaggcgaattagcacaccgagtgtgtgtccccgtgtcccgtagaagtgtacgtagtgtacgtagtatagagagggttgcaaatatatagtacatgtatatgtacgtacttaggaggtgtattttggtacggtacacagagttggtaagtacgtgtacagtttgtacgcccgtacgttcgagggtattttgcctcacgtaggcgtttgagaaaaaaaaagaaaaaatttaaaagattttaaaaaaaaaaaaaaaaaaaa

SEQ ID NO: 16840 - DNA, 589 bp, Oryza sativa
  Clone ID: PAT_MRT4530_22551C.1
aaaaaaattaaaaaaaaaaaaaaaaaaaaaaaaaaaaaaaaaaaaaaaaaaaaaaaaaaaaaaaaaaaaaaaaaaaaaaaaaaaaaaaaaaaaaaaaaaaaaaaaaaaaaaaaaaaaaaaaaaaaaaaaaaaaaaaaaaagggggggccgttttaggggacccaagtttacttccccggcctggcaacgtaaaagtttttttttggggcccccaaaatcaaattaaggggccggggtttaaaaacggggggaggggaaaaccccgggggtcccccaattaaatgccttggaagcactcccccttttccccggggggggtattaggaaaggggcccgccccgatcgcctttccaaaaggtggcccaccctgaaggggaatgggacccccccctgtaggggccctttaaccgggggggggggggggtttccccccagggggcccgttccttttgccgggcccctagcccccgttcttttccttttttcccctttttttctggccccgttcgccggttttcccggtgaggttttaaatggggggcccccttgagggtcccctttttgggttttcgggcccctgcccccaaaa

SEQ ID NO: 16841 - DNA, 318 bp, Oryza sativa
  Clone ID: PAT_MRT4530_22552C.1
atggagtcggcctcgagcaccttgatgaaagctttaccacggtcggctcggacggctggggagacgaggagaggagtaggaggaggaagcggcggcaacgtggggctaggggtggaggaaagggacgaggaggtgcaggcggcgcgacggtaccggtggggactaggaggaagaggcggtggcggggggctggaggtggagggcagggacgaggaggaggaagcggcgccagtggcggggtctaggaagagggacgtggaaggacctctctgcaaaaaggagtttctcagagtatcacgaggaggttacaccaagtga

SEQ ID NO: 16842 - DNA, 602 bp, Oryza sativa
  Clone ID: PAT_MRT4530_22553C.1
gaactcaaacaaattctgggtggatgcccagaaatggctttttaaataagcttcggaaaccacttacgcaaatcagtttcttcagtaaagaaggaagtgtttgaaaacttacactcctagaaacatttgttgtcactctcaagcgatctagtgaaaagattgctttgaacctgtacacaaggagctactgcttgactggttcctactgtagtacggcatgcagacatgcaggaccttgcagagaaatgggcaccagagttaaaagaactcattgaagcatatcctaggaacacatagttagatgaccattcattccaacaagttgcgtatccaagcatgcaacactatttgactttgaggcatctaaaattacaattgcaatggagtagaataacaccatatgcattaaagtatgcatggcggaatgtataaagtttaaaccagactttcagtttgaattcctcaaaaatctagccttatataagagtgcaggatccaggtacctcttgggggtaaaagtatttcacaaacctggcacagcactggtgatggagagagcacctcaaatcatcctgttcttgctactcttcatccatttcggt

SEQ ID NO: 16843 - DNA, 163 bp, Oryza sativa
  Clone ID: PAT_MRT4530_22554C.1
tgcttgaacataattggaagcattagtgggagccttgtggcattcaagatttcaaaaccggccagtgcaaccattcgaaggggtcctttcttgggggttttccgtgcaatggaccttttatccccaattatgattaacagatttaccagttcttaactttttt

SEQ ID NO: 16844 - DNA, 429 bp, Oryza sativa
  Clone ID: PAT_MRT4530_22555C.1
atggaggaaataaagcctatgattgctttatcattgcttggcggtgttttagatgactctgttaccccatattcgataaataggatattgaagcagggcgcgcccgaagacggccacggcggcgcggccggcgggaggcggcgcgcccgcgcccctatggtcgccggcggcggccataggtcgacggcgacgacggaaacggtgaccggagcggaggaaggcggcggcgcggctcgggtggacggggtcgacggtgctccggcggtcggcgagcgaaacggaggggtggacgaggtcggcgaggatgcggcgaagccgaaggaggcggcgccgaggcgggagatggtactcttcgctccgggtgttgaggatgcttctggggcaatgaggtccttgggcgtgctgtctttcagagaaaccttgaagtag

SEQ ID NO: 16845 - DNA, 1703 bp, Oryza sativa
  Clone ID: PAT_MRT4530_22556C.1
ctccgttgccgtcccctcccctccgcccccgatctacgcctgggcgcccgcctccgcgcccctagatcaccgtcggcctgagtcgccgggctcgtcgtcgccaagccgatcccctccgcagggagctaatacaggaaaattactttagtttctactcagcattcttgtgtgataatggcgttagcagcaatctacagccttttcatcattaacaaatctggcggccttatatactacaaggactatggctcagcagggaggacggacaccaatgacagtctacgcttggcaagtctttggcattccatgcatgctatctcccagcagctgtcccctacacctggctgtgaaggcattgaccttctacaagcccacaactttgatctccattgcttccagtccctcacagggacaaagttttttgctgtatgcgaaactggtgctcaaaatatcgagactctactgaaagtcatatacgagctctacacggattttgttctgaaaaatccattctacgagatggagatgccaattcgttgtgagctttttgatctcaacctggctcaggtgcggttaccaccacctcacggtttgacgagtcagggttccccaaatcgttttaggcgcggttaccaccatctcacgcggttgaacggttatcgcaaggtggtggccttcgtgtcattcgttaatcatcaggcggctctttcggcaatgtctgctttaaatgggactgtatttgatccagatactggagaccgtttgcacattgagctagctaaatcgagttcacgtaaacgtcatggagatggtggggtttatagagttgttgacaaacgacttaagagaaaagaaagagctgctgaccatgagaatgctggtgatggaggtaatgatgatgatgcatggggcgaggatgataatggtggtaatgatgtggttgtcattgatgactggtgcttcctttcgtgcacagtagtggtcaaccagggcttaagcagcatagggggcaatctctttcagatttagtacttattagaacaggatcaaccagacaaattgtcaagtgatattccaccttgttctactttatttgttgcaaatttgggtcactcatgcacagaggaagagctaaaggaagttttatctaagcaacctggatttcatttgcttaaaatgcgccgtcgtggtggaatgccagtagcttttgctgattttacgctttgcgtgtcctctacggctgctatggatgctctacagggcactgtgctagcttcttctgacgctgacggcttgcagattgagtacgcaaggtcaaaaatgaggaaaagctagctcactagctacttgttctacatcagcagtgagcactgaccaccggggatcgaacatgaaggtatatcatttgccatttggcatcccatgccagcacatgtaatcgccaggctgtagctgtgctctttaattgaattctaagaatatagatctgggcaatcaaacactttgtcacagagtagttggatcgtttaatttggtttcgctctcgttcagaaacttctctgtcagagtcggatcgttaattgtacttcttgtttctgaaactttccggagacaaccaggcggctaaccggctctatcaacaatcaatttgatgtatgtgctcttctttgtgcatattgaacaattaatttgatgtgctcttc

SEQ ID NO: 16846 - DNA, 1775 bp, Oryza sativa
  Clone ID: PAT_MRT4530_22557C.1
ccacctccgcccggtagcgccagcgccgctcgtcggcgatgtacggctcgccggtttccaaggatctgaacctcccggtgcagccgccggcgatgagctcgtcgggcttgctgcggtacagatcggcgccgagcacgctgctcgccgagttctgcgacgacttcctcccgcccgccgccgcgccccgcgccgccagccccgacgccgacaacgtcttctcccgcttcctcgccgaccaccagatccgtgacaagtctccccccgccaccgccgccgccgccgccgctgccgcgcacttccccgacgagcccaccatggccacccagcaccaccaccagcagcagattcaattccagcaccacccacggcagatggccccgggcgaagggcacgaccgcacccaaagggcatgcagcagtggcatcggcaccgccggctcttaaacggctggtggccttggtggcgggatgaactcgctgatcaatttggcaaattgattcatggagcacatttgcattttcgaagcatgtggcatgctttcttcagcgttcatcaaagaagctgggtttgggtcgcacatcgtagacgtagcgaacgccaccgccgaagcctgctccaccagcggcactgggggcttgatgaaggggcagctcagattctctccgcggtagggctcgctcatgtcgcagctctcgtagttggactgcgaggagattgcagggaggagccccgagggcgcctgtagggatggaggcgcaggtggccggggttacctctccgggtacccgatgagctccgggtgggaggagtcgtcgctcatgtcggacacgaacatctccggcgtgaagcgccagcgcgactcgtcggagccgtcccagaacggcggcggcggcggcggcctggcgcaccagttcagcctgccgaagacctcgtcggagatggcggccatcgagaagttcctccagttccaggacgcggtgccctgcaagatccgcgccaagcgcggctgcgccacgcacccgcgcagcatcgccgagcgggtgaggaggacaaggatcagcgagcgaatcaggaagctgcaagaactcgtgccaaacatggacaagcaaaccaacactgctgacatgctggatttggctgttgactacatcaaggatcttcagaagcaggtcaagggattaaacgacagccgagctaactgcacctgctcagcgaagcatcagcagtactctggctagaaagctttgtacaagtcatggagacttcagaaaagaacacaagattgttttggagattaggcaggactgagacgatctctgaagatgtgtaatggttaatttcatttgtttgggggggtttaattagagaggcacatggaagaaaaggctcttgtgtgccaaagcacctgtataagcaaagggcaatggagcagtggcatcatcaggattcaagtgataaaaagaaaaaggaaaaacaagggagaaaaagggtgggagatgggtgaaacaattgtatagttttcttgtaacttttgccatatatacccctgcatgccccatgtccagtgcattttcgatagaaatttattactgctagtagtttgtaggttagtagtctcatttaacaccatggctctcgccgacctgctcatctcactaataaatattattgcagtggctttgccccttgcttttttgcggtcaagttgttgccaaggagtatatgatcatcatcaagtggtgaaagccattttttcaaaaaaaaaaaaaaaaaaa

SEQ ID NO: 16847 - DNA, 1816 bp, Oryza sativa
  Clone ID: PAT_MRT4530_22558C.1
cccttaaccaaaccctagccggcggcgtcgtcggaatccatggcggaaggtgcgccgatcatctaccttgaccccgccacggtggcggaagcgcgccgccgcggcgacgacccgcgcaagctggaggagtgcaccaagtacttgatgacgcacatctacgggttgctccctggcccacccgtacccatcgccgccgcccgcacccacgccgcctgcgccgccgcagcctccgacggcgtcgaccgcatcagcgccctccccgacgcgatcctccgcaacatcgtctcccgcctccccgtcaaggacgccgcgcgcaccgccgcgctctcccgccgctggcgcccgctctggcgctccacgccgctcgtcctcgtggacgcccacctcttcccgcgaggtcgaagcttcggtgtctccgcctctgccccgacgcgcgccgacacgccgggcatcgtcgccgccgtgtcccgcatcctcgccgcgcacccggggccattccgctgcgtccacctcctctgcggcttcatgggatcgtaccaggcccagctcgagcactggctccggttcctcgccgccaagggcgtcgacgacctcatcctcgtcaaccgcccatggccgttcgaggcggctctccctgccgccatcctccgcatctccaccctcacccgcctctacatcggcatgtggaagttccccgacattgccggcctccccaccaacaccgccttccccaaccttcgcgagctcggcatctacgccgtcgccatggagaaggagggccgcgaggtcgagttcatcgtggcgagatcccccgtgctggagaccctcaacatccaaggaggcaacacgcaggtgttgcgcctccgcctggagcaccggagccttcgttgcgtgcagatctgctcgtgttgcgtggagaatctcgccgtggtggacgcgccatgcctcgagcggctcgtgctctatgattctttgagcaaggatgactcctgcgtcagggtcaagatcgtccatgcccccaggctgcgcttgttgggaaacttggagacaggattccacatgctggagatccatgacacctttgtcagtgctgggatcaggtcgagcccaagcgcattgttcacgagcgtcaagatcctggggttgaatgtgaattttggagtcaggcatgatgcccagatgctgcccaacttcctcaaatgctttcccaatgctgagtccctgcatgttgtgtgtgcaaaatgttctgaagccaccagcttggtaagccccaatttctgggatgatgctggcccaatcgaaagcatcgtgtcccatgtcaatgtgcttacattccgtgaattcaaaggggaggccaacgcgatatccttcctgaagtacttcgtccagaatgcgcagatggtgaagaatgtggctgtggtgttggccaatccacaattcacttcatactccattgatacgctctggacagcgaagatcctcaaatctgtgagatgggccagtaagatctcttcaatgcaggtctataggagcgatgactcagaaggtggtctgatttggagctttcagagaggatcagattattctatccgtgacccttttgtgtactaggaaccagaggtgcctacatatgtgatccatccaagctcagtttctctgaaagttgttagtgttatgtttgcaggataggtgtatctacatctccacatgcaaggcattgttttttgttgttggcatgtgctcaagactggacagggtttttggtctcattagtagtgtagtacgatccgctttaatttagtagcaagtttattct

SEQ ID NO: 16848 - DNA, 472 bp, Oryza sativa
  Clone ID: PAT_MRT4530_22559C.1
aaattttattttatgaaacgtacttaaataaacaaaacagaacatgttttaacaaactactcagactgcaaaaagactttacatggtaaggatacatctaactatcaactggactcaacaaacctaaaaactccattcctactgattaggggggagagcggccaccttccttgtatacaggccatgaggcaaaacggttactacaagttcagctgcaaaggcgggtgcaggcccttgtttgcccctttggacgccaatgcacaggcgagtggtacaaggcccaaaaattcttgctaattaaaccacaaatcttctcctactgattaacccgcataaaaacccaccggcaatttccctgttacctcgaagaccacaggttttgtaaacgaagaactcatccggaacttctcgatttcctaacttgccgggtttaaagccaatagggcctaacaaaaataaaatactcgtgcca

SEQ ID NO: 16849 - DNA, 361 bp, Oryza sativa
  unsure (1)..(361): unsure at all n locations
  Clone ID: PAT_MRT4530_2255C.1
ttgtatggcgnggcgtttccgtctttggagacgaggcagctcctccttgttgtgtggctcncgcctctgttggntgattacctctggttgctgcttggctgctggtggtttgttcggttggtcttcgtggttgggatagggctgaccttcctgtcgctgccgttggtggatcagcagagcattctgctctcctggcttggtngatttctcaggggtggcgatcgctgcccttgtcttctgagtgctttcgtggtgcggtggaggtgtatcctttgtctggcctttcgctgttctgtctgctggttcttcgcctttgtcggtatggtgctggtgtcccctggtggctgttgtttgtctttct

SEQ ID NO: 16850 - DNA, 300 bp, Oryza sativa
  Clone ID: PAT_MRT4530_22560C.1
atgcccggaggggcggtgagcctgcgccggcagggagacggcgggctgggagcgggtgggacacgaggggccgcggcgctaagaaggagcatcgccaggcgtgagacgggacggcgccagcgccacgagtttgggggcacgaggcagggggcgtgcggcgggagatgcgcggcgttaggcgagtgcggcgagagaggtgcacgggaggcgagcgtccgcaagcggggtgcgagcgaagccgcgcgcgagcgcgggcgagtggcgggccgccagagcgtgccgcccaggagcttcgcgtag

SEQ ID NO: 16851 - DNA, 563 bp, Oryza sativa
  Clone ID: PAT_MRT4530_22561C.1
gcaaggggaacaaaaactttgccaaaaaaaccggtttaaagccaaaattttacaaaaaactttgtcttttctaaaaagggccccccctggggtatgggaaacttttccctgttaacaaaatacaaaaaagggaaaaaacttttttgtaaaaacacaagtcgaaacccccatttccaaaaaacttggaaaggggggggggtaaaacccaggtttgaacaacaaccacaccccatggggggcttgcttttttttacccggggtacctttgttggattgggtcaatgtcaacccccttgagtttaaccaccgattttacgggccctttgggggggggcaaccccctaagttgggcaacctcggtttgttttggggcctgttcgggaatttcggaaagctcggggtagccggttttttctttaaaaagggcggaactgggggaaaattggttgaccccgggcagggtcttttggcgcccggccccactgggcctcccgttcccccttcccggaaaggttttttggtaacaaacgccgctttgttgtggaaggttgttcccccccccc

SEQ ID NO: 16852 - DNA, 734 bp, Oryza sativa
  Clone ID: PAT_MRT4530_22562C.1
agtcgcgctgcgctgcgctcgcggcgcggctcggtacgaccctccctatccccgccgcccgcggcggggcggggtcgcctcgcacaccgctcatccctcttgcccacggtactctgcacggatgccgcactctccccgtctacgtgccccaatcggtctacgcgaagctcctgggcggcacgctctggcggcccgccctgcgcagacgccgcgctctcgcggacgtgtctctctcggcgcccgttcgccgtgtgggacccaacgctcacacttcaggaatttcgtcgcagcggcacgcctcacccggcgcgcccgggcgcgcggcgcggactgtctcgcgcgcgctcgaccacacaccctccctcacactcgcccgcgctcgcgcgcggcttcgctcgcaccccgcttgcggacgctcgcctcccgtgcacctctctcgccgcactcgcctaacgccgcgcatctcccgccgcacgccccctgcctcgtgcccccaaactcgtggcgctggcgccgtcccgtctcacgcctggcgatgctccttcttagcgccgcggcccctcgtgtcccacccgctcccagcccgccgtctccctgccggcgcaggctcaccgcccctccgggcatcacgtccccccgcgccccgctgcgccactgccttccacgccgccttcccgccctcctgctcccgaccccgctcccctcccccgaatgcgagcggagcaccggagtag

SEQ ID NO: 16853 - DNA, 209 bp, Oryza sativa
  Clone ID: PAT_MRT4530_22563C.1
tcccacgcagatgcacaccaattcacacacgcaggctcatctatcatagcacagcatagacacaaggccttcagattcgcgccacccagacacatcctcgcagccccggggggcgttgctcagggccgcatgcacagcctgcatgcagactttgcccacctgccccgtgacacagtttggtcagaaagcccgatgataacggacagaat

SEQ ID NO: 16854 - DNA, 2245 bp, Oryza sativa
  Clone ID: PAT_MRT4530_22564C.1
caggcctggattgcaacttgcaagcacatccttatgggtgcttagatagttagatgatccccacggatacacaaagggctccctgccacagaagaaaatattctagttctacacagcatagttttccaagataagtttgacaatgagcatggaacgatcttatatataacattcaattgagctagccccacaaactcttggagacaactgagctatacaacatacacagggttcattattcgtttcccctgaggaaaataagggatggttccagatacgcacagagggcgaaaggggggcaagaacaaattaaccaacgacttttttttttttttttttacataagatacctatagcaagtagcaacacgaacaaagaacatctgaacatgcaatggaattactgttgttcctactatatcgaagtctaacaagggggcttggttccaagtcccactagctattcatcactgaaagaatgaaatcactccaggaaaaaaaaaagcctattgactgatcttgcacccacgaacataggtgtgctcgtagttgatgtactttgtccagtatggtcggtacttcgacattgcaatctccagccatggcttcatgttcccgttgtagtggatgacggcggcgttatctatttctgagcgctcgatggatgggttgtaccctaagccaagaacataccatgatttgtccaggggatgtgttaacttgtagaatgttaggagacctggcggcagtgtcccaagcttccagagcagcctgttttcattcatgttctgccatttgtgataaatgccagtaatgtccttcttcttccattcttccaaatcaaacatattcattccatacgcccagccacaagcattaggatcgaagttctgagcaatatttggatttgaaaaattgaggtacttgtcaaaacggtgaaaactctccccacatgtttccacagcaccatttacattcccatttagatcaacctcccagagtcctgtcaaatccttctgaacaactatgtcatcatccaagaaaaggatcttattcaacttaggatacacttgtggaaggtagaatcttaaatggttgagcatggaaagatatttggggttcctatatttcagattagaagaaccagcagagagagtttttggacggtctgccttaaaatagtactctttcatggccacagattcaagctgcttcagaacagggcaatatgaagagttcagccatttgaagtcatccacgttttcaacatggattgtcgcatctccaggtggattcaacaaaaaccacatgttcattgctccaaagttcagcttgtcagtaacaagatggaatacatgtttctcaggctcctttgcattcatgatggttgagttcaccacaactgaagctgccaaaacattgtccgaaaaaagggcatagtgataaagatcaggattttctaagttctcactcttcggaaactttcttttctctggggagagaaggtaatagtctatcgttagccgcatggacaggcaatggatgccatttgggattgtcttcgccgctaactggcttaggaaggtgctctgcttctttaagctcctgacctgctcatcagctgactgaagcatcgctcttaaccgctgagtaattgccttgcaatcatataattgatctcttgcttttgctagtaactggcccattactttgactctctcagaagcactcttgggaagttcagcatcagcagtagcttccccaagggagcgctggctttccttaagcctggaaagtagatcctgatgaagatcgagcttgtccctggatttggcaagcacagaatatattctggccatgatcatttgatcacgcatcagacgaacctttgaatctgctttttcattttcattctcacgcctccatatgctatattttccaaggacagccgaatcaacggcttttgaacgttcaattccagcattctcaagcttaactagtgcttcatcatcctgctgtactggttcaatcttcttctttattctggttctctcccgcaatttcagcagctgaagtccatcttcttcagttaaggagaaattctgtagtttaatgttggcttgactactccagtccagtacctgtttactagaataaagtgggtccacttgggctccggtgacggcgacagggaaggcggcgagggcgcagagcgcgacgaaagccatcgcgcgagcccccgccat

SEQ ID NO: 16855 - DNA, 123 bp, Oryza sativa
  Clone ID: PAT_MRT4530_22565C.1
ttcggttttgaactcaaggcactgaaacatctgcgcaagctggccagtgcgttcggtctttcggtgttccatggcatagaatccagctatcgacctgggagttctcaaccgcagacaggatga

SEQ ID NO: 16856 - DNA, 249 bp, Oryza sativa
  Clone ID: PAT_MRT4530_22566C.1
atgcatccatttcccggtgaaccagagtatgaattcctcagttcacatttggaacagatagagggcgtgcaggagaggctgtttggcgaagctaggaggttaaaacatcaagtctgccatgcggtcttggtgggacacactttggttgcttcggcaaagcaccatcgacgcaagggtgtgcacggcccacgaaggaggtggttagcattatggaaaaattgcacaggcagaggtgttagggttgattag

SEQ ID NO: 16857 - DNA, 519 bp, Oryza sativa
  Clone ID: PAT_MRT4530_22567C.1
atgtcgtcctctctctctttctcttcttcttgctccccctctctcccttctccctccctctttctcttcacatgtcgatttagagccagtcggcggcgagcgccacctagggcgagggcgggagcgtcatggaaccccacggcggcagcggcgggtgagggacgtcgacagcgaaggcgctctatgagcaggagaggaactcgagcggatcgagcagcagctccggtggcgtgcggcgaccctagtggcgcgagtggggagggggtggaggagtgcggaggcgggtcgagcgatagctccggcagcgtgcggcgaccgcaagagcctctgcaggcagcgcgccttggccacctccgccaccaccgcatccccaaggtcgaggccattgagttcaggcatgcggcgacgagcgcagcggcagcgaatccccgagagcgggagaggtcgacggtggagatggacggcgcgggcagagggagagatcgaggcgggagagggcggggtagcgggcgagcgtga

SEQ ID NO: 16858 - DNA, 576 bp, Oryza sativa
  Clone ID: PAT_MRT4530_22568C.1
atggtgtttggagttatgttgcttggaagtatctctgaagttagtggagagcgtgaattttctggaatgcttctggaaagaagctatccatctagcaaagccgctaattccacaaatcaacaaaatctaagaagaccaattgtttctttggaaaaagaaaataaagataacacttccggtgaatattggttacgtaccaggaaaacagttctaaagttttgcacaatattagtattgggtgaaagctcagatgaactcactatgtataagcaaaaaagaaaaggacagtcacataacaacaatgataagtggacgagtgaaatagatggtggtactcaccgccgaagctttcgggcgtgcccagccaaccccccccttcagacccgcattattccagacgaggaaaaactgaagattcttgcaacccaaactggatatgccgatttggtagagccagccgtcattagagccgtccaccaactcacgcagcatcaggtagtcaatcaggttcagtttttttcccgtcggaaatctctgaaatccaatcacaaaacggaacagcaaacggctgagcag

SEQ ID NO: 16859 - DNA, 552 bp, Oryza sativa
  Clone ID: PAT_MRT4530_22569C.1
atggagtggtccgatgagtggctggctgccgataagctgcagcacgttctcgcctgcttcctcatcgccctcgccggcgccgcgcttgccggccgcagctcgagatccccgctccgtcgccgccccgccgccctgggctgcgccgcatccctcgccgcgggggccgccaaggagatcgccgacgaggccggtttcttcgggtcctcgggagcctccctcagggacgccgccgctgacctcgtgggcgccacgctagccgccgtcgcgctcgccatcctccgccgcctccgccggccgcgtggggagggcaaggcgcgcgacgcggaccatcgggctggcatctctatgagcagtggaactctattagtcctccgcttgtgccaagcaatggcaaagttgaggcctccgcttgtgccaagcaatgagaaagttgaggctgaaatgacagacctgcctgtcctgttctgcaaatggcagagcccaatttcaggaaactacattcataatgctgacaaatcttacaatttttttagtagatatgtttacttgtga

SEQ ID NO: 16860 - DNA, 297 bp, Oryza sativa
  Clone ID: PAT_MRT4530_2256C.1
aaaggcgaatgatataaaacacttatcttttcgatgatacattagggcgatccataacgtacattcacaatacacacacttgcatcatcatcatcatcgtactccatacacggaacacgtacgcacggggacacacggctcccttgtttcgtacattctgaaggagaaggcaccacgcacgcgtacaggcagctctacctaggttacatttgtactaacgaaaacccgcccagtacccctgccggctgcccccgtgcgaccgagtactacacgggccaccggccccgtacgcgaaaa

SEQ ID NO: 16861 - DNA, 906 bp, Oryza sativa
  Clone ID: PAT_MRT4530_22570C.1
atggcgcgaggaggagaaggcggcacggcgcgaggagaagacggagaggcacggtgcgaggaaggcggcggcgcgacgcgagaagaaggcggagaggagcgtatgagtggtgctcaaaatcaacgataccaacaaggtaacaataatcgcgtgcctgatgatccttattctaaggttaagtttaaaataccatctgttttgggttattatgatgctgagaaatactttgattgggagatgacagtagagcaaaagtttagtgcccaccttgtgcctgagcagcatagagttcgacaagctactaaacaagaggataaatctgtacatgattactatggcgagctacaaaagggattgatgcgatgtagcatagtggagggaaccgaagattctatttgtcgtttttactcgagattgaggcgcgatattcaggacatagttgattatatggaatttaacactgtgaaccagttgtttcagtttgctatgtttggagagaaggaattgcaggggcgtgatcaacagaaggtttgccctagtcaacgggcatacgctgctacggaagatggctacatcagcacctccgatgttgaagatgatgaggaggaagagaagaaagacgaagagcaaaaagacctatccatagctccatgcatgcttgaagaatgttcaattggccaagcacctataatttatgaagatgagaataaaggtaatggtgatggtgctacaactaatcaagataaagataaattcaatacgctccatgacaaggtgaaaccgaggacggtttccaatcaagaaggggaggatgatgagaacacaactagctcggatataaccatgactagcttatgtattaatcaaccaaaggcgcatatgttctaccaaaggaggaagggttaa

SEQ ID NO: 16862 - DNA, 376 bp, Oryza sativa
  Clone ID: PAT_MRT4530_22571C.1
gcgacggcgacgcacggctggagcggcggcgacgacggcggcgcgaggtctcacggggctagggcgctacggacgacggcggacaaagatgagggtggcgacgggtagcggcgggcttgggggtccttttataggggttggaaggcggcggcgaaggcccacggcaaccggcgacggcgaaggaaggtctagggtttggggagagagacgaatccgattcgagatcgaatccacggatttccaaacgaaattagccgatgattccaaaagagaaaaggtagaggagatcccgaagatcatttcccctttattgattccaccggaaacggaaaggggcggccggatttggaaggagacggcggcgcggctcggctag

SEQ ID NO: 16863 - DNA, 690 bp, Oryza sativa
  Clone ID: PAT_MRT4530_22572C.1
atgacggtggtggcagcagtgttggaggtgatcatagcagatgaagaaatacagggtgatcggtatcttcgaaagtgtccaagcacaaggagcatattcagttacatggccaatgcgtatgagcatggtccctgcaaggtacttgcttgggcgaaagaaaagagaccgagcatgacagtagagcaaaagtttagtgcccaccttgtgcctgagcaacatagagttcgacaagccagtagtgggttcaaagagtttgcttatatttggtggtctaggttagatgttgggagagctttacctactacatggaaagaacttaaggtagctattcgtgatagatttgttcctccatgttattatagagatttaagcaagaaactgaatcgtttagaacaaggggataaatctgtacaggattactatggagagctacaaaagggattgatgcgatgtagcatagtggagggaactgaggattccatttgtagcttttacatgggattgaggcgcgagattcaggacatgaaggttttccctagtcaacgtgcatacattgctatggaagatggctacataagcacctccgacgttgaagatgatgaggaggaagagaagaaagacgaagagcaaaaagacctgtccatagatccgtgcatgcttgaggaatgtttaattactaagcgcctataa

SEQ ID NO: 16864 - DNA, 873 bp, Oryza sativa
  Clone ID: PAT_MRT4530_22573C.1
atgggtggcgctcaaaatcagcgataccaacaaggtgacaataatcgcgtgcccgatgatccttattctaaggttaagtttaaaataccatccttttcgggttattatgatgctgagaaatactttgattgggatatgacagtagagcaaaagtttagtgcccaccttgtgcctgagcaacatagagttcgacaagccagtagtgagttcaaagagtttgcttatatttggtggtctgggttagctgtagagagagctttacctactacttggaaagaacttaaggtagctatacgtgatagatttgttccaccatcttatcttagagaattaagcaagaaactgatgcgtttagaagaagggaataaatctgtacaggattactatggtgagctacaaaagggattgatgcgatgtagcatagtggatggaactaaggattccatttgtcgcttttacatgggattgaggcgcgagattcaggacatagtagataataaggaatttaacactgtcaaccagttgtttcagtttgctatgcttgcagagaaggaattgcaggggcgtaatcaacaagtcaagaacaaggcgagcatgtacacgctgcgggcgaagccatcttcggggctgcccaagcccatctctttctggacgaccccactagcgagcaagcgaccaattgcacccggagtttctgcagcgccaaaaccacctcacccacgacctgcagattcaggtaaaggttcttcgcagaaggtttgcctaagtcaacgggcatacgttgctacggaagatggctacaccagcacctccgacgttgaagatgatgaggaggaagagaagaaagacgaagagaaaaaaacctatctatag

SEQ ID NO: 16865 - DNA, 674 bp, Oryza sativa
  Clone ID: PAT_MRT4530_22574C.1
atctggaaatcgctggcgccgccgcattgccgttacttcagttggctggacgcactcaaccgctgctggacggcggacaggttaagcatcaggggcttgccccaccccagcatgtgtgtcctatgcgatgagcatgaggaaagcatcaaccatattttggtcgcatgtccagaatcaagatagctctggtggctactgctcttggcaatcggtcgctcggagtgcttgcccgtcaatgaaacctcattccactcctagttgtgtgacaagagggaaaccttaccgagctctcaacggcgaggtttcgataccattgctactctcgcagcatgaacaatctggaaggaatggaataacagggtgttcaaccagaagcacagaagctagacagaagtgcaagggcaatggtggaagaggcagcgctgtggcggctcaccaatactgccataccggccatgccttatcacatgatcgagagctactacgactcctatcctgtctacgtacgctcccctccccaataaaacaggggaatgtgggtgcacggcgaatatttcgagacagatcgaatgcaacaaacatgtgtgctcatgtcgaatacgcccccgggccctgcatactcatcagtctgatctgttcaccaacattgctcctcctcctcctcctactcctac

SEQ ID NO: 16866 - DNA, 1154 bp, Oryza sativa
  Clone ID: PAT_MRT4530_22575C.1
agacgggaataaaactttattggccataacaagccgattataacaaatattcagacaagtagtaatagcgtcactgtatgccacaaattagtataggcacgaaaggccttgaaaatgaatacatcttttacggtaaacaaaacgcagatatccaagattgccagacattctatgcaatatcactgtgccagtacatggtcagacaatgggctaatcaagacaccaaaatgagagtcaaaactgtaacatcatgatcattgctataagtatgaataatatccagtagtgtctgaaagcaagaaatctttgttgattcctcatctagctcagatagcatttccctgtcaagattatacccaaatgaaaaagaaaacgcacatgttagagaaaggggattgttagaggtagagacctttgactgtcttatttgatttggagttgagcaacttgtatgctatccagcttgaaaggaaggaaatcgattccacccatgtaaggttgcaatgcttttggaacttcaacaccattctccctctggaagttctccaaaatacagcaaagggtcctctcagtggcagtcaatgttgagttcaacatatgaacgaattgcttggattgttcatcattctttttctggccataacctataccaagtctccttgcttgaaaatctgtgcaatttgagcaggacactaattccctataggtttttgatgcagggaaccatgcttctaaatcatacttcttagctgcagcatcattaagagcaccagacacaatggagacaagttggtacggtaggccaatctccttgtagaaatcttctgaattttttatcatttcttcatgcatctcccaggattcattgtcatttggacttgtaacacagaattgctcaatcttttcgaattggtggactctgaagataccagccgtgtcccttccatgtgaaccagcttctttccggaagcaggtggaatatccagcatatctaattggcaattcagcaggataaattcgatcacctagatgatacgcacacagcggttgctcggatgtagcgatgagatacttttcctctccatcgcctgttagcttgtaaagctcttcgtcaaattgggccaactgggcacattttcccaggtttccttctc

SEQ ID NO: 16867 - DNA, 368 bp, Oryza sativa
  unsure (1)..(368): unsure at all n locations
  Clone ID: PAT_MRT4530_22576C.1
gcgcttccatctcctcctcgtcgtcgcggcgcgcgagctagggtttctcgactcgccctcgccgatccggtcagccatgtcgaagcgaggagggaaggccaagcccctcaaggcgcccaaggccgagaagaaggagtacgacgagagtgatctcgcgtatctgcagaagaagaaagatgaggaaaaggcactgggaggctctggtctgaagaagagcgggaagaaatgaggctgataccaatctgtaatgcctgaaaaatgataaaccagctacctgtctgtgttacttcactatgtgcggatgtaacaaaactacctttaagcatgttatgcattaagcaatggttgagttggttgcttgatcnana

SEQ ID NO: 16868 - DNA, 774 bp, Oryza sativa
  Clone ID: PAT_MRT4530_22577C.1
atgacaggtatgggtggcgctcaaaatcagcgataccaacaaggtaacaataatcgcgtgcccgatgatccttgtgctaaggttatgtttaaaataccatctttttcgggttattatgatgctgagaaatattttgattgggagatgatagtagagcaaaaatttagtacccaccttgtgcctgagcaacatcgagttcgacaagctacttgcgaagccatcatcaaggttgcccaagcctatctatttctgggcgtctccaccaaagagcaagcgaccggttacatctggagtttgtacagtgccgaaaccaccttccccacgacccgcagattcaggattcagtgccaccgctaccatggatttggccatgtccagaaggtttgccctagtcaactggtatacgttgctacggatgatgactacatcagcacttccgatgttgaagatgatgaggaggaagagaagaaagacaaagagcaaaaagacctatctatagctccatgcatgcttgaggaatgtttaattgaccaagcgcctgtaatttctgaagatgagaaaaaaggtaatgataatggtgctacaactactcaagatgttgagatagataaagataagttcaatacactccatgacaagatgaaaccgaggacggtttccaatcaagaaggggaggataatgaggacacaactagctcggatataaccatgactatcttatatattaatcaaccaaaggtttcgtttttacaaaaatatctcaaatccgcataa

SEQ ID NO: 16869 - DNA, 453 bp, Oryza sativa
  Clone ID: PAT_MRT4530_22578C.1
cggccgattcaggcgcttcgcatcgcgtcgttgggggggggggggggggggggggtttatggcctccatcttctccgtccccccgctgcgccgccccgccccgccaccttcgcgcggcccgtggcgctcctcccctttcacgccgccgctccgccccgccaccctcgcgcggccacggcgtccctcacctttcacgccgccgcactacctctccaccctctcgcggaggcggcgttcctcccctttcacgccgccgcgccgcccctccaccctcgcgcggacgcggcgcccctcccctttggcgccgccgcgcctgcgttgaccctcccctttcgcggcgccgcgccgcgcctgcaccctcactcccgcggcgaccctcccctttcgagccgccgcgccacccctgcgcccccgcgctccacggcgcccctcactttacttttctcttggccc

SEQ ID NO: 16870 - DNA, 1752 bp, Oryza sativa
  Clone ID: PAT_MRT4530_22579C.1
atggcgatgcaggccgccttcgccgcctcgatgttcccgcagctggcgcagcggaggggaagcgatcgcgcggtggtggtggcgccgccggcgccggcgccggtgagggtggcgatgaggagcggtggggcggcggcggcggcggcgagaggggtgaggtgcagggcgagcctgatcgagcccgacggggggaggctggtggagctggtggtgccggaggagggagggcggcgggaggcggcgcggcgggaggcggcggcgctggcgcaccgggtgaggctggggcgggtggagacggagtggctgcacgtgctgagcgaagggtgggcgagcccgctgcgagggttcatgcgcgaggccgagttcctccaagcacttcatttcaacgccatccgcggcggagacggggccatggtcaacatgtccgtgcccatcgtcctccccctcggtgacgcccagcgccgcgccatcgaggcgtccggcgcccgccgcgtcgcgctcgtcgacgccgccgaccgccccctcgccgtcctcagcgacattgagatctacaagcataacaaagaagaaaggattgcacggacatggggaacaactgcacctgggctgccttatgttgatgaggcgattacaaatgctggtgattggttaattggtggtgacttggaggttatagaaccaatcaagtacaatgatggtcttgatcagtatcgcttgtctccagcccagctgcgtgaagagtttgccagacgcaatgctgatgcggtattcgcgtttcagcttcgcaatcctgtacacaatggacatgctttgctcatgactgatacacgcaaacgccttcttgagatgggttacaaaaatcctgttcttctgcttcatccattgggaggattcacaaaagcagatgatgtgcctcttagttggagaatgaagcagcatgaaaaggttcttgaggaaggtgtcctcaacccagaatcaactgtcgttgcaatcttcccctctccaatgcattatgcagggccaactgaagtgcaatggcatgctaaggctcgtataaatgctggtgcaaacttctacatagttggaagagatcctgctggtatgggccacccaactgaaaagagggacctgtatgatgctgatcatgggaaaaaggtgttgagcatggctcctgggcttgagaagctcaatatccttcctttcaaggtggctgcatatgacacaaagcaaaagaaaatggactttttcgatccatcaaggaaagatgatttcctgttcatctctggcacaaagatgcgtactcttgccaagaactgccagagcccccctgacggattcatgtgcccgggtggctggaaggtccttgttgaatactacgacagcttgacgccatcagcggacagcagcaaactgcgcgaggcggttgcggcctagaaagctgaaactacctcaaataagcaagaacattgcatcttgcaactgtaaaatggttctttcagagagagaaccaatggtatatgtgtatactactggtcgcaaggcctaaacatttgggtttgattggaagcgcattctggtgtgatttgtatgtgccctatcatctggtaatgctacattggaagctcatcatgttgttggtgttaataaggatgagcctttgtgtgctctgctagatatgtacatatacaatgtggtggtatttatatagtgcttggtgtgtttgctattatagaagagcaggtttcatcttct

SEQ ID NO: 16871 - DNA, 752 bp, Oryza sativa
  Clone ID: PAT_MRT4530_2257C.1
cgggtggttttttttttttttttttttttaagtcacagcaaccaaaagatcaccgaaatttattccaagaataaccgaacaagctttgaacggaatgcacgggatagagctgcattacagctttagctaagctacaccagctcaacactgaagcagcagaaacatgcaataatggaacctaaggtacatctatcacagctatctgcgtgtgtagatggatggatggatacctgaaagtacttggaacaatgatgcaatggttgatgccatggcggatggatgcttgatggacagttgatgtcgtcatcatcacgccgccgccgccggtgccgccggtggtgcaggcttggaggcgacgacggggaagtcgacgacgacgaccttgtcgatcgccgccatgaacgtgccggcgaactcctggtgtctctcgtggctcatgtaggtcgtcagatcttcagagctcgcgaaggtcagcgagaagacatgagtgaagccctgtgtcagcatctcctggttcaacacatccttcccccactcgaaggatttcaccatgtccatctccgagacaagcttggtcatgccttgcaggatgtcatccaccaagacctcttccttgaacttcaccaggcaaagatgcttgacctcccccattgctgaagctccaaaaaaccaaaaggtgcaaagaaaaagctctcctcacactacacctccaggtgaagtgcctcctcgtgccgaattcctgcagcccgggg

SEQ ID NO: 16872 - DNA, 2240 bp, Oryza sativa
  unsure (1)..(2240): unsure at all n locations
  Clone ID: PAT_MRT4530_22580C.1
gctccatgtctccgcccaggccgccgcaggcggcccaaggccggcggggctcgccgccatggacgccgccgctctccctccgcctccacgggtctgccatctcctcctcctcgtcgtcgcggcgcgcgagctagggtttctcgactcgtcctcgccctcgccgatccggtcagccatgtcgaagcaaggagggaaggccaagcccctcaaggcgcccaaggccgagaagaaggagtacgccgcttccatctcctcctcgtcgtcgcggcgcgcgagctagggtttctcgactcgccctcgccgatccggtcagccatgtcgaagcaaggagggaaggccaagcccctcaaggcgcccaaggccgagaagaaggagtacgacgagagtgatctcgcgtatctgcagaagaagaaagatgaggaaaaggcactgaaggagcttaaggccaaggcaggacagaagggtgcactgggaggctctggtctgaagaagagcgggaagaaatgaggctgataccaatctgtaatgcctgaaaaatgataaaccagctacctgtctgtgttacttcactatgtgcggatgtaacaaaactacctttaagcatgttatgcattaagcaatgttgcagttggttgcttgatccgaagatgtttcgggctctcttctgctagctatgatacatctggtcccgtatgatgataatataacataactcatggtgaaaaaaccaaaaaaaaaaaaaagccgccgccgccgctgctgctgcttacctcctccgcgccgcgcactccttgcactagcccatggcgacggctatgatggctgcgaccgccacctcgtgctcccctcgccgcgcgccggtcgtcgcgtcgtcgtccgtgcagccgcccaggcggcagcagcagcagcaaccgcggaggggattgaagcagctgccggggctcgtggcgacggcggccgtggccgtggccgcggcgccgctaccggcgctggcggagcagatggagaaggcggcgctgttcgacttcaacctgacgctcccgctgatcgcgaccgagttcctgctgctgatggtggcgctggacaagctctacttcacgccgctgggcaagttcatggacgagcgcgacgccaagatccgtgccgagctcggcggcgtcaaggacgcgtccgaggaggtgcggcagctggaggagcaggccgccgccgtgctgaaggcggcacgcgccgagatcgccgcggcgctcaacaagatgaagaaggagaccacccaggagctggaggcgaagctggacgaggggcgccgccgcgtcgaggccgagctcgtggaggcgctcgccaacctcgaggcgcagaaggaggaggccgtcaaggcgctcgacgcccagatcgcctccctcagcgacgagatcgtcaagaaggtgctcccatccgcgtaatggccgccccgccgccggccgttcttgcctcccaaacaccaaccatctctcgtaaagattttctccgtgttttatccgtgtgtatacgctgcttctcctaagaatgtaatttcagtgaacttctcgtgataagtataaaatcaatgatccttttgctagaaattggattgaaattataaactgctttaataagtgcttactgcattaaatgccagtatgctgctgtgctgtgtgacctttgctcccgattcgtggttccgtctaccgattgatcgtttcgggttaggggttagcgatccgcgcttgtgttttgactgtgcaggccaccgtgttgtagatcggttcgtgtctggggtagttcatagtggttttatcctttagttggttagttgaaggtgaatttgtagaattatcatgcgcgatgctgtttgtcctttaaatctgcgtattgacttgtggccttgtcctcagttagggatccgttcggttaatccccacgaggaagggactggaggggggattgagtagggttgggaagtggaatcaatccccttaaatccccgtggcggagggattggctgatatgccatcatatttacttacattccttggatatgttgtgttagggggttattaacttattattggataatgattgtgttaaaagcttgttctgtttatgaagtcctagtttntagggcaaaatacttttttntaactactttggtaacatgaaatgagcaaccttattatatgtttgatgctaacctttatatatgtttgatgctatcatgtatggga

SEQ ID NO: 16873 - DNA, 375 bp, Oryza sativa
  Clone ID: PAT_MRT4530_22581C.1
atggcgacggcgtgggccgattggtggcagtcgatggcggcggcgtcggcggatcgtcgaggacggcggcagtcgaggacgtcggcgtcggcggatcggcggcagtcgatggcggcggcgtcggattggcggcactcgagggcggcggcaatcgaggacggtggcgtcagcggtgcgacagtcgaggacggcggcgtgggcggatcgatggcgtcgtggctcacgtggaagggagcggcgtgggcggatcagcggcgtcgtgactcgcgtggaagggagctatcagggagtggagaggagcgcgagggaggtgggaggtggatctcgaggtgggatgtgggagcgatcctgagcgttggaatctcaccgagatga

SEQ ID NO: 16874 - DNA, 272 bp, Oryza sativa
  Clone ID: PAT_MRT4530_22582C.1
gaaggaggcctcctggggactacgtgcacgaaggctgtgtaggggcggcccaacccatgggtcgaacgaacaaggggttcggccgaaccatggagggctcccttcttcctcagctcaggaaaatggaggaagatgatttcgtggaatatccaacgggcgtgcttggtaagaatccactctggggatcctctagagtcgacctgcaggcatgcaagcttgagtataatgccctccatatggtgcatcatgaaatttttccagagaatgatctg

SEQ ID NO: 16875 - DNA, 2064 bp, Oryza sativa
  Clone ID: PAT_MRT4530_22583C.1
aatattctgtgaaatatgaaaatgttcactgagattaaacagcagaatgcaagcatgcaacaaatacaggaagggacaatgacatcataaaatcaaaacaagtcaagctagtggatgcagcaaaatctagtgcagtgtttacattatcatagaaagtaagctttgcacacttatgtattgatcagaaagctcaatctatttattatttttttatttaagaaataacatgactggttccatttagcacaggcacatcaaagtataccttttcttcccagctataccactaactggaatgaataccatcgtatgtttcaatcttgtcaagaaacgaataaaaatatcttcatgcggacagggttccaacaatagtaaaaaaggaaaaaagaatacagacgcataattgccaatcctctactttcatctacatagctgtgcaacaaatgcttctctgagctgcaccacattttaaactcaatacggtattctgtgcaggtttgccaaaacaaaaaatgctaatgatctcgccccatcaaccactcaaaggattctgtcgaggtcgctgataaaattggaggctatagatgtcagcttctttccagtttctccagccatattcttgagggaagacagatcttgagatgcctggaatgatattctgttgatgagatccgcagcacttaaatccagattcgagtcatccatgtcgcggcggccaaaaagatcagcacttgaaatggacgaagaacccgcaaacttttgaagggacatttgagcgtctttctcttctctgctttgattgccaaaaaactgagatgatgaaattgcctttgcattagagaattttttccttgcttcgtcagtctcctgaatctgggtctttgtggcagctgtgcttgttttcttttggaacccattatccattccgtactcttgaaagaagtttgatgattttggtggtgctacgtggccagtcatttgagttcctccatttcttgaatcaactgctggctcattctccacatattcaaaacgtgaatgcaaggacgggccactttttgtggtggaagtagtcattactggggcagcaggttttggctcttcaggtttctgatcatacaggctttcacttggctttgtggtgagctttttaacaccaagccctccagtcttgcctccaatcttcttcgcaccaatggacttctttacagaagtggcaaaagtgggatgagtaggggcttttggtgtctgcgtaggtgctttttgcgaattggtgacatcaggttcctgcttcccattggtattctctgctggtgcctctggtagcttgaactcagggaagtcatcggatggattttgtggttgagacgctgcaactggcgacgatggcaagacgttatcagcagaactcttggcaacttccttttgcagtatctgcctgtacagctcagcagcccttgacgtgtactttgcgtcgaccttgccaccatctgtccacccgtgctgtttaaagaaagcatgggcacgattgttgcctccaaaagccatcatcttcagttgatctggagtccatgaatctaggtttgttgacctgacgaaggtgatgtggacgccgaggctgcggtggacggcggagcagtcgaggcagaggaagatgccgtaggtgacggaggcccaggtggggttcttggcgctgcagtcgaagcacatcttgttctcgggcttggccttgaggcggcggaagacggcgttcttgtcggtgaaggcgtcgaacgccatggctgctgcctctcttgtcaggcaggcagcccagcccagcagcagagatctgggacgccgaggcgaggatgcttgttttgcgaaacaaaagtttggttgcagcccgggggaccggacggcacccccgtggtgcggagtaggtagggctcgctatatacaataccaccagcgaggagagcaacgtcaaccaattaggcggagcgcgagccgacgaccgtgcgcgcaacgcaacgcaacccaacccaattcaccgtcaggccctcgtgccgaattcctgcagcccgg

SEQ ID NO: 16876 - DNA, 1301 bp, Oryza sativa
  Clone ID: PAT_MRT4530_22584C.1
caagcttgcatgcctgcaggtcgactctagaggatccccgccgataaatgacttcctacgggatgacatgctactatatgtaacagattccaatgcatggtatgcaaatactgtgaatttcatgtttgcaggattcatatgacaaagggagaacgaaaggaggctcatctacgagaacagacgatacttgtgggatgagtcatacctttacagagtgtgcatacagcttccttaggagatgtgtactagctgctgaaggtaaccagatcattctctggaaaaatttcatgatgcaccatatggagggcattatactcaagcttgcatgcctgcaggtcgactctagaggatccccagagtggattcttctagccaaccatatacgaagatactaaagaattcattcgaatatgttggaaatgccagaagcatggagatatcaccactcaagatgcgattcccttgacctacaactttcaagtggagttatttgatctatggggacctttcccaaagtcccatgattgtgagtatatcttggtgcccatcgactatgttcaaatggtaataagtaatggagggtatcactttattgataagatcttccaaaaccttttacaagagttagaggcacaacacatcattgcaatttcatatcacccccaaacaaatggtcaaagtagaaacctccaacaaataaatcaagaacatactgtaaaagaccatgcaaggaatggggaaggcatgaaagaacaagctaccaaatgcactctaccaagaacacccttcagcatgtcaccttcctagctcatctgtagaaaaatgtgctattttcgtatcgcgctggaacacagagcacactaggccatgcggatgtggaattgaaaaggcggacgacacaaacaaatgctgctgtcggagctacaagagtagagggaaaagaccaattacaatgacaaaatatatgaagaaagaacaaagagatggcatggtaagataataaaagggaaggagttcatggcaagagataaagtgatgctgttcaattctatgtgaaactcttcgggcacgaaaaacttcgaagcaaatggatgggaccattcaccatcattgacacctctgcacatggagtagttatgcttcaagacggctgacacaatctttaatgcaaatggtcatcgtttaaaactgaggaagaagggagccctccatggttcggccgaaccccttgttcgttcgacccatgggttgggccgcccctacacagccttcgtgcacgtagtccccaggaggcctccttc

SEQ ID NO: 16877 - DNA, 639 bp, Oryza sativa
  Clone ID: PAT_MRT4530_22585C.1
cgctcattcgctcccttccaggggagcacgcgtcgatcggttgaaggcgccatggctagtagaggaagtggaagtggaagcggaaaaggaaaaggaaaaaaagcaagtggaggtacaagaggaaaaggaagaatgccactagatggagaaatcactgaaagaattagcacgctgcgcatggcaaatactccacgcactgaacgtcttagaagaaatttggcatcactagtgttacgccaggcgcttcagggtgtatattcggaaattctcggcgggtatatccaatcatatgagttggactatcaggatcaggatggatgctcgtttgttcaaggtagaatttttatggagtcaccacgaagtggagaagaagggttcattcaacatgatgcaacatttgttgtcatggatgaagattatgaaactggaaggattatggcccaaaagatctatgataccactatcaagtttcatggatacaacgatgtcattgcagatatctatctagttgcctactgtgaaacacttggtaaatgggttattggatatgagcctttttgccagtactggcttgaaagtacccttgcaccattttatgagagtgatactacaatttcagcatactggagagataaaatc

SEQ ID NO: 16878 - DNA, 396 bp, Oryza sativa
  unsure (1)..(396): unsure at all n locations
  Clone ID: PAT_MRT4530_22586C.1
ggggggggtgtttgtttgggctgtgggggcgttggngcggtggctatgagtgaggaagcttcaggcgcgaagattgatggggggggagcggttgttatgcggacttctccttaaggggttttgggggggctttcctgggggggagtgnctancngacaatcactctggactgactgaagcggggcatgggatccgctgggcgagccgggagagccaatggcccaacctgcgggtgcgttgacggggaggggggggtgcaccgatgcaccgggcggcgccggcgtggggccgcccgggggggaggggtgggtgctgacgaccgtctgcggcccataaggcgagggtgctgggggagggggcgggggcggcgggggagtcatgtggaggcaggagggg

SEQ ID NO: 16879 - DNA, 238 bp, Oryza sativa
  Clone ID: PAT_MRT4530_22587C.1
actacgcgtacatagctagctgctactgttagataacctaccttacgcacgcccgcctgtggcgatgtacaatctctatagggacatctaagacaagttctgcggcctgatctttacaatcaccagacgtggacaaacctgccactacgcacacctaattggcttgaaagagatccatctttcttcatctgacgtcacagagataaggccaaggcgactcgcactttctgactgatga

SEQ ID NO: 16880 - DNA, 397 bp, Oryza sativa
  unsure (1)..(397): unsure at all n locations
  Clone ID: PAT_MRT4530_22588C.1
nacnagacnctgcnggnatgccaaccccgangggggnccngntatngccnacgtnntntctnnattngangcaatntacactgncngnggtggangcatgnncccagtggancaaccnngangntaccnnncttnctccccgcgctacangggtccctnacggatgnaggcntctngactantangnncncatcgatcgcccctccncntgtangcccatcctgnatgncnaatggtacatagtacacgtggtatttgntctaacntcccgtaaacctttggttngtgtagccctctgatgtacntacccggtgcatcccgtctgttccnctatgaataaccagatcggancgnnnntcggtgtantatgttccctgatgtgaanatnactccacta

SEQ ID NO: 16881 - DNA, 252 bp, Oryza sativa
  Clone ID: PAT_MRT4530_22589C.1
atgcgggacccacttgatctcctggaggtcgtggcgaggaaggtggacatgccagcaacagaggagctcgaggaggccacggcgacatgggagcttgatgaggccggcgagaagggtgctcgccacgctgtccccatttggccctcacctccccaatctcccccgctgtgctcgttggccggcaacaccttcacggagccaccagtggacttattatttcgtgcacaaacacatactccctctatcccataa

SEQ ID NO: 16882 - DNA, 175 bp, Oryza sativa
  Clone ID: PAT_MRT4530_2258C.1
gcggcccccgggaatttccccccggggggtgcttttaaacacggtggtttgggtgttctcttgaaagggttcgcccaacttgggaagcggagtataatcctaaacccacttccccaacagaattggtggccccttgtgggtttttgtgcccctcgctcgttgttggggaactttt

SEQ ID NO: 16883 - DNA, 1118 bp, Oryza sativa
  Clone ID: PAT_MRT4530_22590C.1
atggcgggattctctctgaggggaggaggaggaggaggcggcggaggaggaggagtcggcggcggcggaggcggggggaggggaggcgaacgcggcggcggcggcgatcacgccataggggccgacagtctgttcctgtacgcgcgcggcgcggccgccgcggccgccgacacggcgggcagcggcggcgggggtggggggatagggttccagctatggcacccgcagcagcaggcggcggccgcggccgccgccgtgccgcacacgtcgcagttcttctcctcgggcgtggccaccggcgtcgtgctggggttctcgtcgcatgacggcggcggcggcggcgggcatatgggcggccccggcggcggcgccggcggcggcagggcgggcaccagctgccaggactgcggcaacaacgccaagaaggattgctcccacctccggtgccgcacctgctgccggagccgcggcttcagctgcgccacccacgtcaagagcacctgggtccccgccgccaagcgccgcgagcgccagcagcagctcgccgcgctcttccgcggcgccgccgccaacaacagcgccgccgctgccgccgccgccgccgccagcaaacgcccccgcgagctcgtccgcaccctcggccgcttgccctccgccaacaccgccatggtcgccaccaccacatcctcaggtacaccaccaatatggtcgccaccaccacatcctcaggcgagggagacgggaggttcccgccggagctgagcgtggaggcggtgttccggtgcgtgcggatcggggcggtggacgaggcggacgcggagctggcgtaccagacggcggtgagcatcggcgggcacacgttcaaggggatcctccgggaccacgggccggcggacgaggcggcggggcagctgccgccgtcgtcggcggagtaccaccagctgacgggtcaggggagggaggaatcgtcgccggcggggagcagcgagggcgtcggcggcggccacggggcggcgactgcggcgacgtccgcggcggtgctcatggacccctacccgacgcccatcggcgccttcgctgcaggcacccagttcttccctcataaccctagaacctag

SEQ ID NO: 16884 - DNA, 1279 bp, Oryza sativa
  unsure (1)..(1279): unsure at all n locations
  Clone ID: PAT_MRT4530_22591C.1
cccgggctgcaggaatcggcacgaggacctgacctggacaaagatgatgatcttcctgagcctggcgagcactctgctgataaggatgaaagatctgaggatgtgggtgtgtttgaggatgaagagcggaaggagcggtctcaggaggatcaagagaagacctttcatggggataatgtatcaagtgctgtcagtcatgaccctccgtcagcagagcaagatgagctggttcgtcgtgcccaagacaaaatattatatgtggatgatggttcgacagcagtgcctcatgacaaccaggaagctgaacgcagggaggaggaagctcgcaaagctagggagatgactttcagaggcgatgatgtgtcaagttccgtagatcatgatgcccaagtgacaaaacctctcccagaggagcaattgaagagcatggatagcatatttgaaggcaccacaaatttatcaaacggaataacatttcgaggcccaggagtgaatgaatcaactgctgctagggagcttggggctattccagctgatgcatcttcccatccaaacactagcactgtttcagaaagcaatactgatacagctccggtaaatttggatggcaaccatactggatcagatcaagctaattcgacctctttgaaaggtcaacaagagcagcaagcaaattcaacggatgtgttgaacaaccagataaaactcttcattgacctcacatcagctgctgagttgaattatcgaccaaatgggaccctggcttcggcttcaactgatgctgaaaatgccacttctgtagatagaggccatgatggtaataccggaaccaataaggctgaggaaggagatacaggcaaagacttagatttatcgacaaaaatcatgaacaaggccattagtgaagatgaagttgttcttgaatgataaggagatctctcaggttagcttctggtgtaacctgtaagtctgtagggaccttaagaggaggggaagaaactagtcttttctttctcagtagacttggagatgcaatacaagtaaactatctctattgcccccccccccccttttgtataaatttgatagagatatgctatgtattgcctagcacatcatgctctgggttgagtgatgcgcaaaagggcttgttatggaagtaatatatagccattcagcagctctgaagctttgctgctgcaatgatatttcaacttgtctatagttctgtgctttatgtctacaacttttttcttgtgaaaanggaaaaaaaaaaaaa

SEQ ID NO: 16885 - DNA, 534 bp, Oryza sativa
  Clone ID: PAT_MRT4530_22592C.1
caactctacacgcacgcggcgacagcgagagagatgagcaccggcggcggcgcggacaagtccggcggcggcggcggaggggcggtgaagacgccctcggacttcctcaagtcgatcaggggacgccccgtcgtcgtcaagctcaactccggcgtcgactaccgaggtattttggcttgcctggatgggtatatgaacattgcaatggagcaaacggaagagtatgtgaatggccaactcaagaacaagtatggtgatgccttcataagaggcaacaatgttctatacatcagcacttcgaagaggacccttacggatgacgcatagatcgagtggaacagagtcgactctttttaacttcaaaatcgttaagctgattggttgtgatctctctctgacccatgctcgtacctgctgttttgaggtgggaaaatgtattgcatattgctagacttatcagaaacttctttaatgtaactgtatcagctttgcaaagaacttccggccaagatctccagttgcattttgactgtt

SEQ ID NO: 16886 - DNA, 4271 bp, Oryza sativa
  Clone ID: PAT_MRT4530_22593C.1
gcccgggctccggcggcccaacccctggtctacaggcccgcccgggcaacgggtctctcctcctcccacccccgcttcccctgcttcttctcgttggttgctccacccacccaccccccgcgcgacggtctcgtcttcccaaccccctcgcctcctcgcgcgctcggtgagagcagcgaagaagaagaagaagaggaggaggaagaagccaaggctaagcccagcggcatggctggaccagctcaccgacggaccagatcgccgagttcaaggaggccttcagcctcttcgacaaggacggagatggtttgcatcacaaccagaggagctgggaaccgtgatgtcgacttcgctggggcagaacccacccggaggccgagcacctggacatgatcaacgaggtcgaacgcggacggcaacgtgttccatcgacttcccagagttccctcaaccctgtatggcacggcaagatggaaggacaccgcactcggagtaaggaagctcaaggaggagtacgaggggtgtgacgaacaaagtacccagaatgggcttcgtgtccgcccgacccagatgctcggcgacgtcgatgataccaacgaggtcgggccgatagaatcgactgtaccgacgaggaggtcggattagcattatccgagtacgccgacgtcgtacggtgacggcctagatcaactgacgaagagttcgtcaaggtcatgattgccaagtggaggcatcacttcccttgtcgatgatggcgtagtacccatgggtagggagggaaaccgtgcattgagtgtattagttaaggggatgcaaacactggttttcatgtggtcttccctgatgaagaaaaccgtacccgtacttagttgttagttgctgaacatttttctatctctccagtctctccggtgtgccatggaacttcttgcttgatttttctgtgtgaatctgttaaggcttgctctgatctctccgaaaaaaaaaaaaaaaactaagagaagccgtacgtcgcctggcatcgctgcaagaaatcattcgtcatcgaggtcattagctttcccgatgatcccgaggaggaggcagaagaaggcccgactgcacatgggccccagctggacgagccgagcatctgaatgcacgcacgctccggcgttcgcttcccgaaatacaacaccatcaaggttgttaccatcggtaatcacgacttcgttatcaacttcgtcgctcttcctcttagcgtttacgacattatcctgcgagcccaatggctctgctccctttggccgattctctgggacttcgccaaccagtcgctcgcgttcgggccgccgactgaccgtgtggtttggactagcattgacgcgccggcatcaccttcccaggcggctacaatcgacggcacgccaggcgagctcatgacggagttggttgatacctttcaggacctcttcgttgagccacacggcatgccaccggggcgccacctctgccatcggattcgcctagagcacggcatctcggcagtcgcggtgcgcccgtatcgctatgcccacgtccagaaggatgagctggagcgccagtgtgacgagatgctgcagcagggcgtcatccggccgagctcgtcggcgttctcctcgccggctctattgatcaagaaaaaggacggcgcatggcgattctgcatcgactaccgcgccctcaacgacaagaccatcaaggacaagttcccgatcccggtggccgaggagctgttcgatgagctgcgcggcgtcaagttcttcaccaagctcgacatgcgttccggctaccaccaagtacgaatgcaccccgacgacatccacaagactgcgttccgcacgcatcaaggcctgttcgagttcttggtcatgccattcggattgacgaatgcaccggcaacgttccaggcgctcatgaacgacgtgctcctcccgtttctgcaccggttcgtgttggttttctttgacgatattcttatttacagatcatcgtggtcggaacatctccgccacgtccgtaccgtgttgcaaacactgcaggaccataagcttcgactcaagcgatccaagtgcgagtttgggctctccgccatctcgtacttgggccacgtcatttcggccgccggcgtcgccatggacaggagcaaagttcaggccgttcttgactggcctcagcctaagaacgcgcgtgcagtccggggcttcctcggcttggcggggtactaccgccgcctcatccgtgacttcggcaccatcgccgtgcccctcacggcactattgcgaaaggagggctttcgctggtcggacgatgcgacagcggcatttcggcagctccaacaagcgctcacggcggcaccgttcgtcgtggaatgcgacgcgtcgggctctggcttcggcgccgttcttcatcaaggcttcggaccggtggcgttcttcagcaagccgatagcgccacgccacgccaagctcgccgcctatgagcgtgaactgattggacttgtccaagcagttcgccattggcggccgtacttatgggggcgtcggttcctcatccgcaccgaccattacagtctgcgcttccttctagaccaacgtctatccaccgttccacagcaccaatgggcaagcaagctactcggcttcgactttgcagttgagtacaagccgggaacagcaaacgtggtggcatacgccctctccagaagggacgaacacctggctgaaactctcgccttatcagcccctcagttctccctgtttgatgagctgcggcgcgaggtgctcacgtcacccgagctgactgccattcgggatgacattgccaaggggtcaaaaccgccggcctgggcgttcacggacggcctcatcacgttcaaaggccgtatctttgtgtctgcatcatcaccatccttgccggccatcctcgaactggcacacggcctggggcacgagggcacgcagaagacgctctctcgcctccgagctgacttccacctcgcacgggacagggcggtggtacaagagcatgtccgagcctgtttcacgtgtcagcaaaacaagacggagcacctacaaccggccggcctcttgcaatccttgccggtgccatcggcggtgtgggctgacatcgccatggattttgtggagggtctgccacgcgtccatggcaagacggtcatcttaacggtggtggaccgtttctccaagtttgcccactttataccaatggctcatccctacacggcaacctcggtggcagcggccttcttctcggaaattgttcgtctgcatggtgttccagcttctattgtcagtgatcgagatccggtcttcaccagcactttctggcgggagttgttcagattggccggagtacgactgaacttgtcgtcggcatttcatcctcagtctgacggtcagtccgaggtgacgaacaagatcattgcgatgtatctccgttgtcttaccggcgatcggccgcggcactggctacggtggcttccatgggcagagtactgctacaacacgtcctaccagtcatctcttcgcacgtcgccgttccgtgtggtttatggccgtgagccgcctacgctgcgcgcctatgaaccgggatccactcgtctgctggcagtccaacaggcgatgcaagatcgagatgaatttttgcgtgagattcgtgatcgcctggagcaagcgcagcagacacacaagtcggcgtatgatggcaagcatcgggcattggaattcagtgtgggcgactggttgtggcttcgtttgctccatcgcccgattgcttcgctcggggtcaccggccgtggtaagttgggtcctaaattttacgggccgtatagggttgccgagcggattggttctatggcatatcgtcttcagcttcctccgggtgctcgcttgcatgatgtgtttcacgtggggttgttgaagccatttcgtggaaccccgcctgattctgttccgccattaccgcccattcaacacggccaagtgtgtttgcagcatgccgcagttacgcagagtcgattggctcgtggagttcgtgaagttcttgttcagtggaaggataagcctgctgccgaagcttcatggatgcctttggatgaatttcggactcttcatccggattttcagctcgaggacaagctgcttttccagggggggagagatgtcatgtggggattgcaatacaaacgtcgcagcaacaggcgggcgacggcaaggcatgacgaggaatag

SEQ ID NO: 16887 - DNA, 631 bp, Oryza sativa
  Clone ID: PAT_MRT4530_22594C.1
cgttgctgtacccagggatggaagtgtgtccgcacgacaagtccacgggcgccagccaccgggccaccaccaccatgtacctgccaggcagcccccgagcagcgcaacacctcgcggcggccgctgcccgcggcgcggcggaagcggaaggccatggccgccgcggcggcggcgccggtgggcgcgagaccctccagctgttccccctgcagcccaccttcgtgctgccggatcacaagccgctccgcgccgggagcgcctgcgccgccgtgtccccgacgacgccgtccgcgtccgcgtcgttctcgtgggagtcggagagctcggacagccccagcagcgaggcgcctccgttctacgacttcttcggcgtccattctggaggccgctgagcgtgaaggtgagagtgagtgagcgtagagtggagtggagtggagtggaagttgatatcttcatgagtggacgaacccgtcgtgctttttgaaacttatctgcattgttgcatcgatcattgcatggtttaattggttaagggattggaaggtgtactgcttcatcaacttgaagtgtttcattggaatggaatggtgcatgttttgaggcggctgtgctctcacaaaaaaaaaaaaaa

SEQ ID NO: 16888 - DNA, 638 bp, Oryza sativa
  Clone ID: PAT_MRT4530_22595C.1
ggtattaaggagagggagtagtagttagagaaaaaaacgtaaaaaaatgcataatgttctaagctgtaactatatatatacatgtaaaaacaataacatgtatggagcaaattaagcatggagtaattaagctaggtggtgggcggcatcttggggtagcgagagcgggcgcaggcgacgccgaggaggaggacggcggcgagggagagggcgagcgcggcggcgccggcgttgcagtacctccggtacaaccggcagacggcgtaccagccgctggcctcgttcccccacatggcgatcgacccgatcgcgccggcgcccgccgtcgccgccgcctccaggttcaccaccaccgcgtccgcgtggtgcagccaccaccgccccatcgccttcctcgccgccgccgccgccgtcgccgccgcgtacaccgtgcacaccaggttcaccgccacgaagccaatccagacttggaagagggtgaagtcgacgcggatgccccagcgctgctggtggttggcggcgacgacgacggcggcggcgagcgacgtggcggcggcgagaagccggagcgagacgtcgacggcgatgtcggcggtggaggcgaccgtcaccgcctcctgcgattcgagctccaccat

SEQ ID NO: 16889 - DNA, 1236 bp, Oryza sativa
  Clone ID: PAT_MRT4530_22596C.1
ccggccggaacctctccttccctcctcactccacacgcgcacgctctccccatccctgatcccccatttcgcccctccgatctccgccccgatcccgccgccgccgccgccgccgccatggatcagtccatcgtcggccagatcctggagaagcaggtgctgtcggtggccaaggcggtggaggacaagctcgacgagcagatcgccgcgctcgaccgcctcgacccggacgacattgaggcgctccgcgagcgccggatcctgcagatgcgccgcgccgccgagcgcagggccaagtggcgcgccctcggccacggcgagtacggggaggtccccgagaaggagttcttcgccgccgccaaggccagcgaccgcctcgtctgccacttctaccgcgacaactggccctgcaaggttatggacaagcacttgtcaattctcgcgaaacagcatgtagaaacacgttttgtgaaagttcatgctgaaaaggctccctttttgacagagaaactaaggattgttgttctcccaactcttgcattggtaaagaacaccaaagttgaggattatgtggttgggtttgatgagcttggtggtaaagatgatttcagcactgaggatctggaggaacgtctagcgaaagctcaagtgatcttccttgatggagaagggcctgcacatgcatccaagcaggcaaccaaacgaagcgttcggcaatcagatactggcaactcatcggactctgaatagtttttttactgcttctgaacttatgctaaatgtttttattggctgttacggcaaacggttatgttatccctattagtaataggaaaagttaattagtctagcattgaacatttgaactgggacttgggagttaaaagaggtatctagagtgacacatcacatgttgttacggctttgcttggagttgttgtatattatgatgtttatgatagtttgccttgtttgtttgagtgcaaacaaattcatgcttccctggtagatagaatagatgaatttatcgacgattagcggaaagaatgtcatttctgttctgataatagtgcttgatgatcagtctcaatctgggtgtccatctatctaaaccatgtggcccatccagattgtctcattgcctgctgtgtgtctgtgtacaacattacgctgtagcctgcagctgctatatatattgtccatcaataaatagatcctatgcttttgtgccctggt

SEQ ID NO: 16890 - DNA, 1856 bp, Oryza sativa
  Clone ID: PAT_MRT4530_22597C.1
ccccgccgcccgcctctccccccgcgggttcgaccatggcggcgacgaggtcgaccgcgacggcggcgctcgcgctctccagaaccctcgcccgccgccccgccgcctcctcctcctctagaagaatctccctcgaactctccgccccgagaggcaccaatccattccaatccgccgcgttctcgtccaccaccaccggagatccgccgccgccgacgatggattcgccgatcaaggtggtgtcgcacatcggggggagcggtggggatgggggagggggagcgatcgacgcggggaggtcggcgaggaagccgctgagcctgtggcccgggatgtaccactcgccggtgaccaacgcgctgtgggaggcgcggtccagcatcttcgagcggatgatcgacgccggggccgcggggaagcagcagcagcagccaccgcagacggagctgctgacgaagacgcccgcggggagccggaccagcatcgtgtacaagttcgccaccgacgacatcctccgggagcagtacagggacccgtggaacgaggtgcgcatcggcaagctgctcgaggacctcgacgccctcgccggcaccatcgccgtcaaggttagcaaaataattctacctatggatgatagaattatagctcttacttttattcattttgagttttacatgcactgttctgacgaagatagcacaacaaggccccttttgctggtgactgcttctgtagataagatggagctaaagaagccaatttgtgtggacactgatctgaagatagctggagctgttacttatgttggccgttcttcaattgatatacaaattgaagtgactcaagttgatcaagatagtgatatgcaatcagatccaatcgctctaacggctaacttcacgtttgttgcacgagattctatgactggaaagtctgctccagtgaaccgcctttcaccagaaactgaaaaggagaaacaactattcgcagagagggaagcaagggacaagctgagaaaaagaaagagagaagaacagaagggggtgtttgaaaatgggataaataagcttcatgttgaggctgagcgactaaatagtttactagcagagggccgtgttttctctgatttgcctgctttagctgatagagatagcatcttgctgaaagacactcgcctggagaactctcttatctgtcagcctcaacaacggaacttgcatggacgaatatttggaggtttcttgatgcaccgagcatttgagcttgccttctcaactgcatatgcctttgttgggcaaagaccttgctttcttgaagttgatcatgttgacttcttaaaaccagtggatgtaggagactttcttcgattcaagtcatgtgtcttgtatacccagctcgacaatgcagagcagcctctggtcaatgttgaagttgttgctcatgtaacaaggcctgagctccggaagagcgaggtttccaacacattccacttcaccttcaccgtctgcagcgatgcattgaagaacggactgaagatacgccatgttgttccctctactgaagaagaggcacggcgcatattagagcgcatggacgcagagggtttgttcgactagtcctgcagaaccgcttgtttcagccacatgtcttttttttttactgatcaacgtcagctaatgggaaatgtaaagatgatttaaataacatcagataagtagtagcatgctggcaatatagcggcaaaatgctagttatatgattacttttgcaattccttttgcagacatttgggggtatataataaacataaacctcgagactcaaaaaaaaaaaaaaaaaaaaaaaaaaaaaaaaaa

SEQ ID NO: 16891 - DNA, 504 bp, Oryza sativa
  Clone ID: PAT_MRT4530_22598C.1
ggatattattacctgatcaggtaggcatatttttttcatttcattttttgggacaaaactgaatgtcttttgtacttgtaagataataaagattacaatttagattagcgcaatgcttttactctgttttataggaattcgaatcaatagcaatgtgtagggataaatacatataggaaaaatcacataacactaaataggcataaatacatatgaagtcagaaaaggatctttccataacacatttctgtcctctttctacattttttctctaaagaaagctgatccatgcccattggaaaggtgcaagaacaatagtccattaactttgcctagtaaccggtacatccattggtccatagtattttcttggttcttttaacttgcatgcatggtgcgctctgcatttgtcagtatgttgctagcaatacgcagtattaatagtatgtaactaatttcttttctgaatgtgatgggacaaatagctttcaagaatacaaatta

SEQ ID NO: 16892 - DNA, 3401 bp, Oryza sativa
  Clone ID: PAT_MRT4530_22599C.1
atggacgcgatcagcagcgaggcgccggtgggggtgttcgcgatcggcccgtccacggcgctgggccgcgcgttggcgctgcgggtgctgctctgcggctccctggggcggctgcgccaccgcctcgccgcggcgctgcgggccgcgctccccgtggcggcgggctggctgcacccgcgggacaacacccgcgggatcctgctcgccgtctgcgccgtcgcgctcctgctgcgggtgcgggggcggggcggcgggcgcgccggggtccgggcgcgggtgcagtccgcgtaccggcgcaagttctggcggaacatgatgcgcgccgcgctcacctacgaggagtgggcgcacgccgcgcggatgctggaccgcgagaccccgcgccgcgccaccgacgccgacctctacgacgaggagctcgtgcgcaacaagctccgcgagctcaggcaccgccgccaggagggctcgctcagggacatcgtcttctgcatgcgcgccgacctgctcaggaatctcggcaacatgtgcaactccgagctccacaaggggaggctgcaggtgccgaaactcataaaggagtacattgaggaagtatctactcagctgaaaatggtatgtaattctgattcagacgacttgcctctcgaagagaaacttgcatttatgcatgagacaagacatgccttcggtagaacagccttgctgctaagcgggggtgcttctctaggttgtttccatgtgggtgttgtgaaaacattggtagaacataagcttctgccaaggataatttcaggatctagcgttggttctataatgtgctccatagtagcaacaaggtcatggccagagctggagagctttttcgaggagtggcattccttgaagttctttgaccagatgggcgggatctttcccgtagttaaaaggattttgactcatggagctgttcatgacattagacatttgcagacgcttttgagaaatcttaccagcaatttgacattccaagaggcctatgacatgacgggccggattcttgttgtcactgtgtgttctccaaggaagcatgagccacctcgatgcctgaactatttgacatcacctcatgttctcatctggagtgcagtaactgcttcctgtgcttttcctggtctttttgaggcccaagagttgatggcaaaagacagatttggagaaacagttccttttcatgctcctttcctgttgggcttggaagaaagagttggtgctacaactcggcgttggagagatgggagcttggaaagtgatttgccaatgaagcaattgaaggaattattcaatgtgaatcatttcatagtaagccaagccaatcctcacatagctccactgttgagactcaaggaaattatcagggcttatggaggcagttttgctgccaagttggctgaacttgctgagatggaagttaagcataggtgcaaccaaattctcgaacttggatttcctttaggaggaatagccaagttgtttgctcaagattgggaaggtgatgtcacagttgttatgccagccacgcttgctcagtattccaagatcatacagaatccatcttacgctgagcttcagaaggctgcaaatcagggtaggcgatgcacctgggagaagttatcagccattagggcaaattgtgctattgagctggtactagatgaatgtgttgccctgttgaaccatatgcgtaggctaaagagaagcgcggaaagagcagcagcttcacaaggacatggtcctacaatcagactctgcccatctagaaggattccatcatggaatctcatagcaagagaaaattcatctggttcccttgaagaagaattccttatatctcctcgtacaaaccatcatgcagatggaggaattgctggaccatctaacaaaaaccatcatgtccaacaaaatgtacatgatggcagtgacagtgaatctgagagtatagacttaaactcatggacaagaagtggtggccctcttatgaggacagcctcagccaacaaattcgtcagttttgttcagaatcttgagattgacacagagttcagaacaatttcatcgagggaagacagaactgatgttgtaacaccaaatgctaatttcttggtttctcaggcaattggtagagaatctgttgacaacagtgcaatgcctattactcctgataggagcttgggcaattcaggttctgatcctcatgatagtaatgtccctagatctccatttggttgttcaacaagtatcatggtttctgaaggcgacttactgcaacccgaaaagattgaaaatggtattctgtttaatgttgtgaaaagggatactcttctaacacctacaggtggagttgagcttcagggaacatcgcaggaaccagacgtggaaacaattcagacagagtgccttgatgatgcttcggatgacgacgatgtgggattaaatgctggtgatgaagcagcaattgaccctagagcaaacatgagcagccaaaatacacaacaccaggggtcttcactagaaaatataaatctgtcctcttcagtagattgtgaagctgaaacaattactagtaaatcaaagggttcatctctttttgatattggtatggagattcgtccaacaatcttgagcacggaaagtagtatgtacgagaggtcttctgcaaaaataggactgaggacagtgcatgcagaatttatcagcaatccaggtgctgggaagggagaagttgactcaggggctgctaataaagaattttcctatttttctcaaacagcagatactgttatattttcagaaagctgtgaaactgggcaacatcatgaagtgaatgtagaagctttaacctcataccctgtttcagttctggaagatgataggtctggtggcttcaatttgagtgaaataatggctacaactttcattgccgaagctgatgctccaatatctagaagagatgaagttgagcagcataacggatctccagtggaaacattcctggacacagaaacggtacaagctgggccttgcagttctactttggagggcaacaacaccaacaattccgaggaaatgcaagttgtttgcacctcaggaaccaattagaagtcaagacaagaagggaagttttggatttatcatatgaaaaaacaacttcagtgctcgttgtaaatcatatgcagatgtgcgccatgttctgttgtcgatttaaattcgcacattacggaatatcttgttatgtattgtaggttagtgaactagggaaagaggtcgctgaacttgatgaaattcctcgtaaataggaaaagaatgtcaatggttttgttgaagctgctgcttgacaaaagcaaaacaaattccacttctgcgcc

SEQ ID NO: 16893 - DNA, 448 bp, Oryza sativa
  Clone ID: PAT_MRT4530_2259C.1
gcacgaggatcaccctcttctctcggctctcgcttcacttcctccactccccgcgacgccgacgacgacgaccacgacgccggcgacggcgacctcccggcagcttatattcctccccccgcttgcttgcttcctccccacctcgcctccatcctaggtgagcccagccacacgaccagagctgtgcgagggctagcttaagctagccttcgccttcggggtcctcctcgcggtctccggcgatcccgccctccgccgccgccgccatgtcggagcacctcgcgctgcggagctccgtcgggagccacagctccgcgctgccgccgtcctaccaccaccaccggcggctcccgccgccgcagcagcagcaccccgacccgctcaactccgtctggatccggcggctccaactcctccccaccagccgctccctcccccgcccccgcct

SEQ ID NO: 16894 - DNA, 1855 bp, Oryza sativa
  Clone ID: PAT_MRT4530_225C.1
aaagaatcccctctgccgcgcctccctccgcgccgccgccgccaacgccaagcacccacccccctcccccgccgccatgctgccgccgcccctctactgcccccccgccgccgccaggccctccaccccggcccccgcgcgtgcaaccttccggcagcagcagcagcagctctccgccaccgcgtcctcccccacacccacagctaccaccgctcctctccgtctcgtccccacggccacagccgccgctccccaccgccacagccgtcgccgctcccctccgcctcgtccccaccaccatcgccactcctcctgaccgccgctccctgccgtcactcccctccgcctcgtccccaccaccacagatgtcactccccaccgcctcgtccccatggccaccgactgccgccgccccccactgcttcgtccccaccgaaacagccgccactcccttccgcctcatccccaccgccacagctgccgctccccaccacctcgtccccaccgccatcgaccatcaccgccgctccccacaccgcccaagtcatcgccaccgtaatttgggcctgcctcttccgatcagcggccgccgccgccgccctttgccttgccttctcctccggcacctccgcttccacaccctgtacgccccgaacgcggccgcggcgaccagcaccgtcacgccgacggcaagcagcgccgccttgacaccggccgccctcccgcccccgctcgccgccgccgcctcctccaggctcctcaccttgaagtaccccaccttcctctccacctcgcagtccgccgccgacggcgagtgctcgaacggcaggaattccttgttcgccggctccacgcgctgcctccgcacctcccagtacagcccgcccacctcgccgcccgtgcggccgcagaggccgccgccgccgccgacgtttgcggcggcgcatcccgagccgtccccgccgtcgccgccgccgccgccgccgccgccgagaagcctcgccgcatctcctgcgccgccgccgccgccgccgccgcatcaaccgcaccgccacccaaagaagccagcgccgccgccacagccacgcacaacaccaccgccacatcctccgcctccgttgctgttgtgggcctcatccatagcatccgccgccgttgtccgcctcaactaccacagccgtcgcacaccccagcctccgcttgcgccaccgccaccgccctagcttccgccgccgcccccggccccccccccccctctcctccccttctcccctccttgtcatgcggccatgccgtccgtctcgacaactccgtccgcgaaggaatccccacccacgcggccacgcccacgcccacgcctcgatcgcctctcccgcacatgcgacttcagcgcaactccgccaccgccacctccagctcgccctcgcgctccgtctctgctccgaggcctccaccgcccccgaccccaacttcctcgactccgccgtcgccagtcccgttggcgctgacacggccaatgtcagcgccaatgtgtttggcgctgaggcgacggcctagtgtatacgaaatgagacagcggaggttggaaaacttgacttgcgaacacagccgtagaatgctctcatcctttgtatttcattctctgcacgctggaacttttccgccgagggaggaattgtctgatctctccggaagcgaaaaagtatccaaaaacctcagtaccaatgtttgattgctctaatatttctcacatttgttccagagatgtttgtcctactaaaagagctctttccttcactcctaatggagcagttaatgtaactcatgctttgtgtttctaaaacgctttctttta

SEQ ID NO: 16895 - DNA, 1646 bp, Oryza sativa
  Clone ID: PAT_MRT4530_22600C.1
atggccgcgccacccacgccatcatccccactggtcgcctccacccgccgcttcgtcgcccctcgcctccgctccctcctcccggccgccgccgtctccatgtccagcacctcctcctcctccatctcggccccctccaacggccgccccgtctcaggcggcgccggggagcagcggccgccgccgagtcccctcctcccgcacgagagcctcgaggtcgccggggcgcgctgcggcctcctcgccgggttcgacagcctccgccggccgtaccgagccttccccattgtcgcgtcgaaccggcacgtcgagaccatcttcgccgccttcgcgcggtcgctcccggccgtcgcgctccgccgcgagtgcctccgcacgcccgacgatggcgccgtcgcgctcgactgggtctccggcgacgaccgtgcgcttccgcgggacgcgccggtgctcatactcctgcctggtctaacagggggaagtgatgatacatatgtaaggcatatgctgttaagagctagaaacaaaggatggcgcgtggtggtgtttaacagccgtggatgtgcaggcagtccagtgactacagccaagttctattcggcatcatttactggagatctccggcaagtagttgatcatgttttaggacgttttcctcaatctaacgtttatgctgttggctggtctcttggagcaaacattcttgtgcgctaccttggagaggaaactgataaatgtgttctttctggagctgtgtctttgtgcaatccattcgatttggtaattgcagatgaagatttccacaaaggatttaacaatgtctatgacagagcccttgctaaggctctgaggaatatatttaagaaggaattcataaaattttaggcatgcacttctttttgaaggattggaaggtgaatataatataccaaaggcagcgaatgcaagatcagttagagactttgatgaagggctaacccgagtttcatttggcttcaagtctgtggatgattattactccaactcaagcagctcagattccataaaaaatgtttccatacccttattgtgcatacaggcggataatgacccaattgcaccatctaggggaattcccagagaagatatcaaggcgaacccgaactgcctactgatagtaacaccacagggtggtcaccttggatgggtggcaggtgaagatgctccatttggatgcccttggactgacccaattataatggagtttttagaatatgttcataacgaaaagaactctagtaccaagggtagcatctcatatgagcagcagagtgttacacaaacgtcagccccagatgtctccgtgcatgtgcagcgatagtaacgtttctcttgccagatttttccattcactaggcatgtcttgtgcacatagttgttaggtcgagatgctctacagtgctccaggatgacaggttctacgttattgagttgtgacgatattgtcgcggcctgcagtctgggattctttacagatttatgggctttgcctgttcaactaattttaatatttattccgtattgaccattgccgatacgtgctgtataaaacggtataaacagtatatcgatcgtgttcttaatatacatcctacaactatacgtct

SEQ ID NO: 16896 - DNA, 333 bp, Oryza sativa
  Clone ID: PAT_MRT4530_22601C.1
tttaataacatgacaagccactacatgaacactaggggggattagaattataacacacagctctccgcctcctctgttgcatgctcaagaaaagcctgccaaccatacactccctacccttaaccaccatatccggaccaccctaacacattgacaaaggaccagtatgacatccgggaagctcttgaccaccaacaggtacatgaacgctcaaactgccctgtcccctacagcaggcattactaaccgaattgcatacattaaccgctacaacagtggacctacacgattggaacaaaacttgacggcatatgcccctacccacactaccac

SEQ ID NO: 16897 - DNA, 676 bp, Oryza sativa
  Clone ID: PAT_MRT4530_22602C.1
gttttatgccggagacgatgattgggctctcgctcgcactggcttgctatatattagtgatattcagagttgggtgacgaccatgacgactgtgcttatgagtcatggggatgaggttctgcctgtacggcatagcgcctggatgctgatgctttaggtcaaaacagtggcttgaggacaaggacagacaagcctcttttttggcggacgaggtgtaggactcgagcgatgatagcactcagcgatatgggttccaatcacaacaacaagaaggtattgaagttcatatctttgcaagataggacgtttatcatgtgagtcagacggtatggtctgacgaatacatacttggatactatgagcattgatgacaatgcaccctcaccagagctaatgagcgatgaatcaggacaccatgattctaacgagcataagaggataatgtcaagccaatgaggcaagagaacagcaatagcagaagcctgaagaagctcaagaaagcccctacatcgagtttcagttccgaggccttatcacctaagcattttcttgaaggcaagcagcttaagttgaaagatgaacttaatgattctgatcccaaatcgggggcaacgaattaagagtgatggccgaatttctgtcccatgcttgccagtaaagcgtgtcttgataatca

SEQ ID NO: 16898 - DNA, 1157 bp, Oryza sativa
  Clone ID: PAT_MRT4530_22603C.1
cccgggctgcaggaatcggcacgacgatccaatccaatccgattcagaagtagagcgagcggcggctgcggcgatggcggtggcggcggtgcgggcggcggcggcggacgcggcggtgacgttcctgtgggtgctgtgcgtgtcgacgctgggggcgtcgacggcggcggtgacgtcgtacctccgcatccacgaggggatccactacgcgctcctcgtcaccgtctccctcctctccgtgctcctcttcgccttcaacctcctctgcgacgccctcggcggcgccagcttcaaccccaccgccctcgccgccttccacgccgccggcctctcctccccccgccactcctccctcttccccctcgccctccgcttccccgcccaggccgcgggtgcggtgggtggggcgatggcgatctcggagctgatgccggagcagtacaagcacatgctcggggggccatcgctcaaggtggatctccacacgggtgccgccgccgagctggtgctcaccttcgtcatcaccttggccgtgctctggatcatcgtcaaggggccccgtaatcccatcgtcaagacctggatgctctccatctccaccgtttgcctcgtcctcaccggcgctgcctacactggcccatccatgaaccctgccaatgcgtttggctgggcatatgtgaacaatcgccacaacacatgggagcaattctacgtctactggatatgcccttttgttggcgctgttcttgctgcctgggtcttcagggccgtgttcccaccaccggcacctaaacctaaggccaagaaagcatgaggaaatcaagcacaaacttcaactcaggagttggtacagatgttgggtttgaagaacccaacattatttattagctagaatggtacaaggaataatcctttccaccatatttaattcaaagtaatttaggtaattagcttcggaacactgacaaacccaagagcatgcacattaatttgattggacgacctgaatgtaatttcaatcattcattggtcttgtttgctcttgaactggtggatggtatgaatggatattataaatttatcagtaaaaaaaaaaaaaaaaaaaaaaaaaaaaaaaaaaaaaaaaaaaaaaaataaaaaaaaaaaaaaaaaaaaaa

SEQ ID NO: 16899 - DNA, 1193 bp, Oryza sativa
  Clone ID: PAT_MRT4530_22604C.1
tcactccttccggccgatgccatgagacatgttgtaaatcccgcgcccctgctcgagggcggcggaactggccagatccgtgccgccggccggatctggcggtggagcagccggcggcggggttgagcggtgcggcggcggtgtctggtggtggtggcagcggcgtcgaggcgttggcggcggcggcggaggaaaccgccagatctgcgcctggatctggcgggacggcgaccggcggcggcgtctggtggcggggatggcgacgacggcgagggcggcaaggggatggcgtcggtgaggtgaacctggccgcgccgacggcggatccagcgcccggaggtctggcggtcgcgacggtggtggcgacgagttcgcagtgacggcggcgtgggctaccacggtgggccgtctgcgccgtgtgtcgtcgaagctcgacgatagagacaaggtgcgggaggatgacaaaatggcggcggggatggaagggtagcagcggctgctgtggtggcggcggaggtggcgaggggatggcgtcggtgtggcgaacctggccgcgccggcggcggaaccaacgccggaggagtctgtttgtcgcggcgatggtggtgacgagctcgcggcgacggcggcgcgggctaccacggtgggtggtctgcgccgtgtgccattggagctcgacgacggcgagaaaggacgagaggatggtgagatggcggcggggatggaagggcagcagtggctgtggtggtggcgaccgtcaccacggtatggggaggcatggcaatctcggacggctagcgggggcatggcagacagccgcatccggcggcgcacagtgtttagaggaggggtcggaggccggcttggcacatagagacgcagccgatggcagcagaggccggctcggcgcgagaggcgcgagcggcggagatggaggccggtttggcgcgagaggcgcggccgatggagggaagccggattggcgcgaggggcgcgtccggtggaggaggccggcttggcgcgagaggcgcggccggcggtggaggaggcgacctcggcgcgagggaagagctgccggtggatgtgggcggtttttggcgcataaaggctggccggcggtggggcgctggtgcagtgatcccacatggcggcagaggttgagtggtggtggattgttggtctagcggcggtcg

SEQ ID NO: 16900 - DNA, 1149 bp, Oryza sativa
  Clone ID: PAT_MRT4530_22605C.1
atggcggcggttggggatggagctggagaagctttggatgacaatcattctaggttcaacaagattttgagtgatcttagatctgtagattctgcttatgatattaactactcacaatctaagatttctcgacactttttgattggtcttgacatgtatatttgggagatgaaagttacatctattcatgagtctattgatatgtccactctgactttggattcgctttacacaaaactcaaaactcatgagataaacattctttctcataaagttgattctaaatctagtgctttgatttcttcctcatcttctttggatgttggtgcttcttcatcaaattctactactcttactttgattaatgccatgtccgatgagcaacttgaacggttcgaggaggagaacttggttttagctgctaacaagatttctcgagctatgaacaatgtcaggaacaggaaaagaggaggtccaacttgttgcttcgagtatggagcacttgatcacatacgttcgcattgtcctaagcttgggagaggcaagaaggttaccaaggaagatgaaatcaacaagaaggagaagaagaagagtctcaagcagaggttaatccgagaactcatagaagcttttgatactgatgagtcggagaatgaagaagagagcaaagatgtggatgaatctgatagtgatagtgaagaaaagcttagttatcatcaattagaacatgctgctttcaaatttgctaaaatacttaaaacatgttctaatatgcttgatgagaaggatcatactattgagattctaaatgctgaaattgatagattaaaatcttcgattcctaatgatgatgattgcaaatattgtgaagttttattttctgaaattaatgttttgcgagatgtcaattctgttagtcataagaaattggaatctgagattgaaaagtctaaaaaattggagtcttcttttgctcttggatttgctttgcatgctcgtgttgttgatgaattggttttcacaaagggctttttgacaaaatacaaagttgctttttgtgcaagtactttgttaaatttttatgtccaaaaagggctaaacaaaataaagatgttttggtttctcaaaattgttctaagtgctttttga

SEQ ID NO: 16901 - DNA, 503 bp, Oryza sativa
  Clone ID: PAT_MRT4530_22606C.1
ggattcttctcatcatgtgatcgatcagcgatgagcagcaaagtgtgtatgagggcgcctgggcagaggctgtcacggtttaaggacgcagggctgtgtcctgtcacaatgatcataagaccttcagtcagctatggctagattcaatgatgccaattctgctgcttctgcacggccatggccaccaccatggcccagctcgaaagaatgtttctgccctgccgtttcttgcatgcttttgattgctgcagcagcggtgcttttgcgcagtgcatgcatgcgcggttggtttggtttgccttttgctcgcttcctttccaaaggctgtgcccctcgccgcagtcgcgtcggcttttgccgctggcgcggcgcgcgcgccatgccggtttgacctgtgacctgaccgcgcgcggccggcggcgaaaactcggattttacttttgattgatgatgagtgagttcatcgtcgtgtgtgattggttgtatttgtggatgcaggcacg

SEQ ID NO: 16902 - DNA, 1045 bp, Oryza sativa
  Clone ID: PAT_MRT4530_22607C.1
ctcgccaccgctcgagcggctgccggcaaagctgcgcggccacaaggacggcggcggcggggctttgtcctcgcgctcgggcatgggagggggacctgctcgagggcggcggaactggccagatccgtgccgccggccggatctggcggtggagcagccggcggcggggttgagcggtgcggcggcggtgtctggtggtggtggcagcggcgtcgaggcgttggcggcggcggcggaggaaaccgccagatctgcgcctggatctcgcgccgacggcggatccagcgcccggaggtctggcggtcgcgacggtggtggcgacgagttcgcagtgacggcggcgtgggctaccacggtgggccgtctgcgccgtgtgtcgtcgaagctcgacgatagagacaaggtgcgggaggatgacaaaatggcggcggggatggaagggtagcagcggctgctgtggtggcggcggaggtggcgaggggatggcgtcggtgtggcgaacctggccgcgccggcggcggaaccaacgccggaggagtctgtttgtcgcggcgatggtggtgacgagctcgcggcgacggcggcgcgggctaccacggtgggcggtctgcgccgtgtgccatcggagctcgacgacggcgagaaaggtcgagaggatggtgagatggcggcggggatggaagggcagcagtggctgtgctggtggcgaccgtcaccacggtatggggaggcatggcaatctcggacggctagccgggggcgtggtagacggccgcatccggccggcacggcagtgtttggaggaggggtcggaggccggcttagcgcagagaggcgcagccgatggcaacggaggccggctcggcgcgagcggcggagatggaggccagcttggcgcgagaggcgcagccgatggagggaggtcggattggcgcgagaggcgcgtccggtggaggaggcccgcttggcgcgagaggcgcggccggcggtggaggaggcgacctttggcggtggacgtgggcggtctttggcgcacgaaggctga

SEQ ID NO: 16903 - DNA, 221 bp, Oryza sativa
  Clone ID: PAT_MRT4530_22608C.1
ctttcgctcacgttcttaccaatgttactgattgttactcctgagcttccttttgccactgattaagaaattactcacgactggcagcggccagttgtctctaccagctatacctattgcttactgtagaagccttgtccctaagtggctttacatttgtattagacgccttatttgtagcatctgttgaacagcctgcaaaaaaaaaaaaaaaaaaaaaa

SEQ ID NO: 16904 - DNA, 225 bp, Oryza sativa
  Clone ID: PAT_MRT4530_22609C.1
atggcgcgcggcgcgctgcgccgcccccatcgccggcgaattcgacgaattgtccccatcgccggcgagttcatctaccgcctcgacgcaccgcccccatcctcaacgtgttcttccaccgcacctcaacgcgtcacccccatcgccggagagttcgtccaccccgcctccgtcgccgatgagttcatccccatgttgatgatgtcggctgaggcctcctcctag

SEQ ID NO: 16905 - DNA, 957 bp, Oryza sativa
  Clone ID: PAT_MRT4530_2260C.1
atggggaagcaaatggccgccctgtgtggctttctcctcgtggcgttgctctggctcacgcccgacgtcgcgcacgcgcagacgcagatcctcttccagggttttaactgggactcgtggaagaagcagggtggttggtacaacatgctcaaggaccaggtgggcgacatcgccagcgccggcgtcacgcacgtctggctcccacctcccacgcactccgtctcgcctcaaggccagcaagccatgcatctccttcatctcgttacgcttctctttgtagcatgctacatgccgggacggctctacgacctgaacgcgtccaagtacggcaccaaggcggagctcaagtcgctcatcgccgccttccacgccaagggcatcaagtgcgtcgcggacatcgtcgtcaaccaccgctgcgccgacgacaaggacggccgcggcgtctactgcatcttcaagggcggcggcccgcgcggctgcctggactggggcccctccatgatctgctgcgacgacacgcagtactccgacggcacgggccaccgcgacaccggcgccgacttcgccgcggcgcccgatatcgaccacctcaacccgctcgtccagcgggagctctccgactggctcaggtggctcaggagggatgtcggcttcgacggctggcgcctcgacttcgccaagggctactcggcggccgtcgccaggacgtatgtccagaacgccaggccgagcttcgtcgtggcggagatatggaactccctgagctacgacggcgacgggaagccggcggccaaccaggacggccagcggcaggagctcgtgaactgggtgaagcaagttggcgggaccggcgacggcgttcgacttcacgaccaagggcatcctgcagtcggcggtgcagggcgagctgtggcggatgcgggacaaggacggcaaggcgccgggcatgataggctg

SEQ ID NO: 16906 - DNA, 678 bp, Oryza sativa
  Clone ID: PAT_MRT4530_22610C.1
atggcggcggcggcggcggagtttatggagctcgcgctcgagcaggccaagtttgcgttggacaaccttgaggtccctgtaggatgtgtgattgtggaggatgggaaggtgatttcatccggtagcaacaagacaaatgccacccggaatgctacaaggcatgctgagatggaagcaattgatatcctgcttagggagtggcagggcatgggacttgatcagccacaggtcgcggagaagtttgcaagatgcgacctttatgtcacatgtgagccttgcataatgtgcgcaatggcgttgtcgatacttggaataagggaggtgtactttggttgtgctaacgataaatttggaggatgtggatcaatcatgtcattgcatcagagttcttctgctgaactgtcaggggaggaaattcccgggccaaaaggttacaaatgtactggtgggatcatggcggaggaggcagtggctctttttagaaatttctacgagcaagggaatccaaatgctgccacatgcgttcatgtgattgttattattatttgcagccagatgaacgtgcaggaaaggtattggatcaaccccgataagatggtactggagatcctgcatgctgaatccaggtccaagcaggaaatggctctgctgctttgccaaaacttcatcactatttaa

SEQ ID NO: 16907 - DNA, 305 bp, Oryza sativa
  unsure (1)..(305): unsure at all n locations
  Clone ID: PAT_MRT4530_22611C.1
cccgtttcgacccagcgttcgcggtcgcgtgggcgctgtcacgctggcgggcggtggtgaagcgccagtgcgtgggggagggggcacccgtcggcgccgtggacgagcaactccggcaggactgctgccggcagctcgccgcggtcgacgacagctggtgcatgtgctcggcgctcacccacatgnttngaggtggggggggggggggtctnnnncccctatnttttccaccccatggccnntgtgttccccggctgccggcgtggtgtcttggatcgcgcggcggcgagccttcctgcgttttg

SEQ ID NO: 16908 - DNA, 1224 bp, Oryza sativa
  Clone ID: PAT_MRT4530_22612C.1
atggcgcgacgaaagatcccgataggcctcatcgcgcaccggcagaagcgcgccgcgacgtacgcgaagaggaaggagagcctgaggaagaaggcggaggagctctccacgctctgcggcgtccgcgtcgcgttcgtctgcgcgggccccgtcgtccccggcggcggcggcggcgcggcggggaaggaggaggtgtgggagtcggaggagggcgtcctcgcggagtaccgcgccctcccgccggaggctcgcgcgcagcacgcgcaccgggtgtacctcgaggaggaggtcggcaaggagagggccaagctcgccagggtgaggcaggacggcgcgttcccgtcgtgggacgccgcgctcgacggcatcacggcggacgaggcgcgggcgctgctcgagtccatcgacgcggcgagggcggccgcgaacgcgaggcgggaggcgctgggtctgccggacgacggcaacggcgtggacgatgacggcggactagatctgcagcagcagcaggagcacgtcccgccgggcggttctgacgccgtcgtcgtgcctgtcggccatggcgtcctccaatacaccggcagcggcggcggcaaccagatgcagacgacgccggccgcagatggcatcaactgcgccgacctgtacggcgccgttccgtgggatgacaccttccagccgcaggtgatgcgcaccggtgaccacttcgtgcccatggacggctacctgtggcaagccccgggcaatggctggcccgatctcgccacggggtgcaccaacgagtcgtgctcgtgcaacgccgccgccgccgcagccgccatgccagccatgtatccccccaccctagacaccgtccacggaagctttctcgccgcgccggctcaacccatacccatcgcattcagcaccagcaccgacttcatcgacgcgccgaacgacttcctcaccatgggcctgtgtggcggcttcaccaacgtcggcgactactcggcggcgcagcctcagagctcggccgatggaggattccagctcggtgacacgttcgccgccgagcccggcgacacgcaatcccagaattgggggagcttcatcaacgtcgtgagcgacgactcggcgcagtgcaactgcaacgccgcaatccatcttgatcagatgtattacctattcggtggcacgggcggcggcgagcccagcgacacgcagtcccggcattgggggagctga

SEQ ID NO: 16909 - DNA, 577 bp, Oryza sativa
  Clone ID: PAT_MRT4530_22613C.1
atggcattcttggttgctaggtcgtcacgttgtgagcatgactgcatgagagtaggctcaagtccttgttttccatttccttcttttttttttcccttccttttctccccgccccctccctctcatctttgtttggtcattcctgtaaattttattcctcttaatacaaaggtgagcaatccttttgagtatttccaaaaaaaaaccccattacttgtagttgtaggtgttcttgactattgagacttcagaagggttagatttgaattctttgctcaattgaaatagattacaacgaatagattagttaattacaacgaatgttgaatgacctcaacatcctaggtagggaaatcggaatgtatccctattgcattgccaagttactgggttcttaagggtccaaagaattattgcttcgaagtaaccatgttgttctctgaagactggccatcccttgaactatgttcttctcatgatcctattgggtaatatgctcggtagctctaaattccatattatgcccagcttaacataacagtaacttctgcttggagagctataactattctttttt

SEQ ID NO: 16910 - DNA, 993 bp, Oryza sativa
  unsure (1)..(993): unsure at all n locations
  Clone ID: PAT_MRT4530_22614C.1
tttttttttttttctgttacaacttatttggattaaatcataacccttataaatatgtccattagaaccatggagagtgggatggagtcagttggagtgtgaagaaagagatggagagagtattatggagagactgatctttatatgaatatatgagagccaattttgataactctcttaaagatgctctaagcacttaaaaaaaagtgaggctaaaatagagtaaggttgaaggacacatttcattgttcttttggcgtctatacctatatttgagttttggatccacgagaacgtgaccaccatgttgctgttgcccccctcccccctgacgacacacgcaattattggagatccttcatatccgttctctgccatgggctctctacccctgcacaacatttatgtgttgggagacagcactgtacctgaggtagatcaaccggtgggggagggggaccatcggcatatttcccggtcgagcctgccggtgacgccggtgggtgaccaccgtcggatttaccgaacggtctgcttcatcagtgatcagttccatgtgggaagttactattggagcagtgcagaaactagaaaaactagaaaggcgatgtctggaatcaagatggcagactcagagcctggagacgcccatgaacgcagcacttccatggttccattcagtgcttaccactaattctgtcatgggtcacatactcacatctaccgttgatgccaacagggatgtgttttattgtaagaggtactcatatctactagtgagtagtgatgcttgttattcttgccatcattcgaacttggagaacaatgaaatctttagagatggtgccactgtgccgagctaccgggattaaacattgtctcgaatgccttaccttactctgtggctgagtgcatcncgtggagcagaaaccgaagatataatcatcttccctatattaaaaaaaagggcttcacttacagttagcctcgtgc

SEQ ID NO: 16911 - DNA, 1453 bp, Oryza sativa
  Clone ID: PAT_MRT4530_22615C.1
cggcacgccctcgccgccatgtcgtccgccaccgccgccgccaccgccaccatcgccgccgccgccgcgaagctcgccgccacccccgcccccgccccctcccggcgccgcctcacgctccgcgggaaccccaccgcgcgccgctgcgtcgccgcgatggccgtgtccacccccaggtcggccgccgccgccgcgttcctcgagcgccgcgagtcggagcgcgccctccacttcgtcaagtaccagggccttgggaacgacttcatcatggtggacaatagggattcggccgtgccgaaggtgacgccggaggaggcggcgaagctgtgcgacaggaacttcggcgtcggcgccgacggtgtgatcttcgtcatgccgggggtcaatggcgcggactacaccatgaggatcttcaactcggacggcagtgagccggagatgtgtggcaatggagtccgttgctttgcccggtttatagctgagcttgaaaacctacagggaacacatagcttcaaaattcacactggcgctgggctaatcattcctgaaatacaaaatgatggcaaggtaaaggttgatatgggccagcccattctctctggaccagatattccaacaaaactgccatccaccaagaatgaagccgttgtccaagctgatttggcagttgatggctcaacatggcaagtaacctgtgttagcatgggcaatccacattgtgtcacatttggcacaaaggagctcaaggttttgcatgttgatgatttaaagcttagtgatattgggcctaaattcgagcatcatgaaatgtttcctgcccgcaccaacacagaatttgtagaggtcctgtctcgctcacacctcaaaatgagagtctgggagcgtggtgctggtgcgacgcttgcttgtggaaccggtgcttgtgcagtagttgttgcagctgtcctcgagggtcgagctgaacggaaatgtgtagttgatttgcctggtggaccattggaaatcgaatggagggaggatgacaatcatatttacatgactggtcctgcagaggctgtcttctatggatctgctgttcactaggtaccagggaccaagctggaaaagtttaccgcaactgggagcctgagagattgagtataaggtctatcaaattggtgttttggtaccagcacaacccctcttgattcttaattgcgcctgtggcctgcttactatgggcagaattacggggttctttcaaacaaatctactattttaaatcttttctgcttctttagtttgtcaggtttgaaccctatattggtagtaaatctctcctactttttttttgttccttcctttggcaataaacccttgctgtcttaagtgcataactgcatgtgcatttgagttttttgtctacagatatcctgatttactacagaatgattgagcatgtgtgttatttggc

SEQ ID NO: 16912 - DNA, 513 bp, Oryza sativa
  Clone ID: PAT_MRT4530_22616C.1
atggcatggcacggtgtgacattggagaaatctggagcgttgaaatctgatcgaacggtccgctgcgccagcccacctgcagcctccgttttcaacccaagatctccgttcctgccgcccgacgccccaatcccgcggctcgcctcaatccacacgctccactcccgccgccccgcacgcgcccgcaccggacgccgggccgtcgccgcgaatagggaggcggccaccgccgcgcgagctgggagcagggctgccggcgtagaggtcccagacggcgaccagcggagagcaaggcagccgccttgtcacttcgtctcccgtgcccacgtcagcccgccaccgcgccaggccggagagacgccaggctgtcgtgccgccgcgagtggggaggggaccgggcggcagccgtgcgaggccagggccggggccctgccctgccaccgtcatccttggcgatggaggcagccggccgtcggggtgccgatggaggcgatgggatttcatgctgtttag

SEQ ID NO: 16913 - DNA, 273 bp, Oryza sativa
  Clone ID: PAT_MRT4530_22617C.1
cgtgtgggcttggtggctgacaggtggcagccaggagcggcggcgaccctcgcccgcccggatctggaggacgcgcccctctcccgccggctggatccagcggttggcggtggcgacgtggccgggagcggcggtgagcttgggagaggtgacgggcttgtgagccagctgcggcggccggtcgcggcagaaggcggcgacgccgccaccgacgacgacgatggtggcgcacgtcgacaacgacggcgacggcgaggagggtggcggtgggcg

SEQ ID NO: 16914 - DNA, 1455 bp, Oryza sativa
  Clone ID: PAT_MRT4530_22618C.1
atggttaagaggagcgacaacatggacagctccagtgaatgttctagaggagcccataaaaggcttctgcaggacagtaggagctatgaccaggagaacgctatgaagtgctactacaggtgcacgtaccatcaggaccatggctgtccagcgagcaagcacgtggagcagcacaactcggaggacccgcctttgttccgggtgatctacaccaacgagcacacatgcggcaccagcaattctgcctccgattacatggcttcctccatgcaaatccagcagattgccgacgcctccttgagaaaggcacaggcggcggaaagactgagaaaggcagaggtggaaacacctcgcctgatgcattctcctcctcctcgctgcagcggcggctacaacatggcgatgaaagaagagaaggatgtgatcgtctcctcgctgctcaccgtcatcagaggctgtcacattgcagaatcagctggtggttttgataaggggatgtctagacaacgtctccaaggagagaacgacggaaacaccaccgtcgccgtccgccaagctccattgctccaccgccatcaaaacctctgccggtgtgtgggtacactgcaccggcgcccccgccggccagtctccgcatgcagccacctcaccgggctctgcctccaccgacatcacctctcgctgcgcagccatcacgcaccggccgtcctcgacgtcgccggccaagcctacacgcgttggacagttgccggccgcaactccttcagcgagccgacaccacctccgccgtcgcgggctgccggccgagccgacctcaccggccaaccgcaaccaccagttgctgcgcctccgcacgccgtcgcccgcgcatgttgccacctcctctgcgagcgcggcctcttgcccctccgccaccgtcacggtttccggggcctccgcaccatcgcacgtgccttcaccagcctccgcgccgtcgcaccgtcgccgccagccactgcctccgtcgccaatagcgacggctggatgctcgtcgtccggccagatccagccgtcgcagagtcggacctcacccgccaccgcgccaccgggcgccaccgtccgtcgccagcagaagaccccgccaccggccacttacctgccagatccaggcgcggatctggtggtcacttctaccactgtcatcacttccaagcgccggtgccacctttgccaaacgtcgccgccacaccgcactaccacgccgatgccgccgacatcctccccgctagatccggccggacggcacggatctggacggttccgccgtcccaaacgccgagtagcccccctgcccttgcgtggagagacgaaagcgttatctttgatctcgccgggcacgaactcgaggaggaagactaccctgttgtcgactacgagtcagaacttcagaccgccatatcgacaacagttagatag

SEQ ID NO: 16915 - DNA, 1101 bp, Oryza sativa
  Clone ID: PAT_MRT4530_22619C.1
atgccgattatagacgcgtcacaccaagctcacccattaataaagaccaagctcagacgtccattcatttgcgacatatgtcgtcagtcaggttctctcatttgctaccgttgcaagctctgcaacttcagcatccacgagagttgttctcaagtaacgggagaagataatccaagattacatgaagaagcacatgtagaaatttacaatagccacaaatgggagcaaggcaacacgagcaatgtggaaatgggagtaccccaacaatttcaaggaggaactaatgttgaacttgcagcttcagaaggggttggaatacaaggaacagaggcagttgcagttccaacaaaaaagactagaatatcaaaaacagcagctgcaaatcaatttgctacaatttcgcataaattgcttggcgcaacaacagcagttataagaggagcaggacagaaagcaggaagcaggaagtcatcaatactgcaaaaattgaagttaggatcgacggttacaggagggccaggaacaatccatgggaaggacaacaaagaaaaactaacggaggaggaatatgatgaagaggaggaagaagaggaatacgaggaagaggaagaggaagaagaggaatgtgaagacgacgacgacagggttgtggtcggggttggaattgaatcggccatagcccttataacgattctcattgtctcgtgtgcgtcgtgcctcccggcggccgttgaggtgatctcggagatcgccagtgccgcgaggtggaggggtggctcgatgaggcgattccctccgttcagggtcttcaccattggcatcgccagttggtggctactccgggtgcgctgcggcagcggcctcttcgaacgcgttgctgaggaccttgtcgcttcggaagtcatcttcgtaggctcgcggttcttgtcggaacgacaaggtttggccgcattagaatccttctcgagctcggatgtcgtcgatgttccgttctccgcctcggcgggaggatctttcgacatggagtcgtcttggtttgtagccactgcgttctcgtttccggtcattgatggacaggctgagatcggcattgtggtgtaa

SEQ ID NO: 16916 - DNA, 2148 bp, Oryza sativa
  Clone ID: PAT_MRT4530_2261C.1
atggccagcagcctcatcaacctcctcctcacggaggtggcggccatcgtcagcatcgtcctcctcgccctcctcgtcgtgctcagctcctaccgccgccgctccggccacccggcgctccgcctcttcgtctgggcggcctccacgctcttcctcccgctcgtctcctacgccgtctccgccgccgccaagtgggacgccgcgcgcgtcccgctcctcctcgcctggaccgtcttcctccagatgctgcgcaacaccatcgacaccgcccgctcgtcctcgtccacgatcggcaacggcagcggcagcagcaagttcaggccctccgtcgagcagctggcgaggatgggctgggtggcgttcctcattgtcagcagcgacggcaccgccgggagcccacagctcaccggggtgctcctgtggctgtgggtgctcagcctcgccaagctcgtccaccgcctcgttgccgccgagctcgccaagaactcgttcgccgtcggccttaacgcctacctcatctccgactacatgaagcagctgtacgggcaagaccaaggagaccacgacgtgcaagctcctccgttgttggtgatgggcgaggagaagctgcaaatcgaggcgaggccacaggggtaccgcattggccggacatcgccgccgccattgtgcgtcgacgccgggcatgtggtcaccatggaccggatatgccggctgttctcctccggcgatccactcgtcgcttctaacccgcagatcaaggacacatgcctctcgttcgccctgttcaagctgcagctccggcggttcgtcgggtgccccatcgccgaggcgggctctcgccgttcggtggcgttcgtgctcgacggcctcctcggcgagagccacgagcgggtgttccgggtgatcgagaccgagctgtccttcctcgccgacttcctctactccaagctcaccgtcttctacgcgagcgggtggtggttcccggtgctcaactcgatgctcgtgttcgccacgtgggtcagctgcctcgccgccggcggcgccatcgtgcacgacatgacgtgccacggcacgacgctcgccagcaactacgacaacctgagggagtacctgcagaaccacgacaccgtgttccacatcatcgtcggcctcgacgtgctcgtcaccgtctccttcatcgtcgccatcgtgttcacggaggggtgggagatcgctacctacgtccgctccgactggatcaaggtgtccgccatctgcgagtacgcgcgccggccgtcatggcgcaagtcgccatggactcgccgcaacgtcggccgagttctcccgctcaagccaatgcagcgctgggacgatcggttcgggcagacgtccatcctgcagctccgtccgtgctactgtggctgcgtctcccggcaggttgaccggatcgccaagtcgtcggccactgtgccggcggcggtgaagacggccgtcgtggacacgctaaggacgaaccaaggaaacctgggaaacggcgtgctctcgttgcagcggaacggcgtcgccgacaagctcgcctgggcgtgccaccacgccggcgacgagagaagcgtctccgagcagatcctggtatggcatgtggcgaccaggcttctcgagatcatgcgatcagaaggcgctcacgggagacacgacgacggagacggcgacggcggcggagacagcgacacggtggtcgtcgcgacacggctgtcgcggtactgcgcctacctggtggcgctgaagccggagctcctgccggaccacccggcctggacggaggagctgtacgagggcgtggtggaggaggtgtcgagggtgctcgcgcggttcgcaggggcggtggtgcggtacgagcgcgcggcgacgtgcctcggcgggagcacgaacgcgacgctgaggaaggcggccaagctcgggcggcagctggcggaggagctcggcggcgacgaggagttgccctggagggtgcttgccgatttctgggcggagctcgtcgtctacctcgcgccgtcggagaacgtcacggcgcattccaaggcgctccgccgtggcggcgagttcatcaccgtgctgtgggcgttgctcggccacgccggcattgttagccggccggacactgacgtctga

SEQ ID NO: 16917 - DNA, 288 bp, Oryza sativa
  Clone ID: PAT_MRT4530_22620C.1
atggagaccgtgaggcgcgacgggagggcttcaagcggcggggatgggtcgagggagaccgggaggcgggagctggggagggttccaattccggccagcgccctctcttgcaaccgcgccatcaaccggctcatcctcggcttccacacagaccccatcgaccaccccaccagctcaccactcgacgtgtcgatcttcttcaccccgactcgtccatgtcgctccacctcgcctcctccaagccaccttgaatccacctcgatatcggctcccagaaaggggaaatga

SEQ ID NO: 16918 - DNA, 798 bp, Oryza sativa
  Clone ID: PAT_MRT4530_22621C.1
atggttaagaggagcgacaacatggacagctccagtgaatgttctagaggagcccataaaaggcttctgcaggacagtaggagctatgaccaggagaacgctatgaaaaaggtttgcatcggaacaagaactgagtacacatatgcaccatatcatgatgggtaccagtggagaaaatacgggcaaaagatgatccggggcaactccttcccaaggtgctactacaggtgcacgtaccatcaggaccatggctgtccagcgagcaagcacgtggagcagcacaactcggaggacccgcctttgttccgggtgatctacaccaacgagcacacatgcggcaccagcaattctgcctccgattacatggcttcctccatgcaaatccagcagattgccgacgcctccttgagaaaggcacaggcggcggaaagactgagaaaggcagaggtggaaacacctcgcctgatgcattctcctcctcctcgctgcagcggcggctacaacatggcgatgaaagaagagaaggatgtgatcgtctcctcgctgctcaccgtcatcagaggctgtcacattgcagaatcagctggtaataatagcgccgctgctttgccggtaaacaggccgccgccggcggtggccagaagcgaccattacagctgcagctatgcgatttcgcctgaattgttgccggcgtccgacgacctgacactggacttcatgctggattcagtactggatccccactgggtcgagcctctggatttggcttggctcaaagaatccacgcacactggttga

SEQ ID NO: 16919 - DNA, 993 bp, Oryza sativa
  Clone ID: PAT_MRT4530_22622C.1
atgacacttgagcatcatcggtcatcggttgtcggtccggccggggtcgggttgggttttcacccaccgtccaccacctaccaatctaccacagctccattgctccaccgccatcaaaacctctgccggtgtgtgggtacactgcaccggcgcccccgccggccagtctccgcatgcagccacctcaccgggctctgcctccaccgacatcacctctcgctgcgcagccatcacgcaccggccgtcctcgacgtcgccggccaagcctacacgcgttggacagttgccggccgcaactccttcagcgagccgacaccacctccgccgtcgcgggctgccggccgagccgacctcaccggccaaccgcaaccaccagttgctgcgcctccgcacgccgtcgcccgcgcatgttgccacctcctctgcgagcgcggcctcttgcccctccgccaccgtcacggtttccggggcctccgcaccatcgcacgtgccttcaccagcctccgcgccgtcgcaccgtcgccgccagccactgcctccgtcgccaatagcgacggctggatgctcgtcgtccggccagatccagccgtcgcagagtcggacctcacccgccaccgcgccaccgggcgccaccgtccgtcgccagcagaagaccccgccaccggccacttacctgccagatccaggcgcggatctggtggtcacttctaccactgtcatcacttccaagcgccggtgccacctttgccaaacgtcgccgccacaccgcactaccacgccgatgccgccgacatcctccccgctagatccggccggacggcacggatctggacggttccgccgtcccaaacgccgagtagcccccctgcccttgcgtggagagacgaaagcgttatctttgatctcgccgggcacgaactcgaggaggaagactaccctgttgtcgactacgagtcagaacttcagaccgccatatcgacaacagttagatag

SEQ ID NO: 16920 - DNA, 351 bp, Oryza sativa
  Clone ID: PAT_MRT4530_22623C.1
tgttttttttttttttttttttgcagcacaaattctacaagttccacatgacagatcaagcacaaaaattttacatcacaaagattaagaggtgagacatcaaagatcgagcacaaaaagtttacattacgaacccacgcgtacgcggacgcgtgggcggtgctgggacattgtggacaagtacaaggtgacaatattttacactggaccaacactcgttcgatcactcatgcgtgatgggaccgagtatgttacacgtcactttcgaaaatctctttgagtcttgggaagtgttggtgagccaattaatcctagcgcatggggaaggttctacaatattgtcggggactt

SEQ ID NO: 16921 - DNA, 256 bp, Oryza sativa
  Clone ID: PAT_MRT4530_22624C.1
tgtgggctgttccttgcacccaaggagttggaggaggcggctggaaggacaccgaggacaccagcgagacgcccgccatcgacgtctgcaaggggctgatcggcgacaaggccaaggtgagcatctacgacccccaggtgacggaggaccaggtccagcgcgacctcgccatgagcaagttcgattgggatcacccgtgccatcttcagccgatgagccccacggccatcaagcaggtgtcctgcgcctgggacgc

SEQ ID NO: 16922 - DNA, 165 bp, Oryza sativa
  Clone ID: PAT_MRT4530_22625C.1
atggcatacaatgagagtgaagatgttgagaatgctgataccgtgaacactatttgtactaggatagctgatgctttggttgaaattgacaaagataacatcgtccttgtcaaggctgaagatctgtcatatgagcagaaggcggacacggaacaaatgatgtag

SEQ ID NO: 16923 - DNA, 152 bp, Oryza sativa
  Clone ID: PAT_MRT4530_22626C.1
tgcacaaaggacatcaacatgctacatgttcttgagccattttgtgaagacgtcgggagccccgggatccataacaatgaagcgacagatggaatgattaggctcatgctggagtctgcttctgctgctaatgatgacattattgaattcaa

SEQ ID NO: 16924 - DNA, 334 bp, Oryza sativa
  unsure (1)..(334): unsure at all n locations
  Clone ID: PAT_MRT4530_22627C.1
tgggtttctctcttggatttntgatcagaaggaagaaagaagctgcccagtggaccccagtgaagaacgaggagacctaaaatccccccctgtatttaatgcaaatgcaaatggtttttgatcaacaacctgtttataggatcgtgccccatttnttggggctntacagtgttgtactatagtgcatanagtattgtaacatgtgctgtgtcaatcgtgggcattgtanagtttgatcagcatatntgttgccgtgattttncgatacataaaggtttcaataagtgacattacgttcccctcnaaaaaaaaaaaaaaaaaaaaaaaaaaaaaa

SEQ ID NO: 16925 - DNA, 135 bp, Oryza sativa
  Clone ID: PAT_MRT4530_22628C.1
atggtgacgcaggtgtttatcctggttcaggccctcgagaagagggcgccggcctcctttatacaatctcaggccgccggcgccaatcaaggccccgtatcctcacaatctggatacttgccatctattacatga

SEQ ID NO: 16926 - DNA, 369 bp, Oryza sativa
  unsure (1)..(369): unsure at all n locations
  Clone ID: PAT_MRT4530_22629C.1
ccggccgggcaaaacttcgttccagttgctatatgaaatatgagtgattctatgataggcttggtgatagaaaattctaagctatttcaaatantttggagctaaacaacgtagtagtagatgtttggtgaattgaagatttgccacgttagagctgataatatgatttgtcactcatgtgtctatgatatactagaccagtgagtgttgcgtgagttacttggagtagggtaaaaaatgttatggatttttctgtccggctatcgttttccttttatacccaccttttgttttgttttcgaattgtctggaaatggaatcgaatggtaggggatctttattgggaaaaaaaaaaaaaaaaaagcggcc

SEQ ID NO: 16927 - DNA, 429 bp, Oryza sativa
  Clone ID: PAT_MRT4530_2262C.1
tttgtttttttttttttttgggttttttttttttttttttttttttttttttttttttttttttttttttttaaaaggccccccttaaaaacaatatttatttcaaaaacctggcttatttatgcccccccaccaatttttgggaaaaccccatttatccctaatttggccccgggcctttccccccaaaaaaatcaggggaaataaatgggtggcccccccccccccgggaggatttcttcaaaaccaaaattttttaggggttaataatccccaggccccccaccaaaagagcccgtttgtttataaataagggggggggcccatttttgttttcagggccagctgaaaagctttaagggaagccgttgccaaaaacaagggacccgcccttcttgacaaggaaccggccggaaaaggaccccttgg

SEQ ID NO: 16928 - DNA, 973 bp, Oryza sativa
  Clone ID: PAT_MRT4530_22630C.1
cggacgcgtgggtcctaagaggcagtttaagctagctagctacgacttcgagagatcgatatattcaacaatggcgtcagctccggccgcctcttccgcagtgctcctcgtcgtggtcctggtggcgagcctcgccgccggcggcgccaacgcggcgaccttcaccatcaccaaccgttgctcgttcacggtgtggccggcggcgacgccggtgggcggcggcacgcagctgaacccggggcagacgtggaccatcaacgtgcccgccgggaccagctccggcagggtgtggggccggaccgggtgcagcttcgacggcgccggccgcggcaggtgcgccaccggcgactgcggcggcgcgctgtcgtgcaggctgtccgggcagccgccgctgacgctggcggagttcacgctggggacgtccggcggcaaccgggacttctacaacctgtcggtgatcgacgggtacaacgtcgccatgagcttctcctgcagctccggcgtgacgctgacgtgcagggagaggagctgcccggacgcgtaccagtacccctccgacgactccaagctgcgctcctgcaacggcaacagcaactaccgagtcgtcttctgcccatgatttcatgcatactacttcctccgtttcactatgtaagactttctagtattgctcatattcatatagatgttaataaatctaggcatatatatgtgtttagattcattaacttttaaacgaatattagcgatgctagaaagtcttacaatctgaaacggagagagtactatatatatacctctactaaattgtatccaggaaaataataataacatacaataaaacgagcgtgatcagtcgtctaatacgtgggtggacacacgtacgtgtgcactcaatcacgcgtgcttaattatatcggaattgttatatgtcattcgaataaaatttccgaatgaaaaaaaaaaaacaaaa

SEQ ID NO: 16929 - DNA, 3528 bp, Oryza sativa
  Clone ID: PAT_MRT4530_22631C.1
tctctcgctgcggcgccaccccctcctcgccgtggacctcggggtgggagcgtggcggcctgcacagccggagctcagctcgcccgccgcgtcggatggacgccgcctcctgctgccgcgtcttctcgacgcagagatgccgcttcccgctgcggaggctggcgccgccgatttcgcggcggccgttcggcacggagtcgacgagtgagctgttcgccgcgtcgacctcgaagcggcgctcccgggggcccgtcatggcggcgaagaaggccgccgagggtgctaaacaagaagaggggaaatacaaacacacggtggatctaccaaagacaacttttggcttgagagctaattctgttgtgcgggagccggagctccagaagttgtgggaggagaaccaggtgctcaagagggtatcagaaaggaacactggggctacatttgttctccatgatggtcctccttatgctaatggtgatcttcatatgggccatgcactgaataaaatcctcaaagatattataaaccgttacaaggcaagttcatctttatatccaatggaaacaccctatgtttacaagaagttagttctaaagtcactggacaaggaaacattgaatgctctgacacctataaaattaaggcagaaggctgcaaaatttgctaaagcgacggttactacacaaatgaattctttcaagcggtttggtgtatgggcagattgggacaacccttatctaactctgtcaccagagtatgaagctgctcagctagaagttttcggccaaatggttatgaaaggatatatctaccgcgggcgaaaacctgttcattggagtccgtcatcacgtacagctttagcagaagctgagttggagtattcagaaaatcatatttccaaaagcatgtatgctgcattcaagatcaccaatctgtctaagcctgggttgctggaggaatttctccctaatttatgcctagccatatggaccactactccatggacgattcctgctaatgctgctgttgctgtgaaccctgagctcacttatgtagtagttgagctgcaatctgtactagaaagtgaatcaacatctggtggaaatcaacgaaagcttgggagtattttgagccctgggagtcagaaaccatttatcatcgtggctgctgatcttgtctcagctctagagtccaagtggggtacaaagcttataatccagaaatcatttcctgggtcagccttggagcactgcaggtatattcatcctgtgaatggcaatgaatgttctgttgttcttggaggagattacataacaactgaatctggcactggccttgttcatactgcccctggccatggtcaggaagactacataacaggtttgaaatatgggcttcctattgtgtctcctgtggatgatgaaggaaacttcactgctgaagctggacaattcagtggtttatctgttctgggagctggtaatgccgcggttgtgaattatctggatgaacagtgttctctcattttagaggagccttacaaacacaagtacccctatgactggcggtctaaagaaccaacaatattccgagcaactgaacaatggtttgcctcggtggatggtttccgtaatgctgcaatggatgcaattaggcgagtatcttggattccttctcaggctgaaaataggattgtggccatgacttcaagccgttctgactggtgtatttcgcggcagagaacttggggggttcctattccggtcttctatcatgtagactcgaatgaacctcttataactgaagaaactattgaacacatcaagggtatagtgtcaaagaaagggagtgatgcctggtggtatatgacaattgaggaacttcttcctgaaaaatatcgtgataaagcatctgagtatcgcaagggaactgatacaatggacgtttggtttgactctggctcctcatgggctgctgttttggcacaaagagatggccttaattttccagcggatatataccttgaaggttcagaccaacaccgtggatggtttcagagctcattgttaaccagcattgctactacaggaaaggctccatattctagtgttataacccatggttttgtactggacgaaaagggtttcaagatgagcaaatctcttggtaatgtggttgatcctgagaaagtaattgttggtggtaaaaattcaaagcaagaacctggctatggagcagacgttcttcggctatgggtttctagtgttgattacactggagatgtgttggttggtccacaaattttgcgccaaatgtctgacatgtaccgaaagctacgaggcacaatgcgattcctattgtcgaatctccatgattggaaaccagaaaattctgtgcgctacagtgatctaccgaaaattgacaagtatgcacttttccaactggaaaatgttgtgacttccatgaaggatagctacgagaactaccaattctataaaatataccagatcctccaaagatttgctattgttgatctctccaatttctatttggatgttgcaaaggatcgactctatgttggtggccgagttagctttacgaggaaaagctgtcagacagtcctcagtgcgcatctgctctatcttgttagagccattgcccccattatgccacatctagctgaggatgtatggcagaacctaccgtttcaacacacactggatgatggatctgttgctgagtttgtttttaatctaaaatggccagttaagaatgaagaatggctctcggttccaaaggatgatgttgattttctgagtgttatcctcgagttgagatcagaggtgaacaaaattttggagagtgctcgaacaggaaagctgataggctctagcttagaggcaaaagtttatctccacgcggaaaatgctaacacagtgtccaaactaaaggagctggtttcggcaaccaatgacgctgatgctctgcaccgcctgtttatcacatctgaggtggagatccttccttccgtaagctccgaaactacatctggtgtatcctacactggaacttttagcagtgagcgcaccggcaacatctggattggtgtgactcgcgccgatggcgaaaaatgtgagaggtgctggaattatacccgagacgttggatctttccttgaccatcctactctttgtgcccggtgccacggtgtcattgatctgccaccagttcctgctgccgcggctgtcagctgaggctgctcgagagtgacaaggaccactatcagcttcatttgaagattataggtggaattaattgtttttgttctacaattttgttcccctctgaccgatgatgctagaggaaggggaaacttgaagagggtttcggaaacttagtttctaacttcatttgttgcgtacaataagttgtaccttgatttttgaccattgcttggcttcctggagctgtaattgtatatttgtattgcagaactcacacggattaaagatggaaacagttttgcac

SEQ ID NO: 16930 - DNA, 336 bp, Oryza sativa
  Clone ID: PAT_MRT4530_22632C.1
atggtgccagccctcgccatcctggctctctccgtcgccggactcgccgtcgccgccgccgcggcgccgcccacccggagagggcaggaggtccacctgttcgaggccacggtgcgcgtcgccgacgacggcgtggaagatcccgacgagtacaactaccggttgctcgccaccgtgctcggcagcgtcgaggcagctcagagcgtcacgtatgagacttaccctgggacattcagtgcgttcctcacgaacaaccaggcccggagattgtccaaagtaccgggggtgctggaagttaggcaaagggacgatcctgtgcctacggatggacagtga

SEQ ID NO: 16931 - DNA, 735 bp, Oryza sativa
  unsure (1)..(735): unsure at all n locations
  Clone ID: PAT_MRT4530_22633C.1
cggacttttgggcgcggcggccgttcggcgcggagtcgacgagtgagctgttcgccgcggggacctcgaagcggcgctcccgggggcccgtcatggcggcgaataaggccgccgngggtgctgatcatgatgaggggaattacacacacacggtggatctaccaaagacaacttttggcttgagaggggggtgtgttgtgcggtagccggagctccagaagttgtgggaggagaaccaggtgctcaagatggtatcagataggaacactggggctacattcgttctccatgatggtcctccttatgctaatggtgatcttcatatgggccatgcnctgaatcttgtcctcacagatcttataaaccgttacaagctgcttcagaatcacaaagtttcttttattcctggatgggattgccatggccttccaatcgaattaaaagttctaaagtcactggacaaggaaacattgaatgctctgacacctataaaattaaggcagaaggctgcaaaatttgctaaagcgacggttactacacaaatgaattctttcaagcggtttggtgtatgggcagattgggacaacccttatctaactctgtcaccagagtatgaagctgctcagctagaagttttcggccaaatggttatgaaaggatatatctaccgggggcgaaaacctgttcatttggagtccgtcattcccgtacagctttagcagaagctgagttgga

SEQ ID NO: 16932 - DNA, 487 bp, Oryza sativa
  Clone ID: PAT_MRT4530_22634C.1
ccccgaaaaaaaaaaaaaaaaaaaaaaaaaaaaaaaaaaaaaaaaaaaaaaaaaaaaaaaaaaaaaaaaaaaaaaaaaaaaaaaaaaaaaaaaaaaaaaaaaaaaaagggaaaggggaaaaaaaaaaaaaaaaaaaaaagggggcctcctgctcagggggacccaagcttccgcccgcgggcaggcaaagtaaaagcccttttttggggcccccaaattccgtttccgggccggggtttcccccccggggggccggggaaaccccgggggttccccactttatcggcttgggaaaaaaccccctttcggccggggggggaattagaaaaggggcccgaccggggggcctttcccaacattggcccaccctgaagggcaaaggggcccccccctgacgcgcccctttaccgggggggggggggggggttccccccagggggcccgttcttttggccgggcccttaggccccggtctttgggttttttc

SEQ ID NO: 16933 - DNA, 177 bp, Oryza sativa
  Clone ID: PAT_MRT4530_22635C.1
atggagtacgcgtacttgtggggtacgaatctggatgacatcccgattggtctctccatcatctgggaggacggaaggcgcacgaggacggacggacgcagggtgcacccaacgatcccgtcgcgtcatccttgccggccggtcgcgaccaatgggcaaattatacccatcgattga

SEQ ID NO: 16934 - DNA, 291 bp, Oryza sativa
  Clone ID: PAT_MRT4530_22636C.1
taaccccccactaaagggaataagcttgctggcgctctgtgtgccttttttcccttatagaatcactagatttttatcttatggcctgcatcgcttatatgttgctgactgatgatgctcgtgccccgtgcgaccatccacatgcggcagctcgccggataatggagcacgtgaggagaagcatctccgcgtggagtctggttggccgctggacgtgcagctcagctcgagtctgaccgagtccgggagaacgctcggcgcgtcgcacctgcatgattgagtcgctgcgca

SEQ ID NO: 16935 - DNA, 144 bp, Oryza sativa
  Clone ID: PAT_MRT4530_22637C.1
atggctttcgctgcccggacgaaggcccttcgtggtatgcctccaacagtgtcgcactctcgcagcggcggcagacgatttatagcgcaaatcgacaaagatggactaaaactaggacccttctccacgtccaactcgggatag

SEQ ID NO: 16936 - DNA, 288 bp, Oryza sativa
  Clone ID: PAT_MRT4530_22638C.1
aatcagaaagctgaacgccaggttacaatgtgctgactttagatagcacacagaaagattgctcgctgtaacagcttcttagcaaaccatgtgactgaacaacggagaagcataatggagagactgcttgttgtatgtgcacatttattcgcagagattcgtcaaaaagattatcacgattattttatttgtgatgaaacattccagatcgatacataaattggtgcatgagacacatacaagcaaacgaccgggtcctgtattggagaaaacgacgcgactatgcaa

SEQ ID NO: 16937 - DNA, 2368 bp, Oryza sativa
  Clone ID: PAT_MRT4530_22639C.1
gggtgctcgcggcggcggcagcagcagcagttgtcgttgggggtaggtccggcgcctccccgaccaaaccctcgcttccctcgtgcgcggcgtcccgatggcgctggcgctggaggcggcgaggtcgtgggcggcgtccgtgctgccgccggagctcgccgccgcggcggggggcgacccgctcgccgccctcgccgccacggccgcggcgctcgtcgcggtggtggtcatactcgcagtgtgactgcggtccgggcggggggcctcccacaaggcccccccgctaccttcgcccccgccgccggtcaagatcgaggccgacgccgacgccgacgacgtggggatgcgcgtcaccgtcttctttggcactcagaccggcgccgtggacggcttcgctatggcgatggccgaaattctccaaagaaggtaggtgtggttggtttacctagttgtgggtctggattagcatgaacctaaggatgaagattttgagcttaagctcaggaaggaaactatcgtgttgctcttcctagcaacatatggggatggggagcctaccgacaatgctgcaagattctacaaatggttcactgaggggaaggaaaaggaagtctggcttaaggatcttaagtatgctgtttttggcctgggaaataggcagtatgagcactttaataaggttgcaaaggtggtggacgaactgctagaggagcagggtggcaagcgtcttgtcccagttggccttggagatgatgatcagtgcattgaggatgacttcacagcatggaaagaacaagtttggccagaattggaccaactgctccgtgatgaagatgatacaactggtgcatccactccttacactgctgctatacctgaatacagaattgtatttattgataaatcagatgtatcgttccaagacaaatcgtggtcacttgccaatggcagtggtgttattgatattcaccatcctgtcaggtctaatgttgctgttcgaaaggaactccataagccagcttcagatcgctcttgcattcatctggagttcgatatctcaggcactggtcttgtgtatgaaactggtgaccatgttggtgtttattcagaaaatgctatcgagacagtggagcaggctgaaaagctgctagatctttccccagatacatttttctccgtccatgcagacgcagaagatggatcacctcgtaaagggggtggttctttggccccacctttcccttctccttgcaccttacggactgcacttctaagatatgctgatctacttaattctccaaagaaggctgctttggttgctttagctgctcatgcgtctgacctagctgaagctgaaagattgagatttttggcttcccctgctggaaaggatggctccttccagaattcatgtaacatgtgcgttagtttatggacctacaccaacgggaaggattcaccaaggagtttgttcgacatggatgaagatccgaccactccaattatcatgattggtcctggtacagggttagcaccatttagaggcttcttgcaggaaagattagctctaaaacaatctggagttgaactgggcaattcagttctcttctttggatgcaggaaccgtaatatggactacatatatgaagacgagttgcaaaacttcattcaggagggtgcactttctgagctgattgttgccttctctcgtgaaggaccagccaaagaatacgtgcagcataagatgacagagaaggccacagaaatttggaacatcgtctcacaaggtggttacatatatgtgtgcggtgatgccaagggtatggcaagagacgtacacagagctcttcatacaattgttcaagagcagggatctttggatagctccaaaaccgagagctatgtaaagagcctacagatggacggcaggtacctccgtgacgtatggtgacaccatcagaattatcagaaatagctcgctctagctttgtagaagtgaaggtgtcaagagtcggatttgcctgtaaggccatggtgcatgccaatccaatcgtgagtttttcagaacgaagcgtgccgttgcttagaaaattggagttaaaagtcggtgtaattctttgacatctaacatggttccgatatttattattattatatggatgattgaaagaataagtacctgttgtagatttgtagaacctgaaagttggccctgtcccttcagtttgtagtaagagggatacatcatacagtatgagacaatcagattatatcgtgtatacattgaaagaacaccaagccaattttgcatctggtttatgaattaaaacatatgctttaagtagctaaaaaaaaaaaaaaaaaaaaa

SEQ ID NO: 16938 - DNA, 1794 bp, Oryza sativa
  Clone ID: PAT_MRT4530_2263C.1
ccccgacaccatcgcacccagccgccatggcctcctcctccaagctcctagccctcaccctcacctcctccttcctccgctcctccctcctgcccgccccgtcccgccgcctccccaccggcccactcctctccctccgcttctgctccgccgcgggggatgtcgccgacgctcctgccgccgccgcagcaccagatcatccgtggcccgagtggggcgatttcctcgagaagcttcgggccaaggggtacttcgagcagcccaccctcgcgtctcgcgctgatgctgcggagggggaggtggctgcgaccgccgcggcggcggcggcggcggcgggggaggaccctggggcctcggccgacaattacccatccaaggacctgaacaggttgaagaacgcatgcctcaagttcggccgagagcgcttcgatctcctcagtgtccttcccaagcaggatatccgtgctattgttgagtgtggctgtcctaacatcttccggaagcctgtgaattctgcaaaaagactcagagagtttcttcagattgatgaaggagatgcctgtagtgcttgcaaattacgtggatcttgtgataaagcctatgtcattccgaacgctgaagacgaagctcgtactgtcgatgttatgcgcatactgctaaattatgcaatagatccaaccagcctttcaggagaaaactctgttaatggtggtgttcaagaatctgcgagaaagcttctttcagagcttactatgcttagcgacacaacaattgatccatcaattcctaaacctgtattccaaacttctagcaagaccaaaacttttgacaagggcattgcaaagcctaagttctcagctggaaagggtagggaaacaactgaaacagaaatgaagaagggtgattggctttgcccaaactgtgctgcattgggccaggaggccacggccgatgaccaggcccaaggagagccctcttcagatgacgtgaacagtacccgcaaggcacacctcttagatgatatcaggttatggttaactatggtgttagaagattatgatattatggtggcctcttttatcgtttacttcactgttattatttttattccccatccacagtgccacttcatgaactttgcacggaataagatgtgttttaaatgtgaagaatctcgaccaaagaggcagctcatccctggagaatgggagtgcccctcatgcagctttgtgaactttcgacgcaacaaggtctgcttgaagtgcaagcatgaaggccccgaaaatgatacccatgacagccagcacggacacaataggtggaggaacacgagaggggctgacagaagtagaagttttgatgactctttcgatcgggaggacgatggctctgatccagacgaaggcgagcgcagacgtgccaaagtgcgcactagggcagcatcaaccctggggagatccactggcaagagcaaaatttttgactcgattcatgaggatggtaacggtagggaggatgacagcgaggatgtcctgccgtacgaagggcagcgcaggcatattgtgagcaaaagggcgacaccagcacagaggagattcactgctggtagaagcgaggatatttgatagtctgatagatatatataacttcgatatttttccatgtagcgtatagtttcattatgtactgtgtactatttactcgagcactttatggttagactagcttggttgtaattcatactgcttagttccaaataagttcattttttatcaatcccataaataccactac

SEQ ID NO: 16939 - DNA, 1209 bp, Oryza sativa
  Clone ID: PAT_MRT4530_22640C.1
cccacgcgtccgcttgccaatggcagtggtgttattgatattcaccatcctgtcaggtctaatgttgctgttcgaaaggaactccataagccagcttcagatcgctcttgcattcatctggagttcgatatctcaggcactggtcttgtgtatgaaactggtgaccatgttggtgtttattcagaaaatgctatcgagacagtggagcaggctgaaaagctgctagatctttccccagatacatttttctccgtccatgcagacgcagaagatggatcacctcgtaaagggggtggttctttggccccacctttcccttctccttgcaccttacggactgcacttctaagatatgctgatctacttaattctccaaagaaggctgctttggttgctttagctgctcatgcgtctgacctagctgaagctgaaagattgagatttttggcttcccctgctggaaaggatgaatattctcaatgggtagtagctagccaaagaagccttcttgaagttatggctgcattcccttcagctaagcccccactgggagtattctttgcagctgttgcacctcgcctacaaccgcgttactactccatatcatcatctccaaagatggctccttccagaattcatgtaacatgtgcgttagtttatggacctacaccaacgggaaggattcaccaaggagtttgttcgacatggatgaagaacgcaatcccatcagaatatagtgaagagtgtagctgggcaccaatttatgtgaggcagtcaaattttaagttgcctgcagatccgaccactccaattatcatgattggtcctggtacagggttagcaccatttagaggcttcttgcaggaaagattagctctaaaacaatctggagttgaactgggcaattcagttctcttctttggatgcaggaaccgtaatatggactacatatatgaagacgagttgcaaaacttcattcaggagggtgcactttctgagctgattgttgccttctctcgtgaaggaccagccaaagaatacgtgcagcataagatgacagagaaggccacagaaatttggaacatcgtctcacaaggtggttacatatatgtgtgcggtgatgccaagggtatggcaagagacgtacacagagctcttcatacaattgttcaagagcagggatctttggatagctccaaaaccgagagc

SEQ ID NO: 16940 - DNA, 517 bp, Oryza sativa
  Clone ID: PAT_MRT4530_22641C.1
gagattcaatcagggttagtacaaccgggtccacatgtcatggagtcaaggaaaggacctctagaaaaacttatcccagaaatggtcctttttggcgatgctgaggtggaaaaacttatcccagaaggagacagatgtgcaacttttttatttttattttattttttgatatttttttcacacttagaactcacaagaaccaaccatataaaaaataaactcaaacggatgaaatatgtggcatgtggaattttccaaagctctaccaaaaaacttctctcctcgaaaacacaatcttgcaagcggaatttggaggttttaataacgtcgaacccagcgaagtaagtgagaatcggatgtaactttttctgtacatgtctgtggatatattattttcctgattccgagtccggtggcgccagccatggctggcgccccttttttcctgccatgtcggttcgcgtgtgccatggtggtaggaggacggcatcaaagaggctggcgccgtcctgttgga

SEQ ID NO: 16941 - DNA, 348 bp, Oryza sativa
  Clone ID: PAT_MRT4530_22642C.1
atgtctgattttgaattaggaatgacattcccacttggtttgttacctgtacacactgctgaggagctgactgtgaatttatcacttgctgctgcaaatccaaaagcatcttctgctgctctgagatcagaggctgctgtggctgttgcaactgttgtgtttgctgctgctgatgatgtaactgttgcggtatctgctggtgctgcacatgtggctgttgctgctggagaagctggatttgttgaagacctccttgtaagacagtgtgactttggaccgaaggttgcgtttgctggagttgggcctggacaacaacttgaggttgctgcagttgcgcctggagaatga

SEQ ID NO: 16942 - DNA, 456 bp, Oryza sativa
  Clone ID: PAT_MRT4530_22643C.1
atgcgccgtcggaagacgccatcgccgggagccgccgtcaacgtgccatcgggcgtggtgactgcagccgtcgtcactgggagccgccgggagtcaccgtcgccgcaccgctgggagccgccggcgaccgccgccggcgccctccgacccccgtcgtggttgacggggacggggacggtgaaaatttttcaccgcagtgacggggacgcggtggtgattcccgacgttggtaaggcttccgagcagggaagcaagggcgtggacgaaagtcgggctgatgcgaatgcgagtgatgaggtgcgacgtggtgctttgcgtgcggctgcggcgcacggcaggctccggcttggagggcggtcggtggtcaagagcgggaccggaagcgacgtgacgggacggagtcgtttgcccggcgtgctgtggcggcgagtgcgcaggagcggcacactggactag

SEQ ID NO: 16943 - DNA, 3160 bp, Oryza sativa
  Clone ID: PAT_MRT4530_22644C.1
cacaacgtcaccttcagccatatgagtgaggtgattgacggctacgacaagctgctcgccatgctccacaaggcgaccaagaggctcaacgatcagaagcttgtgaggatcgctgagttgcaggataagaacgctcgccccaagaaggaggttgccaggcttcagggacgtccaccgcctggaggagcccgcatccgcaccatgtcgaggaagtcgaccatagctctactgcgcatccagcttacacccaggaacccgccgctgcctccacctccagcacctcccgtagctccagctccagcccttgttccaatgccagctctagagtccgccctctcctttgtgccaaattcagcctacaagggtccagcaggtggcagtggaggatggttgccagcatctcccagtggtggtcgtgtgatcatcagcagttccagctcagaggcaggcagcggtgacacctatgagcaggagtactccaggagccgctcagagggatcggacgtcttccttcagatggtcaacaccaggaatggcggtcgtgcagctggtaacagaagcaacagcgaagaacgcatcgatggtgggcaccccaatagcgcctgcggcaatggtccgccaccgctccccgagaacccgatgctcgcacaagtgatggcccatcagacccagatgatgatggccatgatgcacagatgcagcagcagcccctccagatgcaccagaggatgcagcagcaggccgatcagcagcaacaacagtttggtccccctcccccttagtccaagctgcttgaatttatgcgcgtcaggccacccaccttctctagtactaccaaccccatggaggcaaatgactagctccatgccatagaaaagaagctcaaccttctacagtgcaatgatcaggagaaggttgccttcgccacacaccagctctagggtcctgctcagcttggtgggacaaccacatggctacccgtccgccaggcacagatgtcacttgggcggagttctatcgcagcttcaagaaggcgcaggtgccagacgggctcgtggcacagaagaagagagaattccgggcactcaaccagggcagcaagacagtgacttagtacctgcacgagttcaaccgcctagcgtgatacgcaccggaagatgtccgcactgacgcagagaaacaagagaagttcctggtaggcttggatgacgagctcaccaaccagctgatctccagggattacgcggactttgagaagctggtagacaaggcaatccgacaggaggatcagcgcaacaagatggatagaaagaggaaggccgctcagttcagggcccatcagggaggtcaccagaggccacgcttcactcccggacagcagggtggacctaccaccatgattgtccgacagcaccaccccaacccttccggcaacttccaccagggtgctagtggcagccaaaaccatcagggaggtcagcccaaccatagtgcagctccacgcccgccaatggcaccagcacagccagctccatcagctcaagccaagaaggagaccagagcaaagccagggccctgctacaactgtggcaagcacggccactttgctgacaagtgcccaaagccaaggcgtgccgggccaaggttttttcaagcccggcgtcaaccatgcgtccgcagaggaggcacaagcagcaccagaggtcgtactgggtacgtttcctgttaactcaatccctgctacagtaattttcgattctggtgcaacacattcgttcatttccaagaagtttgtggggacacatgggttgagaaaagaagagcttagcacacccatgagggttcataccccaggaaatagctcgacttctgtcagttatagccctttagtgctaatagaaatccaaagatcacaatttcttgccaacctcatccttcttgaatccaaagacctagatgtcattcttgggatggactgacttaccaagttcaagggtgtcattgattgtgcaaatcgtacgatcaccttgatcaatgagaagggagaaacagtggtgtacaagtctctcgcctcaccaaagcaaggagcctcactgaatcagattgaggtggaaaattcagtgaacgcaaaggagaagagttcgaggaaattggaagatattcctattgtctgcgagtatccagaagtgttccccgaggacctcactaccatgccacccaagagagagattgagttccggattgatttggcaccggtaaccgctccaatctacaagagaccgtatagaatggcggccaacgagctagcagaggtcaagaagtaggtagacgaacagctgcagaaaggatacatccgaccgagtacttcaccttggggtgctccggttatttattttgagaagaaggacaagacgaagaaaatgtgcgtcgcttatcgcgcactcaatgagttcacaatcaagaacaagtatcccttgctgagtattgatgatctgtttgatcaattgaaaggagctaaagtgttttccaagatagacctgcgatcaggccatcaccagttgagaattcgggaagaggatatttccaagacagccttcactactcggtatgggttgtttgagtgcactattgtcctttggactcaccaatgcaccggccttcttcatgaacctgatgaacaaagtgttcatggaatttttggacaagtttgttgtggtattcattgatgacatccttgtttattccaagtccgaagaagatcatgaacaacatcttcgtctggtactcgagaagttgcaagagcaccagctttatgccaagttcagcaagtgtgacttctggttgtcggaagtcaaattccttggtcacgtcattactgttcaaggtgtggcagtggacccgtcgaatgtggagttggttacaaagtggaccccacctaagacagtgacccagattcggagtttccatggacttgctggttattaccgtcagttcattgaaaatttctccaggattgccaggcctatgactcagttgcttaagaaagacgagaaattcaagtggacagctcaatgtgggccgccttgtcgcgaccggaaaaattgccttttcccgaacgctagtgtattaatccccgtcccaggaaaagccggggtacacc

SEQ ID NO: 16944 - DNA, 3114 bp, Oryza sativa
  Clone ID: PAT_MRT4530_22645C.1
atggcgagctccggcggagggggtggtggtggggaggagggggagggcaggggggcgaccaaggtgaaccaggagctgtggtacgcgtgcgcggggccgctcgtctcgctgccgccgcaggggagcctcatcgtctacttcccccagggtcacagcgagcaggctgatcctgacacagatgaggtttatgctcgaatgactctccagccagttagcaatgtgacccagtgtgacaaggagacattgctagcatcagagcttgcgctgaagcaaaccaggccacaaacagaattcttttgcaaaacactgaccgccagtgatacaagcactcatggaggtttctctgtgccacgccgtgccgctgagaggatttttcctcgtcttgacttctccatgcagcctcctgcccaggaactgcaggcccgggatttgcatgataatgtttggacatttcgtcatatataccggggtcagcctaaaaggcatttactgactacgggctggagcctatttgtcagtggaaagagattacttgctggtgattcagtcttgtttattagtgatagtatgcatattggaattcttgctgcagcagcccatgctgcagcgaataacagccaatttacaatatattataacccaagggccagtacttccgaatttgtgattccttttgccaaataccagaaggcagtgtatggtaaccaattatctcttggcatgcggttcagaatgatgtttgaaactgaagagtcaggaacaagaaggtacatgggtacaataactggtataagtgatctggatccagtaaggtggaaaacatctcattggcgcaatattcaggttgcatgggatgaagcggcaccaactgagagacgcaccagggtttccctctgggagatagagcctatcattgctccattcttcatctacccctcaccattattcaccgcaaaacgtccaaggctacctgggatgacagatgacgagactgaaatggacggtcttctcaagagggccatgccatgggttggtgaggagatttgcaagaaagatctgaatattcagaacagtgtagtgcctggtctaaatctagctcagtggatgaacatgcagcacagctcctcgcttcctggcacggttgtgcaaccagagttactaaactcattaagtggaaaacctgtacaaaatttggctgcagctgatttatcaaggcaaatcagttttcacccgcagttcttgcaacaaaacaacatccagttcaacactgcgttggtacctcaacaaaaccaacagacagaacaattagcgaaagttatccctacaccaaaccaattgggaagtgttataataccgcagaaggtggttcaggattgcaactctgaacaaaggcagcatgtggttactcaaccagtgcaaggcagccagccaaacataaacattccacagcctcagcttgttgttcaggctcagcttcagcaaccgcaagtcattctccaggcgcaactgcagcaacctcaagttgttgtccaggcccaactccagcaaacgcaaccttcggtccaaagtcacactgtcttacaaggaggtcttcaacaaatccagcttctccagcagcaacagccacatgtgcagcaccagcagataccgcaacagttacatcatcagcagcagcaaacacaacagttgcaacctgtccagcaggttcagcagtcagtacaggaacatcagcaaataaagatacaacctgttcatgtttccatggatgcaagtatgaatacgcaggtggcagatcatcaaatgaaactacaactactcaaggctttacagccacagcagcctctgatctcagagcagcagaagatgcttttggatttgcagcagcaagtgataaattcacagtcagctcctcagcagtgtgtacagcaaaaggttcagtctcaccaagttcaagacttaactgggaatgtcattcctaattcaaaatcagacatcgctacttccatgggtgctagttctttgcatgtagctggtggacgccaattattgaagacagatgatgttccgtctacttcaacatcaccatccactaacagcaatcctgttcttctgcaatccatcccaagtagctccaagaaccaaagtttaactacagcaggaaagacatctcaatcatctgttgtgttgggtcctacgatcgaacaggacacaaagccatatcaaaatgtaaagcaaacagttatgattcccaagacgacagaacaaaggccagctactggacaagactgcataaataacaatcctcaaatggattacttggacacatcctcttcagctacttcggtttgcctttcccaggctgatggatcattgcaacaaaactttccaccttcatccttccaccagcatcacttgctaaaagacacagttccagatagcgagtttgaggttacagatccaagaaataaccttctatttggggtgaatattgatggtcaactgggtttaccacttaatgcagacctgcttgcgaatgacattggaaccgataaatacatggatcagttgccaggaaatggcatttctaacttcatttcatcaaaggattctcaacaagagttatcatcttcaatgatttcacattcatttggagttgctgatatggcattcaattctatagattctgcaatcaatgataccccattcttaaatagaaattcccggtctgcagcaggtcctgcacatcaacggatgagaacctacaccaaggtacacaagcgtggtgcggtgggaagatcaattgacatcaatcgatattctggatatgatgagctgaaacatgacgttgctcggatgtttggtattgaggggcagcttggtgatcaaaatagagttggctggaagctagtatatgaagatcacgagaaggatgttctactagttggtgatgatccatgggaggactttgtgaaatgtgtacgatgtatcaggattctttctccacaggaagaaatgcagatgagattagtcggcgactttggagacagctttctacccaaccaagcttgcagcagctctgatgggggtcatccctggaggataaccggcgactag

SEQ ID NO: 16945 - DNA, 3865 bp, Oryza sativa
  Clone ID: PAT_MRT4530_22646C.1
ggggcgaccaaggtgaaccaggagctgtggtacgcgtgcgcggggccgctcgtctcgctgccgccgcaggggagcctcatcgtctacttcccccagggtcacagcgagcaggttgcagcatctatgcgaaaggacgcagatgcgcaaattccaagctatccaaatcttccatcaaagctgatatgcatcctccacagtgtcaccatgcttgctgatcctgacacagatgaggtttatgctcgaatgactctccagccagttagcaattgtgacaaggagacattgctagcatcagagcttgcgctgaagcaaaccaggccacaaacagaattcttttgcaaaacactgaccgccagtgatacaagcactcatggaggtttctctgtgccacgccgtgccgctgagaggatttttcctcgtcttgacttctccatgcagcctcctgcccaggaactgcaggcccgggatttgcatgataatgtttggacatttcgtcatatataccggggtcagcctaaaaggcatttactgactacgggctggagcctatttgtcagtggaaagagattacttgctggtgattcagtcttgtttattagggatgcaaaacagcagctcctcttggggatcagacgagcaaataggcaacctacgaacctctcatcatctgtcttatctagtgatagtatgcatattggaattcttgctgcagcagcccatgctgcagcgaataacagccaatttacaatatattataacccaagggccagtacttccgaatttgtgattccttttgccaaataccagaaggcagtgtatggtaaccaattatctcttggcatgcggttcagaatgatgtttgaaactgaagagtcaggaacaagaaggtacatgggtacaataactggtataagtgatctggatccagtaaggtggaaaacatctcattggcgcaatattcaggttgcatgggatgaagcggcaccaactgagagacgcaccagggtttccctctgggagatagagcctatcattgctccattcttcatctacccctcaccattattcaccgcaaaacgtccaaggctacctgggatgacagatgacgagactgaaatggacggtcttctcaagagggccatgccatgggttggtgaggagatttgcaagaaagatctgaatattcagaacagtgtagtgcctggtctaaatctagctcagtggatgaacatgcagcacagctcctcgcttcctggcacggttgtgcaaccagagttactaaactcattaagtggaaaacctgtacaaaatttggctgcagctgatttatcaaggcaaatcagttttcacccgcagttcttgcaacaaaacaacatccagttcaacactgcgttggtacctcaacaaaaccaacagacagaacaattagcgaaagttatccctacaccaaaccaattgggaagtgttataataccgcagaaggtggttcaggattgcaactctgaacaaaggcagcatgtggttactcaaccagtgcaaggcagccagccaaacataaacattccacagcctcagcttgttgttcaggctcagcttcagcaaccgcaagtcattctccaggcgcaactgcagcaacctcaagttgttgtccaggcccaactccagcaaacgcaaccttcggtccaaagtcacactgtcttacaaggaggtcttcaacaaatccagcttctccagcagcaacagccacatgtgcagcaccagcagataccgcaacagttacatcatcagcagcagcaaacacaacagttgcaacctgtccagcaggttcagcagtcagtacaggaacatcagcaaataaagatacaacctgttcatgtttccatggatgcaagtatgaatacgcaggtggcagatcatcaaatgaaactacaactactcaaggctttacagccacagcagcctctgatctcagagcagcagaagatgcttttggatttgcagcagcaagtgataaattcacagtcagctcctcagcagtgtgtacaggtaacaaaccaagctattagtttacataacagtaacactattcaatacccgacacagcaaaaggttcagtctcaccaagttcaagacttaactgggaatgtcattcctaattcaaaatcagacatcgctacttccatgggtgctagttctttgcatgtagctggtggacgccaattattgaagacagatgatgttccgtctacttcaacatcaccatccactaacagcaatcctgttcttctgcaatccatcccaagtagctccaagaaccaaagtttaactacagcaggaaagacatctcaatcatctgttgtgttgggtcctacgatcgaacaggacacaaagccatatcaaaatgtaaagcaaacagttatgattcccaagacgacagaacaaaggccagctactggacaagactgcataaataacaatcctcaaatggattacttggacacatcctcttcagctacttcggtttgcctttcccaggctgatggatcattgcaacaaaactttccaccttcatccttccaccagcatcacttgctaaaagacacagttccagatagcgagtttgaggttacagatccaagaaataaccttctatttggggtgaatattgatggtcaactgggtttaccacttaatgcagacctgcttgcgaatgacattggaaccgataaatacatggatcagttgccaggaaatggcatttctaacttcatttcatcaaaggattctcaacaagagttatcatcttcaatgatttcacattcatttggagttgctgatatggcattcaattctatagattctgcaatcaatgataccccattcttaaatagaaattcccggtctgcagcaggtcctgcacatcaacggatgagaacctacaccaaggtacacaagcgtggtgcggtgggaagatcaattgacatcaatcgatattctggatatgatgagctgaaacatgacgttgctcggatgtttggtattgaggggcagcttggtgatcaaaatagagttggctggaagctagtatatgaagatcacgagaaggatgttctactagttggtgatgatccatgggaggactttgtgaaatgtgtacgatgtatcaggattctttctccacaggaagaaatgcagatgagattagtcggcgactttggagacagctttctacccaaccaagcttgcagcagctctgatgggggtcatccctggaggataaccggcgactagggggtagaaactgatcaaaacccactttacatacatactgtagttgctgtcgcctcaagaccgacttttttttgactgttagtctcatgacagtgcaaaggatggtagtaggcaatgataattttggcttcgaaactttgagcttacagtaaatttatcgacaagaaaactcaataaatatggatacaagaggaaggctgtgttggagtgcccagaagcctccatttataagtttactccattattcagactattgtctctgttgcagtcttgtagatgtgctaattctctgtatgtttttatggccttgttaccctcttgtatagcccgtccatatgtctatactacagtgtatatattgctgctgtataagctgcagaatggagattgtcagatatcaccatctgtaagctgttacagatctaaatgggtaaaaaaaaacaacattttatacatgaggaatcgctgatcatgtatttgtatgagagttttctacagtctttgggagctagtgttgagttgtacatttggggatacgaaatatttcaataaattagtaccaaattcttattgc

SEQ ID NO: 16946 - DNA, 471 bp, Oryza sativa
  Clone ID: PAT_MRT4530_22647C.1
tttcgccgctgccgcggcttctaggttttccattccccatccgctcccgcgacttccttcgcgtctccaccgtcgccgctccaccgtgggttcttcaccgctcgcctttcccctcaccagatcgatatatccctttcacccgcgcagtctccatcgccgccgcttctttgtctctctaccccgtcgagccgaaatcgctgccatcgctgatttccacacaatcttctgctacggtcgtcctcagccatcggcccgctattctatcaaggcctgctggcgtacatcttcattggctggacacaccgtccccaacgggatcgacgggtgcccacggctgcaggtctgcccgccccttcaccgctagtttgaacataggccaagctatgtttcgtcctcagccataggccatctgctcgggggtaatggcgggtgcccagttgatccttacggctcactgtttgacagagcgaa

SEQ ID NO: 16947 - DNA, 342 bp, Oryza sativa
  Clone ID: PAT_MRT4530_22648C.1
atgaaagaactgaagtggaatggccaaaaaccaacacttacgcaaatttcatccaatgcaaggtccggaagttctgggtccagggaccggaacttccggccagccttctatgctcgtaggaagctcgagcttggctcgaagaagctcgcgagctttcggagaggcttagactcggctcgtttggagctcgagcaccgacatcgtgccctgtatggaaccgtggccgcgggcgtgcgactacgcctctacgtggcaccttgagattttaacctaaagagcgaggaccacggtggtcagccttgctcgaagcagttagaaaagaccagggaccaaacacggtga

SEQ ID NO: 16948 - DNA, 203 bp, Oryza sativa
  Clone ID: PAT_MRT4530_22649C.1
actatcgcatcacaagtcgattagcagctgcagtcaccaaacaccagcaacccgtggaccctggtggccttaagaaaatgaccaagcatatgtagctaatgacatcatataaacggcagagcgatcttttgtggagacaatatgcagattatacaacactgctcattttcttttacgatggcgatgactatagtgcccttcgg

SEQ ID NO: 16949 - DNA, 399 bp, Oryza sativa
  Clone ID: PAT_MRT4530_2264C.1
atggactcgccggatggaggcgaagccggtggtgcgaggagaggggaagaggagctacggatggggagatcgaccgacggcgtcgacgatcggccatgggaggagagagaggaagagcttcaagctatgatgatgtgtgaaaaagaggggacctcgccgtctatttataggcggcgagaggtcggttcgaagaagaggaggagaagaaggacatggcgacggcggcgtggagaagaggacgacggcgccgactctttcttcccattggacgatagtgtcggggatccttggcgtcgaaggcaatatggcggcggcggtagcttagagaaggagaaaacggcggaggaggagggcaaggcacggcagcggcggaggaggacgaacacggcacgggcgtga

SEQ ID NO: 16950 - DNA, 399 bp, Oryza sativa
  Clone ID: PAT_MRT4530_22650C.1
atgcgtgcaaaacgcgagagcccagtgtacctgcgcaacccgcagcgatccgctgccgtgaggttaatttgttcggaaaggcccgaagagatttttcatctaggctggccgtatagtcggctgccggcggcggcgaatggaggttgggggcgtgacggcacggctctcccttccccaaatgggccaaattgggcagttcatgcggataaggagagaaaccgcacaagcagccaaaggctgcggtttggagccactcgcctctctcggtgcgccaacgaaacaagccacgcttattacctcctcctgctgctggcctgtgctgtacgtaagtgcccatgcacgcacgcgatcgagctgattgatgcgcaccgcacttgctccccgtctgccttatcgtaa

SEQ ID NO: 16951 - DNA, 177 bp, Oryza sativa
  unsure (1)..(177): unsure at all n locations
  Clone ID: PAT_MRT4530_22651C.1
aaaggtcccgcaaggccccgagggatccggtaacggtgtccagaggtacggttaggcggtatcncggttaaggngtaaggttaaggtgcccggtacagtgacccccaaaggttgggtggtccggtgtgtaagtgtagttccgtgtggcccaaggtagntaggtgttcggtgaaatgt

SEQ ID NO: 16952 - DNA, 477 bp, Oryza sativa
  Clone ID: PAT_MRT4530_22652C.1
atgccctcgccggcggcggccgcagccgctctcgcgaccgtcctcgccagcggcggcgcccgcgcccgcgcccgcctccgtgaccgtcctcgccggcagccgcgcccctccgcgacctccccgcgagcgtcctcgccggcggcggctgcgcccgcgcccgcctccgcgacctccccacgaacatcctcgccagcggcgcccgcgcccgccttcgcaactgtcctcggcggcgcccgcgaccgtccatgccggcagccgtgtccctccgcgacctccagcgagcatcctcaccggcggcggctgcgcccgcgcccgcctccacgagtgtcctcggcggcggccgcggccctatgcgacctccccgcgagcgtcctcgccggcagcggctgcgcccgctcccctccacgcaactgtcctcgtcactcgccttctcagcgtgcagacgcgacggaggaggatgacaacgtgagagagtag

SEQ ID NO: 16953 - DNA, 516 bp, Oryza sativa
  Clone ID: PAT_MRT4530_22653C.1
cagagtccatatagaaatacaatttattcgggccactatttgttggtatttcttactaccatagataaatccgcaaacacacggaataccgttgtagtgcttcactttcgggtgaccccaaaaggatatcgaactcagggaacgattgctaggacgggattcagggctgtcaccacctgccgtctacctctgacaaatccgtagtatacacaacaaacaaataagaagttctccaaacccggagcaaagtgtaccgatagctccggtacttctcttgaattcctcctaggaagctacactcgtcgaggtagaagtcggatgagcgccaaacttcggggcacttctccaaagcttcccctcactctctaccttattctaatgtacaaaagatacaatagagcctcttgtaatctagctcaaagttgtgtgttgtgaatgaatgagaggagctctatttatagcctccatatgacagttacaggtaagggaaacgaccaaactaccctgcaaccgtca

SEQ ID NO: 16954 - DNA, 231 bp, Oryza sativa
  Clone ID: PAT_MRT4530_22654C.1
atggacgacgaggaggacgccaatccactaccgagctccattactgctgtcgccgtcgccctccgagccctcaagccccatctcctcgtcgtcggctgggaggggaggggccccagcgagctgactaccgctgaggcgcgggaaaggagagagttggctatggtggagctcaagttgccagccactgtcgctgacctttggctagatccaggcggcgccgtcgagctctag

SEQ ID NO: 16955 - DNA, 921 bp, Oryza sativa
  Clone ID: PAT_MRT4530_22655C.1
cagcggcaagctgaggatggcggcacgcagggggcagagccagttgggggtggcaaaggggggccgagggcggcggtggtcggcgacggaggcgaaggccaatcgggagcgcggtgggcggcaagcagcaagctgatggtggcttggctgcgtgcgggcgggtggcgaaatctcgcgcaatcccgtcacaccgtctgggagccgcatgagccggtgagcgccatcgctcgctcgagagcgtcgttgtcttcgagcttctaccgcgcggcgctgtcgcgggctcctcctcctcatcatcaccgccgcaatcggcactgcctcctggttgtgatggaccgcgcgatcaccgcacgccgctgtccaccgcacgtccctatgctcctctacccatcactcgtccccgcgcttcgaccgccagtctttccccgcccgtccccgtgcgccaccgcccaccgcctgtacgccaccacctgcccaaggggaacgccaaagagggagtcggacgagcagaggcaatccacggccgccggcgtgcggcttgtcctcggcctccgccgcgagacgacgcagccgctggcgcacctcctctacgtcggggtgacggatggggagctgccgtcatcggcgagggtggaggcaattagggtggcggagggggaggcggcaggcagatgcagaggggggagggcagctttaggcgcagaaggggggtggaggcagtcgggatgcgaagccggagccgaggacagtgaccaatgggccggggcggtggcagaggcaatcggggcggtggagggggagccaagggcagcggtcgacgggggcgggggtggaggcaactcggggctgccggcacgcggctcttcctcggcctccgcaacgagatgcatgcacccgctggcgtgcctcctccacggcatc

SEQ ID NO: 16956 - DNA, 219 bp, Oryza sativa
  Clone ID: PAT_MRT4530_22656C.1
atggcggcacgcagggggcagagccagttgggggtggcaaaggggggccgagggcggcggtggtcggcgacggaggcgaaggccaatcgggagcgcgggggaacgccaaagagggagtcggacgagcagaggcaatccacggccgccggcgtgcggcttgtcctcggcctccgccgcgagacgacgcagccgctggcgcacctcctctacggtggttga

SEQ ID NO: 16957 - DNA, 588 bp, Oryza sativa
  Clone ID: PAT_MRT4530_22657C.1
ctatgctcctctacccatcactcgtccccgcgcttcgaccgccagtctttccccgcccgtccccgtgcgccaccgcccaccgcctcctctacggtggttgacggggggtggggcggaggcagtcaaggcggtggagggggagctgccatcggcgtcgagggcataggtagtcggggtgacggatggggagctgccgtcatcggcgagggtggaggcaattagggtggcggagggggaggcggcaggcagatgcagaggggggagggcagctttaggcgcagaaggggtagtcgacgacggtggctgacgggggaggggtagaggtagttggtgcggtggagagggagccaccgtcattggcaggggtggaggcagtcgggatgcgaagccggagccgaggacagtgaccaatgggccggggcggtggcagaggcaatcggggcggtggagggggagccaagggcagcggtcgacgggggcgggggtggaggcaactcggggctgccggcacgcggctcttcctcggcctccgcaacgagatgcatgcacccgctggcgtgcctcctccacggcatctccttcctccat

SEQ ID NO: 16958 - DNA, 467 bp, Oryza sativa
  unsure (1)..(467): unsure at all n locations
  Clone ID: PAT_MRT4530_22658C.1
gatctacatcttcctcaaangggcgcgttgcccgggngcgaaaagcccantccttggntcctttgaancccggaacggaacggcngcgaacggtttttttccgtcccctttttccttctttgaaaganattcntttttgggcaccccctancctnntaaggggccaatctccgtctggttttccctnttgttngggttttaanccgggcggccgggttccaccccttnaaccggnggccngnttccggnttncntaaccctccncctggttcgttttttttttttgggttccccttncgggtttttttgggggggggnttnntatttnnncccttttnncccccngggttttataaaccccttcctttgggtttatanntccttggtaaatttcctttccctnggcgtcctattcaaattaaaaaactttccnccacccgntccttcgnttgccgaaattttntttc

SEQ ID NO: 16959 - DNA, 549 bp, Oryza sativa
  Clone ID: PAT_MRT4530_22659C.1
atgtcgagccaggtcgtcgggcctccaccagtgccgccgccgacggcgccgcctctcccaccagaacgtcagctcagcggcgagttcgtcgacgtcgagctgggaaacgtgagctccaccgtcgtcgacgtcgatcgcttgcgcgcgcacgcgccacctgtgccgccgccatcggcgccgcctgttcctcctgagacgatgaacccaccgccaagacgtcagctcaccggcgagttcgtcgacgtcgagctgggaaatgcgggcttgtccaccgtgcggcggcggcggcggcagcggacgacggcgcggagcgccgacgatgaagatgggttgtgcagcatgtggtgtccgagaatacaacaaggttataattggtgcagagacctcacaaagagttggcaacaaacagattattcgattcattttgcctctgacggggaatattctaagctgaacaccaagtgctgctgtcaaaacttgcgactggaagaggaccctgacttacttctctctgactttgaatcactgacatgtgggcccactgggtag

SEQ ID NO: 16960 - DNA, 369 bp, Oryza sativa
  Clone ID: PAT_MRT4530_2265C.1
atgcagccccccgacaggtgccaggttctgccaatgataaaacctcggaaaagagggtggcgattgagcttgagggagagggggagcgttggcgacggcgccgccaggtgcgggccggtgcaacacctcggttggggcggcgctgcgcgggtggccaggctcggcgggcacaaccacgctaggagtgtggcggctccgggtcagcttcgggaggctagaccggatggtgccaaggtggccaccggtggcggcacggcgaggttcaagttgtcgccgcgggcgctcttcttgtgcgggatctttagcaccttcacgtacctggcgtcagctcgatggtggcgcccaacaactatgtcgtggcggggatga

SEQ ID NO: 16961 - DNA, 249 bp, Oryza sativa
  unsure (1)..(249): unsure at all n locations
  Clone ID: PAT_MRT4530_22660C.1
gcgaatcatgcagctcgccatggatttagcgctcagtctccgcgactccgacaaccactcactctnccgctgacgagcctatcgtgctcctcgccaagcccgtactaggcctcatgggtgaccgcacactacaggctgacgctgtcgacgtatacgaccgcggactccgcaccgagctactcgctctagccatgacagacgtccagttgcttccgggagctagcgcctacatcaacgctgagaagagga

SEQ ID NO: 16962 - DNA, 432 bp, Oryza sativa
  Clone ID: PAT_MRT4530_22661C.1
atgtcgacccaggtcgtcgggcctccaccagtgccgccgccgtcagcgccgcctctcccaccagaacgtcagctcagcggcgagttcgtcgacgtcgagctgggaaacgtgagctccaccgttgtcgacgtcgatcgcttgcgccagctggtcacgccatcggcgccgcctctccctcctgagacgatgaacccaccgccaagacgtcagctcaccggcgagttcgtcgacgtcgagctgggaaatgcgagcttgtacaccgtgcagcggcggcagccgcagacgacagcgcagaccgcctacgacgacgaagctgggttgtgctgcagcgtgctgtgcgcattggtgatcttcctctccattgcgattatggtgctgatcttcatcggcgtgatcgtcgtgttgattgataaatatgtgttcgggatctga

SEQ ID NO: 16963 - DNA, 212 bp, Oryza sativa
  Clone ID: PAT_MRT4530_22662C.1
gggggaccctctatttattttataaggcgaatgcccccctccctaaccttggatacctttaatcgggcggcctttcttttttttttttttttttatgtataaggcccatagagttatttacgggaccaaatataaacatacagaataggcaggtgcttccaagccgtgagtcacaggcttgttaaataatcaaatctcggacttacttaagt

SEQ ID NO: 16964 - DNA, 308 bp, Oryza sativa
  Clone ID: PAT_MRT4530_22663C.1
acgtggcgggaggagcgagtggggcggagacccaggctgaaccgccatcaatgcgtagcgccccaaccgtccctcgctgaatttaatgcggcgaggggcgtgaccggattgtcaccggcctgtcgtcgggcacatccgattggacgggcggcagtgcccccacatcccgccttgtgctcggcggagtgggggcagggggaatgacaggggtgtcccccgtgtcaagcggggggcggcgctgggccccacttgacgacggacggctgcttagcttccgggcgaaggcacgaacggtcgtcggatcgaag

SEQ ID NO: 16965 - DNA, 111 bp, Oryza sativa
  Clone ID: PAT_MRT4530_22664C.1
atgtccaaagtgcttccaaacataatagccgggtgattttcacactatgacactgctgcaatcgatagggtatatgtagacatgtaggacgtgttcggatggctggctcat

SEQ ID NO: 16966 - DNA, 341 bp, Oryza sativa
  Clone ID: PAT_MRT4530_22665C.1
taatgattgcttccagagccatgcagaagatgggtcaccctgacggagagttttcaacgggctgggcacctttagcagaaggaactataatgacactgtcgtatagggctacttaaagtttcaaggacgtcgtctcaactggaccagaaatacgtttattactgctatacgtgtacaatgacatgaatgtgactgttcaacttgtcataagagccgagagagcttggtttaatgcgattcgactgactattgacactcctatactggtacccagggtatctgacatcaagaacaggtacgttctgtccacatactggatactgaagaatttaaaaagcctg

SEQ ID NO: 16967 - DNA, 345 bp, Oryza sativa
  Clone ID: PAT_MRT4530_22666C.1
acattgaacaacagtggggggtggtttcaattaatcgggggtcatacaacccagtgaaaccctttttaacttcatatcctacaatttgatttcattttgcttaagctctactcaatctgggaacatcctagaatctctgtgctatttcctagacctcttctcctattcatctaaaagtttgaacaagctgcttaattaaccatattattaatcaatttcaactcctctatcatcacatatcttaatatattagctttgatccaaccaattcatctatcattaatagattcaacaagaaaatatgaataactaggttcatcaatttaagaactggtttttactttt

SEQ ID NO: 16968 - DNA, 1279 bp, Oryza sativa
  Clone ID: PAT_MRT4530_22667C.1
tgtccatgtagcgattgcaagaatgagactatgtttaaaaaagggaggacatacacgctcacttgatatgacgaggattcatgaagggatatgcatgttgggtgaagtatggagagcaagaatcgggaagtggtgcagttgcagacacaaatagtgcagacaatcatgaagaaagagatgaagatgagcatgacatgtttataccgtctccatttggcggtgaaatggttgatgtggaccctgatctgctgcaagacatgtcacgagatgttgaggacccaacttacaatgagagagatttcatgaagttcagcaggttggtcagtgactcggagacacttctatacgacggatgcaagccaaaacacaccaaattgtcagctaccttggacctaatgaagctgaatacaagtagtggatggatagacaagagttttacataacttttgggaatactgaaggccatgcttcctgaagagaacacattgcccgagacgacatatgaagcaaagcaggttatgtgtcctccggggttagaggtccgtataattcacgcttgtccaaacaactgcatattataccacaagcaatatgcggactcagatgcttgtcctgtctgcaagacttcttgatacaagcgaaagaaaagtgcgggggaggaaaaaaagtcaaagcggagtggtccggcgatgattgtgtggtatctacccatcattgatcatttcaagagaatatttgccagccccaaggaagcaaagttagtacgttggcatgccacagagagaaggaacgatggtttgctaagacatcctgcggattcgattcaatggaggaatttatatcgatcgaatgcacaaacactttgctgccgaccccagaaatatgaggatatgtttgtgtatggatggcatgaatactttcggagacatgagcagttctcacagtacttggctagttcttattgcaaactataacctcccgccatgcttgtgcttcaaaaggaaatatattatgtcgtgcttgttaatctaaggtccgagacaacccggcaatgatatcgatgtgttcttggagcctgttatcgatgatcttgagattctttggaaagaaggtgtgaaaacttaggatgcatatggtcaggagaacttcaagctatgagttctattgttcttcaccattaatgattatcccgccctgggtaatctttctgaacaaaccgtaaaagaaaagaaggcttgctctgactgtatggaacatacacgtaataggtagctgaaga

SEQ ID NO: 16969 - DNA, 327 bp, Oryza sativa
  Clone ID: PAT_MRT4530_22668C.1
atggggaagaggaagtctcgggtgtcgaagatgctggcgacggcgaagaaggcggcgccgaagctggagacggcgttcagctgcccgttctgcgaccccggcggcgcggtggagtgcagcatcgacatcaagcacatgatcgccgaggcctcctgcttcgtctgccaggcgcgctactccaccaccgcccacgcgctcaccgagcccatcgacgtctacagcgagtggatcgaccagtgcgagctcgccaaagccgccgccgccgccggcgacgacgacgacgacgaccaccaccaccaccaccgcaagaccaagcgccgcagctaa

SEQ ID NO: 16970 - DNA, 399 bp, Oryza sativa
  Clone ID: PAT_MRT4530_22669C.1
gggaaatggcccatcatcttttctaatctttataaaagggaatcataaactcgtcgttcgagattaaaaaggcaactggcctttcctgtcagctaaggatgttttacccaaggaacatgagtcctcaaatgtcaattcccagtcaataataacctgaagttcaaccgggtaaccgggttactggagctcatgggggaccaggcgttactgattgaagcctccgtcgaacgttgaggcaacactttgtagcagtttttggcattttcaacgctcccttataccttttattgccgccaaagaagcccctcatttgaacaaagacccctcctggaatgcccatatcgtttgacaggtcattatttttcaagcccctccacttttccggcagagggttttggg

SEQ ID NO: 16971 - DNA, 367 bp, Oryza sativa
  Clone ID: PAT_MRT4530_2266C.1
gaagacagttcatcacaagactacagtgatttattacaattttcactaccatgcctctacagactacagtgttataagtattgtagaaaaacagaatatgattacaaaaaatgattgtgatagagtacattaattcccagctggatacaattcacatcaaaattgcaaagtcaattctctgtctcgttgtatccgattctccatgcttcgatggggatggatcaaactccagatatgaattcacgcaaaataaaggaaacatactggtattagaagtatatatataaatttacacggctaccaaatgcattttcccatatgatcaaatccggttttcgcaggcagctgggtgactcatgcctccccc

SEQ ID NO: 16972 - DNA, 244 bp, Oryza sativa
  Clone ID: PAT_MRT4530_22670C.1
attgcttagatcttttatgtggctttcgtatcggggaaaattaaggggcgcagatggagatggtgtgggccgtcgacggtggagaatacaagtcaagactcaagaacgacccgtgatccgttctccatgggttgctctcctgtgaagctcgtgagattctaagacggaggaggacgaacaagttttactcatagcggcggcggtgataagctggagaaaaggaggaggaggagatggaggggtg

SEQ ID NO: 16973 - DNA, 332 bp, Oryza sativa
  Clone ID: PAT_MRT4530_22671C.1
gtgcagtggaagtaggcactaagtagccgaagaaacgtcgagggcgtagcacgcgtcagtgtagaggaagtagttgatcgcagcaactcgacgttctccttctcgtgcgttctcatcgccgtactctcaaactgatcagcaccgcaaactagcagcacctctaccggatccatgactcggcctccaaggtccataggactcctattcagatccctatccgaagttcatgtacactcggatgtaatccgaaaactccttttcagtccacgtgtcaacagcggcccctagcagaacgtattgacccaccggacatacataaagatcatatcggt

SEQ ID NO: 16974 - DNA, 261 bp, Oryza sativa
  Clone ID: PAT_MRT4530_22672C.1
atggctgcattcagagccccgacggttgagccggagccagaggagaggcccaaggtcggtgccgtggcagcggcgcatggggaggcggcggaggagaaggttgtgttcccgatgacgtggacggacgatgatgagtcgtgcccggaggggacggtgccggtgcggcggacgacgaaacgcgacgtgctgaggtccaactcctctctctgtttcgggatgaagcagcctcgtgtcggcgtgccgctggtgtcgtccgcgtga

SEQ ID NO: 16975 - DNA, 415 bp, Oryza sativa
  unsure (1)..(415): unsure at all n locations
  Clone ID: PAT_MRT4530_22673C.1
ttttcattntttgggagaagcttcccnttcnatggtcaagttccaaccnaggaaggtttannttttgatcngcgnggtnanctggctnttttttntgggggttttttnggnttaagggntttannttgtnttnttttcaccccccntcccnnttngnttntcatanantncattgtttgggnnatntttgncttttttgatnganttnggngncannccncgagctgcnttgngttgtattaaatantcagttcgttnttggngtcccatgccaancatncnttagtcagngttnggagcccnataaaagcgctnccccgctntttagcctagntaganctcccccctccaanncanggntntcctncccaanaaaaaaaaaaaaaanannaaaaaaaaaaaaaaaaaaaaaaaa

SEQ ID NO: 16976 - DNA, 389 bp, Oryza sativa
  Clone ID: PAT_MRT4530_22674C.1
aagctttttttttttatcatttccatatttaaatcaatatttcctgatctactttaattaaaataaaccatataataattttggtttattatatttatttccattatatttggttgggtacccctctctgggttctcaatgaacaatttcacattctataattttaactctctttccaagtttctatttcaatttcccttcacagtacttgtttgctatcggtcttatacctatttttagtgttaggagccatttacctcctattataattttcatgcaacaatcccaagctgtactactcttaaaataataaaaattattagaaattggatattaacaattttttgggtaataattaacaagactatcactctctatggtgcaagctt

SEQ ID NO: 16977 - DNA, 2941 bp, Oryza sativa
  Clone ID: PAT_MRT4530_22675C.1
atggcgctgtttgatcggaatcagaagcagcggtcgtcgctgtgctcgacggcgaccgtcgtcgtgttcgtggcgctctgcctcgtcggcctctggatgatctcctcgccggagaccatcccggcggcggcggccaacgtcagcaagaagcccgacgtcgtcgccgtcaaggaggaggacagctcgctcgacgccaccaacaatgtcaaacagaacagcgccaacgtcgtcgccgagaccgccgccgccgacgaggccgccgccgcagacgaggacgacaaccccgcgaagccggccgccggcgagaaggcggcggcggcggcggcgtcgtccaaggaccagacgttcgacgacgagaacggcaggacggagggcggcgcgctcgtcaagccggagagcggcggcggcgacgaggcggcctccgacgtgaaggagatcggcagcctcgagcaggcggcgatcgacatgaaggacaccaccgagcactcggtgggtgacaccaccaaggagccaggcgtcgtccaggacaagagctccgaggagatcacgatggcggcgagcgacgcgagggagagcagcgatggcggcggcggcggcggcgcggccaagaacaagcagacgttcgacgacgagaacggcaagctcgacggcgtcaacctggtgaaggacgtcgagaacaagacgatgtcggaggagggcgccaagccattgccggaggagacgacgaccgtgagcagcaagaactcgatcgtcgcggcggccgccatgtccgacgagaagctcaccgacaacaatggcgagcaagcgcagccggtggaggcgctgccgaacgggcaggccgagctgctgacggagcgcgcggcgcagaatgggtcgttcacgacgcaggcggcggagtcgatcaaggagaagaagaagcgcgccgagaagaagaaaaagaagaagaagaaggtgaaggcggcgtcggtggcggcggcggcggaggaggagggcggcggcggcggcgcggcgtcgttgggctggaggctctgcaacacgagcgccggcgccgactacatcccgtgcctggacaacgaggccgccatcaagaagctcaagacgaccgcgcactacgagcaccgcgagcgccactgccccgcctcgccgccgacgtgcctcgtcccgtcgccggaggggtaccgggacccgatccggtggccgcggagccgcgacaagatctggtaccacaacgtgccgcactcggagctcgcggcgtacaaggggcaccagaactgggtgaaggtctccggcgagtacctcaccttccccggcggcggcacgcagttcaagcacggcgcgctccactacatcgagctgatccagtcgtcgttcccggaggtggcgtgggggcggcgcagccgcgtcgcgctcgacgtgggatgcggcgtggcgagcttcggcggttacctgttcgaccacgacgtgctgaccatgtccctggcgcccaaggacgagcacgaggcgcaggtgcagttcgcgctggagcgcggcatcccggcgatctccgccgtcatggggacgcggcggctgccgttcccgagcaacgtgttcgacgcggtgcactgcgcgcggtgccgggtgccgtggcacatcgagggcgggatgctgctgctggagctcaaccggctgctccggcccggcgggttcttcgtctggtcggccacgccggtgtaccaggagctgccggaggacgtcgagatctggggagagatggtgaagctgacgaaggcgatgtgctgggagatggtgtcgaagacgagcgacacggtggaccaggtggggctcgtcacgttccggaagccggcggacaacgcgtgctatatgaagcgccgccagaaggagccgccgctctgcgagccctccgacgaccccaatgctgcttggaacataactttgcgggcgtgcatgcactgggtgcctacggacccatcggtgcgggggtcgtggtggccggagcggtggccggagaggatggagaagacgccctactggctgaacagcagccaggtcggggtgtacggcaagccggcgccggaggacttcgtggcggaccaggagcactggcggaaggtggtccggaactcgtacctcaccggcatgggcatcgactggaagacggtgaggaacgtcatggacatgagagccgtctacggagggttcgcggcggcgctgcgggacatgagcgtgtgggtgatgaacgtggtgacgatcaactcgccggacacgctgccggtgatctacgagagggggctgttcggcatctaccatgactggtgtgagtcattcagcacctacccgagatcctacgacctcctccatgccgaccatctcttctccaagctcaaatccaggtgcgaggtgttgccggtgatcgtggaggtggaccggatcctccggccgaacgggaagctcatcgtgagggacgacaaggagacggtggacgagatcaagggggtggtgaggtcgctgcaatgggaggtcaggatgaccgtctccaagaacagggaagcgatgctctgcgcgaggaagacgacgtggcggcccacggaagccgaggcaagatgacctttccgtccccgggcggcgatccatgtagtaaagttttttggtcgggtgatccggtgggagctgcaaaacttagcccggacagggtgattttccctaccctggggggtgcagccttgccaaaacttaggtagatatttctggagcttgtagctttttttttggggggggtttgtttttccgatttttttttatagttttatactgaaaaacctgtggcttggggggggctttatagtacataaagattttaatgaccccatagccccccttttaggagataccttatgttaaaatagcctagaagttaaaaaaattcccatggtggggttttttt

SEQ ID NO: 16978 - DNA, 458 bp, Oryza sativa
  unsure (1)..(458): unsure at all n locations
  Clone ID: PAT_MRT4530_22676C.1
agctgttttggatctgtctcctggaattagggcacttcgacctcaaaaggtgatcaatcttgggaggggtctactaggttgggttgatctttggcatggaattttaattttcaatgcacgtgatgaacaacctcagattcagtatgtcccgttgcctgagcccatgccactcaacaaggaaagttttcgcccatccaatcgctcggaaagctgccctatgttgtttcgggatgtcatttgtagcagcagcggtgagatcaagtttgttgagttggaccacagacagaggaaaatacaacctattccgagctagctagaggatgtccgcaaagtaaagaagatgtttgtgacagggatggattagatgattcatacctgatgcatgtgacacatggncgatttgccaaagaggngcaccatcctttgttggtgatggttggagggcnagtgccttgagg

SEQ ID NO: 16979 - DNA, 2213 bp, Oryza sativa
  Clone ID: PAT_MRT4530_22677C.1
atggcggccgccctctcctcctcccggagggccctccacgccctccaccgccgcctcctcctccaccccctcccctcccgccacgctccccccatcccccgccaccacttcccctctcctccctcctcctcctcctcctcctcccgcttcttcaccaccacgcgccccgacgcgaggctactacagctgcatgcgcggcggctcgtggtgggcggggcaaggtcgttcgcggcgggcgtcggcggcggggggtcgtcgaagctggcgccgctggggcagggggtgaaggggctggggctggggcggccgctggacgcggccaagaacgcggcggcgaggtaccgggaggccgtggggctgcaggtggaggcgttctggaggcgcaactacatgctgctcgtcggcgccggggctgtcgtcgcctgaatcgctcatgggagggccacccgaggcgtcaccagcaccttcgtcgggctctccgagggcatggccaagtacggcttcctcgccctcgccaccgccatggtggcgttcgccggcatgtacacacgctcaagattcaccataaatcctgataaggtttatagaatagcaatgacaaagctcaacacatctgctgcaatccttgaagtcatgggtgcacccttagccggtactgatgtcagagcatatgtcatgtctggagggggtgttaaactagacttggttaaatttatccgtcatgagactacagtctctgattataaagaatcttggatccgactgaaaaggccacacttttgacatgccattgtggcactaggtacttgccgacatgaagctactctctgataacataccaaaaaagtcaggacctgatcagcggttattccttgtcggtgacgagcaggagtacaaggtgggtgggggtttgatatctgagctgcgggaccctatagtaaaagctatggctgcagagaaggagtttgattatcttgatgaaagagaggatgcggaggatgaagcgagggagcgtgaggaggctgagcgaagacaacaggaagaggaagctgaagcattgaggcgtgaggaggaaagattacctaggcagctgtatacggcctacatatccaaccagatatatacggctattgagatagggaacttagccccgcaaacaacccaatttgaaattcgctccataggagatttgaactcaggacctttgggtactcaggttaatcccatgaaacatgaactgatacacggtacgctgttagaaccttttgaggagatggaggtttataattccacaccgaaagttgaattctggagcaacttcccccaaaactcttgccagttcgcgcggcttcaggctttctttggcgccaaatccgccgcccaatcccagtttggaagaagtcgttgtattgaagatggatgtggatatgaaagaaaagaacaggtgaaatggggtgatgactatgattctgtaccctgtagatgtttggaagttgtatcatgggttgatgataagatggaacgcagtgatgaagaagacaagattgacttcaaaggtggcaatgtgcatgtgattagtaacaaagagaattgggaccacaaaattgcagaggcaaacaaggatgggaaaattgtgattgcaaatttcagtgctgcatggtgtggaccatgccgtgtcattgcacctgtatatgctgagatgtcacagacatacccccagttcatgttcttgactatagatgtcgacgagttaatggacttcagctcatcatgggacatccgagcgacaccgacgttcttcttcctaaagaacggggagcaggtggacaagctcgtcggcgccaacaagccggagctggagaagaaagtggccgcgcttgctgacagcgcctgaggcaaattaagccagtgacaatcagacattattgtcaggaaccccaaagttcagttcagagttcagacgttgccagcaaatatcaattatcatcagaggctgtatgttctgctgaggtgtttcttcagacttggttctgtatatccgtcatgagactgtacagtccccgggtataaagtatctttttttctcctgttaaaatcacacttttgacatgccattttggcactattattgcctgattttaccctggtgattagtgatccgatgtatgttgagtgtgaactgatacagaacaatagggaaatatttttactgt

SEQ ID NO: 16980 - DNA, 249 bp, Oryza sativa
  Clone ID: PAT_MRT4530_22678C.1
atgaaggcccaagtatcctacgaacatgggccaaccaccgacgtaggagaggtcctggctgacgcaacagccctccacgtgaacatggtgggtaaaaggagtgccgggcctgtcggctccctacaacttatacctctgagcacttgtgcttccatgggttctcctgttaagttcatcgttcgttcttgtaacagatgttctagcgtaggactacgatcttctcggactccacgatcaacgttagaatag

SEQ ID NO: 16981 - DNA, 503 bp, Oryza sativa
  Clone ID: PAT_MRT4530_22679C.1
catagccttgggtttgccaaggggttgtcggaaagggccaggaattccaaccccacaaccaattggtcactttgggataggaccaattccttaacccaggggaaatgctcttcctgggcggctcacaccgcggaattggttccaggccaaccaccccaattgttccccggaagggttgtttcccccgagccttgccccggggaagaagggtgaacctttggaagccgccgccgccggcggaagccctcccggccggtttcttccaaccgttggaacattcccccaaccgccggaagttggtgtcttgccttacctgccttgccgaagatctgcctacctagcttaggccttacctgtagcctaacctgttccaatgtatttgtgtgtttacctaaaataattagggtttcccttgtttttgaaaccatatttttgtggaataaatggaggaactccgaggtccctctctataaatctggatggattcgctagctaaaaaaaaa

SEQ ID NO: 16982 - DNA, 852 bp, Oryza sativa
  Clone ID: PAT_MRT4530_2267C.1
atggcttcttctgagccggctgctctaacttcttggccggtacaggaagttctacataaatttcaccaggctgtccgtcttgggtggctccacttcgacctcttgaatattctgcgggtttggcccgtacttgactctgaccgtggagcattgttccgtcctcggttgaaactcaaacttttcctccttcccgttgatatggaaacagatactccccgttcccacgtcaatgttggctcctgcggtgctaaggaacggacgccccagaatgagcggcgtctacttctccatgtccatgtccagcaccacaaagtcaaccgggatgaagaaatcccgtatcttgactggcacatcgtccactatccctgccgggaacgagtggttgaggatcttggtccagatggcaatggaataccaccaccgtttaacaacttccaagatcggattgactacgccgtgcaacatgctttgatcaatcaatcaggagtcttagtcaataccttaacaaacatggtgaagtcattggttaatggtataatagctaaacatcaagccacagggcccgtctatttaccaggtggtgttttcccaaactataggcctttggtcacaggcaatcaacagggttcttccaatgtaccaccagttcagccagcagcatcagtttcagctcctgcaccaactgcaccatcatcagcacaaaggcaaatgaccaatcctcgattgttgactagagaacagccacagcatggtgggcaaaatgtcaatcggctgactcaggagcaggtggctgctatgttcctgccaaatccacctactgccgatccagtacagtcattgccgaatcagtaa

SEQ ID NO: 16983 - DNA, 750 bp, Oryza sativa
  Clone ID: PAT_MRT4530_22680C.1
atgggagcacgaggcgaggcggcgggagcacaaggcgacgcggccggtgcggcggcagcgggagcacgaggcgacgtggccagcgacgcggcggcgggaaacaaaatgagaaacaaacagacgaaatccaatccaacacacacaaaaaaaaacattttttcccctcttctgctgtcacaactcactagcaaaacaagccaagaacacggcaaacaatggcgtcacttatttacctacatcggcaaacaagccaagaacatggcaaacatcggcaaacagtggcatccgctgcacgagctggatcccgaagtggttgaacgcgatggtcacctgcatcgccgagtctggcaggtactcgtcgctgtgccccaacaacatcacctcgttgtggtgcgagaagtagctattcgacacaatgatcgccgtcgaccccatgatggcgtcgatgagcccgtcggcgcaccgcgacagcgcacagtggtccacccacacgtcgcgcgccgagtagagcgagatgccgtcgccgtcggagtgggtgcaccacccgtagtgcgtcggcaaggcgtgcacattcgcgttgccggcggggacacaatcatggatgtggatgttgtggatgatgatgttggagatgtactggagcgtgatgcacgcgccgtcggtgctggcgccgtgatgaggaggaggagcaggtccttgctcgtaacctcgtggaatcccgagggagtctgctcatggtggtcagactag

SEQ ID NO: 16984 - DNA, 1253 bp, Oryza sativa
  unsure (1)..(1253): unsure at all n locations
  Clone ID: PAT_MRT4530_22681C.1
actagtggacccccccggctgccctctccattgctagcagctaatccttcccccaatccaatccgccgccgccgccatcgccatggaggcgttgacgaacgcggagaaatgcttctcccctgccagggcgatgtccccgctgccgctggtgaggccgccgccatcaccgggcgctgccggtcagtacctggcagagttgctgcaggaacagcagaagattggtccctttgtgcaggtgctcccaatctgcggcaggctgttgaatcaagagataatgagaatgtctgctattgtttcgcaccttggagtaagggaacatgataggctgcccattgcaagtccaaaccagatgcatccgttgccgcaggtgcctaatttttgcgggaatggattcaatccatggactgggacgctcccagagaaaaatggctttcctcggggaactatgggttgggaaggtgcagcacatgacccatcttacattgtgaagaagatcgtgcggctggaagttccaacagatgcttatcctcatttcaattttattggccgtctgcttgggccaaggggaaactcactgaagagagttgaagcctcaacaggttgccgggttttcatcagagggaagggctccataaaagatcccatcaaggcaagtctttttgttacattcaaggaggaacaattgaagggaaggcctggctatgaacatttgagtgatccgacacatatcttgattgaagctgaattacctgctgatgtcattgacacaagactagcacaagctcaagaaatactagaggacttgttgaaaccagtggaggagtcacaagactttctcaagaggcaacagcttagagagcttgctgtgctgaactccacatatcgagaggatagcccccatcaaaatggcagtgcctctcccttcagcaatggtagcacaaaactcgggaagcaatgacntttgtgattccaacccccttgatccctccaaaggcgctctaatcaacttgctttcatgacatagaatccggctttaccttgcatagatttgatgatgatgatgaagcttctgtgagactatgatgttggaattttgctattgctagctgctgaattttgatactcccccttgatgacattagctcgtggctgaggtgactagttgaatctccatggctgtaaaatgagaatgttcatttgtttctttaccatcgactgttagttctgatgactaaaaaaaaaaaaaaaaaaaa

SEQ ID NO: 16985 - DNA, 1578 bp, Oryza sativa
  Clone ID: PAT_MRT4530_22682C.1
atggccgggcccgtcgaatccacccgcattaccctcctcctcgtcgccgccaccctcctcctcctcccgccgccgctcgccgcctccctcaactcctccctccccgaccccgccgccgtcgtcgccgacttccacagcaaggtggcgacgtcgcggcggcggatgcaggaggccggcggcggcggcggcggtggcggcggggggtgtttgacggggaaccccatcgacgactgctggcggtgcgccgggacggactggaggcaggaccggcagcggctggcggactgcggcatcgggttcgggcgcaacgccatgggcggcaagggcgggccggtgtacgtcgtcaccgacccctccgacggcgacccggtgaaccccgcgccggggacgctccggtacggcgccatccaggagggccccctctggatcgtgttcgccggcgacatgaccatccgcctcaacgaggagctcctcgtgaacagctacaagaccatcgacggccgcggcgccaacgtccacgtcggcgccggcggcgcgtgcatcacgctccagtacgtctccaacgtcatcatccacaacatccacgtccacgactgcgtccccgccggcaacgccaacgtgcgcgcctcgccgacgcactacgggtggcgcacccgctccgacggcgacggcatctcgctctactcggcgcgcgacgtgtgggtggaccactgcgcgctgtcgcgctgcgccgacggcctcatcgacgccatcatggggtccacggcgatcaccgtgtcgaacagctacttctcgcaccacaacgaggtgatgctgctggggcacagcgacgggtacctgccggactcggcgatgcaggtgaccatcgcgttcaaccacttcgggatccagctcgtgcagcggatgcctcggtgcaggagggggtacttccacatcgtcaacaacgactacacggcgtgggagatgtacgccattggagggagcgcgagccccaccatcaacagccagggcaaccgctacatcgcccccgccgatcccaacgccaaggaggtgacgaagcgggtggacacggaggaggggcagtgggcggggtggaactggaggacggagggggacatgatggtcaacggcgccttcttcgtcccctccggcgagggcctcgaggccatctacgacaaggcctccagcaccgaccccaagtcgtcggcgctcgtcgaccagctcaccgccggcgccggcgtcctcggcggccccagcggcgcctttaaactgccacctccggtcgccggaggggcgccgcttgtcgagttgttgtcggcgccattgccgcgacctggatgggtagagagggatttgcgggacaacggcgaggcggcggcgtacgccggcgtcaactacgccggagttggaaccggcggcggaggcggtggcggcgccggtgccggcgggatggggtatggttatctcgggatggtctatggcagcggcggcaattggagctgccgagctgacctgacactgcaattgacttcattgtttcttgcactctttgctctcatatgcttgcacccattgtga

SEQ ID NO: 16986 - DNA, 264 bp, Oryza sativa
  Clone ID: PAT_MRT4530_22683C.1
atggctagttaccacttcggcttgagggacgacgacgacatcttctctgcaacattaccaggaaaattggcgtggtggcgcggcggcggcgtcggggcgccgtgggctggtccagcggcgggcgggcgcggcggcggcgtggcgtcgtggcggcgtggcgagctcgaggcgggggcggcggcgtgcggcgtctgcggcggtggcggagagcaccgccaagggacggcgagagaagacgatggcgtcagcgcagggttgccctag

SEQ ID NO: 16987 - DNA, 453 bp, Oryza sativa
  Clone ID: PAT_MRT4530_22684C.1
ggaccaatgggtgcccaatcattaattattcccttaaagcccggcgctcgtacctttgggggacttttttaaaaaacccggaaaatcccttcaaatttcgggcctggttttttcaatcgcttgaagataccggcaagggttttcggggggacggggtaccggcctttcacgatgccacgcgcgatcaccctggtgggcggcttcggggagtggattccgttccaagaaaagtacttcgaagggttggcggaagccgccgttcccttgttggcggaacttggcggcaagcttaagttgtaacggccccggcggcggcggaagaagcgaacaaggggttggccgccaaaccgttttttggccgggaaaacggcaatttcgtgaacggcccgtaaaaggccggcttaaacaatggcgggccaagggtggccccggcgaacttcgtcaagggggggg

SEQ ID NO: 16988 - DNA, 744 bp, Oryza sativa
  Clone ID: PAT_MRT4530_22685C.1
atggatcggggcaacggtgagggaggggcgacgaaggcccgcgagaagcgagacggctcacggcgagggcgcgacggctcgacggcgaggcggctcgacggcggggcgcgacagcggggcgcaacggtgaggcggctcgacgacgaggacgcgagggctcacggccgccgctgtccgcgccctcgccggctgcaacctccgccatcgtccgcactgtcgccggccacgcaagcaccggcctcgaccttcgtcggccgcgccgtcacccgccgcaaccgccgctgccgtccgcgccctctgctgtcgtccgcgccatcgccggccgagaccgccaccgtcggctgcgccatcgcctccctttcctcgcagcggctccttctcgtcctaatctgcacgcccacgccgtcgtcctcgatctaccgacacagcgccgccgtcgtcagcatcctagtgcagcgagggagggagggagcggcggcggggcggctcgacgccttcgccaccgcctccgcagcgtcaccatcatccgcgccgtcgcccgccgcaacctccgccgccgtccacgacctctgccgtcgtccacgtcgtcgccggccgcgaccgccgccgtcggccacgctgtcaccttgctttcctcactttcgccgtcgcctggcacgagcaggagcacgagcagaggattggagagagggggaggaagaagaaagagaaggagaatcacatgtggggtccattggttattag

SEQ ID NO: 16989 - DNA, 242 bp, Oryza sativa
  Clone ID: PAT_MRT4530_22686C.1
aatataaggctatgttaggtactcagtttttccaatttcaactcctttgttttgcatacacgtgtcttcccaaactactaaatggtacattttcgtaaaagttttgtatagaaagattgtttttttaaaaaaaataacaataatttacttttaagttattttagctaacacttaagtaataaggtttcgttttctgtgtagtgtgatgaatgacgtacctgcagcggggttgatgcagactt

SEQ ID NO: 16990 - DNA, 471 bp, Oryza sativa
  Clone ID: PAT_MRT4530_22687C.1
cccacgcgtccgcgccttcactgtcgccacgagagccgaaccacgcagacctaagccagagagatcgcgagagggagcctccgctccttcgcttagcggcggcggagaccatggcgagctccggggaggaagggcgggtggtggtggacctccgctcggcggcggagtccgcgggcggcggctgcggcgactaggaggcccacgccgtgccgctccacgagatcgagtccctttgcatgcgctgcggcgacaacggcaccaccaggcttccgatgaccatgattccgcactcccggcaggaggctctgaaggctctccagtgcccgcactgccgtgagaggaacaaacaggattacattgctgcacagctccacccaaacggacgttgctacacgctcggaggtcccgcgcgggcagaacgacaatctgaaccccccggcctgggataccctgattcacccactactcaag

SEQ ID NO: 16991 - DNA, 305 bp, Oryza sativa
  Clone ID: PAT_MRT4530_22688C.1
gggttttaaacgccggcggtgccaggctggaaaacgccgccccggcggcctttaaaaattggttaaaagaaagggggtggaacccaaagaaaaaaagggcaacggcgcgcggcgcgttgttcggcaaacggcagcggcgcggggcacaaggcgcgacggtgacggacgagacggccgacgggtgttacagagcgaaggtcgtcaagaaggatggggaggccagagtcttcgcgaagacgagcggcggcgaggagttccacggcgctaagtgcatcgtgacggtgggcgtctggacgagcaagctg

SEQ ID NO: 16992 - DNA, 330 bp, Oryza sativa
  Clone ID: PAT_MRT4530_22689C.1
atggcaatttgccccaccgggccgggaccctgcggagacccgcccctacaggggcaggggcgggcagcgcggcgaccggcgacggcccacggcgaggtgcgcaggcgggctgctatggactatggtatgaggcggcacaacgcgccactagaagccgacggtgactccaaatccggtgagagcaacaagcaagagacgctccagtgtgacactggacggtacaatattgtacgttttggacttggacgcggtggaggcgtcacagctttcggcaatgtatgggccagcggggtggtgatcagcccagcatcggtgaccacgcgacgctag

SEQ ID NO: 16993 - DNA, 555 bp, Oryza sativa
  Clone ID: PAT_MRT4530_2268C.1
ctaataagtagtactactttcatttggtgcctcatcatcatcagaagaggacttgtcatcgtcttcaaggtcgtcctcctcctccgtagtatcgtcgttggacacctcctcctcgtcggacacctcctccgtagtatcgtcgttggacacctcctcctcgtcgtctccattgtcatcgtcgtcctcctcagactccttctcgccctcgctgaaatcgtcctcatcatccccatcattgtcactctcctcttcctggctcaagggggccttgacccgcgccctgatcgggggcgcccagcccaatggctggtgggcccccgtcacactgtgccatataaagaggggtggaggacgggacgggacaactacacaaggaacgaggttcgtcgccgccgccgccactccaccccataaaccctaaccgatcgagggggcgcagccagtgacgggaagactccaccgccgcgccacgacctcgccgggatccccacgaccgccatcgccgccgccgcccacgtcaagcagagcgacgacaacgacgatggctgggacttc

SEQ ID NO: 16994 - DNA, 477 bp, Oryza sativa
  Clone ID: PAT_MRT4530_22690C.1
atgggcaacaagattatacaggttcgggccgctatcgagcagttcaggcctactgagtggcgttccccttcccggtggacaaggtcctacttttatagttcaaggggataccacatgcaccgcttctacctgctctttctacgggagggggacccactctaccttgaccggaccgtgattcgtgccttcgcccggaagctaaaaagcggacatacctacctccactccgccggatacagaggcgacgtgggggtacggccgcctgtccagtcagacgtgaccgacgataggccggtcacagactgttggggcaccgcgcgcattggtagcggcttggcttgggtctcctccccgctcgctccccccgccacatggcggtcgggcgagggcctcggggcaagtcaacgcgggggcctaaggggcgtaacatggcaccccgaggccccctggctgcccctgcctaaggaggtttattga

SEQ ID NO: 16995 - DNA, 399 bp, Oryza sativa
  Clone ID: PAT_MRT4530_22691C.1
atgaagaagggaggggaggggagaagcgccgatgccatcgtcctccccgatctgcgtcagccccccctcccccccaaatctgcgccggccgcgatgccccccgatccatgcctgccgccgagggaggaggccggacggggagaggaagcggcggtgcgccagacggggagctccgcccggtgtggtcgaagcttgggccgtgccgccgcctctggccccgacgaggagagatggaggcgtggagttcggtgccgctggcgctcggacgatgacgtcgctgccttcggccccgatgaggagagatggaggcatggagctcggcgtcgctgccgctttgcttcgtctgcccgagagagtgagtggtggggaaagtgtgagaggagagagagggagagataa

SEQ ID NO: 16996 - DNA, 137 bp, Oryza sativa
  Clone ID: PAT_MRT4530_22692C.1
ctaccctcacgcccacgcgtatcgcccactcgttccttccttatcttcccaaagcctcttctcctcggtgcggggggcactttgacttgactatgcggtcacacaatttttcatctagttcacccccacctttcttc

SEQ ID NO: 16997 - DNA, 352 bp, Oryza sativa
  Clone ID: PAT_MRT4530_22693C.1
ccgcggaggaaccggaggctccgcccgatcgccgagatctacgccgccacggcgccgatcggcggcggaaggaaggccaaggccaaggccgccggcgtagagtagtagtagccggccggggagggacttgtttgtaaatataagttatttgcagggactagcttgttgagtaagtaatatttaagggcgtgattagattaattgctagcgtagcttagttgtaaattatgttactactactagaggttttgagtttaatcaatcaatcgtcctactataaatattatcatgtttgttttctttacaagaggaatgaaaaacctatatataataaaaaaaaaaaaaaaaaaaa

SEQ ID NO: 16998 - DNA, 835 bp, Oryza sativa
  Clone ID: PAT_MRT4530_22694C.1
tcagcagcaacaactggaacccagggcatcacaaagcaacatcacccaataatagcaccacatccacttgacctgtaacatttgtgcaaacatgtccatagccttgctcttgtggagcagctgatgaggtaattcttgggcagtaccaggttccttatatgaactgcctcttgctttttgcccaggactacctttgtgtgatccgcaggtgcttcggcttccatgccaaaggttcatcttattttgcttgattactgtctttcctgttgccgcttgcccagatggccggaccgccagatgctcacaagccaggggcagcctgccagggatacagcccctcatggaagcacaggcactaactgtgccaactgggatttcatctggaacaatgcagctccgccaagagtgcagttcttcacctggctcatgggaaaaaacaggctgcccacatgtgcaaaccagttctttacaaagcacatgatttttgaaacacatcaggtcatctatctgaacatttctgaagattacaacatccgtatgcacattctcatagccataaagatttttcactgttgtcacttctaggcctgatgcctctggagcgtcggttgctgttgaacgcgattccggcgatgcacattgcacgcgcctccagtcttggccgtcatccggccgccgaccgccctccatcttcggcatcatccgaccactcctgcccgccgccacgacggcgagcaatggcgtggtggagagcgggatctcaggcggcgccgctgttgaggacggaagaaggcaggagactccggcgagggaacgagggatcaaatcaatgtag

SEQ ID NO: 16999 - DNA, 183 bp, Oryza sativa
  Clone ID: PAT_MRT4530_22695C.1
atggacatcggtgacgggcttctgttagggcccgacaaagatatcattggttatctttgtcgggccttaagttggggcccgttaccgataggcatcgactggggatcactcctatggtgcctcctcggcttcaccgtcttctggggtgctctcaaacagttcagcagcgtcggtcgggtctag

SEQ ID NO: 17000 - DNA, 3408 bp, Oryza sativa
  Clone ID: PAT_MRT4530_22696C.1
atgcacttccttctcctcttactccacctcctctccttctcctcctccaccgccgcctcggcttcatcggaggtcgccttcctgacgcaatggctcaacaccacggcggcgcggccgccggactggtcgccgtcggcgtcgtcgccgtgcaagtggtcgcacgtcggctgcgatgccgccacggggagcgtcacctccgtcacgttccagtcggtgcacctcgccgcgccgctcccccccggcatctgcgccgcgctcccgtcgctcgcgtcgctcgtcgtctccgacgccaacctcaccggcggcgtccccgacgacctccacctgtgccgccgcctcgccgtgctcgacctcagcggcaactcgctctccggccccatcccggcctcgctcgggaacgcgacggccatggcgtcgctggcgctcaactccaaccagctctcgggcccaatcccggcgtcgctcggcaacctcgccgcgtcgctcagggacctcctgctcttcgacaaccgcctctccggcgagctcccggcgtcgctcggcgagctgcggctgctcgagtcgctgcgcgccggcggcaaccgtgacctcggcggcgagatcccggagtcgttctcgaggctctccaacctcgtcgtgctcggcctcgccgacaccaagatctccggcgcgctcccggcgtcgctggggcggctccagagcttgcagacgctgtccatctacacgacgatgctgtccggctccatcccggcggagctcgccggctgcggcaacctcaccaacgtctacctctacgagaactcgctctccggcccgctcccgccgtcgctgggcgcgctgccgcggctgcagaagctgctgctatggcagaactcgctgacggggcccatcccggacaccttcggcaacctcacctccctcgtctccctcgacctctccatcaacgccatctccggcgccatcccggcgtcgctcggccgcctcccggcgctgcaggacctcatgctcagcgacaacaacctcacggggaccatcccgccggcgctggcgaacgcgacgtcgctcgtccagctccagctcgacaccaacgccatctccggcctcatcccgccggagctcggccgcctcgccgcgctgcaggtggtgttcgcgtggcagaaccagctcgagggctccatcccggcgtcgctcgccggcctcgccaacctccaggcgctcgacctctcgcacaaccacctcaccggcgccattccccccgggatcttcttgctccgcaacctcaccaagctgctcctcctctccaacgacctctccggcgtcatcccgccggagatcggcaaggcggcgagcctcgtgcggctgcggctaggaggaaaccggctcgccgggacgatcccggcggcggtggccgggatgaggagcatcaacttcctcgacctcggcagcaaccgcctcgccggcggcgtccccgccgagctcggcaactgctcgcagctccagatgctcgacctcagcaacaacacgctcaccggcgcgctgccggagtcgctcgccggcgtccgcggcctgcaggagatcgacgtgtcacacaaccagctcaccggcggcgtccccgacgcgttcgggaggctggaggcgctcagccgcctcgtcctcagcggcaactcgctctccggcgccatcccggcggcgctgggaaagtgccgcaacctcgagctcctcgacctcagcgacaacgccctctccggccgcatccccgacgaactctgcgccattgatggcctcgacatcgcgctcaacctcagccggaacgggctcaccgggccgatcccggcgaggatctcggcgctgagcaagctctcggtgctcgacctgtcgtacaacgcgctcgacggcggcctcgcgccgctcgccggcctcgacaacctcgtcacgctcaacgtgtccaacaacaacttcaccggctacctcccggacacgaagctgttccggcagctgtcgacgtcgtgcctcgccggcaactccgggctctgcaccaagggcggcgacgtgtgcttcgtcagcatcgacgccagcgggaggccggtgatgagcgccgacgaggaggaggtgcagcggatgcaccggctcaagctcgccatcgcgctgctggtgacggcgacggtggcgatggtgctgggcatggtcgggatcctacgggcgcgcgggatgggcatcgtcggcgggaagggcgggcacggcggcgggagcagcgactcggagtccggcggcgacctggcgtggccgtggcagttcacgccgttccagaagctgagcttcagcgtcgagcaggtggtgcgcaacctcgtcgacgccaacatcatcggcaagggctgctccggcgtggtgtaccgcgtcggcctcgacaccggcgaggtcatcgccgtcaagaagctctggccaagcacccgcaacggcgccgacaaggacgacgtcgccggcggcgggcgcgtccgcgactcgttctcggcggaggtgaggacgctggggtgcatccggcacaagaacatcgtgaggttcctcggctgctgctggaacaagacgacacggctgctcatgtacgactacatggcgaacggtagcctgggtgctgtgctccacgagcgccgccatggcggccatggcggcggcggcgcgcagctggagtgggatgtgaggtacaggatcgtgctcggtgcggcgcaggggctcgcgtacctgcaccacgactgcgtgccgccgatcgtgcaccgcgacatcaaggccaacaacatcctcatcgggctcgacttcgaggcctacatcgccgacttcggcctcgccaagctcgtcgacgacggcgactttggccgctcgtccaacaccgtcgccggatcatatggctacatcgccccagagtacgggtacatgatgaagataacggagaaaagcgacgtgtacagctacggggtggtggtgctggaggtgctcaccgggaagcagcccatcgaccccaccatccccgacggccagcacgtcgtcgactgggtccgccgccggaagggcgccgccgacgtgctcgacccggcgctgcgcggccgctccgacgccgaggtcgacgagatgctgcaggtcatgggcgtcgccctcctctgcgtcgccccttcccccgacgaccgccccgccatgaaggacgtcgccgccatgctcaacgagatccgcctcgaccgcgacgactacgccaacgtcgacctcctcctcaagtccggcgccgccgccgcctcgccgcctcgcgccgccgccgccgccacgtcgacgtcgtcgagcacgccgccgagcagcagcagcttctccggctcatccgccatgatctacaactcatcatccaaggccaagtcgccattcgattga

SEQ ID NO: 17001 - DNA, 225 bp, Oryza sativa
  Clone ID: PAT_MRT4530_22697C.1
atggtgagctggtcttgggacggcaacggtggaccagctttcgagcagcaacaacaacagtgggatggcgaggctgcagcggcccttggcgcggggggagggtggtggcggtgtctggcactctggaaggtggcgaaggcagtggcagcattgacagctccctcgcaagggcacgggagcggcaacagcagcatcatcagggctcgtggcggccagatccagtga

SEQ ID NO: 17002 - DNA, 764 bp, Oryza sativa
  Clone ID: PAT_MRT4530_22698C.1
gtacgaggcttctcttctcttgctcctcctcgacgccatggcccccagatcggacagcgccaccggcggcgcggccgccgcccaggcccacggatccgacttcgactccatagatcccctcttccacgtcctccgcgtgctccccttctccttcctccggccgccgcgcacccgcctgaggctgccctccaacctggcgctcccctcccccatgaccgtcttcgccctcatcctcctcacctacttcgccgtcgtctccggcctcgtctacgacgtcatcgtcgagccccccggcatcggcagcgtccaggaccccgccaccggcgccgtccgccccgtcgtcttcctccccggccgcgtcaacggccagtacatcatcgaggggctctcctccggcatcatgttcgtcatcggcggcatcgggatcatcctcctcgacctcgccgtcgaccgcaacaggccccggagccttcgcgtctccttcggtggctccggcgtcgccgccatcgtcatcgcgtacgctatggccatgctcttcctccgcatcaagatcccgggctacctatggtgaggaacaagcttctttactttgatcgttagatcagatctgtaacaagattctctacctctagatctgtttgctgttgctgaggaactattgcgcttcctaatgatgttattgtaaaattctggatgattttgagtttaaattagttatctgaagattatcgttttgaaatagaaataaaaaaaaacttacatgg

SEQ ID NO: 17003 - DNA, 263 bp, Oryza sativa
  Clone ID: PAT_MRT4530_22699C.1
ctccagtctgggcatccaaggcccgtgggttcgcacatggttttcgtaccaccaatgaatgtatcgctgggtattcaggtgttgccccgacgtgtttgagatgcttggttgtatgcatcttggatgatgcggaatagctgcctggggtgctgcttgttgctactggtgtggcgaggaaaaatcttgagattcccacttggtgcactgctgtgcactggaaattgcctgatttgggggtggctcccctgggataaatggtgccc

SEQ ID NO: 17004 - DNA, 318 bp, Oryza sativa
  unsure (1)..(318): unsure at all n locations
  Clone ID: PAT_MRT4530_2269C.1
ttgggtggagcttagaacaaagcggggtagtgggcgagcccctcaaaaaaaaaagaatcaaaaaaaggagaaaaaaagtagtagtggtatgntttggaaaanatttggagcatcaaaaggtggggtttgtgtgtgntaatggaggaatttcgatcncattgtggtgcaaaaaaaaaatggcancgatttgggagggtnaggtgattatgaaaatggatcgtccnttttccgattccnaagggtttttggtttttnttaaaaaaaaaaaaaaaaaaaaaaaaaaataaaaaaaaaaaaaaaaaaaaaaaaaaaaaaaaa

SEQ ID NO: 17005 - DNA, 539 bp, Oryza sativa
  Clone ID: PAT_MRT4530_226C.1
ccgggctgcaggaattcggcacgaggagagaactagtctcgagttttttttttttttttttgtcaaacatttcgaaacggagggagtagatagataaatagataatagatagatagatagatgaccatagaagcaggcatatagtgttttctgcctgacatatatagtggcatgcactcgtacaacaggctgggtaaaaacaccaaacctgaaaacatggcaccaaatcaccagttgccaatacaaaaggaaaaattgcttcaacctgaacaatgcatatgcttcaatccagtcggcgcaaccattgccccaaacgcagctgtttcaacggaggaccaacatagggcttccctttgcgagggcacttccatttaccgcggatctctgtcgttgttggagcagctgctacttctgaaacattagtcatgtctgctaaggggcttctgctagtgcgttcttggactacgactttctgttccacaatgtcacggttctcttgcaacgtcgtggacttcgctcttctcgttgggggcttagga

SEQ ID NO: 17006 - DNA, 264 bp, Oryza sativa
  unsure (1)..(264): unsure at all n locations
  Clone ID: PAT_MRT4530_22700C.1
acgttcgggccgcgcgtgcgcatccgagcatctcagcgacacattttttgcactaggattggcgcccatcactgcacagcatcggcgacggcgagaacttcacgatcgtcttagccgaccacttcaactgttctgtgtatntagagctcatgctcatcatttcatcanaagctcattttcagctgatgcgatgttcaacttgggtgtgttgggttcagcatctctcaacacagaccattgcgatcactttcctccattgcatca

SEQ ID NO: 17007 - DNA, 447 bp, Oryza sativa
  Clone ID: PAT_MRT4530_22701C.1
atgtgcccagaggtggtgtcgtgcacggatatcgaggcgctcagcacgcgagacaccgtgcacctcgctggggtgcccaattacaccatgcgcctgtgcgcaccaatcgccgtctccaaccacgaggatgacgacggcctccctgggcggacatcgttgtgggccatggaggaaaggatggcggctgatgaggcgaagacggctgctacagtgtcacgccccggactaattttaagtttgaaggcgaccgtcgatactcgtgcagagtgcacgatctccgaggcgcaactgggtggttacaagggaacatgcctcatggctcgcggtggaacgcgcgcacgggaggggctgaccggggtcggcccagacccgatctcggccgagctggcgccgacgtggcgcctacgtggcgcctacgtggctgacatgcgggctggcgggaggtag

SEQ ID NO: 17008 - DNA, 726 bp, Oryza sativa
  Clone ID: PAT_MRT4530_22703C.1
atgggcaggtgggtggccggcgcggaagaggaggcgatggcacagaatacgactgtggtagcggtggccggggaaggtggcggagtccagagcatcgtcgacaatggtgaagaggcggtcatccccctaggggcggcggaaacagatcccccaggcggcggcagtgccgacggagggcgttgggtggaagaagtgaggggtcccgtccccctggcggtggaggaggcgagggggtccgatggtgtggtgggcggtagcggcccaccagatcggcatagggccctctgtggccgcggccgggaaggggcggggcggcggtggagaggcggacggtggggtggtcgtcgaggcgggctcgtgggggatgaccggcgcgcaggtggaggggccgagcggaaggcgcgtggtggggcagagatgttgacgacggagaaggtgggcctgggagccaacgccctcgccatcgggccctcgccgccgcgccctcgccgccggacaccgccgtcgctagcgccggggcggaaggggccgggactgccattcacccgccgctcccaccgctgccatgcgacgcccccgccgctgtgccctcgctgccagatgtcgcctccgccagttcccggagccaaaggggccaggagtacagtaggactatatgccagtggccagaccgccggtaagcacaccggcaaaaccactaacccgccgctgatccgaccacagtaa

SEQ ID NO: 17009 - DNA, 240 bp, Oryza sativa
  Clone ID: PAT_MRT4530_22704C.1
atggctcgctccttggagaggttttcctctaatgttgcttttctatcctttgcattagccaaactacacttgtatagagtaccacaggttaccacaaaaatatctgaagattatgctcttcaccctcctgtccataccactcgagataagtacaaattcggcatgcgtgtaattgaagaaatgaggtcatctgcaaacaagaaaacttctatcgctattacaggcaattccacaaaataa

SEQ ID NO: 17010 - DNA, 334 bp, Oryza sativa
  Clone ID: PAT_MRT4530_22705C.1
aaacggggcttcaaaagcaccgcccaggtatttaatttataccaattaaactaaagatttttgtggtctacaaaagggggaatagttcgacccccacaaaaataaattaatacttgatacaagggaacaaaaaaaaagttttttttcaaagctatactttgatgggaaaccctacaaataaccatgggtaaaggataccctataccaggaggaacatccgggcacaaaaaaacccttgcatgggttgaatctttttaaagaactttccatggagaacgtcccaatgcccaactttatgtttgttttatggagcataaaaacatgtttttttggg

SEQ ID NO: 17011 - DNA, 531 bp, Oryza sativa
  Clone ID: PAT_MRT4530_22706C.1
tcaaggcacagtccattgttcagttgtggtctgatgtagctcatttcctaggtggaagttcaactcaacagtctccaccaaaacccttcgcctgagatctacaccgggtaagcgggtgatcaggtttttggggagtacctcccgcacgactgctcgccatgtctggagttgccgccaccgctgctggaggagatggcggaggtggtgcgccgccgggagctggagccggaggtggtgcgctaggagctggttctgagcgtgatggatcttcctgacagagatttccctgtccccgtcaatgagcctccttatctccctgactaggtgcgcagaggccgacaggtctttttctcttgattgcagcatctgtgtcagcgttaaccaatctgtttccacttcaaaagggagcatagtccagtgaagcgctaatgcaattccttccacgcaggcaaggatctctgcctcaagcgccccattacagcgctccataaatcgattccccccgctcttccactggatcaaaagagccat

SEQ ID NO: 17012 - DNA, 360 bp, Oryza sativa
  Clone ID: PAT_MRT4530_22707C.1
tccttttttcttaccctcctttttttttttttttcttttgtgtttttttaaattttttttgcgttctaacacctctttttttaaaacgcaaaaaaaaacaaaatgcctttgcccaaaaaaaaatccttcaaaactaaattgtcacaacccggagactctccccacaaaaaatatcgggactaaaatttcccccatcccccccattaggatacttttaattcaacacaacacgccccacaatttcttttaaacaacctctccttaataccaacgctcatcaaacaaatacccatcctaccattaaacaaactaaagaattcccagaaaaacaccttttaggacaaaacaaacccctgttta

SEQ ID NO: 17013 - DNA, 1334 bp, Oryza sativa
  Clone ID: PAT_MRT4530_22708C.1
tggctttctgtgtcccaatatatctcctgaaaggcagtgtttctctgtctctctctatgtcctctagctagatagatagcacagaggagagagctctagcttagctgctgctgccccggcagctagctacaaattaagaaaaggattaggagcagtgggatttggtagtttggtgcgtgtgtcttgttgcctttagcagcttggagttgaggcaaaaatccaattctgctcaattggactcatggggagggctccatgctgtgacaagaacaacgtcaagaagggaccttggtcgcctgaggaggatgccaagctcaaggagttcatagagaagcatggcaccggcggcaattggattgctctccctcagaaagcaggattgaggagatgtggcaaaagttgtaggcttagatggctaaattacctgaggcccaatattaagcatggagagttcacagagcatgaagacaggatcatctgcaacatgtttgccagtattgggagcaggtggtctataatcgcgtcgcagctccccggcagaacggacaacgacatcaaaaactactggaacaccaagctcaagaagaagctcctcggctcgagcgccgtcgccgccgccgcgccgccacggatacagcgtcatcagcagagccaccaccggtcgtctctcctcctgccgaactcgccgtcgctcaatcccggcggcggctacccaggcttcttctccggcgccggcggcttccatcctcaggaaccagctatgccgttaaccctaccgaccaccacccaggaattcatgctgggcactcactctggccttccaatggtgagcgcctctgcgctgctcaaccatctgcacggcgcatcacatcatcatcagctgcttgtgaaggaggagatcagcagcaacatgatcgtgttcggctccgaccagcagagctgcagctcgtcagatgggctggcggcgccacacagccacaaccaccatggcaacagggagttcatccttgatggctacagctatggcgtcggctacggcagcagctgcatcgatcaggtcgacaacgacaagctgttccagcatcatcatcagcaggatcaggcacaagaacagcagcagcagctggtgtacaactacgacgagatcaagcagctgctgatgaacacatcaaccacaagtaatagtattaatgctggtcaggatcatggcggcagcatggaagcagggttgatcggctcacaagggaaggtaaccatgatgtaaattaaactgatcgattaaagaggaggggaaggcagcagctgggcacggcaagattaaggatggattaatt

SEQ ID NO: 17014 - DNA, 393 bp, Oryza sativa
  Clone ID: PAT_MRT4530_22709C.1
acgcgcgagccgcgggtggagaacgaccacgccaggcaagctacggctgacatagagcatacatcaatcgtagacaacatatcagatcacgatattcacatggtcatggtggacgcggtcgccatagcggaggacatcttgtgctggggcacgacggagcacctatactacatcatgccgatggcgccggcaaggcttcgggcccagctgagacgacgatggatcggtgggccaaccctgtactatccttacggtaacctcatcgacgtgaggagccacacaggcgtccacccagcagttaggctacgaaagaacgaccacgtgattgcgacatttttcgcgactaccagttagccgtctcacgcttgtactagtattggaaaaaacaatacg

SEQ ID NO: 17015 - DNA, 242 bp, Oryza sativa
  Clone ID: PAT_MRT4530_2270C.1
ccctgtatgtttgtaaggatagtccagcttttgtgtggccagcttgtaaccagttataattctttcccttgtaaaatgaaactggcccagagctttgtatgctagcattttgtcctggccatttacccacgccctcccattccccattcccttgctcccaccctccccattgaagacaccatgaaggtgtaacaccacgccccgtaaatgaagtttttccccaaaaaaaaaaaaaaaaaaaa

SEQ ID NO: 17016 - DNA, 845 bp, Oryza sativa
  Clone ID: PAT_MRT4530_22710C.1
ctagtggatccccgggctgcaggatcggcacgaggcgggttttcggtgcagacccaactgggtttggttgccttctgattaagaaatcagttattgggagcttgcaggggaggaatgggtgtaatgcttctgggatggtgaggattgttccagtgtttccgcaatatctaagtgattctgttgatggatttgatgcaatggatggtctcgaagatgattctggtgtccacaaagatgagaagccagcgtctgatgcccgtaatggttcgcagctgccagcatttccaggtgtgtacacatctgctcaggtcagagaggcatttgagagtgatcctggccgtgacagcagctcggacagggatgggcgagcaccatttttgaagaaactgagagcatctcagttggtgaggtcatgaggagcccggctttcagcgaagattgctcttcagagaattctttctgggttgatgttggccaaagcccattggggtcggagaagggtggtcatttcaagaaagggaaacttggatccccattaccatcttcttggttcgctggcagaaagagtaacaagaggatgtcaccgaacctaacatccaggatatcaagaagccctctttatgatggtcaggtgatatcttttgatgcagctgtattatcagtttcacatgacgcggactgcctcaaggaagaccctgaagaagaaatctatgagaatggtcggcggaatcacttcaggcaagttagtgaaattcaagaggagccagaggttgaagaagttgtatgtcaacatgctatgaatggcggtggggatcacaaagaaagtgcgataagaagggagactg

SEQ ID NO: 17017 - DNA, 541 bp, Oryza sativa
  Clone ID: PAT_MRT4530_22711C.1
tcatcgtagaagagcaataccacttgttacaccagtagaaacaattctatcaatgttatctatacgtctttgtatggagcgcaggagcatgttcagagctaaaactctcttgcgaatagaacaaatccttgtggcttgttgcattatgaccggggagggtgcattctctaatagcttgtctagttctccgttgagccggtcgacggcggcggcgagctcgccctggctccgagcggtggccgccgcgcacgcctcgtgttcctgcagcgcgccgcccagcacccccgcgatggccccggccagagcctcgcaccgctccggctgggccgcgggcgcggcggctcgctcgtcgtcgtcgtcgccggcggcagctgcggcggatggggaggcggcggcgggtggatcggagccgtccattggagcggcgatgccatcgaggggggcttcagattggggactagaagcgagaaagtgcgagacggtgatgggcctccatcgtaccaagaaaagctaccagaacacagaggtcgaaacaccgtga

SEQ ID NO: 17018 - DNA, 538 bp, Oryza sativa
  unsure (1)..(538): unsure at all n locations
  Clone ID: PAT_MRT4530_22712C.1
gtacatgcttatcaaaaaggctgtttcggttngcaagcnccttgagcgcaaccgcaaggacaaggactccaagttccgcctgattntcatcgagtcccggatcccccgtcttggctcgttactacaagaccgtcggcgtcttgccccccacctggaagtacgagtccgccaccgccagcaccctcgtcgcatagagtgactttgggtttttgttctgggggtgcgcgagcattggttgtggggatgctcgcattaagggggtgtttaactactacttggttggtttggtcgtaaacggagtttgggcaggaaaaaagaatactactgcatttgtcgacgtctatatgaacttgacgacgaccctcatgacggtcctggggtctaccatcattggcgggaagaacccgtccataccactaagataggagactgggcaagtaaaaagcctgagttgcggaagacccgcgacctcttttcccttgccaatgaagcgcatctatcgtggtaaaaaaaaaaaaaaaaaaaaaaaaaaaaaaaa

SEQ ID NO: 17019 - DNA, 635 bp, Oryza sativa
  Clone ID: PAT_MRT4530_22713C.1
caacacaggaaacagcttatgcccaatgattaccgccacaagcttctaatgacgacttcaactatagggaaagcttggtacgtcactgcaaggtacaaggtccggaattcccagggtcgaacacacaagcagttcacagggctgtgtgccaggttttgtgggttgtctggagtgacacctggcaaccaaagcaccactgcaggtgggcagactgcaaatgcgtgcagaggtgaatgcccagtgctggagggccacaatgcttgacacccaaactttaggctgcaacccgggacaatgaggtgcaatgccccctggtgcctttggcctttcgacaaccaattcccaagcaatggacaatttgcggttcttaaggtgggtgccaaacacatgtccggcctaagacctggttcaaatacaagaaatttggtaataatccaagtaatcctggtaactccaccttggaatcaccccggacttaggatccaatctactggttggttggtaaataaagattcttccaatatggttgtaaattgatgccgtggagaagtagtctatggtgtttgtaaaccactgcacgtatgatgttcattatcatcttggatgttttaacgtaaaaaaaaaaaaaaaaaaaa

SEQ ID NO: 17020 - DNA, 318 bp, Oryza sativa
  Clone ID: PAT_MRT4530_22714C.1
ggcaattcgagctcggtacccattgaatacgccctcctccttgacaaccacctcggcaagcgcttgaccgccgaccgccggcgcgcggatgctcactcgtcgcctgcgcccgctcgtgtgccgctcctcccccgccgcctccgcttcgccggttgccgcgctctcgcctgcctgccgccaccgccactccactttgcttcaccgaccgccgcgctcgcacgccgcctccgtcggccgccgtggcggcgccgccctccgcctctcccgcttcgccccggccgccgcgttcgcacgctgcctccgtcctccggcttgtag

SEQ ID NO: 17021 - DNA, 342 bp, Oryza sativa
  Clone ID: PAT_MRT4530_22715C.1
atgaccatacatgccacggacaccggcagggcaaggcagctagggttggggtcagtcagtacgagacgaaagaaggcactggcaccgaccaaggtgccatggggcctgcgggcgttggagctggagggagtgaaagcggaggacggcgcggcgcggcgcggcttttggttttggaccggacgtgtcgtggtgaccgtgacccgtcctgctggactcacgggcgcctcgtcctccggctccgcgttttggctccttgctgggggtgggattgatgaggacatcctccactattacccgctggcaaagacacaaaagtcaggcggtgaccgtgtgagcctttga

SEQ ID NO: 17022 - DNA, 345 bp, Oryza sativa
  Clone ID: PAT_MRT4530_22716C.1
atggtgatgtctcctggtggcttggagctggcaacaccggaggaaggtagtgatgaagccggctcaagaaggcccaaaacgccgggcaatctactgcatgaacacactggtagcagttgtacgtatatacctggtcctggtccaaggcgctacaagctgcagaggttccatttcaccatgtattatcattgggcattaaataggtgccgctcaattatttttcctgacaattcctacatgatatctattcacgatgacaaaatagagaagttcagcactctgaagaaccggacaggaatttcatcagcacaaaacaataccagattggacaaaaactggagatga

SEQ ID NO: 17023 - DNA, 442 bp, Oryza sativa
  Clone ID: PAT_MRT4530_22717C.1
cccctctttttttttttttttttttgaaattgaaagatttccatatttatttaaattaaaaatactaacttacgagtgatccttaactcacttggttctactacagatataatgggcctcactgaacatgtcctgtaaaaaataccgagctgccttgggcttttacagggtaccgagatttagtcttcttaaaactggtatagttgttccttaagccgtacgttttagttcatccatgatgcaaagatgaattcccgccgaatttcttcataccccttgccgatatgatactgcacccatgttcttgtgtgcttcgaaataaagccgccattgatggtgggtcctcaaaggcacagatgcaaccagaggccgtgtagatctgacgcaatgaagggggcttaggatggccttcttgacaagcttcacctgatgccctgaccag

SEQ ID NO: 17024 - DNA, 264 bp, Oryza sativa
  Clone ID: PAT_MRT4530_22718C.1
atggcggcggggcaacttggaaaaagcaaggtcatcgggaactgggaggataaggcccaacgtgtgctcctcagcctcctccttcaatgtgcgttgtcgatggtgatgaaggggcaacgtgatggtgagccatcatgctcctcacccgattgtgtgcaggtatcaaacctgatacctgtaggtatcaggcttggtacctgggtatcatggttaggtgtcagacctggtacccgtatgtatcaggcctggataatccaacgataa

SEQ ID NO: 17025 - DNA, 595 bp, Oryza sativa
  Clone ID: PAT_MRT4530_22719C.1
ttttgacgcaaagcaaggacatcattatcatttcgtggaagaaatttcaagcataaactgttctgtattacaagaatcagtgctgtgactatcctgcagcaaaaatgccaaaaaatgaactgaggttgctatctgtgactatcttgcgaacccactcccaaataattccagtatgatcttcccatagagtatacagagccttccgttaccagttgattttgtgtctcaatcaatcacctattggtcattgcgatttcatattgctattcactcatccttgaaccagtggcgaacgacatggatgacaaagccgatgcataatattgccgtcccgatagtcaccgcaatctgaaccggtacggaagaagcaaacgcctcttgcacgagcaaattaaaaagcgcaaaccacatagcaccaaaggctgatcctactatagcacccacaagaacctggttcagtgtatggaggtgctgcgacactcgtaaccacgacgggcagcagcacattgctagaattgcaaccccatgaagaactgacagatcgcaaatcaaactaaaataacttaatgaaagaattagaaacaccgcagaatag

SEQ ID NO: 17026 - DNA, 458 bp, Oryza sativa
  unsure (1)..(458): unsure at all n locations
  Clone ID: PAT_MRT4530_2271C.1
gcaggacnttngctcttgcacgctattcccccaccgagcccgccgcggcaagcaacgctagctagcttggcacactgcacgtacgtggctggcatggagctcagcgagcacgaggaggacgccggcgacgtgggcggtggctgctcatccccgcccacgccgcctcaccgcgtgctgacgtcggccgcccccgagacgatcaggtgccggtaccacgagtgcctccggaaccacccggcggcctcgggcggccacgtcgtggatggctgcggcgagttcatgccggcgtccaccgaggagccgctcgcctgcgcggcctgcggctgccaccgcagcttccaccgccgggacccttccccgggccgcgcgggcgcagcacggctgctgcagctgcacctgccggcgtccatcaactcgcgcgcaccacccgcgctgctgctgccgcctgcagcggccgc

SEQ ID NO: 17027 - DNA, 300 bp, Oryza sativa
  Clone ID: PAT_MRT4530_22720C.1
actgcaaagctgcaaagtcttccaaaactttgctggcccacttgaaactggcgccaatcccaatatggggggtatcttatcccttggactactaacaatttggctcacagaggagcaattcccacacccagtgggtgggtgttctgggtactggaatgtgtgaatgagtgataatgggtgtgcaaaatggttgaaaaataaagtgcatggcaatcaatgcatgcgtgcgacaggggaaacggagggcaaaaaagcgaaataagcaccgagggaaagacccaaaaaaaaaaaaaaaaaaaa

SEQ ID NO: 17028 - DNA, 326 bp, Oryza sativa
  Clone ID: PAT_MRT4530_22721C.1
gacagatcatcgcatgtttggatgctctacaattaacccatgcagctatttcaatggttgagggagcttctgaagcgaacagtatggcaaatactatgatgcagaagttctgggattcagctcttgccctgcagcctgcagaggaatcggatgcccgtagtgaagaatctcgaatggcaacatcagataatgctgaagggaaacatataccccctcatgttggcaattcattctcctttaaactacaagatagaaaagggcgtatgcacagattcagttgtgtttcagaaagcttagatgagcttgtttctgccgtatcgtacagt

SEQ ID NO: 17029 - DNA, 276 bp, Oryza sativa
  Clone ID: PAT_MRT4530_22722C.1
atgtacaagcagggagcggatgcttctacggaggcggaggctaacgagaagggtgagcagccggccgtcgccgccgcaggtccgctggtgaagagggagaggcgtggtcgtcgaggtcggctgccgcacgtgcacacgcataccaagatatttgccatttattgggatggaaaaaagactaatttatccttcttctactcatctttccccttttcttcctcccgtcgatcttgccagtgcgtcagtgggcagccatggtgcggcaatgcagcgtag

SEQ ID NO: 17030 - DNA, 1522 bp, Oryza sativa
  Clone ID: PAT_MRT4530_22723C.1
aggcagtagtatgatgacatatatttgatttggtgatgcacattacatcgatcattgttattgcaggctgcagctagtgatggagatcaattagagatcataagtgtaacggaggaggggatggacaggccagggaggcggccttggccatggcgtggtgggggacgccggcgttgcagatgttggcgaaggagcgcatgtgctttatcccgtactgtcccagcgacccacactgatcctcgaacgtccgcaccatcgacctgaggcactcccagtcctcaaccagcgcagcccgctcccgcacaacctgctgcttgtgcttggcgccgcccaagaggaggcccccgatcatctccacgcttctgtccacgcgcgatcgccgtcccatctcctgcacaagccgctcccgagcctccaccttctctgccgtcccctcgccggctctccggtacttgcgccacaagtagagcagatcggcgtcgcgctgattcacagacacagtgtaggagtggctgcctttggcgccagcagcagctaatttgtggtcgttcgccgtcgcaggtgatgtatccatgtagtagaggtccaggctctgcggtgcgagcgccatgtcgccgtactgcatgacgtgggagccgagcgtgtaggtgccctcgtcggacgtccggttcttcaccgtcctgtactgctgccgcagcgtctcggcgaggcgcccctcctggtgcgcctccgcgtcctccatccacgccacgctgtagaggtccccgaggcaggtgtcgaactccgccgccggggcgtcgtggtcgtcgccggggcagtaggtgccccagctgctctcctccgcgttggaggccgtggtggcgtacacggagatgtcggaaggcaggaggccctcgaagatgctgccggactcgcacgcctccacgtacacgaccaggctcttgtacccgccgccggcgtgcttcttcttgagcgccttgaccaggtcgtcggcgtacaggtactcgccgtcggctggcatgctcaggacgccggggccgccgtggtcggcgtagtagacgaagacgtggtcgttggggccgctggcgacgaccttgccgctgccggagccggtgagggcggagcggttgccgaggaggacggcgaggaagttgttgacgttgacgtcgtcgccggtgtaatccttggggacgccggcgtagacgtcggggccggaagggtggttgaacatgagcccaggcctggggttgtcggggttgtgggcgatgtcgtcgtacatcatcaccacgatgttttgctcctccacgcctcccttcctcatgatctggtacgcgtggcacacgtccgcctggtgccggtagttatagaacccattcgaccccgcgatcagcaccgcccacctcgtcgtctcatccgacgacggcagccggaggaactcctcctgccaccgccaccgcccaccgccggcgacgacgaggccgacgagctgcagcagcagcaggcagaggagaccgcgccccat

SEQ ID NO: 17031 - DNA, 563 bp, Oryza sativa
  Clone ID: PAT_MRT4530_22724C.1
gcacgagggaatagcatatctggctcagattttccccgatatcaatgagatttttgagccattgttgactgaaggaaaaatctactatctggcatactatagagtcaagccacgtaacaaaatctacaggccagttgcaaacaagtttgctatctccctcacaaaatggacaaaagttgaagaatatttggagccgccatccagctttccgttcatatgtctacacactgaaaagcttcaatgagttcccatcacttgtggacaaaaaggattcattcattgatactattggggtgatcactgagattacatctataacatctgttcgttcgtgcacaaggaatgctgatagcctgaagcgcaacgttcacatgcgcgatgcaaagttagatttatctgcttcttacaaatatattgctttgcttattttatacatttctgacatgacatgcttctgaacctgacatgtttactaacctgataaccactcccacacaacataattaaacaactcttactaccctattttactagcaatgatactatccacatctcgctctggg

SEQ ID NO: 17032 - DNA, 1826 bp, Oryza sativa
  unsure (1)..(1826): unsure at all n locations
  Clone ID: PAT_MRT4530_22725C.1
gccgcctgcacgcgctcgcggaattcctcgggtgcgactccatcgcggcccgagcgtcngctccgatcgactacaccccgccgcgccgagcgcacgcataaaaccatcaccacctgtccctccacctacactccacctgaacttccacactcgagtagcgagcgagaggagcactgacgacgtcgtctcgtcgccgccatggagatggtgctggactggcgctcggtgggctcgctcctcgccaccatcatggtgttccggaccgccatgcgcgacttcctcccgcccgaggccgagatcttcctccgccgcctcctcacccgcctcgccgccgccttccgtccccacgtcggcaccatcctcatcgacgaggccgacggcgccagcggcggcgccaacgacctctacgacgcctcccagctctacctcggcgcccgctgcctcgccaccgcccccaccgtccgcctccacaagccccaccaagctccccgccccgtcgcctccctccccgacgcccacaccacccacgacgtcttccgcggcgtcctcgtcaagtggaccgctcgccccgtcgagcgcggcgcctccgccggcggcggcggcggcggagtgttcaacccttacaacccttatggccgaggtggcggcggcggcgagccgcgcagactcgagctgcagttcccgcgccagcatcgggagctcatccacggccactacatccagcacgtcatcgacgaggccaccaagatgcggctcaggtcgagggagcggcggctctacaccaaccgcgccgccgcccccggcgacgaccaccaccgcctctggacgtcgcacgccttctcccacccttccacgttcgacacgctcgccgtcgacccggcgctgcgcgacgacatccgcgccgacctgctgcgcttcgcggcgcggcgcgagcactacgcgcgcgtcggccgcgcgtggaagcgcgggtacctgctccacggcccgcccggcaccggcaagaccagcctcgtcgccgccatcgccaacctcctcgagttcgacgtctacgacctggagctcaccaccgtgcccaccaactcccacctccgccgcctgctcgtctccaccacgcccaagtcggtcgtcgtcgtcgaggacatcgactgctccctcgacctctccgaccgcaagaacaaggcgagcgacgacgagaacgcggcgcagctctcgatcatctccccggccgctgcggcggccatggcggcgatggggcgggaatccatcagcctctccggcgtgctcaacttcgtcgacggcctctggtcatcctgcgtcggcgagcgcctcatggtgttcaccaccaaccacccggagcggctcgacccggcgctgctccgccccggccgcatggaccgcaagatcgagctcggctactgctcgccgcccgcgctccgcgtgctcgccaagaactacctcggcgtcggcgtcggcgacgaaggatgcgaggacgccgccgacgatccggacacggtgagcggcctcatggccgacgccgagggcctcctcgcagccggggtgctcatcacgcccgccgacatcgccgaggtgttcatgggctgcgacggcgcgggcgccaccgccgcgctgaggaagctcgccgacgagctgcggcggaggagggacgcgccggcggtgcctgtcacagaggaggcggccatgacgacagagtaaaacccagacgacccccccttcagattgcttgaacttgaacagcatcatgatccaatatataattaataattttcatggtgaaaaaaacccnccaaaaaaaaaaaaaaaaaaaa

SEQ ID NO: 17033 - DNA, 1551 bp, Oryza sativa
  unsure (1)..(1551): unsure at all n locations
  Clone ID: PAT_MRT4530_22726C.1
tggatccccgggctgccggcagcggcacgaggcggggatgcgagcggcagcaggaggccgcggcttcctcctccacccgcggccgccatggcgagctcccgcgcctcctccttctcctcctcccgccgctgccaccgcgctcgcgaggcggctccaccaccggcgcttccctgaaggtattctgtccaccctggaacaaggtgtttctacactgcatttgtgccgttgggttcactctgcaacatgtggtgttaccttagacgacagatcacaggcagaacctgtgaatggagcaaagtccgaccttgttcaaaagcatgagaaggtaggtgcatttcagagaataccaatggtgatgcctgcaactgatatacttatgtcagcacaaagaaaatcaagaaatgtaccacctacaaagggtatagcaaatattgctaaacgtgaaaggaacaaaggggcaaaacaacttgatgccttaatgaaagaaatttcagtacctctgagaacatatacagaaaacttccctaagaggagggatcttcacccctatgagagatctctcattgagttgacttttggggagggatattacgagaaggtaatagcacgagtggatgctctcaggaaaaagattaattctgtcgggaagcaacatgcttctgtctgtgctaagtcattaacgaagcgtgaagcagaggagcgactcagtgaggggcggaagaaacttgaggaagctttcgagcatgggaagtgggtaattgatgatttagtaaacattgcaaagactttgcgttctatgccagttgttgatccacatatacctacactttgtcttgttggatcacccaatgtggggaagtcatcattagttcgcatattatcgtctggaaaacctgaggtctgcagctaccctttcacaacaagaggtattctaatgggacacattgtatccaatcatgaacgttttcaggttactgataccccaggacttcttacaagagatgatgatgaaaggaataacattgagaaattgacccttgctgtcctttctcatctaccaattgctgtcctgtatgttcatgatttatctgaggactgcgggacctcagtggccgatcagtacatcacatacaagcatataaaggaaagattcggtgatcgcttgtggcttgatgttatatccaaatctgatcttttggacaagaaaacatcctcagaatttgatgatgctgatgatgaagtagggagatacagaagattcgggccagaatgtgccatccgagtatctgtgcagggccaagttggagtaaaagagctaaaagagaaggtgcatcagctactaacctctcagatgtctcggatcaaagctggcacaatctatcaggaaacccagagaacggatgataatgctcccgggcaaacttagngaatatggnaaggttangtacacanttatgtaaaccttttaaacgctgctgacagtcngtgcatntaangtagtagtaccngggaanttgtacanggaagagaaaaantttgggcctgtncaca

SEQ ID NO: 17034 - DNA, 282 bp, Oryza sativa
  Clone ID: PAT_MRT4530_22727C.1
ctcatacacaaactatgtccagtgtgatgcatacctctacagtctgagctcgagtctatatacggatgctggaatagattatagggctcgccctatttgaatctgaattaaatggcggcgcctttactgtgggctaatgatgactaggaggtcgatgagtctaggggcggagcgctctaacagttccactgcttacttacacatgccaccgactctatatctattgcatagattgccctaaatgctattaactgggactttttttctagacatcttggctgt

SEQ ID NO: 17035 - DNA, 1097 bp, Oryza sativa
  Clone ID: PAT_MRT4530_22728C.1
cggaattcccgggtcgacccacgcgtccggtgaactttcgtgtgtaataaagccaagatacaggagcgataggctccgcggcgttcgtcgccgaaactccactgttcatcttcaacctccagccattcttgtgtgtgagagaaagagagctctgttcttgtgttcctaggctgattccaacagcgaccatctcgactgccacggcggcgacgccttcggcgtggcgctggtgggcaccgacgtcgcgggaaccacgcacgccgccctctactcgtcggcgaccgacgcgtggagcggcccggcctccattgatcaccaccccgacgccttcgtccaggcgagaaggccaagcgtcctcgtggggaacgcgctctacttcctctgtgacaacaacaccagcatcgtcgagttcgacatggccacgatgacgctgtcggtgatcccctcgccgccgctaccggaggatgtgcacggcgctctcctcatgacggcggagggtggcgggctcgggttcgccgccgtgctggagcggtccaacctccacctgtggtcgaagtcgatggatcaatgggagcacctcgaagatgtcagggacctcaagacgctgctcccccggggttcaatctccatgatgaacaatgtgttgatcggcttcgccgacggtggcgttcgtgtggttgtcgtcaggtcgtaccatggccccttcatcgttgagctgggatcaactggaccagcgagggtggccttgaggagaagtggaatctacgctgtatttccctacacgagcttttgcactccagccgccgccacgacgacagaatgatccatccgcttacatgaaactgctgatgctggcttcctgcagagctgatgcttgaagtgctttcttctgataggcaattttagcaagaaaagagttcactaatggtgatcgatttactcagttttgtctcccattttgcagtctgattgagaaaagagttttgtcaattttagcaaccagaagaattcacaaatggtaatcttggtcatgttagtaagttttgtctcctggtgaatacttttaagaaaagagtgagacttctcatcagttaact

SEQ ID NO: 17036 - DNA, 585 bp, Oryza sativa
  Clone ID: PAT_MRT4530_22729C.1
atgccgtgtgggtatggggtacccataatctccacagagagcgccaagcagtgcgccagggggacggcggcgctgcgccggtgcatggaggccaacgcggagcacttcaaggccgacatccgcgccatggacgagggcctcgacgaggaccagcgccgccgtgggtcgccgccggcgccggatggggatgaggatgaattcatcgccagtagcctcaagtggaggtggtggactgggatgcagagatactccacatgtcaacctaagggaccacggtggaccgggtacacagagacggtccgcgggtcgacgaaagcggaccccgtccgcacaacgggtacggggcgacaccgaaaggacgaggacgagggcgacgagggagagatccttaccaccacgcgacgaggcgtgggaacgacaaagacgaacgagcgcggcggagacggctcggggacgacggaggcgaacggcgagggaacgacttcggcggcgatccttggacgaaggcgagacgcggccggcgcagggcttgatgacgcggaggcgaggacgaagaagacgacggggctgcagcggcacacttga

SEQ ID NO: 17037 - DNA, 747 bp, Oryza sativa
  Clone ID: PAT_MRT4530_2272C.1
atagaaagaaaaacgcgatgtgttcttctctgtgcgcctgtgttttgtgaccaggagaattttcagaatatgtcatcgaattcgcactactttcaggatatgcgtcgccttgccccgcccctgtcgtgcggctgccgacgagaatacgccatcggagcacgaatttccttcgttccgtgccactccgtctcttccgtccatagctccgtcgtcttctccgcccggcgccgttcgccgccggtgcccgtgtcagccgcgccggcgtccgtccgtcaccggcatcgtccatcctcgtcggcgtccgtcgtcgtcatcgtcgtccacggctcggtgggcgcggagggaaggagtccgccaccgcccgcgccggcgtcagtcgtcggcatcgtcgttgtccaccgcccgcgccgcgcgcgcccgtgtcagccacagcgttgtctgttcgccgtcaccgccatcgtcgtcctccaccgcccgcgcatcgcgtcctccggctggagcatgtcggcgagggtgccctgccctcgtcctcctcaacttcctccccaccaccacggacgccgccccccattgtacacagccgccgcattccgcctcgccccaccatccacaaggggcttctcccccaccccttccccgccgccgcagccgccccattctgcagccgcagccgcttcgcccgcagccgcagccgccgcttcgcccgccgccgcagccgttgctagcactcgcggccgcgctcgccat

SEQ ID NO: 17038 - DNA, 233 bp, Oryza sativa
  Clone ID: PAT_MRT4530_22730C.1
atgttccatgcaaatgagggccatgacagtagcgaagggaaggggatgatcaagagctgcggtgaggtccatcagctcctagatctagcggtgcggtggagaagggggagacctgaagttggcctcagttgcgcagaatccggcagcgacagtgcatgtgagcagcggttgtggttcgacgaaggtgacgaaggccatgacgtgggctgcaaacgacaactagcaggggagcg

SEQ ID NO: 17039 - DNA, 546 bp, Oryza sativa
  Clone ID: PAT_MRT4530_22731C.1
attttcaagctggttgtgccaatttatctgctttcaattattcacacatcacactagtacccaaaaagcaagtccctgaaacaactaatggctacagacctatttgacttatgaaccaaccagtaaagataatttctaagataatagctgatagatttcaagtgattatggctacgatagtccattagaatcactttggctttatcatagcaaaatcaatcaagattgtctggcatggacctttaaatatctttattaatgttcatcatgcttaagttggatcatgcttagatgtcatgaaagtaatggagttccctccacaatggattaattgggtaaaattgatccttgaatctgcttccaaaacagaccttctcaatggtgttccaggagagttcttctagtgcaagaggagtggatcccctctctcccatgttgttcgctctcggagcggacatcttacaagctataataaataagggttatcaaatgggcctctttcaaatgtcaatcctaggtgcgccgcacgtgctcgaagagagagag

SEQ ID NO: 17040 - DNA, 147 bp, Oryza sativa
  Clone ID: PAT_MRT4530_22732C.1
accacgcgtttttttccatttgtccgacagaaccaccagatggatcgaggggctcgagagggaaaaaacactgcgcacggagaccatcaaaggcgagagcgaagagcgagagagaccgccctgcatgggcaccgcgacgggagagca

SEQ ID NO: 17041 - DNA, 444 bp, Oryza sativa
  Clone ID: PAT_MRT4530_22733C.1
atgccctgcctgtgtgctgctcccaagtcctcgctttccccatccgtcttccccgtctctgccgccgaggcagcacgagaagcatcctccgctgccacagccattgttgcgtcactcgtgttccactaccaccaaatcaaagttgattccttgggtggggatggatggtcagaatacaagtccggctcccatccacccactactgccacctcacagtgcaccgttgcctcgccgacccttccactactgttgccatctgcttcttcgagcttgcacactagagcccttcccactttacacaaggttaagacaggagagggctggagcgtattaagaaaaaaaatatttgctggcctatgccgtggtctaaaaatcttagttacctcttctggattgtgccttaaggacatgagcaatgcccctagtgctaaaaagtacaagtaa

SEQ ID NO: 17042 - DNA, 549 bp, Oryza sativa
  Clone ID: PAT_MRT4530_22734C.1
atggctcgcctcggccccggcgctattactcgacttgcggataacatcggcgttggggtgtacttcaatccatttgttgagtggagggacaagaggataaagtacggggtggtgaggatgaaggacctggccatggatgtcttgacctgggaccggttctacctcagtggccggctacagaaaccttatgacctgtacgcccaaatttgcagcctatcatatatgggtgatttaagaatgctcttcgccgaagacaaaaacaaggattgtggtgcatctgcaacaaacgaactgttctcttatctcccatggacaatccaaaggcgattgcaaggaagatttgcatcgaattgcgaagaaatgccaactcgtgcctcagtttcttcaaaagatgtagcagcaacctgtgtccgcaaggctttgaggcgccgggtaatggtctcaagtgcacgtcaagcgatgtctggactgctggcctcaggtggcgctgttgctgctagatatctggggaagaagatatccaaagcctggaaatcaagaacagtttaa

SEQ ID NO: 17043 - DNA, 1075 bp, Oryza sativa
  Clone ID: PAT_MRT4530_22735C.1
ttatgcattcgcattactgtcacctgaactgaatgacttgaggtggtcgtccatgaagggattatcagagaaaagccaaccacgaaggaagaagcacgccaattcacggcgaagcggaggcagccgccgccggcgaccatctcgcgtcgctcctccggccatctcttcagctcctccactccccgaagctgccgcccgcgcgatccaccgaatgaggccggcggaggaggcggcgagggcggcggcgctggccggcccgctcggcgagctcctcccgccggtggacttctgctgcgcgtacggctccacgctcctccacgcccgccccgaagcgtcctccatggtcgactacatcctcggcgtccccgacccgctccagtggcactccgagaatttggagaggaaccctgatcactactccggatggatggctcgcctcggccccggcgctattactcgacttgcggataacatcggcgttggggtgtacttcaatccatttgttgagtggagggacaagaggataaagtacggggtggtgaggatgaaggacctggccatggatgtcttgacctgggaccggttctacctcagtggccgactacagaaacctgttcatgttcttgttgataattgggatataaggaagattaacacaattaatctgaaaatggcaacatcagcttctctactccttttgccagcagaattcactgagtatgacctgtacgcccaaatttgcagcctatcatatatgggtgatttaagaatgctcttcgccgaagacaaaaacaaggattgtggtgcatctgcaacaaacgaactgttctcttatctcccatggacaatccaaaggcgaacgcaaggaagatttgcatcgaattgcaaagaaatgccaactggtgccgcagtttcttcaaaaaatgtagcagcaacctgtgtccgcaaggctttgaggcgccgggtaatggtctcaagtgcacgtcaagcggtgtctggactgcttgcctctggtggcactgttgctgctagatatctggggaagaagatatccaaagcctggaaatcaagaaca

SEQ ID NO: 17044 - DNA, 1171 bp, Oryza sativa
  Clone ID: PAT_MRT4530_22736C.1
cggcggtgtcctttccgatactctctctcctcctcctcctccactccggcgactcctccgccgcatcccgagcaagcaagccgccgccgccgacgacctagctccccgatcgcggccatgtcgaggcgcggcgactgggtctacgagaacaacggcgggacgtgcgtggccatagccggcgcggactactgcgtggtggccgccgatacccgcctttccgtcggatacaacatcctcacgcgcgaccactccaagatctgcgagctagcggacaaatgcgcactagcatcttccggcttccaaggtgatatcaaagctctgcacaagaacttggctgccagagaattgctgtaccagcaccagcacaataaaaggatgagctgccctgccatggcacaactgctctccaacactctgtactacaagcgattcttcccatattatgctttcaatgtacttggtgggcttgatagtgaagggaaaggatgtgttttcacctatgatgcagttgggtcctatgagaggactggctacagtgcacagggaacaggatctgctttgatcatgccagtgctggacaaccaactaaaatcacctagtccactattactccctgcaagagatgccgtcacacctttgtcggagacagaggcggtcgatttagtgaaggatgtgtttgcatcggcaactgagagggacatctacactggtgataagctggagatagttgtcatcaacaaagctgggacgaagcgagagtacatcgacctgaggaaggactagatcgacgattatgttcttcagttaccgcaaatttgcatcaacaaatttgcttcgaacattctccctgatacgccagggaatcatgccctgaacttgatagaaacgcctgtgctttcttgcttctattctgtaccaggattctcccaacctgctttgttgaactaatcgctgccttgatgcaaatgagaccgaacatatttattgtcagaaatatcacaatggtcgatatgttgaactaaaaaaaaaaaaaaataaaaaaccccacgggcgatgtctccggatgcccgtttgatccactaaaaaaaaatgttgccccataaggaggggcggcctttatctcacttcaccattccaccagaacaataccaacctagacataaataggata

SEQ ID NO: 17045 - DNA, 737 bp, Oryza sativa
  Clone ID: PAT_MRT4530_22737C.1
gagaaaagctatctctatcaacattagcgaaaaaaaagcacacttaaagcctttacaaaaaaaatatatatgaagtctttacaagtgtaaacatttctgaaattgcctggtgagcgattaaaatgtttttcttgtggtgccttcagagagtttgatatgtttccttgtggttccccgggcggcccgttttctgccgccccgaacattgatctgagagtaatcaaattccttgaatagtttaacttctaaatgttcaaaaataaagggagcgccatggaagtcaaattagtgaaaatcttaggtatcctgcagtgtgtatgggggcactgtgcaatatgatgttgcatgcagtatactatcattcttttaaaagtatcttctcggaataatttcttatttccaaatattctcagatacactttcaataatgtagatatgagatattatgtgcgaatggccaccccaagataatatacttcaggatatgcaaaatcagttggagaatgcaaattcggttgttctctttcatccctcatatatgcatatgtttcttaaataatttacaaaattactgttcagtagtggagtaaataaatatgaatgacggtacctgtcattatgcacatgttctctaaacacatttcatgaatgacaaggtaatttttggtaatattgtttggcagcgagtatttgggtacaatgtactaaagttaatcaatatgtgtggcatatgcatt

SEQ ID NO: 17046 - DNA, 468 bp, Oryza sativa
  Clone ID: PAT_MRT4530_22738C.1
caaatactaactcccggagttttatatgatttcgttcggaattaattaccgagaaaagaatgctgtacatgacaaaactctttgctcccaccacatctctttgctcccgatttctctctcttcctgaatcagacaaggttatgtaattatcttcacttcatcagatgtaaaactccacattaattaatcttccttccttttaatgcttcgacagcatatgctgatcacttgttcttgcagattctgcttccagtgtcacctcgccggagattagcattgtccggcgatgatatcgccattgccggtcatcagttgcagatttcacctacggaacggtggcggcttcttctggaatgttccgggagcaaacaccgggaaggactcgccgccgtgggccctcgtccccgccgtcccctcagactcatgcttgacagctgccttaatcccctcataaaatgctccccccta

SEQ ID NO: 17047 - DNA, 439 bp, Oryza sativa
  Clone ID: PAT_MRT4530_22739C.1
gctggaggcacccccggtgcttgagatgataggatcacgtctctggtccagagggccttcgccgctgccgccgctttcgccgtctccgcctctatcgaagacgcgggcgccgaaggcgggagagatggcgacgccacaggaggaggcgacgctcaccaacggatccagcctcatcaccgaattccatctcagttggtcacaattgaggaaacaaggtgttgcggggcctatgggcttgtaactttgtctgggaccccagcccaagtggcgcccatgtggggtgcgccccaatctggtggagcacgaccctagggaccactaggttgtcctcccacctccttaaatagctaggaataaggttgatctacaccgtctagctcaacaacccatggagaggtgtatcgatcgcaaaggcgcaacacaacatcttgtacggttg

SEQ ID NO: 17048 - DNA, 528 bp, Oryza sativa
  Clone ID: PAT_MRT4530_2273C.1
ttggcacgaggagaggtctgtgatgttttggttggacttcttggggatcaggacatggccgttaggctggcagcatgctcttccctatgttacgctttccgagtttttggtatttgggaagtagatttgcttgagtgtattcctacatgttgggtaatgtgtttcaagttgataggagctgttcaagaatttgattcaaaggtgcaagtcctgagttttattctggttctccttttttttgttggcggcgtccggtgccttccggttgtgcgcgtcctccctcctgtttgtcttcagacctgggaggaatcatctggtgaatgtttactacagatagaacttctagatgcaattcgaacttttatttcttctcttgggtataactctccactttgttatggcatggttcttcctatactccaatatggcatggatgttcatagtcctaaccctcttaatcttcttgaggacactgttttggtgtgcggtgcttctccctctttttttttgtttctgcctactaagctt

SEQ ID NO: 17049 - DNA, 192 bp, Oryza sativa
  Clone ID: PAT_MRT4530_22740C.1
atggcgcggcagctcaaggaggccgaggagatggaggtgcttgagcgcatggccaaggagttgcaaagccaggttgccgctgaggcccccgatgaatccaaggaggagaagcgcgagcgcgtccaccatgaactccaaaagctttgtcggcctacgtccgccattgcagcgtcgatcaaggagaaagtttaa

SEQ ID NO: 17050 - DNA, 146 bp, Oryza sativa
  Clone ID: PAT_MRT4530_22741C.1
ataccttttcttctcagggtatgttcccctacacaccccttcctccttctattctatgaacattttacaataggccttggacatctcatatttacagcaacatattacatcgttatattcaaccagactctaggcctacctacgac

SEQ ID NO: 17051 - DNA, 414 bp, Oryza sativa
  Clone ID: PAT_MRT4530_22742C.1
atggcgacgacagtggtagcagttcccacggtggattcggcggccccgacagctacacgtgtggcggcggcttcccgcgccggatccgacggctacgacggtggcggcggcttccgagccgaggcggcaggcggcagcgcaagaggggaggcggtgggcgctgggtggcggcggcgggtggagatggtgcagccagcagcgggaggcggcatcggtggcgatggctgcgccctcccctcctcgtcagcggcgagcggcggcatcggcgacgtgcagcgggaggagcggcggccgctcggaggtgccctccctccgccagatccggcgagaggaagggctccggagccgtgccaccttaccatcctccgcgccaccaccgaatgcgccgagattagagatagagatagagattag

SEQ ID NO: 17052 - DNA, 387 bp, Oryza sativa
  Clone ID: PAT_MRT4530_22743C.1
atggcgacgacagtggtagcagttcccacggtggatccggcggccccgacagctacacgcgtggcggcggcttcacgcgccggatccgacggctacggcggtggtggcggcttccgagccgaggcggcagacggcggcgcaagaggggaggcggtgggcactgggtggcggcagcgggtggagacggtgcggccagcggcgggaggcggcatcggtggcgatggccgcgccctcccctcctcgtcagcggcgagcggcggcatcggcggtgtgcagcgggaggagcggcggcgctcggaggtgcccttcctccgccagatccggcaggagaaagggctccggagccgcgctgccttaccatcctctgcgccatcatcgaatgagccg

SEQ ID NO: 17053 - DNA, 575 bp, Oryza sativa
  unsure (1)..(575): unsure at all n locations
  Clone ID: PAT_MRT4530_22744C.1
ccgggctgcaggaatcggcacgagggctgcattactagggtattgacattgtcagttttctctaaaccacagtaattagtcagtttcaactcggttagactgatgttttagggagacaaatagtcgagatccgtttttggagttcgtttcgattcagaggcggcatttttctgcaccttcatttatttgtaggtttacgacagcctctgaacgcagctgatgcagcctcagctccatctactcctctcatgaatttttaagttgttcagagctgcgtggctagtggggaagtggcagttatgccacaggttgacctggagagcttggtgtgcggcgtggcgggcgccggagcgggcgacaggaaggtgtcgtgcgagacggtcatcgcggcgggggagagcggggacgcgtcgccgccgcggatnccgccgccgccgccgccgccggaccccgacttcccgccggagtcgataaccatccccatcggcgacgaggtggccttctcggagctgaacccgatatacgaccgggacgactccaccaagggaagcaccaaccccaagtngggcggccgg

SEQ ID NO: 17054 - DNA, 420 bp, Oryza sativa
  Clone ID: PAT_MRT4530_22745C.1
atggcatgccacatggacgatgacatgggcaccctcccctcgggcgcagccggcgacacctccccccgcgtgcaccaagctcgccgatgcctccccccgcgcccgccgccgccctcttcgccccacaactccggcgctggcccccacgtgtccgttgtcggcaacccctccccctgggcgcggtcggttcaagctcgccctgccgccatcgagctcgcgcccgccctgctcgtggcatcgccgtcctttttttctttccgccgcacaccgccgatctctggccactcgtcgccacgggggcggcaacgtgaccagctgcctcccaaggccgaccgcgaacgcctccttgccgaggagcagattgtgtcggtggaggaccagctgcctgccctgacggtggctcgtatccggtgtagttaa

SEQ ID NO: 17055 - DNA, 819 bp, Oryza sativa
  Clone ID: PAT_MRT4530_22746C.1
gacgcgagctactgcttggatggcggcaaggccaagcaagtgccgcatgcgccgtcgccggagaagaagagggccagtttcgcagctggcgcggcggcggtgcgggccaaggtgtgcgacgcccggtggccggcgtcggcggcggcggcgtgcccggcgccctacggtttccgcggcggcgtcgccacgcggtccgtggcgttcgacgagatgacgccgcggcgcgcgtcggtggacgtcccgaatcccctccgcgccgcgctgtcatcggacgacaccgagagcgcgacgtcgtccgccgggtcaccggacggcgacgccgacgccgacgccaagctcgccgccagagcgcgtccgtctcccagaagcatcatggcctcgcccgcgcggttctcgcgcgacgccatggggagccgctcggagcgcttcgcggaccactcgacgccgttcatgtcgcgcactccgaggttcctggcctcaccgtcacccaagacgacgccgacggcgccgccgccgccgacaacgacgaagaagaagtcggtcaagtcgctgttcaacgggctgctctcttcgccattcaccaggccgtcgcctaaacagccacctccaactaagccggcggccatttcgccggcgagcccgtctccggcgaggtgctcggcgacggcggcggcgtctgccgttccagggaggctgcaagcgcagggcaaagccgaggaggagcaccagctgaggctgcttcacaaccgccatctgcaatggcggctcgccaatgcggtggccggcgccgcgatttctgcgcaggaactgaatgcagag

SEQ ID NO: 17056 - DNA, 680 bp, Oryza sativa
  unsure (1)..(680): unsure at all n locations
  Clone ID: PAT_MRT4530_22747C.1
tgtgcaggcctgcagatatttttggaagcacaaacgaaaggatcacgtatgtatgtcatgtttgctgattactacctttccctgcaaatacacatacaccacttggatgtagatacacattctgtcttgcttaacatgttaattaacttgattgagtaaatgatttttgcagtgattggccgatatccccaagcccacgcgtccggtgactgaaggtaattcattagtgttttatgtctatatatgatcataaaagtgtctgcagggtgcatcagacaagcaaaaagtatatgggcagtgatggcacatttcttagggaagggatttatgagttcaacggcaaaatcctctctatcagtccatatagtagcagttgcctagcatttttaacttacctacattgctcccctatttttagctacataagaactatatgtatgtcaccccatcagagttgttgtatttaaatcacatattcttgtattctaagtccatatgttgttgagaagtgttctccaattcatctctatgcagagcatcctatcataacattaacatgttagaccgtatttttggtgagtgctgcatgcagttattattatcaaagccatcaaaagtattgtacatcgttacatctncttcaccctttacaggtttctacattacagatgctcatgtta

SEQ ID NO: 17057 - DNA, 172 bp, Oryza sativa
  unsure (1)..(172): unsure at all n locations
  Clone ID: PAT_MRT4530_22748C.1
ttagataaccgcccaagcaccacaacannaaagggggggtttaatttgagtanaggtggggttttaacaccaacaacaccaacattgtcggcgtagtcatacccgtagcccccgtaccaaccgaggagggagagcgccacactgtgctgagcgccgtcaccgaccccgccta

SEQ ID NO: 17058 - DNA, 183 bp, Oryza sativa
  unsure (1)..(183): unsure at all n locations
  Clone ID: PAT_MRT4530_22749C.1
aagaaatgcaaattnttcctttagagggtctgttagnnggcggttaaaattgttacttaacgaccatcaacatgctcacccgcgatgtggagaggaggcacgccattgtcaaagagagtngaggtagaagatacgtgaggactcgctggttcctacatgaaacatgacctacccacagacaac

SEQ ID NO: 17059 - DNA, 2049 bp, Oryza sativa
  Clone ID: PAT_MRT4530_2274C.1
atggaggtagttagcagtaaccttgaagataacttctgggacccacctggcattgactgtgacagcaccgagccgttttactcggtagcctcttgttcccgcacaactcgcatcgcatgccacgcctctctgctcccgcacggcgccgcgctgcgagctctcgccacggccatggcgacaccgacaccgatgcctcacactcccatctcctcgcaaaccctaacgttagccccacacgtctcgcggcggagatgcggaggcagtgtccgcgcccggaccctagctctgcccgcaacgccggcgtcggcgtgctccttccgcctccgcgccacggcggcgcgcgactccccgctgccatcgctgttcgacgaggcgttccccttcgtcgccgtggagtggaagaccatagtgaaggggtgggcgtgcgcggccgcggccgtgtactgcctctcgcgcgcggtgcccgccgcggggcggctgccgcgagcgctcgcggcctgcgggggcggggccgcggaggcgttcaagggcgggttcgcgctcgcgggactcgccgctgcgcgctcggccgcggcgtacgtgcagcaggcgttgctctgggaggcggcgctccgggcggcggggcggctgcgggagcgcgcgttcgagggggtgcttgcgcgtgacctcgcgttcttcgagggcagtggaggactgtccgcgggagacatcgcgcaccggatcaccgacgaggcggacgacgtcgcggacgccgtgtactctgtcctcaatactattgtgccaacaagcttgcagttgatagctatgggacatcaaatggtgacaatcaatcccctgctctcagtggttgccgcaacggtaattccatgtatgtggcttgtcattgcaagtcttggcagaagactccgccaaatatccaaagaggctcacattagtcttgccatgcttacagtctatctcaatgatgtacttccatcgatgctcactgtgaaggcaaacaatggtgagggcaaggagatatcgagatttcaaaatttagttattgttgatctaaagaataatctaagtaagaagaagatgaaggctttcatacctcaggttgttcgaacaacttacatcggaggcctgttagtgctctgtgctgggtcaatagcagtttcaggcaccttctttgatggtgagggctttctttctttcctgacagcacttactctagctattgagcctattcaggattttgggaaggcatacaatgaatataagcaaggagaaccagcattggatcgcatatttgatctaacaaggttcatccctgaggtgagggataaagcaaccgctgttcatttaaaatatgtcaagggggacattaacttccatgatgttacgtttcaatatattgatggcatgccgccaatactagatggcgtgaatcttcatatcagatcaggagaaactattgcttttgttggaccttcaggtggagggaaaactactcttgccaaattactccttcgactttatcaaccacaaagcgtagcatcctggtcagctacaactgagggtgaaaacatgctgctctctggaacaattgctgaaaatattgcttatggagaccccatgggagctattgatatgagcaaggttgaaagcgctgctaagattgccaatgctgaggagttcattaagatgttgccaggaggatataattcatatgtagggcaaaaaggttctagccttagtggtgggcagaaacaaagattatctattgcaagggcgatctatcagaactcctccgtactgatattggatgaagcaacatcagctttggatagcaggtctgagatactagtgaaagaagcattgacgaatctaatggcaaaccacactgttcttgtcattgctcatcggctggaaatgatcctaatggctgatagaattgtcttgttggaaggtggtaaattgcgggagatcacaaagtcatctttcttgtctcgagatagccagttcagctcaccccaaggcagcagtccgaaactgggtgaggtttaa

SEQ ID NO: 17060 - DNA, 303 bp, Oryza sativa
  Clone ID: PAT_MRT4530_22750C.1
atggttcagcgccgtcgccggtgtggaagccacaaaaatgatagacatatgtacttcggtgcccctggtgcagcttgcgtctccaagctcgtcatggtcatcgacgtgcagcccctgcccctgctcctaacacaacatctacctcatccgtctccacacgacgagctcaagcatcgcctccatgagaccatgatgaccagagcaatgatcagtagtcggtctaagaggacgatcagctacactgagactgaaacacgacccagactcctacgggaagtagcagtgggaaattttccgcaatga

SEQ ID NO: 17061 - DNA, 379 bp, Oryza sativa
  Clone ID: PAT_MRT4530_22751C.1
atgacactcagaactctgaatataatttctctgaacgaaaattctcccatctttcattcagcaataaccactgcaaatcaacagcagcagcaacagcgggcggggagcagcgaccggatcaccgcggcgccgctgccggatgacgtgccggccccatcccctcctgttcctcgtccaccggcgcgggaaggcagagaagacggccccgccaccgacatcccgactcgccgcctggctctcctggagacgcgcttcgacgacgggaatgtggaggagaggagggaaggagggcggccacggcaggagctagggttttgctcccgagccgccaccgctgacgcatgccgttgccgtcacccgacgctgccgcgagggacgg

SEQ ID NO: 17062 - DNA, 1383 bp, Oryza sativa
  Clone ID: PAT_MRT4530_22752C.1
atgtcggcacccttcatccaccaagccgctgcccacaggctacctcttattcgagaaaaagaaaaagaggctgataagtacacgaagaaaaatggtgcctggaccaaagtgagaccatctcataatgctaatgcttttgcgacaaatggaagatcatcgagcccatactacgcccaactatattatcagatgaagcagttaggtcataagatgtatgatcaagattccccgtcaagcgattctggacagtcacaccaagaagaatctgccatgaatgatagcagtccaaatgagcgacatacctcaacacaatctgacaatgatgatggtcatcagatgccagatcaggacaaaacaaagtcagtatcatcgttggggaatccaggagctttgcctccaaagctcaactatagccaatcctttgcttgtattccttatacagctgatgcatactatggtggggtcttgactggatattcttcacatgcaattgttcatccccagcaaaatggtacagctaactcccgggtgccgttgcctgttgagcctgcagcagaagagccaatatttgtaaacgcaaagcagtaccatgcaattcttaggaggagacagatacgagctaaattggaggcccaaaataagttggtgaaaggtcggaagccatacctccatgaatctcggcatcgccatgccatgaagcgagctcgtggatctggagggcgcttcctcaacacaaagcagctcgaggagcagaagcagcaacaggaggaggaggccgcatccggtggcgcgagctctggcaataggacatgccttcagaatggcaccggtagcgcgccttcagcttcctctccctctgaaatcgcgagcgtctcaaccagcagagaattccttggtaaccatgagcagagccacttcccctcagctggcttccttcccacaatgagcttcagagcgcagaatggcggagatgggaagctggtcgcgaacgccattcaccagcgcgtttccatgatgaggtgaggtgaagaggggtgaagtgggttcagctcagcaccatcactttggctctctccctgctggtggcaattcatccttggcttatgaaaataccttatgggaaaaaaaaaagtagtttcatcctcaaatggaccaaacatgtgtggctccattttaagttttcctgtaactaaaagcactgcaatgatcaactgactgttggttctgtttgtggatgcttatatctgtacttgctgtatctaatactgaactctaagttgaaaccctgaaaaaaaaaaaaaaagtgaatattgtagcttgcattttatctgatttttagttcctaaaaaaaaaaaaaaaaaactcgagactagttctctctct

SEQ ID NO: 17063 - DNA, 360 bp, Oryza sativa
  Clone ID: PAT_MRT4530_22753C.1
atggatggatcgatcttctttctaccggtggaggaggagcggtttggtcaggtgggcgggcaggtcttggcgagagggacaggggaggcgtgcgggccgtggagcaccccgtcggcgattagcttgtacaccgcctccgttgggtgcgtcccgtcccacgagacgtacgtcgatgggtcctcgcacacggtgcaccctgccttgccgcacggcacgctctggttcccgcagcaagaccccagcgcggggcaggagctggaccggaggcggcgggcaagcgacaatagggcggcagcgcagtcgagcggcggcttccatcgcagcagcgtcgagtggcttccacgggagcggcctccatcg

SEQ ID NO: 17064 - DNA, 342 bp, Oryza sativa
  Clone ID: PAT_MRT4530_22754C.1
atgtccgtggcttcgtcttggaagggccggaccggggggccgctttccgccggcggcgactccacctctccacgccagcatcgtcgtcgtccaccgtccgcgcctgcgcccatgtcagccgtgtcctccggctggagcacgccgactcgcggcggtgctcgagctcgtggtctcatgtccgcgctcgccctgctgctagcactcgcctccctccgtgcccacaccacgctgtggacgacggcgacgatggacgccgacgaggatggacgatgccggcgacggatggacgccggcgcagctgacaagggcgccggcacgggcggtggcggactggcggactga

SEQ ID NO: 17065 - DNA, 1341 bp, Oryza sativa
  Clone ID: PAT_MRT4530_22755C.1
gaattaacaaatcttctgaaaaagcattggaatcttcaatgtgctgatttgaaagacaaacatgacctcagtgcattctctgaaataaatggtttggtgctgtatgaaaaacgctgggccaattatatccaacggttgtttaggccaaagcaaacctcgattcacaccatatccatttattcatgggcataaccattatacttgtagcaaaaataatgtgtgcctcaagctaataggttttacaggtgtcataaagggcacactgaaaagacagaaaatgagcattagcaagcactgttgtcttattacaaatggggatttaatttacagttcatatcgaccatagggcctcagacagagcagagcttttcaagaatcatgttctcgtcgccgtcgacaatcttcagagcactcctcacgatgtcttcagggaagcccatttaaagttttaaaccaacttatgcacatgtggtcacagtcacagataagttgtactccgtatatccaatggaataacaaatactccgtataactcggtaacaatacattttcttccataccgacggaggtactctgcaaaggcctttatccagtagcagaaaatatggaatagtcacgcaggtaccagctccaagtgccatcattggtccacactgtagctctagccatcatgttttcatctctaccttttcccagcatttgagttttctttttttttgttggctctgtttctcattcaaaagataaatagattagagtccagagtctacctaaatgctacagagaaatagggaatgctcacttattagtgccattagctgattagaaatagcatgtgagcacttgagtagagtagcagtagcagtagcagtagcagtagcagaccaggacgcgaccatgcgcccgtgcactgggctgttgctagctgctgctgcgcccgcacgctgcgcgtcgacgctgcctccgcgcgtccccaccggcgacctgctgccttgcgcatgctgcgactgcgccagctgctgcaccgccgctgcgcacccgcgtccggcctgctgcaagccaccactccaagccaaaccctagccaccgccagatctgaaggtggtgcatcctcgggtcggggcagcgacgctgcgacggagtgggagaggggcgatgagacagcgggaagcagaggatggcgtgttgtggtgtgggagagatcatcgccgacgaggagaagcaagccaggtggagggaaagacggggcggcggctgtcgcccgtcgcaaggaaagaggagagagcgagagaagcagaggtccgggcggctcgtgccgattcctcagcccggggatccact

SEQ ID NO: 17066 - DNA, 224 bp, Oryza sativa
  Clone ID: PAT_MRT4530_22756C.1
aaaacgagaacgccttgatttaccatcgaaggcagacaatgtcaaaaaaaggtgatttttttttcctacaggccaccctacaggcgattagaccaacctgactggacaaaaccaaatacttatcccagccagcaagaagcgtttaacgcccccgccaaaccgaaaaaagcaaaccaaagcaattcacccgtgacccatttcaaaccccaacttaatttttcctt

SEQ ID NO: 17067 - DNA, 491 bp, Oryza sativa
  Clone ID: PAT_MRT4530_22757C.1
gtacagagaaagtactagctagtatattcatgcaaaatcctacctacagtatttattgggttattctctgtccagtgtataagtagaagtgatatggatggatagggtgatgaaggagaggaatcgaagttgggcatgcgtgcgtggagatccatgatgcagtgcacccccgtagtttgttagtaataattaattatgatggcaagtgcatggcatggaaggggccggtccattgataattcgacatgatccagctaataatctgcatgctacacccacacatatgacatgatatgatgcatcaatttcacctactagtgctaaaaccacacacagctcgatcgatagatgagatcaaaggggtaagatgggttgtactaactagtagtaatatacgtaagtgagcgagcgagtatacgttggaaatcaaaagttgtaaaaagtaaaagcaaagctaacactgcaatccaaaacaaagaagaaagaaaaat

SEQ ID NO: 17068 - DNA, 421 bp, Oryza sativa
  unsure (1)..(421): unsure at all n locations
  Clone ID: PAT_MRT4530_22758C.1
tccaagcgtactcccacgcgatctgaaagaggatgactactgactagtgcactactcagatacttgcgccaccaacgatactagtgctacaaaactaaatatggctagcagagcatggaaggggatcctggcacagggatcaactgcaccaaatgactcaccaggcaagcggatctccggcgttccgccggcaggggcactcatcttatctacgctgatgctcagacgcatgtgcaatctgcatgtcttgatcacacggacaataggcncaattttgacgtacggctcgacagaaacggtcgcaagcatagactgatactatgtctaccacgagcgaggtgcaagagaccgacacaaggactcccaccaggcaagcacaagaggcatgcacccgctccgccacctgcgccgtacaccgagc

SEQ ID NO: 17069 - DNA, 479 bp, Oryza sativa
  Clone ID: PAT_MRT4530_22759C.1
ggacatctaactggagataatcttgttgcataaatggcatcgtgcaactgacaataatatgtttgagatattgatacatgacatctcaatacaatactgtcttcagaagtcaccttgtaaactatgctaaaccatacttgatcactggccattgcctatggatctgcatcttctgtactgtgaggaatactctattagtaaattcagttctgttcttccaaatttcagactgacccttgtgcagcctgcaggacagcatcactgaatcccaggagaacacagcagtggacggccagccaccggagcagcgacgacgatgcgcagagagccaccacacgtgtggggtgtcgatggcgaggctcgctggagctccactggcagccgtggacggcggccctgatccgggctggcattgccagagcctccaaggtggactgatggagcttagcaactccaaaacacttcagaagaatcagaac

SEQ ID NO: 17070 - DNA, 120 bp, Oryza sativa
  Clone ID: PAT_MRT4530_2275C.1
atggcggtggatgtgcccatcagcagggcggtggctagggttggctctttacatagcaaggtggagatgaaatctgggcggtggctagggttggctctttacatagcaaggtggagatga

SEQ ID NO: 17071 - DNA, 348 bp, Oryza sativa
  Clone ID: PAT_MRT4530_22760C.1
atggtgtcggccaagtataagaagacaacatcgtcttggataatgctccggataggccaggtcggtgtgagcagtgggcggtggcagcttcaggtatgttgtgtcagaccagaggtctccgatgcaggacaccgcttcttgcttccactccttgaggttaggagtgacagaccatgtcctaaggaatacattctcattgttgttgatagagcggctctggtggtagccatcaatgtagacaaacctgatgaggctgtcgttgccacagcacatggaacggcactcctcttgtacctgccgcccatgttgaaggcgaggagggtgccatttggcgcgctttgtagttag

SEQ ID NO: 17072 - DNA, 331 bp, Oryza sativa
  Clone ID: PAT_MRT4530_22761C.1
ctacccggacgagttgcagcactcgccctaccggtaccaccttagtcgcggaggagcccgcgactacgcctccttccgggatgctagctcggaggatgacgctaccatcgcgcacctggcgcgcatgatggtgcgccgcgggatggtcgagaacaacatgaagatcctggagctgcgtcaggagaacctgcagctcaagaaggacctagatgcggtggaggcgcagctgcatcagctcaagatcgctcagggagaggactgccgtcccaagcgtctgccgcagccagaagatcaccgcccgcaagagcacctccaggcccgagcttgttag

SEQ ID NO: 17073 - DNA, 1669 bp, Oryza sativa
  Clone ID: PAT_MRT4530_22762C.1
tttgatttacacatcttccatattccatatataaaaaagtgttaaaaacgttaatctcaacaagggtaaataatgatctgcgctagaaattaacaaataatcttcaaaatctatatcatcatacatctttccttcggaaagtttcttgatctaacaagtatgacttaaaaaatgaaatgaaactgaactataacttcaaagcatcagctcttaggaaaatgctgtgcggtaattggtcagtagaaggcttctaagcctttttttttttccttcaggtcactcggagcaagtaattgctgagatatcggccttcagggtatgcaggatctacgggatgatcacaggctgcccctgcttggcgtagaactgtaacctttcggccggtcattgatgcagcaccctgaatggttctgaggaagaggccgctttgggtcatagctccagagcatgagcatgtcatgagtaacccccctggctttaccacttgcatcgcaagagcgttcaagcttctgtacatacccgaggcactttgtagcaccttttttcgaggtgccaactttggaggatcaaggattaccaagtcccagacctcatttcttgagatagcacctttcatgaatgcagtcgcatcttcttttacaaacgaaatcctttgggtgtcaagcttattcaggataatattcttattggcaaggtctagtgctgatgctgatgaatcaatgccaatgacattattagcaccaccctttgctgcatttagagcaaaaccaccactatagcagcacagatcaagaaccctttggtcctttgagagtgttgatatgaaatgacggttctcacgttgatctgcataaaaccctgttttctgcccctccaatgagactagatagagaacatcattctccatgacctccactgttccacagtgtgaagacgattcaggatccttttgttctgatacatctaatccttcttcttttagaatatctgttgatgatctccactttatatggttcacatcactgactttgttaacaaggaactggatttcatgcctatatttctcaacccaagcagcagatgaagcaactacagcaacatcagcaaagatatccactattagaccagacaatctgtccccttcactgttgatgagacgataagcatttgtgtgaactgaagggagacctaaactgcgccgtaaatccacagcagataaaatccttgcctcaagcagtctttccatatttagtgcacatgttggatccctttttgcctcttcttctagttgcatcagccgaacacaaaacatggacacagagttatagagaccccatccaataggtttctctgccccatcagctacaagaacaacatcaccagtttttggaggaggtcgaccaattattctatcaacagcaccactatacaccatcggactcccatctcgaaatatttgggtctttcctttctttaatactactcttgccaaacctttgcgcccggcggcgacctctcccagcgcggagagggaggaggaagcggaggcggtggcggtggcggccgcgtgggctgcggaggaggcctgcttcgcgaggcgcgccctgacgagcgcgggcaccgccgccgccgccgccgccggcgacgcgccgccgcaagcgcgcagcat

SEQ ID NO: 17074 - DNA, 356 bp, Oryza sativa
  Clone ID: PAT_MRT4530_22763C.1
gaggggctcttttgtttttattcactgaaaatacttacaaagggaaagttcgtcggcaaaataaaagagctttatttttcacttaagggaagccctgaaaaaaagactctcgcctgacatcaggaaatgaactcacaatttaaaaaaccttttacaaacaacaaacttgtacagttttgtgagcgacagtttttgtacttctagaagatcaaggaccgatgcaaatggtttttaaatatgctaccgagggcaccagtaatttttacgtcgcgcctcaagttgccaaaactttttttacaatttgcaagacacccccgaagatcaccaaaagaatgccgagccgtgtttaatttcat

SEQ ID NO: 17075 - DNA, 558 bp, Oryza sativa
  Clone ID: PAT_MRT4530_22764C.1
atggtcgctgctgagctgctgcttgtggctgttgctgcatgggctcaaactgaccatactgagatgcgaactgaggttgagccaatccccctggctgatattgggcttgcggggaaggaggctaatattgataactcaagttacccccttggtaattatgaaggttgggctggatattgtgcaccaagtgctcaggaacaacctgaggcattactgtgccatccggctgtacatggtgaaccaaatgctctgggacgactcggtttacaaaatgttgtacaggttgacctccaggcgctgcgaacccggccgatgcgcttactgaccccgggtgctgaatcggctgaacgatttgctgcctcaacggagtctgttggatcggctgcagaagctgctgccttggtggtgtttgctgaactggttgcacgacctgttgctggattggttgcacagcctgttgctggattggttgcacagcctgctgaattgggggtaagggagtcgatgctggcgccgtcggctgagttgtgggtgcaacggacggaactgcttgaatag

SEQ ID NO: 17076 - DNA, 461 bp, Oryza sativa
  Clone ID: PAT_MRT4530_22765C.1
tgcaatcaccatctgatgctagtatgttgcccagcaacattagccatgggcaccacggatccgtatagcagtacatgatgcaaaacgttgggcatgggtagctccacagccaggttcatatcacagcctatggctcccctgcagcagcatatgttgcatgcagctcaaggcatgatgcctcagtgcaactgtggacaccagttaccagatgatgcagagcatgcaacaagttatttgtgctggactcgggcagcacagatgatgatgaacctgccgatgccagatgccatgacatggtgcaacatggccccggtcaacttccaactgctgcttgcttgtggtttttttgatcaaactgggttacatggactgttagtaataaggtgttgcatactatgcggggcaaacactagaatgaagaacctggaatcaagtatcaatcaattgcagacggcaaaaaa

SEQ ID NO: 17077 - DNA, 1400 bp, Oryza sativa
  Clone ID: PAT_MRT4530_22766C.1
atgctccccctcctcctccccctccccgtgacccctcctcctcctctcccctccccaaccctaaccctagcccccgcctccgctcctcgccgacgcctcgtcctcctcgccgccgcggcgccgcaccaccaccatcaccaccgccgccgccgcgtctaccgtcgccagcgcgcggcgccgacgcagacgcgggcgccgaggaggacgttgtcggcgtccaatgcggcccgcggggaggaggacctcgaggaggcgatctacgagttcatgcggcggtccgacaagccgggggcgttccccacccgcgccgagctcgtcgccgcggggagggccgacctcgccgccgccgtggacgcctgcggcggctggctctcgctcgggtggtcctccggtggcgcggaggcaggcagggcctccgcgtcggtccgcgtgcacaatgactaccctcgaaggaaagatggcactggagataattgagaagaacaaaataattgaagagaaacaaagaaggcttgatgaagctgagaaggccttgagtgagctccgtactgtttatattgtgtggtctaatcctgcttcagaggttctattgactggatctttcgatgggctggacaagtcagagaagaatggaaagatcagaaagaggcaccttttccttaaacctgaggttgtatcctggtagatatgagattaaatttattgttgatggtgtttggaggaatgatcctctgcgcccccttgtgagcaataacgggcatgaaaacaaccttctgactgtcacttgacttgaagctccatttgtcaatcctggtagcatttttgtagattgttatctagatctttatcaacatgattaggccaatccatccagaatggaaacaaaaaaaatgagtgagctggttagctctgttccaccctgtaattatctgcttcgccttaagtcgtcgttctttttctttggtagagattcttacaatttaaacagtgtaagggtgttgtcagaatgcctcaccctgttagataggagaagagaatagttgtgtattcttttcttccccgtcttttgcccggagaagtatagttgtgtgatgggtatccaggtgtctggttgtacaccttcatggaatgaagctgagaaggccttgagtgagctccgtactgtttatattgtgtggtctaatcctgcttcagaggttctattgactggatcttttgatggctggacaagccagagaagaatggaaagatcagaaagaggcaccttttccttaaacctgaggttgtatcctggtagatatgagattaaatttattgttgatggtgtttggaggaatgatcctctgcgcccccttgtgagcaataacgggcatgaaaacaaccttctgactgtcacttga

SEQ ID NO: 17078 - DNA, 203 bp, Oryza sativa
  Clone ID: PAT_MRT4530_22767C.1
gaccgtcacgatcaagctgtggaggcactccttgtagtagggcgccgctctttttttttttggtttaacaaaggaacaggcaattaatacattacttaaacaataggatttgaggagccacactgaaagagtctagaaccctcaacttctagtggtgacaatagaataaacaacccagatcatgggatgaaaagtttacagct

SEQ ID NO: 17079 - DNA, 458 bp, Oryza sativa
  unsure (1)..(458): unsure at all n locations
  Clone ID: PAT_MRT4530_22768C.1
ggttttagcaaaagtgtactcctgatcatatagaataacagagttttcctgtcatatattaccaaaaccttacggggtaatacagttctacttgaccatagtaggtatattgtgctctaaaaatgtataagacttgagctaccaaaacatttcttgcagaaaaactagcagcattacagtaaatccaataattgtctctaatgaaaactacagccttcaatcgcgcactcaccagatgtaattcggaaggctcaagggcgatnggatctttcatcctgagtgttgtgtgtggtcgaaagtgaaccaacacccagcaaacaatgatctcgatctcaggtcagagctcattggcatacaactacaggccatagcttgctctgcacttcacaccaccaaaattacaaaatggatgccacaccagtctatcttccaactatcaagacttaaacttttggcct

SEQ ID NO: 17080 - DNA, 1629 bp, Oryza sativa
  Clone ID: PAT_MRT4530_22769C.1
atggaggccaccattacccgcttcctcgtcttcttcttcctcctcctcgtcgtcgcggtcagaggcgacgacccttacaggttctacacctggaacatcaccttcggcgacatctaccctctcggcgtcaagcagcaggggatactgatcaacggccagttcccggggcctcagatcgacgcggtcaccaacgacaacatcatcatcaatgtcttcaacaacctgccttccccgttcctcctctcatggcaaggaattcaacagaggaggagctcatggcaagacggggtgtatggtacaaactgcccgatccctccgggtggcaatttcacttacatcatgcagttcaaggaccaaattgggagctactactactttccttcccttgcattccataaggctgctggtgggtatggtggtatcagggtccttagccgcccggggatcccggttccatttgcaccccctgctggcgatttcaccatattggccggtgactggttcaagctcaatcacactgatttgcaaggcattctggacagtggtaatgaccttccaccccctgatgggcttcttatcaatggccaaggctggaacggcaacaggtttacagtagaccaagggaaaacttaccgttttagggtatcgaatgtgggcatagcaacatcagtgaacataaggattcaaggtcattccttgctgctggttgaggtggagggatcacacaccgtgcagagcacatacacatcgattgatgtccatctaggccagtcctactcattcctcgtgacggctgatcagccaccccaggactacagcattattgtctcgacccgtttcaccaatcctgtgctcaccactactgctgtcctccactacagcaattcaaacggtgccctttctacggtagcaccacccccagcaccaacaatccagattgattggtctctcaatcaggctagatcaattcgatggaatctgacggcgagtggaccaaggccgaaccctcagggctcataccattatggccttgtcaacactacaagaaccatcagacttgcgaactcaagggctagcataaatggcaagctgagatacgcggtcaacagcgtgtccttcattccagctgacactcctctcaaggttgccgacttctacaacattcagggtgtgttcgctctggggagcatgcctgacaacccaaccggaggtggcgcctacctgcagacagcagtcatggcagccaacatgcgagactacgttgaagtcatctttgagaactctgaaaactttgtgcagtcatggcacattgacggttacgcattctgggttgtcgggatggatggaggacaatggacacctgcgagtcgccagagctacaaccttagagacgcagttgctcggtacacattacaggtgtatcctcaatcatggactgcaatttacatgcctttggataatgtggggatgtggaacatcaggtcagagagctgggctagacagtacctcggccaacaattctacctccgggtctactctccggcgaactcatggcgggacgagaacccgatcccaaagaacgcgctcctctgcggtcgggcctcggggcgccggaccaggcctctctga

SEQ ID NO: 17081 - DNA, 1820 bp, Oryza sativa
  Clone ID: PAT_MRT4530_2276C.1
ctttggagctgagctacatagcacatccgtggagtctcttgtgctaagcaatttaccgttccagtgctctactttgtaggccatccatattagacggaagaactttatcagtattattattggaggagaccaattcaagaatgatataatggagctttaccctggctatcttgaagaccattttaacatccacaagcttagtatcagcagcgcctctcctccggagtacatgacctcggcgtcgacgcagttcgcggcaccggtcagaatgggggcgtacgaccggcctccgccagttggcatgtggagtcacgagcagttcaaggttgacaacggccaggccacgagtgcatccacgatcatggaggcagagatgaaatttgagaataggctagaagaaattccccaagtagttctggaggaagggagaaatgttgatcaggaggcaagcaagccgccagacaaggtcctcagaagacttgcacaaaacagagaggctgcacggaaaagccgcctgcggaaaaaggcttatatccaacagctggagacaagccggttgaaactagcgcagttagagcaagagcttcaacgggccaggcagcaggctgtgtatgcaaatgggagccttcgagaaccaaatcttggatttacaggaccgatcgatccaggtgccttaggttttgagattaagtacagccattgggtggacgagcagaatcgcaacactggtgagctgaggaatgcgctgctgcaggggcagacgacggaccaggacctggagctcaagttgctcgtcgaggctgggctcgacaactacaaccgcctcttcgagatgaaagaggaagccgccaactccgacgtgttctacatcatgtcgggcatgtggaagacccccaccgagcggttcttcctgtggatcggtgggttccggccatcggaggttctcaagaatttgagaccgcagctggagcctctgacggacaagcaggtcgtggaagtgggcggcctgcagcaaacctcgatgcaggtcgaggacgccctctcgcagggcatggacaagctgaagcagacgatcgcggactccctgacggcggccgacccgttcgactcccccgaggcctacatggtgcacatggccaacgccgtggagcagctcagatccctcgtccagttcgttacccaggcagatcatctccggcagcagacgctgcaggagatgcacaggatcctgacgacgcggcaggcggcgagggggctcctcgcgctgggggactacttccagcgcttccgagcgctgagctcgctatgggcagctcgcccgcgcgattcagggataagctaaacaccgtaatatggtcacggtagaagctacagatatcagtagcaattcgtcgtgttagttcgctacttcagtgtcaggtcaatggccagtgaaggatgaagagatctttctacctgtgcttcgtcgaagaagaacaactcgtgatcgactttctgcagcgccgctgcaactgcaatccaaggaatggtgtatgttcgcctgctgagatgaagaaataaccaaaattaactttggtctttctgatgtgggcacaagagaagatgtaatataatatgtaaatatatacatgttttgggtatcattgccagaggcctctacagctggttttatagacatgtgatgtaattatctgtaactagtgttgctcggttcctcctccctagtacggcagacataggtgacatactgccattgtattgtatgggagaacaaattagttcacttgagaactagaaaaacatgcagtgatgttttgctg

SEQ ID NO: 17082 - DNA, 185 bp, Oryza sativa
  unsure (1)..(185): unsure at all n locations
  Clone ID: PAT_MRT4530_22770C.1
gcgggtgtcctatctacgtcagcgacaagccctggaaccacaacttctatctgctcaggaagctcgtgctcccctacggatcggagcttcagacgcgccttcgcggtctntccaaacgataatggcttttattcgaaccggggcgcgacagatagagtttgctcaagatatggaacctgaacaat

SEQ ID NO: 17083 - DNA, 310 bp, Oryza sativa
  Clone ID: PAT_MRT4530_22771C.1
actccagagtcgcagcatctctaacttcacccagggcctgccaggaggatggcagtcaatgagtattggttgaattaatgaaggcatccattcggtattgacagctgatgtttccttcacaatctttctcacatctttctcttcccagggccatggtccacagtaccttttaagtgtgtcctggctaattggggcaaaatctctggaagaccatatgtctgagagtccctcccacctctgcctggtcccatgtgttgcttccagactcatctcccaaatattttcattgtatcgctctggcgggtagcct

SEQ ID NO: 17084 - DNA, 542 bp, Oryza sativa
  Clone ID: PAT_MRT4530_22772C.1
ccccccccccccccccccccccccccccccccccccccccctcccttctcccttttttttttttttttttttttttttttttttttttttttttttttggaaaaaatttgcttaaaccctccaacctttttttttttgggttttaaacagggtttttttgaccaaaacggggtttttcttcccgccccccaaaggtcaaattttggtgaacccccccgccgttttaaccccggggggtcccagcccccccgcccccccgggggcccccaaatttttttggttggggtttttccccccaacccctttgattttgtttttgtttaccccccaaacccgaaaggggggggcccttgggttttggccccttaaacaacttccttgggggggacggttttggggggggggtttttggtttaggggacggcttcccggttaacttttttagggaaaattttggccccccggggttttctttgtaaataaccccggaaatgcttttggggccccccttttttgccggctttgggatgcgggtttgggga

SEQ ID NO: 17085 - DNA, 240 bp, Oryza sativa
  Clone ID: PAT_MRT4530_22773C.1
ccgtcgctgccgctccagaagaacgcgccgccgcgtcccctcgcgggcgcgatgtcccgccgagcacaccgcctcatccagtcctcgtcgcgacaccggccgcctccagccctcgttgcgcggcccgccgccatcgcctccagcctcgtcgcgccgcccgccacctccagtcgtggtctctccgccagccgcctccagccattcgccgtccgccgtcccttctctgattctctctacggg

SEQ ID NO: 17086 - DNA, 256 bp, Oryza sativa
  Clone ID: PAT_MRT4530_22774C.1
aggacggcctgtcctttttttttttttttttttttttgttaatttaaaactaatacatttgtggtcactttcacgtatacgtatacgcatacacgtcttgtttggaacacacgtacgtacgtacgtactattagaatactagaatttatatagtacaagatgcgaagaaaaaaacgcagcctgctgatggatggatggatggacggttttgtatcagtggaagcatggctcggcgttggacatcccgacggcggcg

SEQ ID NO: 17087 - DNA, 161 bp, Oryza sativa
  Clone ID: PAT_MRT4530_22775C.1
aaattcaaacacctcaagacatttggctgaattttggatgattgagcctgaactggcctttgcggatctaaatgatgacatggcatgtgcgagttcatatctccagtatgtagtgaagtatgttctagagaactgcaaagaagatatggatttctttaata

SEQ ID NO: 17088 - DNA, 993 bp, Oryza sativa
  Clone ID: PAT_MRT4530_22776C.1
atggcggttctcgtcccgatcgacggcggcggcgacggagagggagagggaggtagagccacggccgtcgccgaccccgcccccgcccctgctcccatggatatcgacggcgatcgcggcgcgctcgacgtcctcgcccccgcccccatggacctcgacctcgaccgcgaccgcgacgggggcggcgacagagccgcgctcgtcgcctccaccagcaacgggggcgggcggggcggcctcctcagggatctccccgaggacatcctcgccggcactttgggctgcctcagggacaccagcgccgccgccaggaccagcttgctgtcccgccgctggcgccacgtctggaaatgggtgtccggcctcttcttgcatcattacccagccccacgactccagccccgtgcgcgccgccctcgccgccctcgccgtgcacgcggccaccagcatcaaccagctctacgtcacctccctccatccacagcgccacgccggacgccaccgcctcctggctccgcgtcgccgcgcccctcatctccggagagcttctcttctgcaacaggagctcgattccgttccacatgcttttcgacgaggtattcagcgataccatcgaagaaagaggcgcgctcgagctcccctgcttcacgagagccaccaagattcggctgcgcctggggtttctttgcctatcgctcgctgccgccgtcgggcgtcttcgccgcgctcagggagctgcacctggtgttcgtccggttcaatggcggcgaactaaccctggacgataccatgatgccgttcttggaaggggtagagatctggtgttcccgtggcttggcctccctgacgatcaggctgaagcatctcatctcgatgaatctgtacgccgtgcggggggttgtttgggctcaatgccgtggtgccgagactcactcaagtttgatcaatccatcttggagcatatttgatcttctgtacacgcaattaatttaa

SEQ ID NO: 17089 - DNA, 2541 bp, Oryza sativa
  Clone ID: PAT_MRT4530_22777C.1
atggccggtgaagtaaatcaaaattccgaagaatggcctgaagtgcggtatatcaacagccatgctgtgttcaaagaatacttgtcgagggtcgtggctgggctcggcgtcctgattttcacctggtctaccgttgtcctgcttggtggcttcgtctccctgctcgacaagaaggacttttggtgtctcacgatgattaccctctgccagacaaaagaggcatccggtgccattactggtggagttatagaggggttttctggagtcacccgcttactcgctacagcatttagcacacccaagtcgcctccaacttcgaccgagcaaaaggccgagattacggcagatactcttgcatattcttcacttcgcaagatagagactgatccggcagagactccggccgagactccggccaagactccggccaagattgtggccgagtggttgaaacactatatacttgaccatgggcccatcgtagcgtatgctacgttgcagttgtttcggctccttgtgttcaccaccattgttgtccctctggtgtttgtctacacgttgggcatgtacatctccaccgcgatctcgctgttccgcctcacacggcgtgacttgggcttcggcatggccaacgccgccgccgatggcggcgccaacctgcagaagccggcgttgcgcgtcctctacctgatggctcttgcccagggcgtgctttacttctacggcatgaccttcatcacaacgggaaggaagatggagaggaaagtggccgacaagtacaatctcaattatggggcaaaatcacctgttcgtgagtacgcggtcgaaaccatggctggatgcatgaaggacccgtcgttcgtcagaggaaggaacatggtcacacatgccattggactgatagaatcttcgtcgatcgacactgacaatttcatcaatggcgtgaggattatcgactctctcgtgcaaagccagttgcagggacaccatgcgctgatgaggcagctgctcaccggatccgcgtcttcttcccacatactcgtcaagctcctagaggctgcgaccaggtgcagcccaactcagaacaatatgacaaagagtgcagcgaggatagtcgaatacttcgctgtcgacatccacctcaagaagctgccaggaggcatcgaatgcatatcagacatgctcgagctatcgaccacaggtccacagctggagcagttcaaggacaccctgaagcttgaccagtgtatggagatgcttcactggggcctgaaaatcctccggatcctcgctgctcacagtgacaattgtagagtcatctgcgacactgaaggtctcctctcaaggatcatggcgcccatgagctccgacctgctccaccgcatcgaccacgaggtgtggcactcggttgtagaggagtcgatgcaactggtggcacttctcgtcgttgctcccggagtgaccggcgtcaggctccgccgtgagatctctggcaacaaggaggctgtcaccaccatggacagcattcccaagtgtagcaaatgcaagccactgctgcaaatcatggccatcaagatcctcagccagctagcctttgataaatctttatctatgagtacgagcgtggcaagcagagaagaattagccaagtatatgctgtgcatcttcaccgatgataacaaggatatgtctgtcagaaaatcggctgctcaagcattggcgatgctctgcgtcgaaagccaaagcattgccgtggtcatcctccaggcagacggcaatgtcgttggtgtgctcaaagacatgcttctacactctaaagaaaacgagagcagaataagtgcagcggaaatcctagctcacctatataaccactacacctatgacgacgagtacctcggtgaattgaacaaagtcatcaaggatgtgatgccaaaggtgcttggagaaatgtttgggtgtggagacatccaaacggcgggaacaaaagcagataaagctatgttttcaccacccggtagcgtaagtattgaagtccaagatggagacaattggctccgtgtagacagcaaattgctggaggctttcctatatttaattacaacagtatttgatgtaagccaagatcaagatttggtccaactggttgatgtggttttccctggagatgctacctttactcccattgggaagctaaaggagatggtatgcatctacatcttgccaaactatgaactcacggctcactggctgagaattgtgaagctaatttttatgatgttcatatcgatgttaagactaaggagcagcagctacgccaaagaagaggaaaacctgaaggagttgatgggctatctgtccgaagtttccattcagatgtacggcgtagatggcgtcctgagcttagccgatagcaacaatggcgcaaaacctccgttgaagactctcgtctccctttttattgaagcgcaggagattgtggatggacagaaggaaggcataatctacctccgtggctctgtagaggtaaacccaatggcgtag

SEQ ID NO: 17090 - DNA, 3065 bp, Oryza sativa
  Clone ID: PAT_MRT4530_22778C.1
tttttttttttttttttaaaacaaaatggactcaggatttgcattcagtagatcatcaacaagacaaaattcactaataacgccaacaaacacatcagtagcaaactgaaacaagattatacaagcaaaacatggcccaaggatcattctgactgattgtccatgtctcgatgcatcatcatctaccgtcaggcttttctttctacgggtgtgttgcctactgaacaggaagagcactgtattttcgacaaggatccagctcttagtgcacactgacaatgctagtcatggcaggagagtgaactgaagctcccactcttagcacttcagaagttcagagattcagatgcctctgataatgtttcccctactcgttttctcacctaagatggcctgttgctggtataaccggatgttgcacaatcccaggaggtatttttacattgttaggattatctcccacgcctcctccgccgccatcacagctcggttccaacaagcgcataagcgagaggaagatttccattctagtcacatccctgttggcctcaacggtgaagcgagcccagattttatttttgcgtgcttccatcacacccctcaagatagttaatccaagtcctttgatgaagtcagctatctccaagaagatccctctatcctcacagagcatctccacaagcatctgacgaggccgatcaagatcttcaacaatgattgggcatgtcatagattgactgccaacatcaaaagcccaagtagcaccaccttcaaagtaatctttcagaagcgggccattctcaccaccaccatgtatctttgattcgttagaatccttgaggttgtctgcatgcttcgtcacactttgcaagaaaaccatgtgcttaatggtcttttccaataatgcatcaatgctacactttgccccattaggtactagttcccgcagctcctttatacgatcttgaataagctggcggtcctttggccgtggcttaggactctctcctggtctagatctcttccgatttgccttgtttgctgtatccagacctttgctgtttgaggcagacacgctttcacatttcatgttctgtccactctcaatccagaggcgtatctgagatttctgcactccattgttttgggaaagacaaccatcttcagccttttctaggaaacatggttgtttgacaaaatttgaaactgccaactcattcttgattagcaaaggtggagcaccagatgacttgcattgcttcgtttcttttgagccacagtaagaagtgctaggaatgtctgtcaacgaagtcttgcacgaggcactgtcaccagagatctgcttgccaccaggattaacattcgagataaccgcatccaatagttggtcagtatcagtgagcgaaaaaatcccagaataagaaaattcatcctcctgtgcaccgaaggctggtgaactgtcaagataaattgaggattcaggtgcatctctgtctgaactctgaggctttgcagtgttccaggagaggtcaccatccaaactgcggtgcaattgatgaaaatcagtaccaaatatatcaaacaaatcattttctgtactaggatccataacaaatgaggaggttctctcattagaaatgtctaggatcttgtgtcggtccatatttttcacatcctgcgtgcttacagcagcactggagtcattgacttcatttgtcttcttgttttggcacatatgctctgggttaaactgacgagtggttgttttcaaaccactcgaaacttggacatcagaaccagaggatggagctgcggggtcttgaaatgattgtcttctgggattctccattttcacaatgaattgagcagagtgggggaatttatatgaaacagatggtttataccctgccatcccagaagtggaactgcatctttggtctaaaacttgactagacgtaccattgttatacaagttagcctcaactactctaggacctgcttggagaaaatcaaaactcccatgactattcagaaaagccggcacctcatcccctccatgaaatagactcgtgttagtattttcatggacaacagggttccggcatgaaagggattttaacagaacatttctgggccctgatgactcttccatgttcccgtgttctacttgtccaatgttgttcgtcaacaatggatacttttccactgatgctgagatagacgagataaaacctgagctcatagcactactgtgtgtgttaatatcaactctcctgtcactataagggagctgctgtctgaacctcatatcaggagcatataagacttgctctctaatggcttgatcatttctctgtgcaaccttaagtaaggaagtgttcctgcccgtgtttgctgatgtgctacttgacaaggctcgggcatcatgaccatagcactgttcataagggtgtatacttgggagaccatgtaaagatcgtgactgaactttctggctcaaatcatttttggctgaagcagatgcgaccatactcgaccggttgtttagctgacagcacagcttcttatattgttgcacagagcttatgttttccagaatcacactagtagagcctagctgcagcacaccacgtggtaacacaggtataattgcaatggtcttaatgccagctctgaactgattgttcatctcagcagcaacctcggatctgagcccgtgatcattggcagtttcatggacaatccattgatgattcccagtgaatgcagcacggccaatggtaccttctccaacaacatgaacctgcgaggccatgatcttcctaacaagcgtgcagacggcgccgccggactcgcacccagcctcagaagcctcagatccagcagagcacgatgcgtggccgcagaagccatcctcccacaccaaatgcacggggtcggcggcgccgatggccttccagaagacggcgtacgaccaccgggcctcctcgcacagccgccgcagcgcatcaccgacggccatcctcctcctcggaaaccctagctaagctccccggacgcgtggg

SEQ ID NO: 17091 - DNA, 633 bp, Oryza sativa
  Clone ID: PAT_MRT4530_22779C.1
atgcctacacctggttctcgaccggtagatcgtagcgatctctcaccacctaaaactccaagtgatcgagatacgcctacacctggttctcgaccggtagatcgtagcgatctctcaccacctaaaactcctggtgatcgagatatgcctacacctggttctcgaccagtagatcgtagtgatctctcaccacctaaaaattcatctccaggtgatcgagatacgcctacacctggtcctcgaccagtagattgtagcgatctctcaccacctaaaaattcgtcttcgggtgaacgagatatgcctacacctggttctcgaccagtagatcgtagcaatctctcaccacctaaaacttcgtcttcgggtgaccgagatacgcttacacctggttctcgaccaagatccctaaccacgataacacctactcttgacatcgaaattattgtccctttacgccagtctgacaagcctccgagaaacctaagggaatttcggctggggacacccagagcagataagctcttgtcagatcctaaagagccaaacgaccatgtaaaacctggtcatataattccattcaacgctgttgaggactccatgtctctacggtcttacagcgggatcgattaa

SEQ ID NO: 17092 - DNA, 177 bp, Oryza sativa
  Clone ID: PAT_MRT4530_2277C.1
atgaccacactagcctaccctaaccgcatcatggttcgatacttggatcaacgccggcgatcgagttcgcaggcgaccaacgtagaccatctgaccatggagtgtgcagggtacgtgctcgagctcgagggcaagcagcggccgtggtgcacgcttcagttcagggagattgagtag

SEQ ID NO: 17093 - DNA, 597 bp, Oryza sativa
  Clone ID: PAT_MRT4530_22780C.1
atgtctcagtcgccggcggctcccgctcccaaggcgcccgctgcggcgggtcccgctcccaaggcgaccgcaccggctggtcccgctcgcaaggcgcccgcagcggcgggtcccgctcccaaggcgactgcaccggctggtcccgctcccaaggcgaccgcaacggcggctccttcttccaaggcgccctcacctgcggctccttctccagaggcgccctcacctgttgcgccagcggcacgcccttcatactcgtctgtgctaaggttggtctccaacaattctgatgaggactttgaccgtgaagtttataggcttgcgcacttacggccacttgtttctaaagctgcatcgcagcgttctcaagcaatggtagatgattttaccaattttagctccgatgatgagtttgagtacagttctggagtgctggttgatagtgtttttgatgtgttgtgtgatgacttttctgatgaggattttcaatatgaagaagttgatgcaaggtattatagggtcagtaagagaactctcaaggcgggaggcctggtaggactggaaggtggaaaacttggtacagcctactacagggcctga

SEQ ID NO: 17094 - DNA, 1275 bp, Oryza sativa
  Clone ID: PAT_MRT4530_22781C.1
atggactccgtcgcgtcgtgggggctgaccccgctcgccgcggccgacccgctcgtccacgacctcctcgagcgggagaagcggcggcagcggagcggcatcgagctcatcgcctcggagaacttcacctccttcgccgtcatggaggccctcggctccgcgctcaccaacaagtactccgaggggatgcccggggcgcgctactacggcgggaacgacgtcatcgacgagatcgagaacctgtgccgcgaccgcgccctcgccgcgttccgcctcgacgccgcgtcgtggggcaagatctccgcgacgtcgatctacttcgagagcctcccctacaaggtgagcgccgccacggggtacatcgactacgagaagctggaggagaaggcgctcgacttccgccccaagctcatcatctgcggcggcagcgcgtacccgagggactgggactacgccaagctcagggccgtcgccgacaaggtcggggcgctgctcctctgcgacatggcgcacatcagcggcctcgtcgccgcgcaggaagctgcaaatccttttgagtactgtgatgtggttaccaccaccacgcacaagtccctccgaggaccaagagctggcatgatcttctacaggaagggccctaagcctcccaagaagggccagcctgagggtgctgtctatgactacgaggacaagatcaacttcgcagtgttcccgtcactgcaaggtggtcctcacaaccaccagattgcagcccttgctgttgctctgcagcaaaccatgacacctggattcaaggcctacgcaaagcaggtcaaggccaacgctgtcgccattggcaagtatcttatgagcaagggctacaaaatggtgactgatggaactgagaaccaccttgttctctgggatcttcgccctcttggcttgactggcaacaaggttgagaagatgtgtgacctttgcagcattacacttaacaagaatgctgtctttggtgacagcagtgcattggctcctggcggtgtccgcattggtactcctgcgatgacatccaggggtcttgtcgagaaggactttgagcagatcggcgagttcctccaccaggccgtgaccatctgcctcaacatccagaaggagcacggcaagctcctcaaggacttctccaagggcctggtgaacaacaaggacatcgagaacctcaagctggaggtcgagaagttcgccacctccttcgacatgcccggcttcaccctcgacagcatgaagtacaaggagtag

SEQ ID NO: 17095 - DNA, 918 bp, Oryza sativa
  Clone ID: PAT_MRT4530_22782C.1
actagtggatccccgggctgcaggcgcgaatcttctcctcctctcttctcttctccggtggcgatctgagtggccgaccggcggcgagatggcctccgccgccgtgacgctcccgcgggtgatgctggcggcggccgcggtgcgggcggcgatgctggcgctcggggagtggcaggacgcgcacctcgaggtgcggtacaccgacgtcgactacctcgtcttctccgacgccgcggcgtccgtcgccgcgggcgggtcccccttcgcccgcgccacctaccgatactccccgctcctcgcctacctgctcgtccccaactctctcctccaccccacgtgggggaagctcctcttctccgcagcagatttgcttgttgggttgttcattgacaccattctgaaactacgtggtgtccctgacagcactcggatctggtctgttgtagcttggttgttcaaccccttcacgttcacaattggcacaagaggaaactgtgagcccatagtctgcgctgtcatactttggatcctgatatgtttgatgaatggtagagtattgcaggcatcattctggtatggtctgattgtgcacttcagaatatacccaatcatatatgcaattcctttcgttatagttctgggcaagaattatgctggtcctgctggaaggcctattcttacacagtggacttctaagcaacatttacaaagcgataaatccagtccaagtgtggaaagggcaacatcattgttaactaatttatggaattttctgacaagccttataacaagaaatacgatcctgtttggattactttcaggatctatgttctttctctggactggtgttttcttctacctttatggatgggaattcttaaatgaggcactactttaccatctttctcggactgaccc

SEQ ID NO: 17096 - DNA, 1876 bp, Oryza sativa
  Clone ID: PAT_MRT4530_22783C.1
gcgttctctcgccgccgcaaccaccgccgcctcgccgcagcatcacgggcagccgccgccgccgccgccatggactccgtcgcgtcgtgggggctgaccccgctcgccgcggccgacccgctcgtccacgacctcctcgagcgggagaagcggcggcagcggagcggcatcgagctcatcgcctcggagaacttcacctccttcgccgtcatggaggccctcggctccgcgctcaccaacaagtactccgaggggatgcccggggcgcgctactacggcgggaacgacgtcatcgacgagatcgagaacctgtgccgcgaccgcgccctcgccgcgttccgcctcgacgccgcgtcgtggggcgtcaacgtgcagccctactccggctcgccggccaacttcgccgcctacacggcgctcctcaacccgcacgaccgcatcatggggctcgacctcccctccggtggccacctcacccatggctactacaccgcgggcgggaagaagatctccgcgacgtcgatctacttcgagagcctcccctacaaggtgagcgccgccacggggtacatcgactacgagaagctggaggagaaggcgctcgacttccgccccaagctcatcatctgcggcggcagcgcgtacccgagggactgggactacgccaagctcagggccgtcgccgacaaggtcggggcgctgctcctctgcgacatggcgcacatcagcggcctcgtcgccgcgcaggaagctgcaaatccttttgagtactgtgatgtggttaccaccaccacgcacaagtccctccgaggaccaagagctggcatgatcttctacaggaagggccctaagcctcccaagaagggccagcctgagggtgctgtctatgactacgaggacaagatcaacttcgcagtgttcccgtcactgcaaggtggtcctcacaaccaccagattgcagcccttgctgttgctctgcagcaaaccatgacacctggattcaaggcctacgcaaagcaggtcaaggccaacgctgtcgccattggcaagtatcttatgagcaagggctacaaaatggtgactgatggaactgagaaccaccttgttctctgggatcttcgccctcttggcttgactggcaacaaggttgagaagatgtgtgacctttgcagcattacacttaacaagaatgctgtctttggtgacagcagtgcattggctcctggcggtgtccgcattggtactcctgcgatgacatccaggggtcttgtcgagaaggactttgagcagatcggcgagttcctccaccaggccgtgaccatctgcctcaacatccagaaggagcacggcaagctcctcaaggacttctccaagggcctggtgaacaacaaggacatcgagaacctcaagctggaggtcgagaagttcgccacctccttcgacatgcccggcttcaccctcgacagcatgaagtacaaggagtaggaaaacaaaaacacacacaaaccatggtcctaccgccgctaatcgtcgaccagctgtgctctcgtggaccgccgtcgtcgtcatcttcttcctcggcacaagctggccctgtgttacggattttgtctgcccatcgagatgataggtttcataaaacgctctctcccccaccctgctgctgcctctggtttggttgccaacctcatcccccatcggtttttttcctcctcttgtttctaatttctaggagctgtgccttttggaatcatggaatgtcaagtatttgccaataatcaatccgtttgatttctgcctaccttgtgttttctgtgggattgctaaactatcaaactgtgcgaagctacgaaaaaaagaaatgctggaatttttc

SEQ ID NO: 17097 - DNA, 981 bp, Oryza sativa
  Clone ID: PAT_MRT4530_22784C.1
ccggccgggcgagcccaacccgggcgtacgcgacccggccaccaacctcacctacgacaacatgctgtacgcccagatcgacgcagtgtacgccgccatgaaggccatgggccacgccgacatcaccgtgaggatctccgagaccgggtggccgtccaagggggacgacgacgaggtgggcgccaccccgcagaacgccgccgcgtacaacggcaacctcatgaagcggatcgccgccggggaagggacgccgctcaagccggccgtccccgtcgacgtgttcgtgttcgcgctcttcaacgaggacatgaagcccggcccctcgtcggagaggaactacggcctgttctaccccaacggcacgccggtgtacaacatcggcttcgacgccgcgtccttcagcccgtcgccgacgacatccacgttttcctcctcttccaggccaacgagtacatttctgatgggggtggtgtcctactcgccgcattcctcctctgacaattttctccacaagtatattgcacgaatgatttgggattgttttttgaccgatatagttcgatttgtggttggttgcatagcacagaaaagcagatacattgttctaacctcgaggtaagctgggcttaattttcatctatagcatggattcacacagttttaagaaaccatcacttgccagtaggactcccatcttataagctccccctcccaggttgcttattcccctacccatccagttccaagcctcggcttaatttggtagccctggtggcaggggctgggtcggtccctgcgctgtggcacgtcacgtgcggacagtgtcgcatcgggtgcggcttgcgtcggttgtcgctctgttagcgcctgtccctgggagggtcgccgctggtggttccctggttgccggttttaggattctagctctggctatctcttcagaactctaaactgaccgaccaaccaacgcccaacgagaag

SEQ ID NO: 17098 - DNA, 241 bp, Oryza sativa
  Clone ID: PAT_MRT4530_22785C.1
atgatccgacaacccccgagctctagggagctcgatctagtggccgatgtgctagggaggggtagagagtcgtcaccgcactggggagaggtggatcctgcggtgccacttgccggtgtgggtcaagtgacagggatcgagggaagggagagtggacatagagaggcagggctgctggggagagacgaagagacgaagggaggttgggagaggggaagcatatgccctctaggatcagtcg

SEQ ID NO: 17099 - DNA, 197 bp, Oryza sativa
  Clone ID: PAT_MRT4530_22786C.1
gcaggaattcggcacgaggggaaacaacacttttgggttcaattccccagctcaacctgctggtttcagtacatctgttgatggcagtaccacccaaccatctgccaccagcacgatctttggtagcaaactgccacagtcagagggcacaatgccgcagccatcgaagagttcacctggttcccagtttagttcac

SEQ ID NO: 17100 - DNA, 176 bp, Oryza sativa
  Clone ID: PAT_MRT4530_22787C.1
atggatgaagatgtgattttcttgctttctataactagccccatgaaaacggataggttggaagttgtgtttgctgttgatgtgaggaagggcatgcttcaaggattagcaaagcttgatgttcgaccgaagaacttggctatcatggtcaccttatgcaccagcgagatttgcag

SEQ ID NO: 17101 - DNA, 741 bp, Oryza sativa
  Clone ID: PAT_MRT4530_22788C.1
atgtggggcgatactcgtcggaggtcaacctcgtcgagaccctcgcaaaggcgccgccaatgctcgcctggtccttcccgtaggtcggtcgatgcccgccaactatctcctggtatggatgactatgggatggataaccgccatatggatggtctggagggagatggggatgatcctacggaacagtccatcatcgaggccaatgacgacacggtcttgtctttgccgggaggcaaggccgagccatccacaccatctgcagggagagcggattgttggcaacacatagaaaaaataaggctagtgatgaaggagatgttccaagactattgccgagcaaagaataaacttgtgaggatgtttggcattgatgtgaaacataggtggaacacaacatacctcatgctacatcaactgaaagggtatgagaaaataatttctgttttcatcgattcattgcactttagaagtaatgatactgatgaggatggtgatgaaaaccgacatgacagagttttagcttatgttgttcaacccatggaagaaaaatttctcaaatacttcactgctattccacacctttattgttttgctttggtacttgatcctcataaaaagttggaggttgtggaggctgctttcataccaatagtgatgcaatgggtcttgattattctaaagcttatcaacatgctagagatgagttgttcagggttttccgtctgtaccagactgagctaa

SEQ ID NO: 17102 - DNA, 706 bp, Oryza sativa
  Clone ID: PAT_MRT4530_22789C.1
caccccccaaaacaaaaacaacaaaccccccccgaccacggacaaacacaaccaccagcaaaaaaaaacccccctaaaccagaagcgccaagctaaactgggcttgacccggccccaaagttgggttccttttttcccaaaccgaacattgccatccctataaacccaaagcctcccccctttccttttccttttccccattcgcctccaagccatttgccgcccaccttccccccccctccccccccggggggccccggtcgcccccccccccggcccttcccccccgcctggccccccgccccccccccccccggcccctgccccccctccccccccccccccccccaccccgggcccggccggtctcgcccgtcttgcgccccccccccctccccccccccccccgccgccccctcccccctccgcccccccccccgccccccccgccgccccccccgccccccccgccgccccggcccggggggccccggcccccccccgctcccggggcccggcggcgggggttttgcccgggcgcggcgcggcgcccgccgcccccccccccctccccccgcgggcgcccctgtggctccgccccccgcatcccccgcgcgggggcttggggccctccccgcccccgccctgcccccccccccacccgtcgccctccctggcgtggcgcccgcccgcccgcccgcggcgg

SEQ ID NO: 17103 - DNA, 264 bp, Oryza sativa
  Clone ID: PAT_MRT4530_2278C.1
atggagctccggtggatttcggcttcggggagatggctgccgggctccctctccttcttgcgaacccaacggcggcagcggcgaccaaaagcggcagctaaggcggctgctagctgcggctggagatcggaacatgacggcaacccactggttcatggcgaggactgcctccggcgaggtttcggcacaaggggaacggcggccggggtggagctcgaccttgcggagccgatggaggtggcggcgcaggaagcaggcagatga

SEQ ID NO: 17104 - DNA, 2754 bp, Oryza sativa
  Clone ID: PAT_MRT4530_22790C.1
ctggcggcggaggaggtggacgccgcgacgatcgacggatccggcgaggcggcgaagcggaagagtggtaagcagaggggatcgggcgccaaggggaggcgccgggacggcgaccgggctgtccgcccgccggcgatgaggccggatgaagaagggcgcggtgttgcgacgaggcccggggcgctctgggaaaggaagccgccggccaacgccttcaacgcgccagacgatgatgaggatgtcgagaaaactgatcaacttctagagcctctcaacaagcccaaaagacgtgatgcagggaagaagaaaagacccagaaaaaagaaagtagatcaagagaacatcaaaacccacaggcataacgcaaatgcagtaaaaggcaagatgttagtcaatgataaggtttcgaagactgaaaagaagcaaagggaagaaaatgttgacaggtatcctgatttgcctgaaaatgaatttgctgcaaaatgcccttattgtcgcaagaattgtaattgcaaggcatgcctgcgaatgagaggtgtcgaagagcctccaagaaaggaaatttctaaagaaaatcagattcgttatgcctgtcatgtgttacgcttgttgcgtccttggctgatagaactgcgacaggagcagatggcagagaaggaattagaggctaagatacaaggtgtttcagttgatcaaataaaggtggaacaagctgagcttcgcaaaggtgagatccctggaggagaagaggtggaaattttggatcctgaagaaagagacaaggattatgcttttggtaagattctgtcagatggtgagaaccaaagggactctttgaagtgtcgcagcgacacccaaaacagtgagtcaaacaaaggcatggcttctgacgaaaaccaaaagaaggctctgttactttggaaagcaaacagtaatggtagcataccttgcccacgaaaggaaaaggaagactgcagtttttcatctctagatctgaaatgcttgtttccagagaagttgctccctgaattagaagatagatctgagaaggtcttctggagtgaaacatttgcaaaagaactaggtagaacaagtgagctgtgcccttgttttgatcactcaggcaagataagaagtgacagcaagaaattacgtcaggctgcaaatagggaggactcgagtgataactacttatactgtccggtggccactgatatccaggacgctgacctgttgcactttcagatgcattgggcaaagggcgaaccagttgttgtttcagacactcttaagctaacttctggtcttagctgggagccgatggttatgtggcgggcagtacgagaacgaaccaaagggaaggcagaagatgagcagtttgctgtgagggcagtagattgcctcgactggtgtgaggtggaaattaacatacacatgttttttatgggatatacaaggggcagaactcatcccaggacctactggcctgagatgcttaagctaaaggactggcccccttctagctcatttgatcagcgattgcctcgccatggtgctgaatttatcagtgcattgccatttccggagtatactgatccacgatatggtccgctaaatcttgcagtgaagcttcctggtggtgtcctgaagccagatcttgggccaaaaacttacattgcctatggattttctgaagagttgggcaggggtgactctgtaaccaaacttcactgtgacatgtctgatgcagtaaacatcttaacacacacagcggaagtgccctgtgagacttatgatgctgttcagattaaaaacacgcagaaaaagatgaaaatgcaagatgacatggaaatatatgggatgatagaatcaggcagtgaactcaagccatcagcatgcccagttgaattggggaacaaagctgttggtgaagcaccaaaggcctcatgcagcaaagaaaatgttcataccttgaaagacaagtctaatggttggtggagaaaatatacttttggtttggatataaacgcttcaccacctgatgatgctggaggtgatgccagggatgaagcattgtcctatgaatctgtggtacatagtgatgtagctcagtgtccaaaccataaccatgagaccaataattctgatgatgcacgtattggagctcagagatgtcaaaagaaagctaaaggtcgtcctccgaagacaggttcaggggtatcagagcaccaggaaagtggtggtgctttgtgggatattttccgaagagaggactctgagaaattacaagacttccttaggaagcatgcgccagaatttcggcacatccactgcaatccagtgaaacaggttattcatccaattcatgatcaagctttctatttaactgcggagcataaaagaaagctgaaggaagaatatggtgttgaaccttggacctttgaacaaaagcttggcgaagcagttttgattcctgccggatgtcctcaccaagtcaggaatttgaagtcctgcatcaaggttgcactggactttgtttcccccgagaatgttggtgagtgtgttaggctgaccaaggaatttagacgacttccatcttcccacagggctaaagaagataagctagagatcaagaagatggctttccatgctctgaatgaagttctaaactttctggatcctccttcctcagaagggtcgaaagaagcggcggagaagcctcgaagggggcgtggtcgcccaagaaaacactag

SEQ ID NO: 17105 - DNA, 252 bp, Oryza sativa
  Clone ID: PAT_MRT4530_22791C.1
atgtcactatgctcgatcgccgtggggaggtccagggagctcccttccctcttggccaacacgagggtgaaaggcgtcaacgccctcttgaaggagatctcgacgaccatgtcgaacatcgtgaagagggcctcgtgctggggacctccatgcttcagtgacgcgtttgctacgagggatgaagacggcgtcgatgtaggctctcagacgaagtgcgtcgtccctctccttgtcgggagcggaaagaggtag

SEQ ID NO: 17106 - DNA, 510 bp, Oryza sativa
  Clone ID: PAT_MRT4530_22792C.1
atggggaggctgacctgtgggccaccgcggcagcggctggacgaggggagcagcggtggccatcggggcgcagcggaaccgggccgagggcggcgggcggcggcggctcggccgcggcagtgggaggacgaggggaacggcggcggcggcccgcgctgccgctcatcgtcctcctcctcatggttaccagcgtggtctccgacggctcgccggggtcggggccatttccagctgcagctccgtccactcgcgccgttcagcaccggggcagcgggactagccgcgatgttggccgccggcgccgcgctgctcgtgctcgtgtgcgccgcgtcgctccgctgctcgaccgcgcccaagaagctcctcagtggcggggtctccatcgaggagccgcgcgccggcggcggcggcgaggagtgcgacatgttcaacccgctctacgcctccagggactgccccttcctcgacgtcggcttccgctgctccgataacgaccgccccgacgagtag

SEQ ID NO: 17107 - DNA, 141 bp, Oryza sativa
  Clone ID: PAT_MRT4530_22793C.1
atggccctaatgtacatgtggaagaaaccatgcgcgcacatgcacaacgtgaggtaccatgataaggagcaggggaaggccagaatggaatggggagaacacctcacacccaatgggaggggtggccatgcattgatatag

SEQ ID NO: 17108 - DNA, 886 bp, Oryza sativa
  Clone ID: PAT_MRT4530_22794C.1
atggagacctccgcctccgcccgcagatccgccgcccccgaccccaagaagcctcgcctcgcccagcaccccgcccccagggatcccagatcttaccccgctgccgccaatggcaacgcccccgccgtcgaccaggcgcaggtggacgagctcgtcgcgcagtaccggaccgccctcggggagctcaccttcaactccaagcccatcatcaccaacctcaccatcatcgccggcgagaacctccacgccgccaagcccatcgcctctctcatctgcgccaacatcctcgagggacaggggatactgggagctggggccaagactactacaatttccgattctggtgatgatattgagaggactagcaggacagctgttgatagaggtgcagggcggcggctggatgctttgaaccctaggactaatgtacagcgggcacaaagggacccttttagcaatcctattcatgaaaagcaagatagagatatgagggtccttggattctccaacatttcgcagcaggctgttgtgggaactggtcttgttcgtgcaaaacctaaaggccaagatggaagtggcggaccatattatactgctggagttggttcttctgaagaacagtttgacaggcgcagcaatttttatgcaaacaaggatgttagaccatcaggatctgtacgtttagatggtgcacttttgccaactcctgttagtaattctgataggattggtaggccgtcatccaacaaaagctggaagaattctgaggaagaagagtacatgtgggatgatgatcatgaagagtaccttcatggtaagcacgaagtggaaccaagaattgatagggaaatgctcccggaaggacagccgttctcgtcatctcgtg

SEQ ID NO: 17109 - DNA, 3758 bp, Oryza sativa
  unsure (1)..(3758): unsure at all n locations
  Clone ID: PAT_MRT4530_22795C.1
atggagacctccgcctccgcccgcagatccgccgcccccgaccccaagaagcctcgcctcgcccagcaccccgcccccagggatcccagatcttaccccgctgccgccaatggcaacgcccccgccgtcgaccaggcgcaggtggacgagctcgtcgcgcagtaccggaccgccctcggggagctcaccttcaactccaagcccatcatcaccaacctcaccatcatcgccggcgagaacctccacgccgccaagcccatcgcctctctcatctgcgccaacatcctcgaggttccaagtgaacagaagctaccatctctgtatctacttgacagtattgtcaaaaatattggaaaagattatgttaaacatttttctgcaagattacccgaggtgttctgcaaagcatataaacaggttgattcttccatacacaatagcatgagacacttatttggaacatggaaaggagtgttttccccaacttcactccaagtgattgagaaggaacttggctttcaatcatctactaatggatcatcaggcgctgcaccatcaaagcctgattctcaatccaatcgtccatcccacagcattcatggacaggggatactgggagctggggccaagactactacaatttccgattctggtgatgatattgagaggactagcaggacagctgttgatagaggtgcagggcggcggctggatgctttgaaccctaggactaatgtacagcgggcacaaagggacccttttagcaatcctattcatgaaaagcaagatagagatatgagggtccttggattctccaacatttcgcagcaggctgttgtgggaactggtcttgttcgtgcaaaacctaaaggccaagatggaagtggcggaccatattatactgctggagttggttcttctgaagaacagtttgacaggcgcagcaatttttatgcaaacaaggatgttagaccatcaggatctgtacgtttagatggtgcacttttgccaactcctgttagtaattctgataggattggtaggccgtcatccaacaaaagctggaagaattctgaggaagaagagtacatgtgggatgatgtacgttctcaaggagcagattatggaggtaccagttcaacaagaaaaagagaatggatacctgatgatggaaatgttggaagctttcaaagggttaaatgggcagaggcgggaggacctttggaccctgaccaacacaaattagatagcttccaaagatttggaaatgcgacgggtcaagatagaagaattacaccatatatggatcatgaagagtaccttcatggtaagcacgaagtggaaccaagaattgatagggaaatgctcccggaaggacagccgttctcgtcatctcgtggttcctctctctggttatcccatgaaaaacctctcccagacattgtgtcagatcctaggatatcagcgttttccaatcagccagcggacaggcctaccatttatgctggtaccttgtcaacaagtatcacttcatctgtacctgttgggttgtcagcagcctatgctggacgatcaagcctagaaagtgcagcaacaagatcaactgagactataggacagcaaaagaatagatattggtcaacttcctcaccacctgtacagtcaccttctgcatcatttgcacgccagagttcccctagtcctgtagagcttgattactcttccaaaccattctcacagttgggtcaaaattctctggaagactataaccaaagaactcatgccttggctcaaaaccttgcactttctcagggcagacctaatctgctgggtgctccttcacatgcctcccagcagattgaaaagcacccttccttgctgcagtcaaagccacatctcaggacacttgatcaaccgcaggcaaacttttcacctgaaaattcatcttcagtatttaaatcttcaatccagctgcctatttctgttggcgtggggcatcggcagcctgaagaagtatctctgtctagtgattccactcttatgagctcagatcatttaagtgctagcagtttgttggctggccttataaagagtggattcaaaccgaatgaccccaacgatcttgccagtttgagggcacaacctcctcttccaagtgggccacctcctcatgtttcgacatctttttcagctgcttcctcatccctgcaccttccagctagtgatactctgaagtctcaggcgccaaactctctgcgcccacctttgccccctgggttgccactttcgtcgccgtttgtgtgcccgacaacacagacctcggagaaagctgcaccactctctagtcttctcagttccctggttgcaaagggattgatttcttcgccttctgcagattcaactgtagcgatcccacaacagccctgtaaatcagaactgaacacaccagatgacactgcttcagctccatctctgccttttgtccagccttcagttaaaaaggaaacatccaatcaaaactcatctgccccatctaaggtgctggtgcatcaacctgttgaaatcaagaaggaacctgcagaaatcaagatggtagaccttattggctttgacttcaagcctgagatgctccgcaagtaccatgcacatgtgatcagcaccctctttgatgaccaaagtcatcaatgtaatacatgtggtctaagattcagtcttgaagaagagctctctgtgcacactgcgtgccatggatcgaagcaaagtgagactagaaagactggtatcgcacctgaaaaatggtaccctagcaaaaataattgggtcgatagatcacatgaagtgcagaacagcgccctggagtctgcttcttctgttgcagatttgagctctgaagaggaagtttgtgaattcatggttcctgcagatgagagtcagattatctgtgcactctgtggagagtcatttgatgacatttattccattgagaaggataactggatgtacaaggatgcggtctattttgattcttcgaagacagaaggcagcagtggcgacagtgctgagagtaaagagcgtgtacccatagtgcatgcaagatgtatgtcgataagctcaaatgatggcatggaggttgattagcatttgtgccaaacacaggggcagaagcagtagcaacagaaacagctcgaatgatgagattgaggtggattagctggaaatctggtgcttaacagaagctcaaatgaaatgattgccacaaaagtgggtcagcgtgaggggtgatccgcnagcagcaactgcaatgatgctgtcgcggcccatgacatgtaggtggattagtgtgaagttgacaacctgacgcgctgcacaagttaattttggtcaaatgtttgtgttcatccctcagtcacccattaatcgtggataaggtgcttaccccagaataaattcccaagtccagctctggccttgtcaaccgatcatcctcgcaatcgagatcttcgggggtctgatatttgtatttttgggtcaatcgaagggaaatgatcttttctgttcatagaaggccagcttgtatgttaaaaaggagtgtattgtttcattacgagggaaagcaataggtgacgctgccattgagttactgttgttttttggcaaacttgtttcatcttccgaggactagagattttgtacctaaaaagaactgataatagaacatcatggaggcagaattaaactaaaaaaaaaaaaaaaaaaaa

SEQ ID NO: 17110 - DNA, 852 bp, Oryza sativa
  Clone ID: PAT_MRT4530_22796C.1
atggatctcggcaagtccacctccaccaacgcgtcgctgaagaagctccaggaagatggcgcccttcccggtcgtggaggcatggagagagaagttggaggcttgaacagcgaaacggtggagcgccgcgtcggccaactgatgatcagtggccccacaacggcaagtgacatccccatccccctttgtgagaaggaggtggccgatcgtgaagccgcaatcaacgttctccctctgaccgatgtcatcggaccgctcgtggaccaccaggcggtggcatcgctgaaagagggtgtcgcacaggaggcatccaacgcggccgctgctgctgctgccgcgactagcgggagccgccccccgaggaggggaaggaagttcacctccgtactcggcagtcgctggaaggcgtcctcccccacggcctcggacgtgtctccgccacctccacgacgacagaagttggttacgctaggcgagaagtgggcgcgggcgaaggcggcgcaggatgggtctggtgagacctccagtgcgtctcctacagctgcctccactgacgtcgtggttgccccacgaagtcgggaggcgacgccccatggcctatctggtgatcttgggcctgttcgcggcccgcctgccgatgtcctcagctggggggagctccaagtcgggatggggcacctcctcgaagctggcgctcgcgggataagtcgcgatattgccgaggcgaggacagtggcggcgtcggcctgtactcagctcgaaggcgtcggcctgcgcattgacgaagccctgaagcaggaatgccgtcgatcgagccgatatgctggagggcatgtgttggcttgcatatga

SEQ ID NO: 17111 - DNA, 218 bp, Oryza sativa
  unsure (1)..(218): unsure at all n locations
  Clone ID: PAT_MRT4530_22797C.1
ccagtttnttggtcgttttcaacagacctataaacattctntgccgcgtttttttgtnccnaagcatggcactatgttnacnctngcccttgtccgtttnccgcctacngcaactaaaganattcantaccttaacgctaaaggtgctttaanttataccgatatnncnggcgaccctgttttgtatggnaacttgccgccgcgtgaaattcctatga

SEQ ID NO: 17112 - DNA, 2082 bp, Oryza sativa
  Clone ID: PAT_MRT4530_22798C.1
atggctggagcggcggtgacgacggcggcgcgaggctacacggtgctagggcgctaccgacggcgagaggcgaaagcaagggtggcggcgggtagcggcgggcttgggggtccttttataggggttggaaggcggcggcgaaggcccacggtgaccggcgacgcgaaggaaagattagggttcggaggaaagggttcgatccgaatcgaactcgaatccacggatttccaaacgaaattagccgacgattccaaaagagaaaagatagagaattcggatcctgtctttgttgttcctgaggaacaaccagacaagatttcgtcttggaccgcaaagcctaccttgacccctgcccttcggttcttcgtcgaggccatcgatgacctccgagtacgaggtttgtcggggtatgaagtcgctgccaacttcgttggcttgaacagcgaaacggtggagcgctgcgtcggccaactgatgatcaacagcccgacaacggcaagcgacatccccgtccccctttgtgagaaggaggcggccgatcgtgaaaccgcaatcaacgttctccctctgactgacgtcatcggaccgctcgtggatcaccaggcggtggcctcgctaaaagagggtgtcgcgcagggggcatccaacgcggccgctgctgctgcctcagcgactagcgggagctgccccccaaggaggggaaggaagttcacctccgtacttggcagtcgccggaaggcgtcctccccccgtcgggaggcgacaccccacggcctgtccggtgatctcgggcctgttcgcggcccgcctgccgacgtccttagctggggggagctccaagtcgagattgggcgcctcctcgaagctggcgctcgcggcataagttgcgagattgctgaggcgaggacagcggcggcgtcgtcggctaacgagcgcgccgacaagctggagcgcaaactggtggaagttcgcgaggacctccagaagatgagggagctggtggccggcatcgagcgacagcggcggggtcttgaggaccgcatggcggaactcgagagtaacctatcggagctccgtggctcgctgcgagtcactttcactggcctacaccagctcgccgggcaatgtggtgtcacgaccacgatcccggcgaaccccgacgagttctcgctgacgtcttcactcgcagaactggctacggcgatggaggcgataccctccaagcacgcggccaggatcaggaaggagacgtccaacgggatctataccggggcatgtcatgtcctcgcgtgcgtcaagttggcacatccgaaacttgatctccagcggatcttggagcagggggcgacgaacgacgcgcgtagaggcgtgatggaagaagtcggcgatctgggagagtctgttctcccgctctttgaagatcgtcgctttagttttccccaacattttttatcccgagcacttgttgtcctttgtagagatgtcgatgtcgaggatgtccagcagcgtgggcagcctgagtcatcagtgatccttccggatcttgcatctgaggaacccatgtcgctgaacgatgtggatgaaattttacccgcgagaatggggacggcaacgacttccttagatctcgagaatgcacttgctgaccaagatcatcgtatccaatattggaagacaaaatttgaagtggcggaactcgagagagctatgttggaagtgaagaaggagcaggccgtggaaacactccgaggtcgtgaggtgtggttcaactcgtatctgaagagttgctgcacgtccatggcccgagtttgtagagagctccgagtactccgcggagatcccgaggagtcagcggccggatacatctcatggctgaatggggcctgtactcagctcgaaggcatcggcaagcgcatcgatgaagccctgaagcaggaatgccgtcgatcgagccgatatgctggagggcatgtgttggcttgcatacgagatcatcgtccgcaactgcacctcgagtttctccatgaagggttcgctcgttctcggaggactccggtggagatagaccacctggcgaagtag

SEQ ID NO: 17113 - DNA, 2073 bp, Oryza sativa
  Clone ID: PAT_MRT4530_22799C.1
agcagtcggcggccgtggcagcaaccttgcttcagccgtggtggggattgtcaccgcctcatctgccgtcaccatggtcgccgccggcgatgtcagcccgccggtggcattcgggctcttcgtcctcatgatcgccggactctcgctggcggtctccggcgttcgccgtgtgtgaagtcgaagggatatatcgtcaataggctatggttgtcggggtatgaagtcgctgccaacttcgttggtaggcgaatccagccgctccaggctcgagctcatccagcctttgactattctgggccggaggacacgacccgggtttctcctcggggcttgaacagcgaaacggtggagcgctgcgtcggccaactgatgatcaacagcccgacaacggcaagcgacatccccgtccccctttgtgagaaggaggcggccgatcgtgaaaccgcaatcaacgttctccctctgactgacgtcatcggaccgctcgtggatcaccaggcggtggcctcgctaaaagagggtgtcgcgcagggggcatccaacgcggccgctgctgctgcctcagcgactagcgggagctgccccccaaggaggggaaggaagttcacctccgtacttggcagtcgccggaaggcgtcctccccccgggcctccgacgcgtctccgccacctccacgacggcagaagttggtgacgctaggcgagaagtaagcgcgagcgaaggcggcgcaggatgggtttggtgagacctccagcgcgtctcctgcagcggtctccactgacgtcgtggtcgccccacgaagtcgggaggcgacaccccacggcctgtccggtgatctcgggcctgttcgcggcccgcctgccgacgtccttagctggggggagctccaagtcgagattgggcgcctcctcgaagctggcgctcgcggcataagttgcgagattgctgaggcgaggacagcggcggcgtcgtcggctaacgagcgcgccgacaagctggagcgcaaactggtggaaggtcttgaggaccgcatggcggaactcgagagtaacctatcggagctccgtggctcgctgcgagtcactttcactggcctacaccagctcgccgggcaatgtggtgtcacgaccacgatcccggcgaaccccgacgagttctcgctgacgtcttcactcgcagaactggctacggcgatggaggcgataccctccaagcacgcggccaggatcaggaaggagacgtccaacgggatctataccggggcatgtcatgtcctcgcgtgcgtcaagttggcacatccgaaacttgatctccagcggatcttggagcagggggcgacgaacgacgcgcgtagaggcgtgatggaagaagtcggcgatctgggagagtctgttctcccgctctttgaagaagatgtcgatgtcgaggatgtccagcagcgtgggcagcctgagtcatcagtgatccttccggatcttgcatctgaggaacccatgtcgctgaacgatgtggatgaaattttacccgcgagaatggggacggcaacgacttccttagatctcgagaatgcacttgctgaccaagatcatcgtatccaatattggaagacaaaatttgaagtggcggaactcgagagagctatgttggaagtgaagaaggagcaggccgtggaaacactccgaggtcgtgaggtgtggttcaactcgtatctgaagagttgctgcacgtccatggcccgagtttgtagagagctccgagtactccgcggagatcccgaggagtcagcggccggatacatctcatggctgaatggggcctgtactcagctcgaaggcatcggcaagcgcatcgatgaagccctgaagcaggaatgccgtcgatcgagccgatatgctggagggcatgtgttggcttgcatacgagatcatcgtccgcaactgcacctcgagtttctccatgaagggttcgctcgttctcggaggactccggtggagatagaccacctggcgaagtagatggcgccgctggcggagaaggtcttccagtctatggactggcgttggccttcctgg

SEQ ID NO: 17114 - DNA, 470 bp, Oryza sativa
  Clone ID: PAT_MRT4530_2279C.1
ctaagccgcggcagtcttcttgagcttcgcaagctcttgcctgatagcacctcccctcttgaacctgtcaaagtcattgagtgacgctctcctcttctggacaattagcttcttgccccatgagctattctcccacttgttcttaacatcagcctcctccatagccttaatcaaagttgtcttcttcgggacacgtttgatgtcaatcttgatgtcagtcagggaaagcctcttgaagttgatctggcacctgaccatgtcaggagcatccacaagtgcccggttctggtcgacgacatcaacgatgacgacgaggcggccgtagtccttgccgtagttcaccagggccacccgcccgatctccacgaacctcttgaacggcattctcgcggcggcggtcgggagaagcggcggggggggggggcgcggagaagcccacgcgtccgcccacgcgtccgcccacgcgtccg

SEQ ID NO: 17115 - DNA, 2321 bp, Oryza sativa
  Clone ID: PAT_MRT4530_227C.1
atggaagcggtgaggtgttttgtggtgttgtgcgtggctgtggcggcggcgctggcttctttgggtggcggtgcggttgatgcggcggcggcggcggcggcggcgcaggagatgcggcgaggcttctcggcggcgcacgaccggtcctactcgcagttcgagcaggtgctgtccgaccccaccggcgtcttcgccctcggcttcctccgcgtcaactccaccatgctcgacctcgccgtggtccacctcccgtcctcgttcccgctctggagctccatccccgaccgccccgcgcagtggtccgcgcccgcttcgctctccttcgacggcgacctcgtcctcaccgaccccgccgccaacaaggtcctctggtccgccggggccgccgccggagccggcggcgaccgcgtggtgctcctcaacacctccaacctccaaatccagagcggcggcggcggcggcgacggcggctcgtcgcccggtatcgtgtggcagagcttcgatgccccatcggagaccatcgtgcaaggccagaacctcacctccgcggcggcgctctacacctccgaccgccgcttctccatgcggatggggaccagctacttcgggctctacatcgagccgcccgcgtcgtcgtccggcggcggcggcgtcgcggcagcgatgtactggaagcacacggcgctgcaggccaaggccgcgatcgtggacggcggcggcccgacgtacgcgcgcgtggagcccgacggctacctcgccatgtaccagaaggaagggccacccgccgaagtcctctccttcgacaccttcaaccatggcgtgcgggcgctccgccgcatgacgctcgaggccgacggcaacctccgcgcctactactgggacagcaccggctcccggtgggtgctcgactacaccgccatcaccgatccgtgcggcctgccaagcacctgcggcgcctacgccgtctgcgtgccgcccagcggccggtgcgcgtgcctggccaacgcgacggacggctcgggatgcgccgccgcaaacgtcggcggcggcggcggcctctgcggccgcacgggcggcgaggtgggcgggctgtactgggaggtgcggaggcagcgcgtggagccggcgaacaaggaattcctgccgttcgagcactcgccgtcggcggcggactgcgaggtgcggtgcgcgcgcaactgcagctgctggggcgccgtctacagcaacggcacggggtactgctacctcatggactacccggcgcagatgatggtggccgccgacgagaggaaggtggggtacttcaaggtgaggagcctggaggaggcggcggcggcgagcgggggcgggagggcggccggtgtcaaggcggcgctgcttgccgtcggcgtgacggtgctggtcgccgcggccgcgttcggggcgtacagggtgtggaagcggaggtgccggaggagaaggcaaggcaaagggcggcggcggcggccgctgatcggaagaggcaggcccaaattacggtggcgatgacttgggcggtgtggggagcggcggtgatggtcgatggcggtggggacgaggtggtggggagcggcagctgtggcggtggggatgaggcggaagggagtggcggctgtttcggtggggacgaagcagtggggggcggcggcagtcggtggccatggggacgaggcggtggggagtgacatctgtggtggtggggacgaggcggaggggagtgacggcagggagcggcggtcaggaggagtggcgatggtggtggggacgaggcggaggggagcggcgacggctgtggcggtggggagcggcggctgtggccgtggggacgagacggagaggagcggtggtagctgtgggtgtggggagcggttctccggcgagtgtcacgctcatggcgctgatcgacgagatggggtcggcgtcatggaggaagtcgaccggcgggggttgcccttggcgtcgtcaatggctgaagatggaggcggaggttgaaggcggcggtccacgcgctcgaagccagcggcgcagccgtgctggcgtggaagagggaggcggccacttggggccgctgcgagacgagcaggacggcggcggcggcggaggaggaggaggatgaggatgttcttctgcctgtccgccggcggcggcggacggcgcgggctgctcatcggaggaggacgcggtggcggagagctgctgctgctgctgccggaaggttgcacgcgcgggggccggggtggagggcctggcggcggcgggggggcagtagaggggcggcggcagcatggcggcgggggaggggg

SEQ ID NO: 17116 - DNA, 2019 bp, Oryza sativa
  Clone ID: PAT_MRT4530_22800C.1
atggcacccttcctggccatggagccatggagagagaagttgaagatagagaattcggatcctgtctttgttgttcctaaggaacaaccagacaagatttcgtcttggaccgcaaagcctaccttgacccccgcccttcggttcttcgtcgaggccatcgatgacctccgagtacgaggtttgtcggggtatgaagtcgctgccaacttcgttggcttgaacagcgaaacggtggagcgctgcgtcggccaactgatgatcaacggcccgacaacggcaagcgacatccccgtccccctttgtgagaaggaggcggccgatcgtgaaaccgcaatcaatgttctccctctgactgacgtcatcggaccgctcgtggatcaccaggcggcggcctcgctgaaagagtgtgtcgcgcatggggcatccaacgcggccgctgctgctgccacagcgactagcgggagctgccccccaaggaggggaaggaagttcacctccgtacttggcagtcgccggaaggcgtcctccccccggtgggcgcgagcgaaggcggcgcaggataggtttggtgagacctccagcgtgtctcctgcagcggtctccactgacgtcgtggtcgccccacgaagtcaggaggcgacaccccacggcctgtccggtgatctcgggcctgttcgcggcccgcctgcggacgtcctcagctggggggagctccaagtcgagatggggtgcctcctcgaagctagcgctcgcggcataagttgcgagattgctgaggcgaggacagcggcggcgtcgtcggctaacgagcgcgccgacaagctggagcgcaaactggcggaagttcgcgaggacctccagaagatgagggagctggtggccggcaacgagcgacagcggcggggtcttgaggaccgcatggcggaactcgagagtaacctatcggagctccgtggctcgctgcgagtcactttcaccggcctacaccagctcgccgggcaatgtggtgtcacgaccacgatcccggcgaaccccgacgagttctcgctgacgtcttcactcgcagaactggctacggcgatggaggcgataccctccaagcacgcggcctggatcaggaaggagacatccaatgggatctataccggggcatgtcatgtcctcgcgtgcgtcaagttggcacatccgaaactcgatctccagcggatcttggagcagggggcgacgaacgacgcgcgtagaggcgtgatggaagaagtcagcgatctgggagagtctgttctctcgctctttgaagatcatcgcttcagttttccccaacattttttatcccgagcacttgttgtcctttgtagagatgtcgatgtcgaggatgtccagcagtgtgggcagcctgagtcatcagtgatccttccggatcttgcatctgagggacccacgtcgctgaacgatgtggatgaaattttacccgcgagaatggggacggcaacgactttcttagatctcgagaatgcacttgctgaccaagatcgtcgtatccaatattggaagacaaaatttaaagtggcggaactcgagagagctatgttggaagtgaagaaggagcaggccgtggaaacactccgaggtcgtgaggtgtggttcaactcgtatttgaagagttgctgcacgtccatggcccgagtttgtagagagctccgagtactccgcggagatcccgaggagtcagcggccggatacatctcatggctgaatggggcctgtactcagctcgaaggcatcggcaagcgcatcgatgaagccctgaagcaggaatgccgtcgatcgagccgatatgctggagggcatgtgttgtcttgcatacgagatcatcgtccgcaactgcacctcgagtttctccatgaagggttcgctcgttctcggaggactccggcggagatagaccacctggcgaagtcgatggcgccgctggcggagaaggtcttccagtctatggactggcgttggccttcctggtag

SEQ ID NO: 17117 - DNA, 845 bp, Oryza sativa
  Clone ID: PAT_MRT4530_22801C.1
attcccgcctcgacccacgcgtccggccatattgtaacttgaatcttgttcaaaaattcttttcaagtcttaggtaggtcactgttggtgccaccttcttgagaagtttatgatctgcatgttcacctaagatatccagtcaagtgctaaaaaggtcacaaaaatgggaggcagaaaggacaatcatgactcctcaaatgccgacaaagggttccatggagcgtatccaagcggttaccctggtgcatatcccctaatgcaaggataccctaattcacctggacaatatccgactcccggtggataccctagtgcaccaccgggacaatacccaccagccggtgggtaccctggtgcacaatatccaccaagcggttaccctccatcacaaggtgggtaccctccaggagcgtatccaccatcaggatatccacaacaaccaggctacccgccagctggttacccaggtcatggccatggtccacccatgcaaggaggtgggcatggtgcaggcgcatctggctatggagcgctgctcgccggaggcgccgcggtggcggctgctgcggtgggagctcacatggtacgacccggcggcggtggcggccacgggatgttcggccaccatggtggcaaattcaagaaaggaaagttcaagcatggcaagtacggcaagcacaagaagtttgggcgcaagtggaagtgataagcaaactaaattgcactgcagtttgcctccggtttcttgtttggttgaagtgctatagcatgatgggattaagtgtccatttaccatatatatatatatatattcatcgaaatataaccatacgagatcttatttt

SEQ ID NO: 17118 - DNA, 619 bp, Oryza sativa
  Clone ID: PAT_MRT4530_22802C.1
atgacaattaaggaccagttcacgggaaacccttgaagacttaccatgcttaccacaggcgggagcactggtggcgagggtgggcgtgatggagttgggtcggccggggtgtccggttgtctagctgccggattcaccacggcgcatgagggtactgcccactctgggttaggagtgggggtgaaacattagagtggtgtggatggttaggggagggttatgcgaagggtcttgtcatgatttccccctttgcagtaccatgttcaggtggttggttgggcctattgcaacatggtgtagcgttggacagtgatgattaatattgcttaatttacctcaactgttttacttctttcaacttatgttcttaaatgcctgctttatgcaaatgaacctttagcctcctttggttatatcttacatcatacctcctcttccggtatgacttgttgagtacaatggatagcagtcttgctctctcttccccacactagagctgaagttcttgccagttggagctttctcggagaagttggtttcgtcgctgccgtcaagcttagaaattctggttcgtgaatttctgggctcaacaatggtgccccatcccaaaaattacctt

SEQ ID NO: 17119 - DNA, 240 bp, Oryza sativa
  Clone ID: PAT_MRT4530_22803C.1
atggaagaggaggtgccgttgctcaagggggactaccaccaaggttgccccggctgtgcctacgatcgcaagaaggaggtctacaggggattgccttacaaggaattcctctatctctggatgatctgcctcaccgccgttccatatgggtttggtcggtgttcagtcatgtcaatgattcctgttcctgtggggaaatcgctgattctctataatagtagattaacaggaccaagttag

SEQ ID NO: 17120 - DNA, 219 bp, Oryza sativa
  unsure (1)..(219): unsure at all n locations
  Clone ID: PAT_MRT4530_22804C.1
tcggcgatcgaagttccgttgcccagagcgcgggataaccatgnctggggagtgtgtgtgaacgtgaagttnaaggttgcggatttccccccgcgctgcgtacttgatatgaacccacggtagacctggtgcatatgtcttaaccggtgcccatattantaaaaacctttccctantcccttgctggcccanttcccttaaaaaaaaaaaaaaaaaaaa

SEQ ID NO: 17121 - DNA, 207 bp, Oryza sativa
  Clone ID: PAT_MRT4530_22805C.1
atggcgatcaagaaggagcggatgagctcggacaccgtcatcgccatggatgagctcgaccttaggatagggctggggtggcaggggcttcacgattggtgcggtggcggtgggctgagggcgtcggacgggcgacggcgcgccaagacagtaaggcacgcgcaagcggccccgaggccgacgtgcggcgaaacggcgcgcggctaa

SEQ ID NO: 17122 - DNA, 256 bp, Oryza sativa
  Clone ID: PAT_MRT4530_22806C.1
cccacgcgtccgcccacgcgtccgcccacgcgtccgcccacgcgtccgcccacgcgtccgaataaattgggctgagaaggagtctcatgtagatgaggacgaaatggccaaggttaagacagctttcgttggaaatttaccagcaaatgttacagaggagtatttaagaaagctttttgaacattgtggagaggtagtacgggctgcagtcttatggaaaggacaatatccagttggattttgttactttgttcag

SEQ ID NO: 17123 - DNA, 737 bp, Oryza sativa
  Clone ID: PAT_MRT4530_22807C.1
ttttttttttttttttttttttttagtcaatttcgatcccattctgaaggggttgatgttattccacctatccaaaacaagcccttaatagttgaagcaaacaactaccactcacggtttgccctacaataatatttacataatacatcttaaaccctctaactgtgctatagagtggatcacatccagtcaacataatcagaagacgattttgtttctcttttcggcttcttgtacctgttattctcaaacattgcttttgataagagagaatccagaactgctgcttcagagaggtcgtatggagtcatcaacacacttgcaagaatttcctccaaaatagtacgttggcagggcgtgacatagtatatgcactttcttggacactgcccaacagcaagttggacattgtagtcatcatagtgaccttgagatgatgcatgtgctgtaccagtgtcatcggcaaatgcaaacgcgtgaggtgcccttttaacacaagaatacgggcatccagtgccaatgcatagaagttcattcacaaatatgtcacaagatgcgcactcaggttcatcaaatggatcaacattattcctttcgatcatcattccttggttaccagataatatctcataggcctcaagaactcttctcattattagatctgcattctctgtgtccttgcaaacatctggatggaattcctttacctgtagcttgcgatttaggaaaaacaccat

SEQ ID NO: 17124 - DNA, 499 bp, Oryza sativa
  Clone ID: PAT_MRT4530_22808C.1
tttttttttttttttttgttaccaatcaactttcatttattgatccatttccactaagaatgacaaatacatgttgcctgcaattcgagtatataaatttaaagcggaaaaaaagaacaacttgatggacgactttaaagtctcttttctgaagaaaatactatacaaaagacaagtaatacaaaggacaaaatgctacatgccaaaatttttgtcattcgtgagcaaaccatttctttgtaaaacctcagcagacctggaagtcagaaagacttgttctaacttccaatattcagttgcctctgaagtctgaacccccatcgaattgaaatgtatgttagaaaaagaatgtcaaatgagcctcaaaaggcatctccaggcacctgggtcgatgttacaatgatgcttcaaacagaattctgaaggcgcaggttccaactgcagtcatttaccagagttgccaagctggtacctttttcttatctatatattctcatgt

SEQ ID NO: 17125 - DNA, 210 bp, Oryza sativa
  Clone ID: PAT_MRT4530_22809C.1
atggatatcggcaagaagcacaacgccttgttcccgaggaatgcacttcaggaggattccattagccgcgcgccgatagagggtcccttctaccagcacgtagcgtttggagatgcgatggacgcgttcactcccttcgcggtcctcgggtcccgaggcctggactccgacgggcctcgggggccggtcaggcgcatccatctcccctaa

SEQ ID NO: 17126 - DNA, 699 bp, Oryza sativa
  Clone ID: PAT_MRT4530_2280C.1
atggagggagagaagaagagcgtggtgctgatcaactgcgcggtgagcatgtacggcaaccgcgtccgcatcgcgctggcgaggaagggcgtggcgtacgaggagaagccggagaacctcgccgccaagagcgccctgctcctctcctccaaccccgtccacggccaggtccccgtcctcctcgtcggcggcaagccggtgtgcgagtccctcgtcatcctcgagttcatcgacgaggagttcgccggcgtcggcgagccgctgctgcccgcggggccctacgagcgcgcccaggccaggttctgggcgtcctacatcgacgccaagctggcgccgtgcgccgggagggtgtggcggtcgccggcgggcgccgcgggcgcggcggcggtggaggcggcgaggggcgagctggtggcggcgatgcggacgcttgaggcggagctcggcgggaggaggtacttcggcggcggcggcgaggcgctgggctacgtggacgtggcgctggcgccgttcacggcgtggttcgcgacgtacgagcggttcggcgggttcagcgtggcggcggagtgcccggagctggcggcgtgggcggcacggtgcgtccgggagaacgcgtgcgtggcggcgtcgctgccggatcccgagttcgtgtaccagttcgcatgcggcatgaggaagcacttcggcctcgacggctga

SEQ ID NO: 17127 - DNA, 440 bp, Oryza sativa
  Clone ID: PAT_MRT4530_22810C.1
ataaatatatataacccgagcttccatatattgcagtcacatatgcctcacccaacaacatatattcgtaacaaataccactcttacatcaagtcagagagagatcacgtgaaacaaaaacaaaaccatatcacggactgtaaaatcaaaagactattaacaaactgggaacacactaaacaaggtgggagacatcatccaatcaaagatgaacaattaaacaaggctatatatgacaatcacagcttatttgccaccagactcctcacaccccgaaggcttgtaggctatgaagctgatgagctacacctgcctgactttgtccaagcccatgatactgaccaatgcatcaaggtactccttcttggcctcctcgagctccttgaccacctaagtggcgtcagtgcacccgaacatgggcagattccacatggtccact

SEQ ID NO: 17128 - DNA, 804 bp, Oryza sativa
  Clone ID: PAT_MRT4530_22811C.1
atggatgaaggttcatcaccggcgtccacctcggccaccgccgccgccgccgccgcaaatttggagtccaccagtttcgacgacggcagaagtcatagctccaagatcacgccaatcgagctggtcgtcgtcaatcccgaagaaccgccaccggcctctcggtctcgtggtcatggacctcgtcgtcgatcatggcggcggcggccatgtccacccctcgcgaagaaggcggcggccgagttcgtgggcacgttcatcctgatcttcgccatgctctccaccatcgtgaccgacgcgcagcgcggcggcgtggagggcctcgtcggcgtggcggcgtccatcgggctcgccgtggcggtgctcgtcatgtcgctcgcccacgtctccggcgcccacatcaacccggcggtcagcgtcgccatggccgcgttcgggcgcctccagcccgcgcacctcctgccctacgccgccgcgcaggtcctcggcgccgtcgccgccgccgccgccgtcgacgggatcttccatccggcgagccgagggtggatggttaaagagttgatagcagtggcagtcggtggtacagcgatgatgaacgttcttgtcgcagggtatgcgtgtgaaatcctattgtgcatttacaacgttcttgtcgcagggccgtcgacaggagcatcaatgaaccctgcaagaacacttggtacagccattgtcgcagggaattacacccagatatgggtctacatggtttctacccctctgggtgcaattgctggaacaggggcttattttgcaatcaagctctag

SEQ ID NO: 17129 - DNA, 210 bp, Oryza sativa
  Clone ID: PAT_MRT4530_22812C.1
atggagggagtaccagctgctggagccaatgcttccagggaggttggcggcgctgctgctttccccaccctcacgcgaaccaactacacccagtggtcgctgctgatgaaggtgatgctgcaagcccgtggcctttggcaccccctcgagcatggtgaatgcgatgagcaagaagacaggatggcaatggaggccatggggatcctctag

SEQ ID NO: 17130 - DNA, 792 bp, Oryza sativa
  Clone ID: PAT_MRT4530_22813C.1
atgcgctcggaagggtcacgaccgttgggaatttggagggaagagggtggcagaaggcgcaggttttatagtgtcagaggcgcgcgcgccgaggccgccgactcgcggaggccgcagtgcgacctgcggttcagcggttcagtggcagtgaaggcggcgacgtggacaaggcggcccacgaaactcgtcctcggcgcgggaggacggagcgtcgccacgacggctagagatggcaagggagcgacggatccggtgctcccggagatggatccggtgtttgccaagacggagacgcaggcggcggtggagcttggtcgcgagagcgaagatgacggcgccggcgtgggcagcggtgccgatggcgacgcgcggcaggaggtcgcaacggcgcggcgtggacaggagggcatggacgggaggtgcggtgcggcgtgcccgtgctggtggcggcgcgagggcgacgccggtggagtcactgtgacgccgtggacggcgatgcatgaggctcgtagcgacacgtggccatgcctggcaggggtctgcgtgaggaggaagccggcatgggtcgcttgggtgctagcagtagcggtggtgactgacgacggaatcaccggtgaaagccttgccaggccatgggccggcatgacgacgacgccattaggtgtcgttccccttcttggaggcgtcgttttggcgttgacatctcctagcatcaagaacctttcgcgcacaatggtagccatcgatggactcctgcaatgtctccaaagccctacaagtctagctgtttga

SEQ ID NO: 17131 - DNA, 537 bp, Oryza sativa
  Clone ID: PAT_MRT4530_22814C.1
atgacggcggtagtgctggatctggagctcccagatccagtttctgcggcggcacccctgctcaatcctaggcggggagcagccggcgtgggcagcggtgccgatggcgacgcgcggcaggaggtcgcaacggcgcggcgtggacaggagggcatggacgggaggtgcggtgcggcgtgcccgtgctggtggcggcgcgagggcgacgccggtggagtcactgtgacgccgtggacggcgatgcatgaggctcgtagcgacacgtggccatgcctggcaggggtctgcgtgaggaggaagccggcatgggtcgcttgggtgctagcagtagcggtggtgactgacgacggaatcaccggtgaaagccttgccaggccatgggccggcatgacgacgacgccattaggtgtcgttccccttcttggaggcgtcgttttggcgttgacatctcctagcatcaagaacctttcgcgcacaatggtagccatcgatggactcctgcaatgtctccaaagccctacaagtctagctgtttga

SEQ ID NO: 17132 - DNA, 873 bp, Oryza sativa
  Clone ID: PAT_MRT4530_22815C.1
tgccttagccatgctgcccagtgcccatacagaattgtgactgtcacccacagggactgccagactagacaaagaaaactcatcctttggttgattactatcccgctggacaacactaccaatcctcgacaccttgccacccctggagctcgccgctagaaaaccgggcggcaagccaggaaggcggcgacgtggacaaggcggcccacgaaactcgtcctcggcgcgggaggacggagcgtcgccacgacggctagagatggcaagggagcgacggatccggtgctcccggagatggatccggtgtttgccaagacggagacgcaggcggcggtggagcttggtcgcgagagcgaagatgacggcggtagtgctggatctggagctcccagatccagtttctgcggcggcacccctgctcaatcctaggcggggagcagccggcgtgggcagcggtgccgatggcgacgcgcggcaggaggtcgcaacggcgcggcgtggacaggagggcatggacgggaggtgcggtgcggcgtgcccgtgctggtggcggcgcgagggcgacgccggtggagtcactgtgacgccgtggacggcgatgcatgaggctcgtagcgacacgtggccatgcctggcaggggtgacggtcattgactgggtttgggtgctaaagggttggtgtggtggtccgacgatggtcgttgtacacgatggttgtgtggacctttgaataggaatcaccggtgaaagccttgccaggccatgggccggcatgacgacgacgccattaggtgtcgttccccttcttggaggcgtcgttttggcgttgacatctcctagcatcaagaacctttcgcgcacaatggtagccat

SEQ ID NO: 17133 - DNA, 681 bp, Oryza sativa
  Clone ID: PAT_MRT4530_22816C.1
atggggctaaacgagaagccattggtgcctccgttgtctccaacgccggtggacttccgagcccatcaggtgttcccatccaagcaccacgattttgacactagcaagagtcgtaacatctctggtagtgtcgccatcggcagtgattctgaggaggagtacttggcgacttctctcttgatgctcgcacatggcattcgggacgagaccaaggacatccgagggatgggagacgtaaaaggtgtgggtgttgacactttggagctggtgaaaccaagccaacgggcttatgagtgctcggtgtgtggcaaggtgtactggtgttaccaggcgttgggtgggcacatgacgtgccaccgcaacctatttgcacaagtggtggccggtgatgagttgtcctccgataggaccatggtggttaaggggcacaagtgctctatctgtcgccttgagttcccatctgggcaggcgctaggaggacacatgcgggtgcactatgtgggtggtgttgaaggaggctctgtcaaggagaagaacgttgtgaagaccaaggttacaggagcactgaagctagtgttgaaagactttgacctgaacgtgcctgttgtggcaacgatggtgggagacgaggctgagagctcacattcagaggccaaagcgcggatgatgacactcccctaa

SEQ ID NO: 17134 - DNA, 402 bp, Oryza sativa
  Clone ID: PAT_MRT4530_22817C.1
atggcgcaccattgcttaaccgtgagcttcatggggtcccaatccatagaggaggcagaggacgctggaggggctgcggcagttgccagtcatccatggctcaacgtggtcagcctagttgtagatctcgtcgatgacctcgtgcccaagagcaaaggcaggcccattgaaaatcctgccggcaccagaaaaagcaaaggacacactgctcagtgctcaccgccgccgtacggagccgcgacaactccgtgcggcggcatgatcagcactgccgccgagccgtgggtcgtcatctggaagatcctggcggagcctaaagaggtccaccatctaaatctgccaaagggcacgaagccggcggtggacgaggctcagtggtggcagctcagcgacagcggatag

SEQ ID NO: 17135 - DNA, 1866 bp, Oryza sativa
  Clone ID: PAT_MRT4530_22818C.1
atggatcttggcaagtcgacttccaccaccgtgaccctgaagaagctccaagaggagggcgccctccctggccgtgacaaggcagagagggaagcaggagtcttgaatttctatgggctttcacttttgcatttgaatcccagctccattgctttccttagcgttttcgtgcatctttgtgaggcctacattggggtagaaccttttcttgatctgttccgtttttactatgagttgcgctggatggaacccaatagggtgtctggttgcgtcgggttccgacttcgtgacggaatgaagttgcgctatgtccctttccagtgtccctcttctcgtagtaaatggcggaacaggtggttttatctggaaatcaaggattcgaatccggtcctcgttgttcctgtggaacaaccggataagattctggtttggaccgccaaaccccctttgaccccctctctccaatcgtttatcgacatcatcgatgatctccgagaacggggcttatcgggatatgaagtcgttgcagacttcgtcggtctgagcagcgacggcgtggagcggcgcgttggtcaagtgatgatcagcgacccgacaaccgcgagcgacatccccgtgcccctttgcgaaaggggagcggtagaacgcgacgaagcaatcaatgtggcggcgtctctgaaggagaaggtcgtccaggaggcgtccgacgctgccaccaccagtggtggcaaagctccgactaaggcgaggaaattctcgtctgtactcgggaatcgccgcaaggcggaaactcccttggcttccgacgcgtctcctccgccagctcgacgtcagcgtattgtgacgatccgcgagaaggaggcgaggtcgaaggctgctcggggcaagtccggggggacatctagtgcgtcccctgtcacggcgtcaacggatgttgtgcccgtggtcgggagtcgggaggcaacgccaagtgactccgtgggcgatcccgtcgggggccgtggtctgtcggaggctgtcctcacctgggaggagctccatgtcgagatggggagtcttctcgaggccggtgctcgcggcgttggccgcgaggtctcggaggcgagggcagagacggcagcggccaacgcacgtgctgaacgtctggtgcgggagctggccgaagcccgcgaggacctcatgaagatgagggagctggtggccggcaacgagcgccagagcaaagggctcgaggaccgcatgtcggaactcggggataacctctccgagatccgtggttccctgcgggtcacttacaccggtctccaccagctcgcggtggagtgcggcgtcaagtcgatgattccggagaaccccgacgagttttcactgacttcctcccttgcggagctggcgtcggcgatgggggaaatcccctccaagcatgctgccaggatcgcagaggagacgtccaacggtatctacaccgaggcatgtcacgtcctcgcatgcgtgaagttgtcgcgtcctgaactcgatcttcgcgaggtcttggatcagggagcggcaagcgacgcgcgcaaggaggtgatggaggaaatcggtgacctgggggaatctgtcctccccctttttgaagaagatgctgatgacgaggatgtccagcagcgtgggcagcctgagtcactggcaatgattctggtactcgagtttgaaccacgcgcctcacatgacgtcggggacgaaactcttgatgcggaggtcgaagtagcggcaactgctgtgggggttttccgagttgtcttagtgatcatcacgtttagcagatctcgaggatgcccttgcgacccaagatcgtcgtatccaatactggaagacgaaatttga

SEQ ID NO: 17136 - DNA, 639 bp, Oryza sativa
  Clone ID: PAT_MRT4530_22819C.1
cccacgcgtccgctttcctcttcgcaagcctcccccaccttcatctcctcctccgcctcctcgcctccccaccccttctagaaccttccagaaccccagagaggcggcgagatgcacggcgtcctcacctccccgtgcctgcgcccccctcccctcctccgccgcgccttcccgagccccgccacccgcctcctcccgccccaaaccctagccctccgcccgctccccctcccccgcggcctccgctcgtcgccgccgccgccgcgcgccgcggcggaggcggcggcttcggcggtgggcgggctgctggccccgctctcgacgctggaggtcggcctgcggagcgtcaacctcgcgccgctgcgggcgccggtggccgcggcgatgtcggcggtggtgcggtggctgggggtgtacagggaggtgctgctcgtcggcgtgctcttctcgtggttccccaacatcccctgggaccgccagccattctccgcgctgcgcgacctctgcgaccccttcctcgcgctctgccgcgaggtcatgccccccgtgttcggccgcaagctcgacctcagcccgctcatcgcgttcatggccattgacatcatcatcatgatccttcgcccgcagccacgcatgtga

SEQ ID NO: 17137 - DNA, 987 bp, Oryza sativa
  Clone ID: PAT_MRT4530_2281C.1
tttttttttttttttttcacacaatttatggcatactatcttagattctgaatagaatttgtggcacaaggtctaaacacaggagttcaaaacttaaatttttcatgagatcccaataacagtggctggcacaatgtttcatatttagggacatcaaacatcattgatcaaaatctcaactgatcaccaccaaaatgatctacgcagcagcctccttcttaagcttagcaagctcctgtctgatagcgccgccacgcttgatcttcgccaacataaccttgaacctgtcaaaagtcgttgagggttgctcttcttcttatgttggaaactatttaacagccatcagtcatacaaaatctctaaagcacaaccatgctcaatttaaatatgaaataggttccattaaacagtagtactaattctggctctaagaccattgaaacatattgctgatccaacttggaaccaaaaactcaacatggcactactaagccgcggcagtcttcttgagcttcgcaagctcttgcctgatagcacctcccctcttgatcttggccaacataaccttgaacctgtcaaagtcattgagtgacgctctcctcttctggacaattagcttcttgccccatgagctattctcccacttgttcttaacatcagcctcctccatagccttaatcaaagttgtcttcttcgggacacgtttgatgtcaatcttgatgtcagtcagggaaagcctcttgaagttgatctggcacctgaccatgtcaggagcatccacaagtgcccggttctggtcgacgacatcaacgatgacgacgaggcggccgtagtccttgccgtagttcaccagggccacccgcccgatctccacgaacctcttgaacggcattctcgcggcggcggtcgggagaagcggcggggggggggggcgcggagaagcggaaaggcaaagaggaactagcctgcccgggccggtagagcgcc

SEQ ID NO: 17138 - DNA, 493 bp, Oryza sativa
  Clone ID: PAT_MRT4530_22820C.1
ttttttttttttttttttttacccagtgaaaatgactaatgcaagagatagtgagcaataataatggatgtccttgtcacaaattaagagatcgattgcattgatgagctcggtacaggtatactcagccgtttatagaaggaagaaaaaaaaaggcacaatcaacctttacgatccaattgaggaccaggcgttcttttgattatatatgtatacacaggtcagttatgcagcaaataccaatgttaggttcgtattggcagatgcttgcttcaaaactgagagttggaaatctttccaggcatttatcgacctggattccctgaaccacatcatcatatagagtcctgtagtgatgactgatgaaataaatcattatcccaatttctgttttgagttacgcaaacacaccaagtcctcctagcgtaaccgtacagtcagttggtcacgttgattgccatgtgggctcgggaataaaagaacgtttcacttc

SEQ ID NO: 17139 - DNA, 174 bp, Oryza sativa
  Clone ID: PAT_MRT4530_22821C.1
atggaggccaccgtctttgctccccaccaggtcgccatcctggcactgccagcgcaagatcatagagttgagcaggaatggaccagaagctatggctcgctaactggcatattgaacaggagcacaaccttaggagggatagagtcagatcatggctctctgatgattttgtaa

SEQ ID NO: 17140 - DNA, 688 bp, Oryza sativa
  Clone ID: PAT_MRT4530_22822C.1
ggcggcgactccaggcagtggcctcccggcccccgctgcccccgcgcccgtccctccccgtccgtccccggccgcgcgcccgccgcgtcccggccgggcccccgtcgccctccgtccgcgcatatcgtggcgcggtggcgccggcgcgtcctccgccccgctccccccgccgggggggcggcgcctgtctgcgtgttgtttccttacagctgcggccccccgcgtcgccgtcggcgccgcgttcggctggctgctgcggctccggcgtggccccgggtgcggccaccagccgctcttctttgtcctttcatgtcctcgctcgcctgtcaggggacactggtcacccaaccactggagcctattcagttttggaaggtttctgatgccggagagagactctatcctgctcaaggtccacggttatcttctccatcttaggcacagctccgtcagtgaaggtgattttgtttatggcacgggcagatcgacagcaagtaacggtgagcttcaggaactcttctttcttgaaggtaagtttgctttcattgtaagaactgtccaagagctctaggcacgggaaaatgttttaaacactcgggtggacgttcacccgtttcttgcatgtcatctaaatggttataaaaaattttcaagtttggttttttggcaaaaaaaaaaaaaaaaaaaa

SEQ ID NO: 17141 - DNA, 557 bp, Oryza sativa
  unsure (1)..(557): unsure at all n locations
  Clone ID: PAT_MRT4530_22823C.1
tcggacgcgtgggcggccggcgcggcgcggcgaggcggattcggcggcganttccttcctagggtttggtcttcctcctcccctccggcctcctctcgcaccgacggcatcgccccctcccttctagatccgcctcgccatcgaaaaccctagacgaccacgagccgccatgaccgtcccccttcccaccacccgccgccgatggcggcatcgacgattacaacctgcgattaccgtcatgtcgtgcggttcgttcgtctccccctccgcggcgacgcctcgagcaggtggagtttatgttattcatacatgcaagttatgtcaatgacacctaactggtttagtttagatccttgtgtctcattgtctcctttgcaagacagaagttctatttgattaaagcaatgctgcaatgtatgttgattgtgaggcaatgactgaaaaggatgattatgagagcaatactgaatcacctgtctgtttgtattagtatgtgagtgtgacaataatattaatggcaactatatccttcgtcaaaaaaaaaaaaaaaaaaaaaa

SEQ ID NO: 17142 - DNA, 270 bp, Oryza sativa
  Clone ID: PAT_MRT4530_22824C.1
cgttgtgttgcagatatggcgaccaagttgatagcagattatgatggtggcccaccggtgaggagtatcaaagcagggtcttgcaactatatcctgtacccaggcagcgcgtgttttcaggacacgtgcaacacgttctgccaacgcatgcaggattcagccacacgacaacgtgtccgcctctggcctctgcacttcccagggatgcgagtgttcatcagcgcccagatcatcgacgtcatacttaaaggcatcacgccggtgaattag

SEQ ID NO: 17143 - DNA, 393 bp, Oryza sativa
  Clone ID: PAT_MRT4530_22825C.1
atggacaaacctgaaacctggcacggagaaggcgtcagctatgacacatgctgccgagacgcatcatcgtctgcgtctggtgccgtgcctatgtgcatcatcttcaaggcttcaaccgtgcgcggcgcacacgcacgcaaaggtaccagtaacgctccgccagtgcgaattcccaacgaccaatcggttgcggcagatagcctgacgccacctatcgggagaaacttgcactggcaagccaacgcctttgctcttttcggcctcttcctcgtagtcgtagacatgggaggggacaaatttgagagatgtttgaaaattctggaattctggaaactccggtccatgaatatctggacgatatcagagcagtactgcctgttgaatgatcaatga

SEQ ID NO: 17144 - DNA, 564 bp, Oryza sativa
  Clone ID: PAT_MRT4530_22826C.1
actattgagcttattgattgtttagttgaactactagtatttgtaacattgtcatttgggtgaacctgatgagctcttgtcttcgttcactgtgccaattttttttttccaatggcaactgggcagtcaggcagtggattgaatagatcttgcatggtcactacttaatgtagctagcaccaattgatgtttagaaattgagcgcttttgttggccggcctgatggaccactgttcgagctcaaagcaatagtctgccattatgtcgaaatgtgtggttcgtcttaaccatttgatcataatctagatggaccatgttgaggtggtattgtgggagggagatttcattcatggttgtctccaaagaataaataatttaaatttctcgcatgccttgaaatgtccctagataggtactttacctgtgaagagataaatagtacattggttaggaatataacaactaatttgatataaattaatttgcttcggattaatttgtttgttactttatatcaccattcagtggtagatgttttatgatgtccagaaatcagatgattga

SEQ ID NO: 17145 - DNA, 1449 bp, Oryza sativa
  Clone ID: PAT_MRT4530_22827C.1
atggcgtaccagggcatcgaccttctctcgacgaaagccgcaggcgatgaccacggcgagaattcatcgtacttcgacgggtggaaggcctacgacacgaacccgttcgacctgcggcacaatcgcgggggtgtcatccagatgggtctcgccgagaaccagctttctctggacctgatcgagaatgagcaagaccaccccgaggcatccatttgcacaccggagggcgtctcgcagttcaagaggatcgccaattttcaggactatcatggcctcccggagttcagaaaggcgatggcccagtttatggggcaggtgaggggaggcaaggcaacgtttgaccccgaccgtgtcgtcatgagcggcggcgccaccggcgcccaggagacgctcgccttctgcctcgccaaccccggcgaggccttcctcgtgcccacgccatactacccagctttcgaccgcgactgttgctggaggtcaggaataaagctgctgccgatcgagtgccacagcttcaacgacttcaggctcaccaaggaggccctcgtgtcggcgtacgacggcgcacggaggcagggcatctccgtcaaggggatcctcatcaccaacccgtccaacccgctcggcaccatcaccgaccgcgacacgctggccatgctcgccaccttcgccaccgagcaccgcgtccacctcgtctgcgacgagatctacgcggggtcggtgttcgccacgccggagtacgtgagcatcgccgaggtcatcgagcgcgacgtgccgtggtgcaacagggacctgatccacgtcgtgtacagcctctctaaggacatcggcctccccggcttccgcgtcggcatcatctactcgtacaacgacgccgtcgtggcggccgcgcgcaggatgtccagcttcgggctcgtctcgtcgcagacgcagtacttcctcgccaggatgctctcggacgaggagttcatcggccgcttcctccaggagagcaagtgtcggctggtggcgcggcacgagcggttcacctctggcctccgcgaggtcgggatcggctgcctgcgcggcaacgccgggctgttctcgtggatggacctgcgccgcatgctccgggagaagacggccgaggcggagctggagctgtggcgggtgatcgtacaccaggtgaagctgaacgtgtcgcccggcacgtcgttccactgccgcgagcccgggtggttccgcgtctgccacgccaacatggacgacgagaccatggaggtcgcgctcggccggatccacgacttcgtgcgccagcaccagcagcgcagggtcaaggccgagcgctgggccgccaataggcagctccgcctcagcctgccgcaccaccaccacctcagcccagcccatctctccagtccattggcgctcctgtcgccgcagtccccgatggttcgcgccaccagctga

SEQ ID NO: 17146 - DNA, 183 bp, Oryza sativa
  Clone ID: PAT_MRT4530_22828C.1
atgggtggcgtagttccattagaattgctggttgaatcttgtgaaatcaaaggtgactcgatgcctcgggagagtatatttgcggtgatggaccgggagtcgacttggtgggaaggagatgtccgtggtggtcagatatcatgcgtgatacttaggctagagttcaatgcacgtggttggtga

SEQ ID NO: 17147 - DNA, 241 bp, Oryza sativa
  Clone ID: PAT_MRT4530_22829C.1
tttcttttttatttttaaatttattattgttttttcgccgtaccaatctaaatggatttttgcttttgctttgccccgaacgaattggagatcttactacttcattttaaatgaaaagattcgcgcacaggcccttgcttgaaaagggagagaggcacacaatggccaggctcccagggggcactggtgcaacctcaggccgaggcaccccaattttctagtactaagtttaacctccttc

SEQ ID NO: 17148 - DNA, 352 bp, Oryza sativa
  Clone ID: PAT_MRT4530_2282C.1
caggcaagagtcctgaccaacggaccttccacgactatgggggttacaagaaaaaaactactgcttactttcaaaaaccgcaccccgtgaatgtacgggattaacattacccctttcccaggggaagccacaatctctttggtggagaaaaaaaggggaaatgattttggtcctccgacccttccccatgccctaaaaacaacagggcccccccgtgtaagcccttctccttaaaagccggccgcaattaccggatttccaacagaaaacccttttcttaaattccctaaatgggggggactgaagaaccccccctcatgaacaacgggattcaaaacctttgcccttttcg

SEQ ID NO: 17149 - DNA, 341 bp, Oryza sativa
  Clone ID: PAT_MRT4530_22830C.1
caacagtaaaaactttatttttacatgttttataaagggaggaggctttaaagtttaaagattcccctttcggggagaggggttttttaatactaacatgctaaaacagggaactgccttttaattatatatatgggttttgggcaaattttgaaatgtagcccttaaaatttaaacctgggtcgtcgtcgtcgtcgcccaaggctgtgggatttcctgaataaatgatggggaggttaaaaccctggacttggattaaggctgttcggggccatccatgaacccgggggtaatcgaagggaaatttttaatgggcaaccttttcaattcctaaaaatccc

SEQ ID NO: 17150 - DNA, 528 bp, Oryza sativa
  Clone ID: PAT_MRT4530_22831C.1
ggagaactagtctcgagttttttttttctcttttatttttcagttattgcagaacgttcttctgatgagaggttggagagctgaagaaatttttttttctcttgctgttcttggcgtgcagtatcatccagacgtttcaaaggagagcgatagcggcgtccatttccagcggatcaacgtggcctaccaggtaatttcaaactagatccgatttcactctcacctcaaagggagtcacagtgaattatcaacgtcagtatcatcagcaacacaccgcaacaactctgaatccaaccaatatctagccaagaacaatagcatattaaaattaccaccactccaaacatttttcgagagtatgatcacttgaagcccctgctctgattttttcacctcgcctcgatagcttaacgttgatcttgtaaacacttgtaacccttcttttttttttctcttaataaaattttatcggacatccaaaaaaaaaatctccgtaaactttttttttaatgaaccgacacaacacag

SEQ ID NO: 17151 - DNA, 405 bp, Oryza sativa
  Clone ID: PAT_MRT4530_22832C.1
atggcattaaatttaaggtccggaaagtctacgacatcaccgaaagatcgggccatgagtgtcgagaggaactcagggtttatcaggtggtatcagagctttcgttgctcgaaagtgcgtaatcacgaaaaggaggagagagacatgaatgacccgccaattccattgttcgcactcaagttagaggcatctccattatctgaagaggacatcaaaggtaaagtaaatggtgctgaaattaatcaaggtgagagtgttgtcaacgaagtaaatttgtccatttttcatgttaaagtagagcaaccgttagtggaatcaaatgttgaaattcctttgtcacaagttgatttacttgctgttccttgtgataaagaagagttttatgataatgcttcacttatatga

SEQ ID NO: 17152 - DNA, 412 bp, Oryza sativa
  Clone ID: PAT_MRT4530_22833C.1
ttgacggtcgttaacgatcagttttgactgtcaaaattaccgaaatataggagaactagttatgcttacaatgcatatacatgtcagaataataatattccacaagtattaggtttactaaccttttgtagagaataatcataaagtgaaggaaaatcgacatcaactcaaacgataaatcaatcggacgatgtcaaggattagacttatgcatgaatgggccaagaactcagaattgacacgatgaattgggccaaaattcacaagtctacgaaagagagcaatggaggagaccacctgccgtttttgggccaggttgggccgacccatggttcggccgaaccccccgcagcgccgtttgatccaggtttctcctggatggctgagatggctccccaatgacggttggtgg

SEQ ID NO: 17153 - DNA, 984 bp, Oryza sativa
  unsure (1)..(984): unsure at all n locations
  Clone ID: PAT_MRT4530_22834C.1
tggtccgnattccgggtcgacccagcgtccgatcggatcgggatcgggatcggtgtgtcgaagatgaacgatgccgacgtcgggaagcagatccagcagatggtcaggttcatcctgcaggaggccgaggagaaagccagcgagatctcggtggccgcggaggaggagttcaacatagagaagctgcagctggtggagtcggagaagcggaggatcaggcaggactacgagcgcaaggcgaagcaggtggacgttggaaggaagatcgagtactcgacgcagctgaacgcggcgcggatcaaggtgctgcgggcgcaggacggcgtggtgggcgagatgaaggaggatgccggcaagagcctcctccgcgtcaccaaggacgccaccgcctacaggaaggtcctcaagggcctcatcgtgcagagcctgctccggctgagggagccgtcggtggtgctgcggtgccgggaggcggatcgcgggcacgtcgagtcggtgctggaggcggcgaagaaggagtacgccgagaaggctaaggtgaacctccccaagatcctcatcgacggcaaggtctacctcccgccgcccaagaccgcccgtgacgcccatggccccttctgctctggaggtgtggtgattgcatcgcaggacggcaagatcgtctgcgacaacacgctggatgcgagggtggaaatctctttcaagcaaaagcttcctgagatcaggaagaagctcttcagccagaaagtgtcacaataagcaattttttcgggttcttgatatccaggaataaaacaaangacgtggttcacaaatatgtatatttttgttgtattttggagtactattcccttctgtcagttaaagtgcacaggccgtgtatgcaactagtaaggccaaaagttcatttcagtgaaagcaaatgtctcgttgtgtaaaacactaatatatatctctttgtgtaaaacaccatgagaagttgag

SEQ ID NO: 17154 - DNA, 669 bp, Oryza sativa
  Clone ID: PAT_MRT4530_22835C.1
aaagggtgtcaactgaaaacgatcttgatgggggtgatgcaggagttcaacatagagaagctgcagctggtggagtcggagaagcggaggatcaggcaggactacgagcgcaaggcgaagcaggtggacgttggaaggaagatcgagtactcgacgcagctgaacgcggcgcggatcaaggtgctgcgggcgcaggacggcgtggtgggcgagatgaaggaggatgccggcaagagcctcctccgcgtcaccaaggacgccaccgcctacaggaaggtcctcaagggcctcatcgtgcagagaaaagattcagagatcattgatcaaattcagagcctgctccggctgagggagccgtcggtggtgctgcggtgccgggaggcggatcgcgggcacgtcgagtcggtgctggaggcggcgaagaaggagtacgccgagaaggctaaggtgaacctccccaagatcctcatcgacggcaaggtctacctcccgccgcccaagaccgcccgtgacgcccatggccccttctgctctggaggtgtggtgattgcatcgcaggacggcaagatcgtctgcgacaacacgctggatgcgagggtggaaatctctttcaagcaaaagcttcctgagatcaggaagaagctcttcagccagaaagtgtcacaataa

SEQ ID NO: 17155 - DNA, 255 bp, Oryza sativa
  Clone ID: PAT_MRT4530_22836C.1
atgaagggcgggtttgaccgaggtgggggagctttgactgaggtgtggagtgggttttgccccctgcagggagggaagtttaaccatgttcagaacattgatccagaaattaagcaacatgctcctattcccccatgcatccatatggtgacattgacaaaaacaaattggcagagggattattatattcacatcgcaaaaattaatatcttgtcaactttcagcattcttaaacatgttggagatgacatgtag

SEQ ID NO: 17156 - DNA, 272 bp, Oryza sativa
  unsure (1)..(272): unsure at all n locations
  Clone ID: PAT_MRT4530_22837C.1
aaatcatagtgtaattaggtttaaaagattcgtcncgtaatttacacacaaactgtataattagttattttttcgttaatatttaatgctccatacatgtgttacgttcgatataacggggcaaaaattttttgccggtggtggatntaaacncccccaagttntcattccctgtgtttgaactcaagttgatttcctgttntgaaaaaaaaaaaaaaaaaaaaaaaaaaaaaaaaaaaaaaaaaaaaaaaaaaaaaaaaaaaaaaaaaaaa

SEQ ID NO: 17157 - DNA, 1158 bp, Oryza sativa
  Clone ID: PAT_MRT4530_22838C.1
atgtccaaggaggaagaggagagggagaaggtgacggcggcggcggcggcgagcgaggtcgtcgtcgtcaatggcggtggcggcgaggaggagggggagggggtgagggcgctgcacgcgcgggtggaggcggagtgggggccggtgatgcagagcgcgtgccagacggcggcggcgagggcgctgtgggggcgcgcggtgcgcgacccggcggccggggtgctcgccggggggaggttcctggcggcgctccgggagcggatgcggcgcgacgaggaggccggggcgagggaggtgcacggcgtcatgatcgccgtccgcacgctctggttcgacgcccgcgtcgaggccgccgtcgccagcctcggcggcgccgcccaggtcgtcctcctcggcgctgggatggatgcgagagcttatcgactgagctgcctgaaggagtgcacggtatttgaacttgacttcccggagctcctagaaatgaaaacagatcttcttcacgaagcaatgagctctgcaaataatcagaaactcaccatgatggcaaaatcattgactagggttcctgccgacatccgagatggagactggatcaccaagctacagagctacggctatgttcctgaaaggaacaccatatgggttcttgaaggcatcctctattaccttcaccatgtccatgcaatgcaagtcctcgaaaccattgtggcctgccgcacctcagtccacactgtcctcctggctgacttcatgaacaagaatgcagtatcgctctctcgggcaatgtaccatttctaccatgacagccctgatctcctgctgccttccattgggttctctcaggtaactttgtcacaaattggagatccacaagcacattttgggctgctaagtcacccgcagaacctgtttgataaactgaggagattgccaagatcagtggagacaaacccagaggatggcacaccatgctgcagattgtacttggtagaagcctctgcttttccagatgaccagatcactaaacagggcatttaagtccattgataaggacgcccccccatccttcccccctggctgcctgaggtcttcaccacccttcatttcaaacctgatgttagtatgtgacttgtatttgtatagttcccattcagttcc

SEQ ID NO: 17158 - DNA, 342 bp, Oryza sativa
  Clone ID: PAT_MRT4530_22839C.1
tataggatggatttgtgagtgtgcgaactgaaaagggaagcactaaggatgacctgaggctgcctactgatgataacctgcttagagagatcaaggatggattcggagaagggcaggactctgtggcgacagctatgcctgccatggcatatatgctcccctgcgatggcgccgacttttctcggaagttaagctaccctgaaccatgggcacagtactcgtactaggacttttgacacctgttaccctgtgaaatcacatatctagcattgctgcatttcttaacggatcatatcttggtggaactgatcataaatattctcaagaggattgcatggtcaa

SEQ ID NO: 17159 - DNA, 163 bp, Oryza sativa
  Clone ID: PAT_MRT4530_2283C.1
tcgttaaaaccccgtaaaaaaccgcaagtggcgttgttacgatacgattcagcggccttatctcccaccaagcaggcagatatagagagttcaccataatgtagaattcagttgctggcatatcctgtctccacctatccttataattacttgacgggggagc

SEQ ID NO: 17160 - DNA, 2607 bp, Oryza sativa
  Clone ID: PAT_MRT4530_22840C.1
atgatggtgacatggccgtggcgcgctctaccgttggcggccgttctcttcctcttcctctcgccggccgcgtccgtcgatacggtcaccatggaggctccactcgcgggcaaccggacgatcgtgtcggccggagggaccttcacgctcggcttcttcacgccggacgtcgccccggcagggcgcaggtacctcgggatatggtacagcaacatcctagcgcggaccgtcgtgtgggtcgccaatcgtcagagcccggtggtcggcggctcgcccacgctcaagatcaacggcaatgggagccttgccattgtggacgggcaaggcagggtcgtgtgggcgtcgccggtgatgtcggcttctgtgctgagcgccggcagcgccaaggcgcagctccttgacaacggcaacttcgtgctgcggttcgccagcgccggcgttgcgtggcagagctttgactacccgaccgacactctgctccccggcatgaagcttggcatcgacttccgcaccggccttgaccggtacatgaactcgtggagggcggccgatgacccgtcccccggagagtactccttccggatcgacccgagcggctcgccggagtttttcctgtaccggtggtccacgaggacgtacggcagcggcccgtggaacgggtaccagttctccggcgtgccgaacctcaggacgaacaccctcctgagctaccagtacgtgtcgacggccgacgaggcatactaccggtacgaggtggacgacagcacgacgatcctgacgcggttcgtgatgaactcgtcggggcagatccagaggctgatgtggatcgacacgacgcggtcgtggagcgtcttctcgtcgtaccccatggacgagtgcgaggcctaccgcgcctgcggtgcctacggcgtctgcaacgtcgagcagtcgccgatgtgcggctgcgcggaggggttcgagccgcggtaccccaaggcatgggcgctgcgtgacgggtccggcgggtgcatcaggcgcacggcgctcaactgtaccggcggcgacgggttcgccgtgacgaggaatatgaagctgccggagtcggcgaacgcgacggttgacatggcgctgggcctggaggagtgccggctcagctgcctgagcaactgcgcgtgccgcgcctacgccagtgccaacgtcaccagcgcggacgccaaggggtgcttcatgtggacggccgatttgcttgacatgaggcagttcgacaacggaggccaggacctgttcgtccgcctggctgcgtctgatctccccaccaattctgtttcagacaattcacagacagctaagctcgtcgaaatcattgtcccatccgttgtcgcactattgttgcttctagctggacttgtcatttgtgtcatcaaggcaaagaagaacaggaaggcgatcccatcagcactgaacaatggacaggttactcctttcggacaaagaaaccatactgcttcagcactgaacaattgggagattactcccttctggcaaagaaaccatgttgctgcatccaacgatgcccaggacaacaattccatgcgtcctgctggtcagggaaatcaccaggatttggatctgccgtcgttcgttatagaaaccattctttacgccaccaacaacttttcagctgataacaagcttggccaaggaggatttggccctgtctacatggggagacttgacaacggacaagatatagctgtcaagagactgtcacgtagatcgacgcaaggtctccgcgaattcaagaatgaagtcaagctgatagctaagcttcagcacaggaatcttgtcaggctacttggttgctgcattgacggttcagagaggatgctaatctacgagtacatgcacaatcgtagcctcaacactttcctgttcaatgaagagaaacaatcaattttaaactggtcaaagcgattcaatatcatcaacgggatcgcgcggggaatactatacctgcatcaagattccgcgctacggataattcatagagatcttaaagcaagcaacattttgcttgacagagacatgaaccccaagatctcagacttcggtgttgcgagaatatttggaactgaccagactagtgcatataccaagaaagtagttgggacatacggatacatgtctcctgaatacgcgatggacggcgtattctcgatgaaatctgacgtcttcagcttcggcgtcctggtactggagattgtcagtggcaagaagaacagaggattctaccacaatgagctcgacctgaacctccttagatatgcttggaggctgtggaaggaaggtcggagcttagagttcttggatcagtctatcgccggcacttcctcaaacgtgacggaggtgctgaggtgcatccagattggcctgctgtgcgtccaggagcagccgaggcacaggccgaccatgtcggcggtgaccatgatgctgagcagcgagagccccgcgctgctggagccgtgcgagcctgctttctgcacggggaggagcctcagcgacgacacggaggccagccggtccaacagcgcaagaagctggactgtaacagttgtagagggcagatag

SEQ ID NO: 17161 - DNA, 1203 bp, Oryza sativa
  Clone ID: PAT_MRT4530_22841C.1
cagaaagctaagctaaagtgctaaactaagcacgagaaaatctaatcaaccaagcttagattagatcattagctatatatagctaggcgatttaatcatccacgagctagcttattagctaagcagtagcagcagcagaagatcgaagatggtgaaggagttcgtgcaggacgaggagaagcagcggctgctgctggacgagcacaccgagaagcacttcaccgccggcgaggtggtccgcgacatcatcatcggcgtctccgacggcctcaccgtgccgttcgccctcgccgccggcctgtccggcgccaacgccccctccgccctcgtcctcaccgccggcctcgccgaggtcgccgccggcgccatctccatgggcctcggagggtatctggcggcgaagagcgacgccgaccactaccaccgcgagctgcagagggagcaggaggagatcgacaccgtgccggacacagaggccgcggagatcgcggacatactgtcgcagtatgggctgggcccagaggagtatgggcccgttgttaactccctccgcagcaaccccaaggcctggctcgaattcatgatgaagtttgagttgggactggagaagccggaaccaaggagggcgctgatgagcgcgggaacgatcgcgctggcttatgtggtgggtgggctggtgccactcctaccctacatgtttgtgccgacggccgaccgagccatggccacctcggtcgtcgtcacgctcgccgcacttctcttcttcggctatgtcaagggccggtttactggcaaccggcccttcatcagcgccttccagaccgctgttatcggcgctctcgcctccgccgccgccttcggcatggccaaggccgtgcagtccatctaagtactgtagccggagctccggctgcaggcatccaagtaaatgtaattaatttagcagatccaataagtattgcagaaatgtatgtataagtatttatgtacgtttgctgcgtgcttgtagtgtattagatgttctggaggtgtatccgtagttagccctaagtgtaccatgtacacgagtgtaatcactcattttatatcgtcttctattttggctcccttttttatattcggttgggattaattaataatgtattgtcgatttgtaagcaatgatgtgctttgttatctatacttacttaatttaaaaacaaa

SEQ ID NO: 17162 - DNA, 1787 bp, Oryza sativa
  Clone ID: PAT_MRT4530_22842C.1
aggatcttctcccttgtgttcttgctgcttttctgctccatgtcctgctcttggagatggccatggctctggctctgagctgtggcaggaggcagagagggaagaaaggcggcggcggcggcggcgactgcggcggccgccatttccatgtccactaccatcttcctcgccgggtctgcgcctcctcgtttgttcccaatttgctgcctcgttttttctcgctgctgtcagcttgcgtgctggttcctcctgtgctgttcttggctgtgcttgccttcctcgtcttgtttctctggttcaccttgctgtattttattcgctccctgtggaacaaagacatcaacggtgagaccttcgagaggagtagcaacgatcatggcagcgatgctgataaacgccttggagaaggcgttgcagaagaaggaaaggcagagaagaaaactctgaagatttcgtctgaagattgtgctagaaggtttgagatagaagaggtactacatgttaattctgatgattctcaaaacttgcctagtatggtgtcatctgatggttgcctgaactgtaagatgcatactgatgatgaaaaactcatcaaagaggtgactgtctttgagataaaaagaagggaatcgggagctgctattgtctgttctgatggtttgtcacaaaagcgtcagccacgagatatgtcagttgattggtttgaggaagaaactaaaagtggagatatcatcaaatcaggtgattcatctccaactgtactgtcaactttttcatctgaatttcatgatttctctgacaacaatgaagtggtagggttggccacggattttcttgatgtaaacaatcaaaataaagcagtattgctagatagttcatctcatcgtggtatcatggacaatcattgcaaatgtggtgaggaattttcttctgataaggaggctccagcttaccatttatttgaaaattatgattttgttgacaagcatgaaacaaaagaggtggtacttggtgatacagtagtcttgacctttgtagatgatttagccaatgatgactctgaatatagggaggatatttcagaacaaaaggatccaaataatttatcaggattgcttgataacgttgcagatattttttaccagcagcaagaaatacataaggtggttgtttctgacgacaacaagccacctgaagttttgttcctcagtggaaagcaaactgtcagcagttcaggtgaatttagttctcctaatgagaatggaacatcaggatttccttttgattctgtttgtgaagataaaaatggaacagtggcctatcccagcgtagcatcccattataatatcggtattgaagatgacaaatgtgaggatcatactgacaacaacatagaggaggcatcaagtatcgcatctacaaattgtggttctgctgataagcatcagactatacaggtgttgcctgtttgtttagcaaatggagataacattgatgatgttgcttcattggggagttcaatttgtgaagacgttgaagataaagacaacaaaagtaatgctaattgtatttcagaggtcatgggtggaactttgggacaacagaaaactttagatgctcatcctaatcctgtgttgacaatgaagaagtatttgacagtttggattgagctgagtgctattctttctcaagaaagaaagcttcaacttactgtaattgattttgaaagggaaatggaactggaaatgcttgttgacttgttgtatagtgtatactatatgctttga

SEQ ID NO: 17163 - DNA, 189 bp, Oryza sativa
  Clone ID: PAT_MRT4530_22843C.1
atggctgagtctctggcgtctccggccacggcgagcaggacgctggctggcggggtgcgggtggccgcggccacaggaggggaggcggcaacagctagccatgatggagatgcagacggcgagatccagccttcacaaacttctaccggccaaccacaagtagatcggtggctcgggagcgacacctag

SEQ ID NO: 17164 - DNA, 462 bp, Oryza sativa
  Clone ID: PAT_MRT4530_22844C.1
aaaacaacggcacacttgcccaaattaaatttaaaacgtttgcccagccggtgattatagagtgatgattactaaatttcaaaccaagacactgattgatttctcaaattaatgatttaaatgattaacttgacgattcacgatctatgccgcaccaaatgagagtcagagcgacatacaagcaatctttgaattagacccatgatgcacgcatgtaacaacacactgtcgatcatggtacctggtcatctctggcacaggcgcaggcacaattattcgccgaccttggtgccgggcctgaaacaactccggcctgggtgaccaccgcccgcaggaacccgatgagctcgccgccgggggcaatggcctcagcgtgcccctccacattgcccgactgcaccaggtagaggatcatctccgacgcggacccaccaaaaacgtctctcaccttaccctgcggcc

SEQ ID NO: 17165 - DNA, 273 bp, Oryza sativa
  unsure (1)..(273): unsure at all n locations
  Clone ID: PAT_MRT4530_22845C.1
anggggggaaaccccctaagggttttataatttttttttctgggggggggttttttccacaaacccaaaatttttggaagttttttaaaccattttcaacttttttttaaaaaattggttttttacatatttaggggtttaaaaggtccctaaaaaggatttaattttccccgttttaaatggtcccttaaaaaaattcccccaaaggaaatttttcctttattcgccccagggtccgtttttataaatgttaatttctcttgaagttttttt

SEQ ID NO: 17166 - DNA, 2242 bp, Oryza sativa
  Clone ID: PAT_MRT4530_22846C.1
cggaattcccgggtcgaccccgcgtccgaagattggatctactctatctcatatagtctccgcccatccgccatcgctcgcagatctctctcgctctcgctctagctctcgctcgaggaggagatggcggagatcgtggtggcgccgcgggcgccggcgccggcggggaggtggggcgccgcgccgccgcaggagctggtcgagaggctcaaggactacggccaggagggcgccttcgcgctctgggacgagctcgcccccgaggagcgcgacttcctcgtccgggacatcgagagggtagagagtctcaaggactacggccacgagcgcgccttcgcgctctgggacgagctcgccttcgaggagcgcgactacctcgtccgggagatcgagagcctagatcttgctaggattgaccggatcgtccgatgctcgctcagatcacaaggtgttcctttgccagccgtcgagcctgtgccggagtcgagtgtctcgaccgtcgaagatagaactcctgaggacaagcagaggtggtggaagaggggcttgaaagccatttcagaggggaaattggctgttgtccttttggctggtggtcaggaaatgaaatctcacatatcctctttctctccaatttcggacagggaacaaggcttggcagttctgatcctaagggatgcttcaagtatttttggagtaatatcctacgttttagtctgctttcagtcttcagtgatcttaagattcatggtgttcttttcctctgatttctgctcaggcatcgggcttccatctggaaagtcacttttccaacttcaagctgaacgaattttgtgcatacagaagctggctgctcagtccactgatggtactccacaaatacactggtatataatgactagcccctttactgatgaagcgactcgaaaattttttgaaagccacagatattttggcttagagcctgaccaagtaacatttttccagcaaggtactatcccatgtgtctcagctgatggaaggtttattatggaaacaccatacaaggtagcaagggctcctgatggcaatggtggagtgtatgctgctctaaaatctcaaaggttgctggacgatatggctggaagaggtgtgaaatatgtagattgctatggagttgacaatgtattggtccgtgttgctgatccaacattcctaggatatttcattgacaagggcgtgtctgctgctgcaaaggtcgtaaggaaggcatatccacaggagaaagttggagtgtttgttcagcgtggcaggggtgggcctctttctgtagttgagtacagtgaaatggatgcagctatgactactgaaataaatcaaggcacagggcgccttcgttattgttggagcaatgtatgcctgcatatgtttactttggattttcttaatcaagtaacaaatagtcttgaaaaggacagcatttaccatttagcagagaagaagattccttcaatccatgggtacacggcaggcttaaagcttgaacagtttatatttgacgtgttcacctattctccatcaacagctctttttgagattttgagggaggaggaatttgcaccagtaaagaatgctaatggtgcaacttatgatactcctgatagtgccagattaatgctgctccgccttcacagccgatgggtggtagctgcaggtggctttttgactcattccgtgcccttgtatatgacaggtgttgaagtttctccacttagctcttatgcgggagagaacctggaagccatatgccgtggacggacattccatgcaccgagtgagatttcattttaggaatagtgtctgtcgaaagcaacagtctcagacccagctaaaaagcatctgtctcaagaagagaatggcaggatccctcaattttcattgggacatgagatgagatagttggacttgagctcttgcagttagaatgttgatattagtcagcttgttgtaatgccagtaattgtaattcaacaattggagttggctccctttccatgtaccatttttgtgctgctcaaatgtagatgatcaaacaatggctaaatcttctgtaaaaaataatacatctctgtaagactggtctatgcacaattgttaattcaacgtgctctaaagtgagaagaaaaagaaaacaaaaaaaaaaaaaaaaaaagaccagttaaaaaaaaaaaacgggccgcctccggcccctgcagcccgggga

SEQ ID NO: 17167 - DNA, 695 bp, Oryza sativa
  Clone ID: PAT_MRT4530_22847C.1
ttttttttttttttttaccgaaaaaggacagcaaatgtaataactatgactatgagtgaatagtatttcaataaccacattacaataaccacaactaagtagtggtgcaccatgacatgtcgcaagtaaaacaagctttcttaaaaattatatcagtactactgtcaaaaaaaattatatcagtacggtagaaactactgtaacctcttcggtgcgcatgaaaggacagaatcacctctttggtgcgcatgaaaggacagaatcacggcacagcaaccaatagtgtcgaatgccaagatgcatccaagggaacagtgaaaactgcaggtgcagcgtcgttggtaccctttccccgcttcggctgccctgcgcctactgtttgcaggtgcttcttccaaccccgttctgcatcttccggtagggcgggctgatgtggtgcccgaaggtggcatagttacagcaaagttctgacactaaaggttctgacttgccaaggacaagatgctccgttttcctataacctttggttgataagaggccatcaccatcaacagcagatacagatgaccacatcacaggatggaagaataatccagtaggaaatctttgcctccttgccacccacataattaactcagcataaggagtagagtgaattatagatactgggatttccagaagtatgcagagacaga

SEQ ID NO: 17168 - DNA, 1881 bp, Oryza sativa
  Clone ID: PAT_MRT4530_22848C.1
aatgaaactaatttagtgttataaatataaattttaaagaagttttttttttttttttttacaaagttactgttccttgccttgtaaagaatatgggcccatatacccaagtaaaaagggtaggttacatttcatttagtttggtctccacaaatttcaattctaaaaagtgtttagcgatctcacaaggtttgaggttggcatgcagcacaacacccctatgttacaacactgctaaaacgtggtacattggtctcacctagcaagcttccatgcctgagcagggaacagcaattggaaacggtattttgagtagtagatggtcacctgaatatactgaccaaattgacacctaacactgtactgccgaatgttatgtgagtagtagcgtgagcttgcaaaatccccaggccgcatgcgcgtagtctctcctctgtgacagggaaaatggcagattagcttgcagcaacaacatcagtggccgggccggagccgaggagttgtcgaagcttgggttcagcatgctctgtgtgtctgacactcgtcttgttcgtgttgtcgatcattgacaaaaagttctccacgacgcgaggagaggaggctgtggtggttttctgcagagatgtttctgcctgggtcgatgctgcaggatccttaagcttccccattagagccgaattctccagcctgagcttctcggagctttctgatagcctactgatttcagatctaagtgacgtgttctctgctgtaagtgattctacttgtgtagccagatcctccgtttcagcctgctttctcagccttgatcgtctggcggattccctatttgattgtttcctcttttcacgctttaattccctttcatccttgatcagtaattctgttgatactcctgtatgacttggaacaatcacaccaggcggtggagatattggtgtgcccaatgccctcgaattagcaacattagtagcactgggcctaattacttgagctggaaagctgtgatttggcaaaatcgcagtacttcccaatatatggctgggaggtaaagcattttccatctttgcagctgctgatgtttcagcaccagctccatcatccaatctccgtttcctgccagtcttgcccacctttagatcatttacatcactagagccttctgcactgtaatccccactagacgtcattgtttttttactgtcaccactcccagtggatactgcagccccatcaacttccttaagtttcttgttggagcctttttccttactgcttgcagacttggctggttccatgctcaatggatttgccatcatgggcataagagggtgtggataagctccaccgtgtgggtacattgcagcatacggggtcccaaaagggggtggcattataggctgaggaccccacatatatggtggaggagcatggcctgaagctattgctggggcaaaatatgtcggtggtaagacaccagggccataatatgcctgaacagcggaccaatcaggaaatggacatggagttggttgatccttaggaggggaggttgttttcccaatcttttgtgtagcaacagcttcatcatgagccatgccttttatgaaagcctgctgtcttcaattcaattgcctcttgtagagagatttaaggaagagagccacttagaacatgctcgctcgccggctccgtaccggaggagccgcacaggggttggaggagtcgcgaaggagagggagctcgccgccgcccgcgcgcgcgtgccgggaagcgagacggcggtggaggagaccctcggaggaagcacgcggagagagagaggagacgtgaaagccagattgatctccaatgagcgccctcggccgggtgcctcctgcc

SEQ ID NO: 17169 - DNA, 2150 bp, Oryza sativa
  Clone ID: PAT_MRT4530_22849C.1
ggacaccgcctgccgccgcctcaccgcgtcctgggtgcgcgacagggccgcctccgacccggactccaccccgctctgcgacttcttcgagtccttcgaccgcgccgccgccgccggtgacctcgcctcctacatgccccccggcgtctacaccctcgccgacctccgcgccctcggccgcgaccgcgggatctgcccctacttcctcgcgaggcagatggtcaagtacgccaatgtcgtggtctacagctaccagtacctgattgatcccaaggtggccagcattgtgtccagggagatgcagaaggagtgcgtcgtcgtcttcgacgaggcgcacaacatcgataatgtctgcattgaggctctcagtgtcagcatccgcaagcagacgctcgaaggaaggttcaaggccactgatgccaataggcttcgtgctgaatacaacaggctggttgatggattggcacagaggggaaacctgccaatatcggatgcttggctcgcgaacccggccttgcctgaggacattctgaaggaggctgtaccaggaaacatcaggagggctgagcattttcttgctgttttgcggaggcttgtcaggttcctagatggacgcctggaaacagagaatgttgagaatgaaatgcctgttgcctttgttgcttcaatccattcccaggctggaattgaccagaaaatgttaaggttttgttatgatcggctacactctctaatgcttaccttggagataaccgatacagatgagttcatgcacatccagacaatttgtgactttgccacattgattggaacttatacacggggcttttctataataatagaaccctatgatgagagaatgcctgatatccgtgatcctgtgattcagctcagttgccatgatgcatcgcttgcaatacagcctgtttttgagcgttttcaaacagtagtcataacttctggtactctcagcccaatagacctctaccctcgccttttgaactttaatcctgttataagcaggagcttcacaatgtctttaacaagggattgcatatgtcccatggtcttgacaagaggaagtgaccagctacctgtcagtacaaagtttgatatgcgtagcgatcctggcgttgtaaggaattatggtcggctcttgctggagatggcttctgctgtgccagatggcatagtttgtttttttgtcagttactcttatatggatggcattgtcaacagctggaatgagatgggtattttgcaggacatcatgcagcataagttggtattcattgaaacaccagatgttgttgagacaacattggctcttgataattacagaaaggcatgtgattgtggaagaggtgctatattcttttccgttgccaggggcaaagtagccgaaggtattgattttgatcgacactatggcagacttgtgatcatgtttggtgttcctttccagtacacactcagcaggatattacttgctaggttggagtacctaagagaaacttttcaaataaaggagggtgacttcctgaccttcgatgctttgaggcaagctgcgcaatgtgttggccgtgtgatccgttctaaagcagattatggaatgatgatatttgctgacaagagatacagtcgccatgataaacggtctaaactgcctgggtggatactgtcacacttacatgatgcgcacctaaatctgagcactgatatggctttgcatatagctcgtgagttcctacggaggatggcgcagccttacgataagacggggagcggcggcaacaagactctcttaaccgaagaggatttgcagaatatggcgcaggacgccatggagatgtgaaaccatgaaagaaattgaaagagagggagggggagagagagttttctgctgtacaatacattcaaaattgaggtagaagtcactaatgtacaaaaaaaatttggctactcatgtgaaccagcatgaattcgagctgcacggttcatgctaaattgctaacaaattggtccttccaagcacatgtgatattactctgcatctgatataggtatgtacaccttaaagtccttccggatacttatatctgaatatgatggcggcctctgaatttcagacgtgtcgttacattgcctac

SEQ ID NO: 17170 - DNA, 2175 bp, Oryza sativa
  Clone ID: PAT_MRT4530_2284C.1
gctgtctttctcctccggtgccctgccgatccccgtcctgctggttccggcgttggtcttgtttccttttttttggtaaaacaaagaacaaacttgcatttcttgtacaggcagaatcaactaaagaaatgttttgtacatcagttccttttcttcagtacaaggtatatgatacaatttttagctacaactgattactcacagcgccaagacgggcgtactgcttgtttggcaattggcatactgcttgttcttcacctcagacgggcggcattgctgcagtttaacgccaattttcgacatctttgctggggctatggatttcaagatagacaaacgactgcccattttcaggttcatgttcttaaacagcttcatgattcctcattgttttttcagaccatcaagccggtcgattaagtccaaagctttggtcctatccatctggaagtcgatgacaggaagcatggatgatctcctgagtgaaagcatgtctttcctactgccactggttggagattgactgttgctctttatcagtctaatctgtttgctatgtcttgactttgtgtcaaactcttgactcttgcttattccagggacgaatttccggaacttaacattcttcagcatatccttatcctcttgtgtgaggattggcgatgaactgttcgacttgtctggcatcaaggtgatacccttttgtgttggtgaacggacgggagacttgatgggagaccttacacctccattggcatttttggatttactgatgagatgatggagccacacgacaagctcaaggatatggccatcaaccttttccttctcagcatgatatagtgtttcgattcgggttaagtccatctgccctgatagcttgcagttcagctcagatttcgttgtattatttgcaatagggacaagccatcgcaaagtcttctccatttcagctttgatttgagaagctgtaagctcttctttgagttcaaaggattgtagcttcgaacggagagctgatttgatagtcagtggcaaaccttggtatagtgtatcccttgtagtgggagggatcaaacttgatcgagaaacaagagtatcaatctgattgatgatatttgcataatgcaatgcaaggcctgctggtcccaatctattgtggtgtttagctggttcttgtggcgcttcactgtcagcgaggccaaaggcattattgatctccaaatgtaagaaatgaacaatgtctacgagcttttccatcacctcttccaaattcttggaccaaagtgacctcttcttcagacttttaacatgcttagtttgactcttgacatcctgctttagcatatgcagactatcacagctgtatattgcacacaaataatcaattgctgcatcactgattctgcatcttctttcaggcgatgctgaggagttcgttccgatgccaatcttcattaaatacaaggcagaaatcaaactgcacttttcaaagtagcggtccaagctgtgccattgaggattcttgcaacgatttccaaatcgaacaacttcttttgaaaagatttctaactcttcccttttgtcagttgctgcaatcttgtgtaattcatccatatctttggatataaggtgttgaacaccttctgaataaagcaccacttctttgaggtgctttatgttggtctttgagagtgcacgcattagattggaacctttaacaatagtatttgccacctcgaaagccaaaatagatattttatctccctttgctgccgatataaaaccactgctagtatttaaacttgacatgctactaccaagcgtatctagaacctccactgcttttccaagaccaacagtgccagccctgcctaaaagggagctcacttctgaaacctttgcagcaccggccttagtcttgcccaaaccagccttctgcgacagagtccgggccagttgtggtgtcctagacccggcctgaccggcatgctctccaagagatgcaaaagactgctgctggtcttccacccgcttcgccgttgcctcttcaaccacaggcgacttagcccgctttgtcaaggcaggctcaggatcaactatctggtcccgaacaagcgtggtgtcgctcggggacttgtctaccgctgaaacctttgagcagaggccacccat

SEQ ID NO: 17171 - DNA, 230 bp, Oryza sativa
  Clone ID: PAT_MRT4530_22850C.1
ggcaggggaggggcgccctggcactgctggatgccttgcgtgcctgagaactagggtcaactactatgtcaactgctgctcgcacctacaatggcatcaatctcatatccacggggtgacacctctggatcgcataccataatttttcatgttcagctcgcaataattcatctttaggtaatatgacagtattccaccgtgtttagaagattcgcagcaaggggggaaaa

SEQ ID NO: 17172 - DNA, 588 bp, Oryza sativa
  Clone ID: PAT_MRT4530_22851C.1
gtgcttctctctctgcggctgcgaggaggagaggagaggggagagagctcgcgcggcagccatgcggctgcttgttcccgccgccgcagcaggaggaggaggaggaggaggaggagcggtgggattggaggagaggagcgacgcggcggaggactcgctggtgtcggtgctcgccgtgtacgacggcttctgcaatctcaagcagattaatttggagctcaaggtctgtggaggatcatctatccggaaaactctggtgaaagaagcggcttcctacggcgctgcgcatctcatccttggtgttgcgaagaattctctatcttttagtagatcctcctccatttctgttgccaagtactgtgcaaagagggttcctactggatgctcggttcttgcagtgaacaatggcaagattctttttcataaagatgcagtacagcaagaaccataccatagtgctagcacaatgacagagacaccaaggaggagttaccggaagctcctgacttctgtgattggggagaaacttcgggatgagtgtgaacaagataacaggtccattttccgggctgtcaccatgccaccaag

SEQ ID NO: 17173 - DNA, 2326 bp, Oryza sativa
  Clone ID: PAT_MRT4530_22852C.1
ctaggcggtgatggtgcggccaccgtcgacgcagatgacctgcccggtgatgtacggcgccgccggcatgcagaggaacgcgacgagcgacgccacctcctcgggctcgccgatgcggcccatgacgacccgcgccgcctccctctcctccatcgcccgcgccgcccccggctccagcgccacgccgctgctgccggcgatatcggtccggacgccgcccggcgcgacgcagttgacgcggatgccgtcgcgcgcccactcggcggcgaggctccgcgtgagctggttcatggcgcccttcgtcgccgagtagacggacagcgccgggtaggcgatgaaccctgcgacggaggagatgttcaccacgctcgcggcggcgccgccggcgccgaggaggagagggtgcgcgagctgggcgaggtggaagcaggactcgaggttggtggccatgaggcgcgcgtactcctccggcgcggtctccgcggccgggccgacgaccacctggccggcgttgttgacgagcatgtcgagccgcccgccgagcgcggcgcgcgccgcggccaccagcgcctcccagtcgccgcgcacggacacgtcgcagacggaccccgtgacgagcgccgccgcgccgccaccttcgccggcggcgttccaccggcggaggcagtcctgcaggtcggcgtcgtggcgtgaacacgtgtgcaccctcaccccgaacccggcgagctcctccacgatcgcgcgcattgtgaaacggagggagtagtgtttgttaggtggagtaggtggcaggtgaaagccacggggaggatacggcgagcggtgcaaagcatagatgctttcgtccacgtttgtctcttgtggatgcatcagagtgtatgtcgtcgtgtgcaggttgcaggcagacgccggccgcccggcccatattccagagaaaatctggtcaaattttgtcaaaaattcagtttgatttttcttgaacttactctgatcaacatccagctccctgttcttgaggaagccggagtaccagcgagcggagagcctcgcctgccgcggccgcgactcgtcggcgaagtcgacgcggtagaggccgtacgatggccgtaccccgtcaggtactcgaacacgttcacgaatgaccacacgaagtagcctttcacgttggcgccattccttagtgcagtcaggatactccctatatagctcttcaggtaatcaaccctgtcattgtcatggacagtgtcattgcttgatccataaccaggtggtggatctgtcttggaacctctgtagtaaattgatatatccgctacaaagtcgcgtgtgcccttacccaaaggacgatcattcacatagagagagtagtagtgattcattccaatgaaatctagagaacccttgacatcttcagattgggcttttgtgaaggatggaaggcgagaaccgacaatgttcttcattacttgtgggtaatcaccgaataccaagggtcttagtaccctagaaagagcaccacaactttggtatttttctctgtacagttttgtgactgatgcatgtgccagtaacatgttatgaactgctatatatggctccacagatgagttccctactgtacattttcttattccaaaaggatcagagcaacgcccaggggccaattgtccggaatcataagacccaattgaagcaacattaggttcatcaattgtaatccagtgtgcaaccctgtctccaaactccttgaagcacacatctgcatatgctttgaaatcctccaaaattctcggactcaaccatccatcgtactcgtcttccagaacctgaggtaggtccaactgataaagcatgatatggacttgaatcccatttttcactagcccatctatgatgtcattgtagtattgtagcccttttggattgacatcacccctcccatttggaataatcctcgaccaggagatggataatctataagcctctaggttagtgtcaaccatcagcttcaaatcatctttgtacttgtggtacccgtcggcggcgacatcagctgtgcttctgcccggcattctcccttgatgagtgaagatgtcccagttgcttgggctcctaccatcctcatcaaaaccaccctcatactggtacgacgaggtggcggatccgaagacgaaatcctccgggaaatcccctcgcgtgtagccaagaactgcaggcgccgcgccatccagcagcagcagcagtagggagaggtagacgacggcaatggctgcagccatgcgagtgagtacgtgcctcgtgccgattcctgcagcccggggatcca

SEQ ID NO: 17174 - DNA, 546 bp, Oryza sativa
  unsure (1)..(546): unsure at all n locations
  Clone ID: PAT_MRT4530_22853C.1
aagaaagcttagttagatattccacaagtatttcttacaatcccatcaaaatccataactatattacacttttttcctaagacatttgacacaggacatgggaactaccaggaaggccaacgccaatccatcgactggaagaccttctccgtcagcggcgccatcgacttcgccaggccatctatctccacaggggttcaccgagaacgagaaaacccctcgcggaggaactcaacacagcaagaccaatacatgcattattataccatagttcaaatttgccatttccaaaatggcaatcatatccatcaaaatccaatttggatacacttattaagtttctttgcaaagatgggacataaaaaacatctcgaagtaaaagtgtgaagccattcacgagctctagggtgaagatctccaacagcttcaacttttgcttcattggcaactctaatggatctttcgcttctttgcgtagtcctcgtcgaacggaatgcctttaaacaattacatgcatgnaatagttgctccagaataaatccacta

SEQ ID NO: 17175 - DNA, 452 bp, Oryza sativa
  unsure (1)..(452): unsure at all n locations
  Clone ID: PAT_MRT4530_22854C.1
aattcggcacgagaatgagtaagccttacctttatgtcagattcttctttcctmvanvgtagatgtttacgtcatgggttgtacctgtttaaacatttagtcaagcatgttttgtctgatgaatcttttgtgtgcatataggaaaatgaactttttttcttcctgcttctgtttattgactagttgaagcaaatcctttatttacacatactgaaatacaagtcctaaacaatttatgattgtctttatgcccttttgctgctaattttaccagcctaattctgcaaaaaaattgcacatgttccctatatctgattactctgaacttttaagtaattccaccagccttttatccataatttgttgacttacaacgccattycctatgcaatatctattcccackgcaaagaragtctattaacagactgtttgttactgcaaaaaggcatg

SEQ ID NO: 17176 - DNA, 687 bp, Oryza sativa
  Clone ID: PAT_MRT4530_22855C.1
atggttcctgtgaatgaattattggaaagacataagctcgagaggttcgttagaaggcccaatttggtgggaatttcaccaacaagagaattcgaggagagatccaacacccttagtctcgaacagtttgcaagcccctctggaatagtatcacgcagtgagttatgcctaagatccaggactttcagtctgtggagatggttcagcggaggcaatttgccggagaaatggtttgaagagaagttgagtgccttgagaaacgtgaggttcccaagggaggagctgattgtgccggacagggagagtttgaagagattcagcgccgtgacgcgcccagggtgcctccggctgcagctaacgccgggagagcagatcagctgtgttgttcagagttgcttcacaacggatgctgccagctccgtaagacagcagcaacagcagcaaaaacgccagaaatgcagccatattcagaggatgattttggtttcaaaagatccagaggatgaggttggaaactcgcttgctcgtaggctcgtagctaacgcggcgaaaggcaataaaccacggccgcaccgcacttctggtggaaccatcacagattcacaggtgttcaaagaagagctgacacaacttgcaacagactgcttgaaaacaaaaggtaacggaggaacttccgatgctatttaa

SEQ ID NO: 17177 - DNA, 2329 bp, Oryza sativa
  Clone ID: PAT_MRT4530_22856C.1
atggcggagccggccctgctggaccccaccgccgccttcgacctccgcctctacccggcccacctcttcgaccacgaactccctctcgccggcggcggcggcggcgacgacgacgacgacctcccgctcgacgggctcgagttcgacctgcccggcgatttctccgtggaggacttcctcctccggtctccggagcgggacgactccggcgagggctctgctgccggatccgggcccaccgcctccccgtcgtcgtccccgaccacctcggcgtccaactccgccgtcgccaacggcagcggcggcgaggtcaagcacgaggagtcggatgaggggaggagcggtgggggtgaccccaagtggagcctgaagcggaagcaggcgagccccggcccgagctcggacgcggccaagtgccgccgatccggggacggcgacgtttctccgtcggcgtcggcgtcgcggaccgctgtggattccgacgagggggggacggtgtgcgaggaggaggaggacgagcggcgggcggcgcggctgatgcggaaccgcgagagcgcgcagctgtctcggcagaggaagaagcggtacgtggaggagctggaggagaaggtgaaatcgatgcactcggtgattaatgacctcaattctaggatctcctttgtcgtggccgagaacgcaacactgcggcagcagcttagtggcggcagtgtgaattgcccaccacctggggtgtatccgccggcgccaattcccggcatgcatttcccatggatgcctgggtatgcaatgagaccccctggttcccatgtacctcttgtgccaatcccccggttgaagccgcaacagccagtgccttcatccaaagtagtgaagaaaccagagagcaagaagactgtggagaacaagagtaagagcaagaccaagaccaagaaggtggctagtgttagccttcttggtttgctgcttattatgcttgtctttggtgctttcattccagggtttaatcataactttggaatgtgtgggcagagtgataatgctatgtttaggaattttggtcagtctcatgctagggtgttgagtgtcagtagccaggataaaagtagtttgaacaatagcgacatgattggtgttgatgttggaaagatgacggggaatactgatgggccagggaagaaacatcagcctgcacacaactcaagtgagatcctccctgctttgttgtatgtgccgaggaatggaaagcatgttaagatcaacggcaacctgattattcattctgtgcttgcaagcgagaaagcagtggcacataaggcctcaaaagatgatagtgatcagtcagctagagatcacaaagagactagtgttgccatagctcgttatctttcgctgcctggaaaggatgtgaatcgacaggagacatcctcggcagatggaccattgccacaatggtttcgtgaaggaatggaaggacctatattaaattctggaatgtgcagtgaggtatttcagtttgacatttcgacggcttctagcaatcctggtggcattatacctgcatctcctgttgtgaactcgtcaagtgtcaatgctaccgagaaaatcccagcacattctgctgcttatcatggcaagctgaaaaacagaagagtcatgtacaatgaagcgattccactcaccgggaagacggcgaacaacacagagccttttaacagaacctctgaaagcagcagcaagttacctgatagcaagccagcatcatcagttgttgtctcggtgctagccgatccaagggaggctggtaatggggatggcgatccgagagtatctccgaaacccctgtccaagatatttgttgttgttcttgttgacggtgtgagatatgtcacttactcctgcacgcttcctttcaagagctccagcccacatcttgtgaactaagcggctgggttgttcgccaaaaactgacagatgaatagatttatacaatgatctgatgctgtttcctaaccaaggactaaacttcctatgcactcaggctgaggtaattcaagtttgtcgaaggttcggagtgatgagtgcgagtttagttaatgtatgcagtttttgcagtgctgtgataatcgggttcgtttgctgtacctctagctgtaacggtgatgtaatcatgtaatactgtttgatcgttgagatataagtgcaactagtaatatgggtagtcgagaacacgtgcagaatatacatgcctttttttaccttagtttcaatgaatatcataaacaaagctacagtacatcaggttgctgaaaaaaaaaaaaaaaaaaaaaaa

SEQ ID NO: 17178 - DNA, 1410 bp, Oryza sativa
  Clone ID: PAT_MRT4530_22857C.1
gcacgagggttagcttcagctggagttgcttctcctcccactcgatggcggcctccggcgtgaagcggccaccgaggccggccccggcctcctccggcggaaaattgtttgttatcttcgagctgaacatggaggaggtgccgagagtaaggaagctcattctagctctggccgtgttcttgccggcgctgctgtacagtcagctccagcctccgcctccgaagatctgcggctccccgggtggccctccgattacagggacaagaacacggctcaaagacggtaggtatttggcctacctggagtccggcgttccaaaggagcaggccaagtacaagatcatctttgttcatggttttgactcgtgcagatacgatgctctcccaatttccccggagctggcgcaagagctgggcatttaccagctgtccttcgatcggccggggtacgccgagagcgacccaaacctggcaagtacagagaagagcatcgccctggacatcgaggagctcgccgacaacctgcagctgggccccaagttctacctcatgggcttctccatgggcggcgagatcatgtggagctgcctcaaacacatctcacacaggctcgccggggtggccattcttgcccccgtgggcaactattggtggtccggcttgccgtcgaacatgtcgtggcacgtctggaaccagcagctcccgcaggataagtgggcggtctgggtctcacaccacctgccatggctcacctactggtggaactcccagaagctcttccctgcctccagcgtcatcgcctacaacccggctctcttctctgaaggagacaagctcctcctgtccaagttcgccttccgaacctacatgccgcagataaggcagcagggggagtatggctgcctgcaccgcgacatgacggtcggattcgggaagtggagctggagcccgctggagctcgaggacccgttcgccggcggcgaagggaaggtgcacctgtggcacggcgccgaggacctgatcgtgccggtcagcctgtccaggtacctaagcgagaagctcccctgggtcgtctaccacgagctccccaagtccggccacatgttcccgctcgccgacgggatggccgataccatcgtcaagtcgctgctgctcggcgatcagccacctcaggcctgatcctgattcgaactctggtcctccccgttcaccaatgtggagtgcgtttcttggtgcttcgttaagtacatattgctggcattgacagcgtagttaatcgggcgggcggccggaaaaggaaaggcggtcggtggataaaccggtgggggtggaacctccccggaattttccaccggaaaccgggaaggttaaccacggcctggtttcccaaaggctcaaaaaaaaaaaaaaa

SEQ ID NO: 17179 - DNA, 323 bp, Oryza sativa
  Clone ID: PAT_MRT4530_22858C.1
gcattgtgtttagagacacatcgatgttttatcggggtgctagccgataaattatctggacgttgcatcggcttacaaggattacatccgattggtttctactggactatattattgttatattatattatcaacagtcgattgcctttatatgttatttatatcaagcgttagaatctacatcagaattatagccgatagctcaaaaccctatcccaatcggctaggtcaaactgactggcatgcccgcatctcatcaacctttggacctgtactaaagctaagcagatctctcaggccagtgtgtgtttttcgcatcaaca

SEQ ID NO: 17180 - DNA, 420 bp, Oryza sativa
  Clone ID: PAT_MRT4530_22859C.1
atgccgagcggatgccggcggctgcggcgagcggcggggcgggccacgccgagcggaggccgcggttgcgacctgcagaggcggccgaatgaagacttctccttctcatcaccgtcccagcagttccaccactcgcacggcgtgccgatgcagcagcagcagcgagcgtcgtccacgcctatggggacgccgccgacgccgccgctgtcgacttcgtccaccgcggcgggcgctgggcacgacctgttcgaggcggcggagggcagtgctaaagagagagagagtgaggctactcggagggacggcggtgctgcaacggatggcaacgctgctactcctcgccgttgcatcggaagaggtagcggggagagcatttggccagccttggggatgtggttgtggctggctagatttagctag

SEQ ID NO: 17181 - DNA, 562 bp, Oryza sativa
  Clone ID: PAT_MRT4530_2285C.1
gaacggacatgattctgaccgattacttgttccattgataccatcacactcggtaacgcgcgatgtagaaccgcgaatagttaacgaaccatgccaggagtgccatagcgaggccctgatctttgctacatgaaaggtgcacgaaaagccagcacactagccaagaattcagcccacacgctttattgatacgggagggatgcgcgccgcctgcgacgggcgagccgcttctctgtgatgatgctgtgaggacgccaacatcaagcgcacgcctaaggggacccgcgggcaaaccaccacgaggaagaggctaagagaaggtgtccacaaccatatatttgtgggtagatggcgtaaccataccaccaacaacggtcatgacgaactcatgacccttgtccatatctttggccgatggggtgggcatcttggtcaccagcttaggaaacttcacggaaatgtgagaggcgtgacaggccagcactggggccgagccattgccaatctgcctaggtgggacaagaagaacacctgcttggcgaagctgataccctccttggca

SEQ ID NO: 17182 - DNA, 279 bp, Oryza sativa
  Clone ID: PAT_MRT4530_22860C.1
atgaagatgaagaaaatagtcgagaacgacaaacgcaaccgacatgatgaagatgacgatgtcgacgagacgaccggcgatgaagacgataaggccaatcaacactggcagaatcatgcagccatggaagtgaagaaaccagtggagacactagtcggcggcagacgaggcgaccagtcgacgaagacgatatcgccgtcagcaacgacggtggcgcacaccaaccgtggagagacaccagtcggcggcgacggagacaggccagcggtgaagtcgtag

SEQ ID NO: 17183 - DNA, 960 bp, Oryza sativa
  Clone ID: PAT_MRT4530_22861C.1
gcacgaggccacccaccaaagatacacccgcgcaagtcacagatcgcgccggccatggccatcggcggcgacgcggcgagcatggtggccgtcggcctcgtgtggggcaccaccaacgccctgatgcgccggggcgcgcttgtctgggaccaccgcctgcgctcccttcccgccacctcctcctccgtcaccggcgtgctgcggcggtgggcggagctcctcctgacgtggcagtactcggcgccgttcgccgtcaacctcgcggcatccgccgccttcttcagcctccttggcgccgccccgatctccgttgccgtgcccgtcacgaacgccaccaccttcgccgccaccgctgtcgccgccgccctcctcggcgagggcacgcgcgcagcgcccgcagcgctcggcacggcgctcatcgtcctcggcgtctggcttttggaaatgatgaatgaattatggtcgaatttattcagcacagttgctgtgcttggaattctggagattgagcaaacaaaatgtgagcctgtctcagcaagcgattcttggaattccatgatcagtgtagatgaatcctctgaagaagatccgaatgcagtatataaatgcaatatgtattgcaatcttgaaaaggctggcaataattttgatatgcaacaggtaataagctggagggctcacatgcatctcctgcctccatcctggacacaccttgcaggatggatggctaggattgatgatcagcaagcacctcctccaatggattatggatgtctcataatcagagtcaaagcagaggagaaatcacaaattcacaattcacaactaccagcaggcatggggagacagcatgcatggttgatggtccttggcagctatcacccaaaaattcagagtgagatgtttgctgctgcatctgcaaattcaagtacatgggctgatgggcacatggctgcatga

SEQ ID NO: 17184 - DNA, 399 bp, Oryza sativa
  Clone ID: PAT_MRT4530_22862C.1
atggcggatttggacttgttggatcaatcgatctcaaggcatccacgcactcgtccacacgacaggctgctccttccacgcaaggaatgctccggcagcggcggcgttgtccatgtcactgccgtagtcccgcatcaaccagccaccttgtaccgccggagaagcgaccgcacgtcgtcggcgacgtcatcactgaatgccgccagcgataactccgccgaccgcgtgcaccgcgcccaggacacgccggtctcccaccgctcggcaggaactcacgccgtcggcgagttatcctcttccaactcctcctctatgtggtctccgcttcatcagctactcggcttttctccgccaccaccacacgatctcagccgtcacggaggaaggccagagcagtga

SEQ ID NO: 17185 - DNA, 291 bp, Oryza sativa
  Clone ID: PAT_MRT4530_22863C.1
agccaaggtacagcgggcgacctagctatgtatatggtgcgtagcattattaacagacatggaaagaacactaataagtatacaccaagaccaaaaactgccacaaacaaaagatgtagaggggacaatgcaacagaaagaacagcaaaatgggttacttaacaaattataacatacactttctgctatttttttttcctgcatacaaaatatcattaacacccaaacaataatgggtaaactaaataaattaatttaactatagtaagaatgatattctaaaaaagaagg

SEQ ID NO: 17186 - DNA, 408 bp, Oryza sativa
  Clone ID: PAT_MRT4530_22864C.1
atggtggctaccacccttgaggaacgtaacagagattgggaaatgtggctaacaatggcgagatggaaccagagagcgagctatggagatgtcgaggatggcgggcaccgagagaccatgcgtgagctttgctccctcctccatgcgcggtgcccgagagcccaccttttcatccatgtgcggcaccaccatcgccgaactccttgtcctcattgtccgtctctgcccacatgcttctactcctcctctggctacctcctttccccttctgcgcatgtcgtgcgtgtggctgagctccgcctcaacaactttcgcaacaacctgtctccgttcccggccgtcgaccttgaggttgcggctgaggaaggtggtaaggcggagataggtggcggcggcggtgacaactag

SEQ ID NO: 17187 - DNA, 1284 bp, Oryza sativa
  Clone ID: PAT_MRT4530_22865C.1
ctgagcctctgctgtaaggcaacgaggaggtccattgggggtttaactactggacaccctatctccgcattgccgcgggcaataaagagcatactgtcaagctatccttccctgctcaccagcctgggtggtaatcttgctcgagcctacaaggcggccgaaccctgcctgtgaatttgccttggccgcgtgatttctgggatcgatctcgtcgcgtctctacctttcgcaacatatcgagcccctgcctagttggaggccacggtggaaaaaatgctttttttgcagtttgggctggccgtgtatcatgaatattactacatttcttttatggggcagaatccgtttatatagcatcttaattctctctaccaggtgacatagaatacccatttatgaatgttcatcgtattttaccacaaatacatttcagatacagcaataaaaaaaataaattcaacattggatgacccattcactcgtttcttggaacccgagaaattcaagagtttgcggtgctacttgagtaagttattcccttacatctttgctaggggtcctgaaggaagctcagtggatttggatattcgtagtgggtccaataccaggcatgttgttctgaagcgacaaactgtcactttaaatccggtaaggtcgaggatgtgtgagattccaggtgcaaaagacaattcaaaggttggttacattaaattgacaactttcaaccaaaacgccgcaggatctgttaaggaagcacttcagaaattaagggagaacaatgtgaagtcttttgtgttggatctgcggaataacagcggtggcctttttcctgaaggaatcgaaattgcaaagatttggatggacaagggtgttattgtatacatatgtgatagccagggtgttcgtgacatttacgaggcagatggaattagtacggttgctgcatcggaacctttggtcgtgctggtaaataaagggaccgcaagcgcaagtgagatccttgctggagcactgaaagacaataaaagggcagtgatatatggggaaccaacatacggcaaagggaagatccaatcggtgtttgcgttatctgatggctctggcttagctgtgaccgttgcgcgctatgaaactcccgcgcatactgacatagacaaggtcggcgtgatcccggaccgcccgctgccggcgtcattccccacggatgaagacggcttctgcagctgcctcagggactccaactctgcctgcaatcttaacgctgctcagctgttcacaagatga

SEQ ID NO: 17188 - DNA, 2307 bp, Oryza sativa
  Clone ID: PAT_MRT4530_22866C.1
cgttgatcctcctccccgttcttggctcccctcgcgggcgtcctcacttcccttcttgcatgggggttcgccgccgtgagtgaggaggaggaggagtagtactaggaggaggtgaggccatggagagggtggaggatccggacctggaggacccgaacccggacgtgggggagctgttcagccactacgacgggctctacttccgcggcgcgctcgccggcgccggcttctccgtccagtggagctcgccgccgtcgcggatggccggttcttttggatcgtgtaccttcggaaaaccggataataccataacattgtctgaaactgtgctgaaatatcgctcaagtattgatatgaagaatgcattgctgcatcagatgatccatgcaatcttatttgtaaagcatcataggaaggactgccggggtcatggtcctatttttcgtgcttggatgactgctattaacacctgttctattgacgatcaccagagaccacctgatgggtacaatatcaccaccagacatgatttttctccggacaagtccacccgcagcctaagtggttttttgtggaagtgtgaatattgtgggaatacacttgtgagagccacaaacatcggtgctccatctgatgcctgctgcattgagaatgttgacaactgctcaacctgtggcaacatgctttgccactggcataaccacaagatgaactgtggtggcacatacacaaagatgggcacatcaacatcggcagaagttcaaaacaatgttcaaggtacaaaaagatgcccaactgacatgaaaatggccaagtcacaaagaaccatacggaaaccagagtcaccagattcagatggattgcaggagaaagctactgtcatgaaacaaaaagcagaaggcgagcttctcgcacttgtggctggcagcaatttaaaattaacaggaagtaactcttcaaagaagggagtgaagaggcataggcctgaagacactcaagacacaaatgctatgctttctacccctctgaaaaacctgaagctgggcctagacttggtttcatctgggaagcacagggtgtcatctatagttggtagcaataacacaaaatcatcaagaggtagtgcttcaaggaagcaacgcaaacgacattcacctgagaatgttcagaagtccagtgttctgcctgctctctctcaaaagaagctgaaactgaaggaagacctggttgtatcagggaagaacgagcctttatccctagtgaatttcagcaatggaaaatcagcaggaagtaactcatcaaaaaaggtaagcaagcagcatgaacttgaaggagttcagaaatcctgtgttcagcctgctagccctccgagaaaaccgaggcaagatcttgttgcatcggtcaaaaccgagatttcttgtctagccagtcgcagcgatgctaaagtgttgagaggcagctcctcaaaatgtgcaggcaatcagcatgagcctgcagacattcagaaaagcatcgctctgccttctgcctctgaaagtaaactcaagcgacagaatgaaattagctcctcaactaaggcagggatgcaggacaagcctagaggcactcagaaaaccattgatctgcctgcttcccctcaaacaaaactgaagcaatcagtgttgcagaagcaaaagagacagtgcggaactaggaagtcagctaatgagcaatttgccgtgattagtgcttggctgaactactacgagtcagaaggatcaagtggatcaactgagccccttgtaaacaaaagaacagagcggagaaggatagcgaggaataggataacttatacacggtcaaggaagcaaaatgccaggggaaatgcttccatcaagtcccaaccttctgaagatgactcgtctcaagcaaaagctgcagctccatgcttggagattgttgttagcaccccttctgagcaggtggtaaatcaatcccccggatgccagtcccagtcaccagctccatacttggcgatcgttcctttcgacgctgctcatgatatggttccacttcagtcagcagatccacccggtttaactgatgatccaaccattacttctggcataattgatatttcagatgatgactgattttattttcgaattggcattgatcctgcaacaggcaatgctttcgatggatgaacaacatactggatgctaacaaactattggtgttaggctcgcatcattttggaaattgacattgtttttgcatagtgcctaaaaaaaaaaaaaaaaaactcgagactagttctcttctctc

SEQ ID NO: 17189 - DNA, 363 bp, Oryza sativa
  Clone ID: PAT_MRT4530_22867C.1
ggggaaacgaataaaattatttttgcaaaaacataaacttttttttcatctttttaggggacacaacaccaacttgatcattattttggggcactaaacccatttttcccaacccaaaaacaacgaacttgttggccacaaattcattcaaccacaattaaccactggtaagctacgggcccccactttacttgccggggaccaagttggtggcgtacccccaggcgttgtttttgaccgggtccgcaagggggtctgcaaggtttttgagggggcccttgccggtgaccatggcctggaccaaaaaacccaacatggataacatggggggggggccgttctttgatttctttaaccttgggc

SEQ ID NO: 17190 - DNA, 443 bp, Oryza sativa
  Clone ID: PAT_MRT4530_22868C.1
tttgggtttttttaattttttggttttttttttttttttttttttttttttttttttttttttttttttttttttttttggccaacaccgggaacttatttaggaaccttttcccaaaaacaaaaaatgttttggggccgggggtagggaaaaaatggaacaaaaaaaatccccttttttttaggggggaacccactttggtttcggaccacccaaaaagatgggggccccctgcctgttttaaaaaaccatgcaaagaaaagtttttttggtttaaaaagaaaacgggttagaacttttggacacttggggggttctatggggggggatttggccttgaacaacggggggcccttctttgggttggaccaaggggcctttaggggggggtccctggggaacctcctgaagttgcccaagggggcccacaacaacatcccggg

SEQ ID NO: 17191 - DNA, 350 bp, Oryza sativa
  Clone ID: PAT_MRT4530_22869C.1
aaattcacaacaccatatttcattgatcagggtgagaacttgcacataaacacacactaccgatacacaattgaccctttttacaatactcgtacatccatccacgcggtccacactaatacatacatgtatacggaacacgtacttacatatactggactgtgtacacacacgcacactttcctgcagagacgcacatcgtctgcaacctagctagcttagctgaaggcgatgcgtctccatggcaacacggtggcggcggccctcacttgccggcgacgaaactggtgggcgacgcccaggcgttgttgtttactgagatcactaggtcgaccacgaggttctccagg

SEQ ID NO: 17192 - DNA, 148 bp, Oryza sativa
  Clone ID: PAT_MRT4530_2286C.1
ttgtttttaaatgaaactggtgttaataataaaagtaattcccaaaaaaaaaacagttgagattcaatttacaacaataccatattacaattcaaagatccacccgtgaataccacaacttttattttaaagcaagatagtcggagga

SEQ ID NO: 17193 - DNA, 186 bp, Oryza sativa
  Clone ID: PAT_MRT4530_22870C.1
atgcaagccaagctcctccacctgctctccatccatgcggcgactgtgctggtgccgacggtggcctctcttcctcgcattggcgacggaacggtgtcggcacccctgcgcctctatggccagtggcttccacctctccgggcatcggccggcggtggtgcgacgcactccagggccgcaggctag

SEQ ID NO: 17194 - DNA, 600 bp, Oryza sativa
  Clone ID: PAT_MRT4530_22871C.1
atgactgacacctccacctctgggaaggcgatgtcctgtcagccgtgctccccacaggttggtctgctcggctcggcgtcactggctcgttttactgcgcgatgcatattgggaggccgtaatgcccaacttgaagccaccggtgaccacaacagcacgagctttggagtactaggaggagatcctcaaagcgctgcgccgccgcctccgggccctatccacgtgcgtgtgcgccgccgtgcgcgtctcagccacgccgccgtcctcgccgccacctccgtcccctggccgcgtgcgtgcgcgccgccgcgccgtgtgtgctgccatcctcgccaccgcctccactccccggccacgtgcgtgcgcgccgccgcgccacgcgtgccgccatcctcgctgccgcctccggccccccgtccttgccgctccgcctatcgcgaggccggtggaggtggatccgcttgttgcccgccgcctgccatcagctgcaccgtctatcgcctgccgcccacggatctggtcgtcgcgggcccggccaaggtggatccaagcgtccaaagaccaagccgcgcgccaatacctctcgtccagagaagatga

SEQ ID NO: 17195 - DNA, 348 bp, Oryza sativa
  Clone ID: PAT_MRT4530_22872C.1
atggccgccctcgggcgcgccgagtggctgccgcgtggggcccggccgtcagccgcccgtgccctcgggcctattatgctgccgttcaaggacgtcttcgttttcgtcatcattctgcttcttccatcgccgactggttatgccgccgatgactgctgctacaccgctattgactggatcaccgacatcgtcatcttcgtcaacatcctgtcaagcctcttcaacatagcctactctactgctattgatgggcaacttcgtcattatagtcgatcatctctattgctgctaatcatcattaccgtcggtttagtttgccgtcgccgaatattttcttcatcttcatga

SEQ ID NO: 17196 - DNA, 571 bp, Oryza sativa
  Clone ID: PAT_MRT4530_22873C.1
gcacgaggatacaaatcgttccttttattttcatagatacaatgtatttgtatatatatatatggagccatctataccgttataacctggattaccataatcttttttttatttttctcagattaatatgtggtaattgactaatttctaggtcaccagagagaagctagtgactccttgtcaacctctcttaataatatagtagatcttgagccatctggttatctgcaaataaatgaaaagagcaaaagttaaagcatgggtatgatgaactccaaagagtaattatcaacaactattgatggaaaaaaatgcaagtaacctgttttctcagtactctttgcgtggctgttttctagcacatgccttattgctcctgcaggaagatagatggtaatcctctttcacccatctactgtttatggctgggcagtccttaatgaataccctctggtggtcagtgtcattgcagagatgttgcatgaagtttggaagctcccttagcaaggggcattgctcaatcaagaaatactgaagggaagccgaggcagaagaaagagtctcaggaaga

SEQ ID NO: 17197 - DNA, 167 bp, Oryza sativa
  Clone ID: PAT_MRT4530_22874C.1
tcaggacccacccacacctacgctaacaaacacctaattacacactctgcgcgagcctaatctaggctgaggtaggactagtacaacagcacatcaatctcggccgcgagaggagtagcacttggccgtagcgctcgccgcggccgcggcgatcctcgcggcgagcc

SEQ ID NO: 17198 - DNA, 336 bp, Oryza sativa
  Clone ID: PAT_MRT4530_22875C.1
tcggacgcgcgcgccgccgtctccgcctccgcctgcgtctctatcccatcgcgcgctatggactccggcggcggcggcggcggcggggcgctgaggccgtcagcgctggacctggtggcggcgctgctcacggggcggggacgaccggaggaggaggggtggccgccctcactcgccgagaaccgacagctcatgagcctgctcaccacctccctagccatgctaggaaggtggagagacccgctgctcgtccgacgatgctacatctccgggcccggcgtgagggcgcatgagctctagaggaagacccccgaccccgcgaagaggcagcaagag

SEQ ID NO: 17199 - DNA, 357 bp, Oryza sativa
  Clone ID: PAT_MRT4530_22876C.1
ccatccccaattgagtggacgggtttacccctgcacacatacagatcagacggagaggatcaattcagacgccgccgtagagaggagcccagcgccgccgcttccacgccgagcagactccgccgtccgccgacgccttcgtggcttggaaatcctccatggcagcctctgccgttgccgcggccatcttcctccgactccgccaagtccgccgcatatggccgccctcgcatctcgagtcgctcagtcgccccgccccatcctcatcctctcgggccggaggccccccgccggccggccaccgtccgccgataccaccggttgagtgactgaccgggactgattttaggcatttag

SEQ ID NO: 17200 - DNA, 382 bp, Oryza sativa
  unsure (1)..(382): unsure at all n locations
  Clone ID: PAT_MRT4530_22877C.1
ggggtggggtagttttttttttgcaaaaattattcccgaaatatgaaaaaaaggaacacgtcttaaaaaaaaaaataaaatttgctggaaggcgacaaaaaccacccctgcctgaggacagagacccgccgcatatgtgaactaagaacataggggcttgcgagacctataagaaccaccaaagtccttccgatggatcaaccgacgacaagcaccggtgggctcgtcaacaacggggggggggcaacatccagaaacaggaggaagcaanccccccagttttggggcgccaaacctggcgtttttttgaaaattaccaagagggagggttgaaaagggcccaaaagcaagaataaaaacgcaccggtcactggtagacaac

SEQ ID NO: 17201 - DNA, 751 bp, Oryza sativa
  Clone ID: PAT_MRT4530_22878C.1
tcaactctctctcccctctcccatccccatggcttctgagcgcccgctgccgccgccgacgtcgttgctgctcccgccgacgcagccggagtccgcccatccgcgccgactgcctcgttttctccctcgaggccaaccccttccgccgggagcccgacccatcggccgcgtcgcagcgggaggtggaggagtccaccatggcgcagacgttggtgggcacaagactagcgtcggcgtcagcctgcatcacctcgagcagcttcgccgggtcaaggccgtagtctgtctccgctccagtgggatcgactggatgttggctggatcgaatataacatgttcgtgtggctcaaacctcaaagagcattttacgaagctgctcgaggtgatgcaggctgaagccgacgccggtctcgtgccgaacggatgtcgtccagccgtcgccatcctcgccgcagcggacgccgtgaacgacgacgtacttgcgctggtggtcttcaagtcgggggtgtccgacccggggggcctattggcgccgtggtcggaggatgccgaccgcgcctgcgcctggcccagggtgtcatgcgacgcgcggacggggcgcgtcgacgtggtcgcgctcccggccgtgggtttcttcggccgcctcccgcggtccgctctgctccgccgcccgtcggtcgtcgcgcccgagagagaagagagaggagagaggagagaggagagagacggacagaggggagattgggagtga

SEQ ID NO: 17202 - DNA, 465 bp, Oryza sativa
  Clone ID: PAT_MRT4530_22879C.1
ttcgtcgatactgctatcttgtcgtgctacccaggtacaatggccggcgacgctcgaacgtatatgtaaggcagggagagactgaccgacgcagaagcgcgcaggtcgtgagggcagagactgctacaggctggcatgataggagtgccgtgagacgcgcgcactacgcggagagcatctacactctgagtacaagctctgtgctgcacactgacacacctgtggaggcctctccgtatacccgacactacatatgcttattcaccaaccgatccgtacaggtacttgctgatgtacaacttcatggagtgcgtgaggaattgcaacgaggctatggagaaggaccgggagctacgagcctacagcaagctattggtgcgggctcttatgaggatctgcgtatcgctgaatcaagattacgcctgcgtcatggactacaacccgacaatcatggcgctgcagtac

SEQ ID NO: 17203 - DNA, 225 bp, Oryza sativa
  Clone ID: PAT_MRT4530_2287C.1
atggagaacagtagagatacgcggacggcggtggaggcagcgacagcgacgttcggacggaggatcggcagcggcggcggcggcgcgtggacgatggaccagcagcgtgggcagcgtggggtcggtgcagacggaggttgtggcatcgtcgcggatggaggtggtggtggcgacgtcttcctagccgcggagggggcagcgtcgaggatggagggggccaagtga

SEQ ID NO: 17204 - DNA, 838 bp, Oryza sativa
  Clone ID: PAT_MRT4530_22880C.1
ggtgacatatgtggaacggcatgtgcaaagggaattgataatgttctttgccaccaagagctgactttgaaatcaaagaaagcatacaatacatcaagtaagacaactagataacactcaagataccggtacacaaccaaattagaaaacaatggctaaaagcgaggctgaaggtgacattttccaatcgtgatgcttcaaatgtatggtcagaatatagagcagtgaccacaggtagatggtccaaggttgacaagtataacacccagtttatagctatacagattttgacatcaaaactgaaaaattatgaactgataagggcgcacttaatagtaactatgataaatcatgtttatacagcattgtttaagtggatgtgaataaggtacatggtatcatcaagaaaattcacaaagagaagatggcaaatgatataacatgctacttgaaaaaggtttcaaggacatgagtacatgacagagcgaaacattcctgtaaactttagataaattggtcaagattaattttgttcactgccaatattgttcttaggagattggggaaggaggcaagttgttccaagaaggaaggtcatatcagaatttaggcataaagcgagatactacaagcgctagcaataatgtaaaaagacaatacagactaaaatcttacagcttacacgattatctcgacaggagatgaggcaagcatcgaattgatcatccagcaataattatcatgccaatatggttgcctcagcatgctcttcatcaattcaagtagcaggactacacaaagaagcatccattgagcctgaccgagggcggttcacaat

SEQ ID NO: 17205 - DNA, 1251 bp, Oryza sativa
  Clone ID: PAT_MRT4530_22881C.1
atgagattggtgaatctgaatggtctgaggttcaagcagctcaagcttgtctgtcttgccctccttgtggtgctcctgacatggaaatgggagaagggatcgctgcgaaatcgcggcgagctcctccgatcagagccattggctttgagccatccagttcaatccaagtatatagatcatgatatctccaaggaagaaattttttctagcttggatccattagtgcagttagtagatgaagtaggaagggaagctactgctgcatctccacctcagtctgtagttcatgaagcagaaaacgtcactggtaaaagggaagcatcacctcctgagaagaaagaatgtgactacaggaatggaagatgggttcctgatgacagcagaccattatattctggtctcagctgcaaaaaatggctctctgatagctgggcttgcagattgacacaacgaaaggatttcgcttatgagaaattcagatggcagcctgaaggctgtgacatgccagaattccaagcctcccagttcttgaaaaggatgcaggacaaaaccattgcttttgtaggtgactccttggggaggcagatgttccagtccatgatgtgcatgctcacaggtggggatgatcactcgcatgtcgaagatgtcggtaaacgctacagccttgtcgttgcgcgccacgctaagagaccgaaaggttgggcataccggttccgaagaaccaacaccaccatcctctactactggtcagcaacgctctgtgatctggagcctctcaggaggtctgatcaggcaaccggctatgcaatgcacctagaccgccctcctgcatttcttcagaagaacctccacaggtttcatgtgataattctgaacaccgggcaccactggaaccgggggaagatgaaggcgaaccggtggcaaatgtacgtctccggggcaccgagccatgaccgggatatcgccgtcatctggaaggcgaagaacttcaccatccacaatgttgtcaggtggctggatgatgagcttccaaggtacccccatctaaggtcttctacaggtcattgtcacccaggcatttcttcaatggggaattcggtgtttcggaatcgttctgacgatgccgaagccgaggaagcggtgagaggcaccgcaatcaagctcttgcatatcaccgcgatttcgcggctgagggatgaagggcatatatccagggagatttattacatggtttctggctacagaatttaa

SEQ ID NO: 17206 - DNA, 1135 bp, Oryza sativa
  Clone ID: PAT_MRT4530_22882C.1
atgagattggtgaatctgaatggtctggggttaaagcagctcaagcttgtgtgtcttgccctctttgtggtgctcctgacatggaaatgggagaagggatcgctgcgaaatcgcggcgagctcctccgatcggagccattggctttgagccatccagttcaatccaactatgtagatcatgatatctccaaggaagaaattttttctagcttgggtccgttagtgcagtcagtagatgaagtaggaagggaagctactgctgcatctccacctcagtctgtagttcatgaagcagaaaatgtcactggtaaaagggaagcatcacctcctgagaagaaagaatgtgactacaggaatggaagatgggttcctgatgaccgcaggccattatattctggcctcagctgtaaaaaatggctctctgacagctgggcatgcagattgacacagcgaaaggattttgcctatgagaaattcagatggcagcctgaaggctgtgacatgccagaatttcaagcttctcagttcttgacaaggagtgatctgttcagggtctgatcaggcaaccggctatgcaatgcacctagaccgccctcctgcatttcttcagaagaacctccacaggtttcatgtcataattctgaacaccgggcaccactggaaccgggggaagatgaaggcgaaccggtggcagatgtacgtctccggtgtaccgagccatgaccgggatatcgccgtcatctggaaggcgaagaacttcaccatccacaatgttgtcaggtggctggatgatcagcttccaaggcacccccatctgaaggtcttctacaggtcattgtcaccaaggcatttcttcaatggtgagtggaacactggaggaacatgtgacaacaaagatcctttatccaaggggaattcggtgtttcggaatcgttctgacgatgccgaagccgagggagcggtgagaggcaccggaatcaagttcttggatatcaccgcgatttcgcggctgagggatgaagggcatatatccaggtacagcatcaaaggtagaggaggggtccaggattgcttgcactggtgccttcctggtgttccagacacatggaatgagatcctggctgctcaattgtag

SEQ ID NO: 17207 - DNA, 405 bp, Oryza sativa
  Clone ID: PAT_MRT4530_22883C.1
aacggaaaaacagtatattgtacaaactcatgtctgaatctacacaagaatttcattttcagtcctgaagaatgatggggtgcgtgtatgtgtgtggctaatcccagaaaagtacagaaacttattgaagggttattacagatttacatgaaaaatagctgcttttatcagatgatgataacatcagataaaatggttagagcttatcaaaagaaaaatgtgttgactatggcagcaggcagctacaattgagcagccaggatctcattccatgtgtctggaacaccaggaaggcaccagtgcaagcaatcctggacccctcctctacctctgatgctgtacctggatatatgcccttcatccctcagccgcgaaatcgcggtgatatccaagagcttgattccg

SEQ ID NO: 17208 - DNA, 333 bp, Oryza sativa
  Clone ID: PAT_MRT4530_22884C.1
ggccccccctcgagttttttttttttttttttctgcctgcaaggagtgccagcgctcattatgttatagcacacggtgacgttacaacaggtaatcgtttgatcaggtacagtacagtacagagagggcgtgttaacaggtccagtactggttgcataaaacatataatggtaacaatagtatatatgtaggtctagatggggatacaataatggtaacaatactagaggtggagaagaagcatttccttggctacgaaatgtgatgacatgatggatcttggatttgatgtgtgctataacaggcacggcacctgcgatggggaggggaggg

SEQ ID NO: 17209 - DNA, 1050 bp, Oryza sativa
  Clone ID: PAT_MRT4530_22885C.1
atggagtcgactttgggccactcgcggcgatttctgaatctgatcgtcggcatgtctggtgtcaaatcgctctgctgcatcgacctgatgcaccagccgttgttcaatccaacaacacctactacacagccaccaaacggcaacggatcgcaatccgtcccccagacaccagcggctttgatgatggagcagcttgtggttcctgcctcgagtttcagcttccaagcttcaccttcagcacccaactacgaccaacggaagattgagtgcttccccctgaccggtcgccaggactggggcagcagcctcttcgtcattgagaggttcccaaagtctgaggttagctatcaagtcgaggccttcgtctaccgccatcccagtccagcacgctactccaggacctggcactgcgagctccttcctcctccgccgtatctccatgaacccaacaagtacaatcgccgcctggagatatgctcctatgcagcacttggctcctcaagcatttgcatatccgtcaatggcatcagcacctaccgcctgaacatcgcaacccagacatgggaggaagttggcaagtggacccttcccttccacggcaaggttgagtatgtgcctgagcttaatctctggtttggcctctctgccgagtcccaccacttggctgctgctgacctctcctcgttggaattggactcccagccacagctactagtaggaccttggaaggagcttcacctgccggaggaatggaaggaatgcgaggattctcagcttgtcagtctgggctttggcaagttctgcgtcgcaaggttcttacaccctaatgataggattcacaaaggcgagctgggcgatgaggaattatctagccagaattgtatcactgtcttgactggtgtggaggtggtgccacgtgtcccgaatgccaacgtcaattcaaatagcagcggcagcgttagcagcaacggcatatcggaactccggatgatccctcacaaatcgagatgtcacacttctaatggcactatcgtccatactgtgttctag

SEQ ID NO: 17210 - DNA, 667 bp, Oryza sativa
  Clone ID: PAT_MRT4530_22886C.1
ttttattcccaagtctttcaactccacccaactcagccatgcctgtcatccccgttatcgacggcgagctcctcttcaagaggatggctgccgacatgcccgagatcgcacacagcaccctggtaaaaaggctagcggacatgtacggcgtcaccaaaagtatcctcggtgaggagcacacaaagttggacgtctttggcgttatcctcggtataatatttctgatgggcttgctctactactggggtatcaagaaggacggtgcgtggaaatgatgggtacggtcgtttttgcccatggagggacgaggcttcgctcgagtcgatcagacgaccaaaataccagcaccgcgagatgcggacaatcaaaaatcacgacagagtctgttcaatacaacgatatcgtcatctacgaaacctgactcagtttacaccatcgaacagcaccttctcaatcacgaccacccgcaacattattcaccgttgggagatatggcctcttggtttcagactggaagctgggcctgcaggcacgaggtcgcttgggttttggagaatgacgcgagtctgaatggggttgcttgatgctagcgtggcattgagcagaacagaacaagagcagagatagaacaattggataacagcacagcaaaaaaaaaaaaaaaaaa

SEQ ID NO: 17211 - DNA, 482 bp, Oryza sativa
  Clone ID: PAT_MRT4530_22887C.1
aaatatgaacataagtactgcaagttaaaaatacaaattacaagttcctaaaattattgtaagtgcttattcatacaaattacatgttccacaagaaatttaaacctgaaattacatttgattcaaactccacaacccatcggcaacccagtcccgatattgattcattacctgcgagtccaaatagtctgttgcatcatttgatggagaagacatttttccagccaatggatcatagttttcatcttggtcacaatggttgaattctgtatcggctagttgactgtctttaatgaaattatgcagtactattgcatgcgacaattattttgctttgctttttctgcgagtaacttgctaaatgaaacaaaatcctccacttattcttcaagactccaaatgacctctttatgacattccgacacgaagaatggcagtaattaaagcgctcttttttttcctctgggcattatgcattcgtt

SEQ ID NO: 17212 - DNA, 126 bp, Oryza sativa
  Clone ID: PAT_MRT4530_22888C.1
atggcgaggggtgttcaccgctacctccaccaagaagatgtgggtgaggtcacctgcggcttcagtggcgagatcggcatccgcaaggagctcgcctccgactccctcgctggcgaggtagtctag

SEQ ID NO: 17213 - DNA, 330 bp, Oryza sativa
  Clone ID: PAT_MRT4530_22889C.1
atgacggtgaacccggcagctgtggacctggcaatggggagctcgtcggcagcagatctggcgctggggagctcgacgacggcgaacccggcgggctctccccctcgtgcgcacgtggatctggcggtggggagggtgttggcgacagcgagggcgtccgctcttacctcctcaaggccatcaagtacaaaaactaaaccggtgtgctcctctcttcggcgtctttggcttcgagccgccaaccgggacttcgcctaccgcatgatgctagctgtgttgttcctctgcagcgacagcgacacccctgtgaaacatggatgtgggaactag

SEQ ID NO: 17214 - DNA, 318 bp, Oryza sativa
  Clone ID: PAT_MRT4530_2288C.1
cttgcctccggctcgagccaatctctcgctgggtctctctcgcgctctccactagcaccggctcggctcggctcgcgcggcggcggcggcggggcggcgtggcgccgagggaggggaacgccggtgtggggagggcggcgtgcatgggccgcggcgacggcgaccggggcggcggcttcgagcggtcccacgagccgcgacggtgatgggctgcgatcacaggaggcacgcaagcacggaggggtcgtccgtgctgacgaccgcaggatgcgtgtgcgagtcgacacagaccgcgccagtctagcgcatgcgcatcag

SEQ ID NO: 17215 - DNA, 336 bp, Oryza sativa
  Clone ID: PAT_MRT4530_22890C.1
atggtgccatttttaggagtgtttggtttagggatgagtgagttgggttggtttagggactccctggagaggaatattcctctcagatccgggaccaagccatcaagcaaaatcggccggacgagctcgtccaacctggacgaagcacacgacatcagctcgcctcttcatccgctggcgctcgtctgcgccagtcgccaactccgtgagcgccagcgcttctccaagacaccgcggcctctcctccgctgtgacaggccgccacctccacgaacgccgtcgactcccttgcctctagccaccactcttttgcctgtgtgccactcgcggcgatga

SEQ ID NO: 17216 - DNA, 1842 bp, Oryza sativa
  Clone ID: PAT_MRT4530_22891C.1
atggggagctcggcgcggcttcccccctccctctcggtggcgtgcgggagcggtggccgagtcgcggcggctagcggagctcaacaactacgcgacggcgcgggcgcacggagctacgcgactaccgacgacgacgcacccgagccggtcaaccccgccgcccgcagcctcgcctcctactcgggccacgccatcgctgccaagaggtcccgccgtatcgtcggctgcgatggcgagtaccaccgccggcacccgagatcggcagtgttccaaaagtccagtgttccaaaatcaatggccatcttcatcggatgcatctgttcacttgcactcttgctgctctgctcccatgtcttccagcttctctcagacgctcgccgccgtcttccaccgggcccgaggccgcttccggtcatcggcaacctcctcgacgtcgccggtgagctcccgcaccgctcgttggcgtgcgtcgccgagcggtacggcccgctggtgacgctccgcctgggcacgatgctcgccgtcgtggcctcctcgccggccacggcgcgcgacgtcctgcacaggcacggcgccagcatcaccgaccggggcacgccggacgcgtggagcaccgacgggcacgacggcaactccatcttcgcgttcccgacgcgccaccaccggtggcgcgcgctgcgccggctcggcgccgagcagctgttctcgccacggcgggtcgaggagcagcgcccgctgcgccgagacgccgtgcgcggcctcctccgccacgtggcggagctggctgcggcgtccggcggaggcggcgcggcggtggtcgacgtcgggagggcggcgttcgcggccatggcgagcctactgttcggggcgctgttctcggcgggcatcgacgccgcgacgtcgtgccggttccgcgacgcggcgcgggagttcgcgctgctgacgatgacgcccaacgtgtcggagttcttcccggtggtggccatggccgatctgcagggcctgcggcgaaggacggcgaggcacatcacgtggatgtaccaactgatcgacggccatgtcgaacggcggatgcgtggccgggaaacggccggtggctgcggcgccgcgcacggggagaaggagaaggacctgcttgatgtgatgctggacatgtcggagaaagaggagcagaatgacgacagcagcctcaccatgaaccggggtgtgataagagcatttatggccgatttactaatggcgggcagtgaaacaagctcagctgtaatagagtgggcaatggccgagctactgcagaatcctcaaactatgacaaaattacaagaagagctcaaaaaggtcattggctcaaaaacttgcatagatgaagaagacatcgaccaacttccctatcttcaagcagtcatcaaggaaacacacaggctacatccagccataccactgctaatgtacaaagcagccgtcccagttgaaatacaagggtataaaatccccaaagaaaccactgtgatagtaaatacatgggcaattcatcagaattcagaggtttggattgaaccagacaagtttataccagagagattcctacaaaaggagatcagtttgtcatcaggtagtaccaacatggaacttattccattcagtgccggacgacgtttctgcctcggatatccggtagcaaatagaatgctgcatgttatgcttgcctcgctagttcatcagtttcagtggacactgcctgaagtagtgaagaagaacggtggcgtagacatggcagaaaagtttggaataacactgtctatggcgacccccctacatgctatagcaaagaatattgtgtaa

SEQ ID NO: 17217 - DNA, 249 bp, Oryza sativa
  Clone ID: PAT_MRT4530_22892C.1
atgtttgggcaaaagtctgccgcaaagacttatggtatcttagagatcaaatcaactggcacgctaacacacccgaaggcgagctttggacctgcactggagttaagcagatctcccaggcctcgtgtttttcgtcaacaccacgccgacgccatcgcgtcacacgtcggctggacgccgcgcatggccgctgcccggcttgaccctggagctgaaggccggagcagggggtactcgcaggcagcctaa

SEQ ID NO: 17218 - DNA, 129 bp, Oryza sativa
  Clone ID: PAT_MRT4530_22893C.1
atggacggggcggcgacgcacggaaagggtgaggaaaccgcgacccaggccacggcgggcaacaggaaacggcgggaaacgcaccggaaaggaaagcgtggggcgggaatggggaagcaaaaggggtga

SEQ ID NO: 17219 - DNA, 652 bp, Oryza sativa
  Clone ID: PAT_MRT4530_22894C.1
gttggaaacagttaccgggaagaagcctgctggtagtgaattcagacaaggattaagccttcgcgaatacgtgaagtctggtctagaagacgaagtgatggaaattgttgacatgcgtctatgtatggaccttacgaacggcattccaactgggaatgatgccacatacaaaagaaaggttgaatgcatcgttttacttcttaaacttggaatgtcctgctctcaggaattaccctcaagcagatcgtcaaccggagatattgtgaaggagcttctggccatcaaagaatctctctcaggcgacgagcacaagatgtgatgatggaagatatatatgccaaatgtcatgctgcgatgattcatgtatcgatgatatatatgctgttggatgacattaggctcctttctcaagtgttccatgaaatgttttgaacatcgaatgatcactgaaattgtatctttctgctaatctgtgaacctgagagaattatttcctgtattttagtcagagctcaatactagttcataagcctccactgcatgctgaacctctgtagtatatcaagtatgcagtagcagtctattagcttcagctataatcctgtgccgtattatcgtttaccagtaacgcgtctagcattgtcgtttcttc

SEQ ID NO: 17220 - DNA, 981 bp, Oryza sativa
  unsure (1)..(981): unsure at all n locations
  Clone ID: PAT_MRT4530_22895C.1
tgctccccgggcgtcaggccgtcgcggatctcgccaagatcgcctcctcgcttcttccccccgaggcggcggaggccgaggcggccgggttcaccgaggaggcggtcgccttcgcgcgggacgccgccacgcggcccgagctctggctcgactttcccctcctccccgacgacgacgacgatttcgacatgaccgacgcgcagcaggaccacgcgctcgccgtcgagagcgtggcgccggagctggccgatctgcggatcgagctctgcccgagccacatgagcgagggatgcttctggaagatctacttcgtgctgctccatcccaagctcagcaaggacgacgccgacctcctctccaccccacagattttggaagctagaaagaagctatcacacaatttgcaatctgagtcaaagccagacagcaacgaagacatggtagctgcttcttccagtaatatagatggtaatgtgccttctcctgtagaggttgtgggcatattaaagaatgaagatgaatctgcaagggccgaatccttcaacaacntcaactttttgctcaccttaaccaggaattttggaaatgcaatgggatgatacacttcatgactctggaggtcttggggcagatgacatcaccaggtagggccttgacaaattttgccaagattcgaagaggtcactggtgtgcgaagaccgcggtggaagaaatatacggggatgcaggggcagtgcatgagagacagatgccgcaggcggacgtggatgcaggaggcgaatcatattgtgtatggcgtgtaagaaggggtggattagcatgagcgagaacacaatggagtcattagctcataaagaaagattggagaattgaataggaaacattaagaaaaagagcactggtagggttgaatataatgcagatatttagttgatgaaatgtgtcacgtgttagcagtaaatattaggccgaagaggagag

SEQ ID NO: 17221 - DNA, 588 bp, Oryza sativa
  unsure (1)..(588): unsure at all n locations
  Clone ID: PAT_MRT4530_22896C.1
cccagcgtccgcggncgcgtggngaaaaaataaaaaaaataaaaaaagaaaaaaaaaaaaaaaaaaaaaaaaaaaagaaaaaaaaaaaaaaaaaaaaaaaaaaaaaggaaaaaaaaaaaaaaaaaaaaaaagaaaaaaaaaaaaaaaaaaaaaaaaaaaaaaaaaaaaaaaaaaaaaaaaaaaaaaaaagggggggcgttttttaagggttcaaattttatttccgcttgtttgcaagtttttatttttttttttgtgccccttaatttaattttattggccggttttttaaatcgtgggttttggaaaacccttggttttcccaattttatttgttttggggcatttccctttttggccgtttggttttttttcgaaggggcccctccctttcgcttttcccacctgttttccattttttttgttaattggccctccctttttccgggttttttttttgggggggtgggggggttttccctcctttgtgcctttttttttttctctttgcttttgcgcccgttttttttgtttttttttctttctttttttggcctgtttgtgttgttttttccttggttttttttt

SEQ ID NO: 17222 - DNA, 766 bp, Oryza sativa
  Clone ID: PAT_MRT4530_22897C.1
ttatcggtgcaagatgatcaaaggtgacttgccttgctcgagatcttgagcttgatcctcgaaatcctcgcactgcgggtcttcgggctccgaaactcgcgtggtcccgagcgggacccgcttgtcggtggcacggttcaccgtgcggagggagcacgcggcgcgcgctaggatttgggggagggacgcggtgcacgcgcgcggctcgcgggggtgcggttgcggcgggcccacgcgcagcctcatggctcatggtggaccgcgcgcgcgagcggggcagaggggagcggcggaccgaggtcggcttgacccggtcttagccgagctggcaccgacgtggcgcctacgtggctgccacacaggccggcgggaggttgaagacggcgccggccaaaacggacggcggacggcggctacgaacggcggggcgaaccacggcgataccggcggaagcgggcacaccgggtggttgcacgagacgaggggagacgatccaacggctcggattcgccggagggagctcgacggcggcggattgcggcggcggcaaccgtcggcgagggaagggggaaacggcgacggcgcgacgggaggtcgattcgggcgagctagagcatctacgcgactccgggaatccgtttctagcgtcagattggacggagacactacgagagaggccggcgacgtgtgggcgctaccgagcacgggcggcgacggcggcgagcacacagcgagcggcggcaacggtcggggcggcgccagctag

SEQ ID NO: 17223 - DNA, 102 bp, Oryza sativa
  Clone ID: PAT_MRT4530_22898C.1
atggcggttaatggggaccacaggggcgcacggtggctgagggcaagcacggtagcacaaggtggatggagacggcgcaagacgaccccaaatggcggcacg

SEQ ID NO: 17224 - DNA, 271 bp, Oryza sativa
  unsure (1)..(271): unsure at all n locations
  Clone ID: PAT_MRT4530_22899C.1
ggaaaacacatcaccttttttaagcgggaacagttttagggaataaccccctttcccttcccaagcaaaaaacccacccttaaaaaaggggggggaacggaactactccctccctcttccgggattaccccaccctnngaaaaaggggcgggccgccggggctctggggcgaacccgggacgacggctccccggggccccaaaaggtgggcagcccgttggccaacccgggattccccatcggctgcccccgcggaaccggccccggcccg

SEQ ID NO: 17225 - DNA, 1699 bp, Oryza sativa
  Clone ID: PAT_MRT4530_2289C.1
atggagaccgctgagctgtgctgtttgctagctcttcttcctcttgtatactgcctcctcacgctcttccatggctcacgcgagagcgaccttcggctacctcctgggccatggcggctcccgctcatcggcagcctccaccacctgttcggccgcacgctcccgcaccgcgcgctgcgcgacctggctcgcctccatggccccctcatgctcctcagctttggccaggcggctccggtggttatcgcgtccacggccattgcggctagagagatcatgaggacgcacgacgacaacttctccacgcggccactgagcaccgtgctgaaggtctgcaccaggtatggcgcggggatgacgttcgtgccctacggcgagcactggctgcaggtgcggaagatctgcagccttgagctgctgagccccaggcgcatcctcaagttccgcagcatccgggaggaggaggtggcgcggctcgtcctggccatcgcctcatcatcgacgccgacgccgacgccgcctgcacctgtgaatctgagcaagctcctcagcaactacatgacggacgcgacggtgcacatcatcatgggccagtgtttcagggatcgcgacaccttggtccgctacgtcgacgaggccgtgcggctggcgagcagccttaccatggccgacctgttcccctcatggaggctgccacgcgtgatgtgcgcaacaactctgcacagggcagaggtgttcgtcgagtccgtcatggagttcatggatcgcgtcatcagcgagcaccttgagaagaggtcgtgtcagggaggagaccgcgaggaggacctcatcgatgtcctcctccggctacaagcagaaggaaacctggagttcgagcttagcaccagcataatcaaagcaatcatttttgaacttttggcaggcgggagcgaggcgccaataacgacgctgcaatgggccatggcagagctgatgaggaacccagatgtgatgtcgagggcacaggccgaggtcagggaagcctacaaggagaaaatgaaggtaactgaggagggcctaactaacctaccctatctacattgtatcatcaaggagaccctgcggctccacactcctgggccatttgttctaccaaggaaatgccaagagcaatgtcaaatactcagctatgacgtacccaagagagctactgtagtcgtgaatatatgggctatttgcagggacgctgagatttgggatgaaccagagaagttcatgccagataggtttgagggtagtgcaatagaacacaaaggcaaccacttcgagttcataccgtttggtgctgggcgaagaatttgccctggaatgaattttgcacttgctaatatggagcttgctctcgcaagtcttctgttttattttgactggagtcttccggaagacgttctccccggcgatttggacatgacggaaactatgggcctcactgctaggaggaaggaggacctttatgtgtgtgctattccatttgtgcaactcccctaatttccttcgcctcttgttcagcttgagggttgtcctgtcgaactgactctaccactctacgtctagagcaagaataaaatcccacatggcattgtctagccatggattgttgtatgtttttctgcattctttttgttggaacttgtacttgtttattgtgaacatgtatgtt

SEQ ID NO: 17226 - DNA, 133 bp, Oryza sativa
  unsure (1)..(133): unsure at all n locations
  Clone ID: PAT_MRT4530_228C.1
ttcgttacacagtatccactcacacacatcgcggaggtgaggtttcattggacgggtggacatacggcttatcattgncgccgtataacaccaagagggcggttaacaaagaagtgtattccatctgctctaa

SEQ ID NO: 17227 - DNA, 321 bp, Oryza sativa
  Clone ID: PAT_MRT4530_22900C.1
ccgacgcctggcttctataaaggattgccattggccaggagaccgactctgttccttgcactgcggatgataaaacagacaccagaggtaggtcggcgggtgggaaaacctggttgctactatgaacggatggaaacagcaaacgagggcacacaccatgcaaaggagttgtggtaacaccatttgcaaacacagccgttaccgagggtgttcactgcatctgcatatagagctgtaatgaatagctcccataggatcctagccatcatcattatccatacaaggaatagcttgatgacccacatctatattacatatgca

SEQ ID NO: 17228 - DNA, 378 bp, Oryza sativa
  Clone ID: PAT_MRT4530_22901C.1
tagtatctctgctacaagtagcctgtcctgtacgaaccacgctaccgagcgaaagaatgaacactgaaagaagtagccacaaatgcatcactaaagacatcatatctcggccagaaagcaaaggaacatgtttcgctagagttggactgatttacacatgccatggcctgaaatgcatttatgttactagagaacatgcgtggtgattgtgaacaactatatgcgcatccacacatgcatttttgttgtagttaaacttttgtcgaaagctatgtatatgagccctttactgtacttcatacctcctagagatatgcactagcacgtaagagcgcataataaaatctagccgttgattaaaaaaaaaaaaaaaaaaaa

SEQ ID NO: 17229 - DNA, 165 bp, Oryza sativa
  Clone ID: PAT_MRT4530_22902C.1
atggcgacgacaacggggacatacggccgtgatccaatcggagcatccgacttcgccgcgcacgggaccacgtcccgccctccgggagccagctcgtcgatggctccgacgcggcgacgcgtgcctcccggctgccgcctgccgttctctccgccagctacctag

SEQ ID NO: 17230 - DNA, 174 bp, Oryza sativa
  Clone ID: PAT_MRT4530_22903C.1
ccattaaaaaggctttttaagtttacccccagttgggcccataattttatttacctcattacttatttgggattttttttaccaaacccgctataaagcggggtttttaatgtgggtgcagcacacattaatacatccgttccgttcacaagccttaatttagtgcagtgcggg

SEQ ID NO: 17231 - DNA, 615 bp, Oryza sativa
  Clone ID: PAT_MRT4530_22904C.1
taccacagaaggggtacacaagaccctggtaccttagtaaagcctacttctgaatttttcaccacgagttaaaagttcgccctaaggataccatgagaagatatgaaataaatggtcaccatagatttattttcagctagagttggaagctggagcccaggccttgatgtgcccaccctgatatttctgtgagttctccatccgcctctgtttcttgagcatctcacgagtgagcgtgctaaagccttcttgccaccttgagggaatggacacactttggtggagcctcaacaacttgcaccgaatgttaacctgtgttgcacgtgcccacgggaattctggaagagtttcccatgcttgggccgccctttgcgcttgctttttctgtgttgcatccacggtgacttgcttgccttttgctggcttgctgttgaaactggcacactggcctgcatcccccattgctgttaaaacgaaagatgccccagctgtgtgccccctcttccgcttccttcggttttcatctacactcgcgttctcatcgcccaccggtccatccttgcgtacatctagagttcttactgcttttctacccaaaaaaaaaaaaaaaaaaaa

SEQ ID NO: 17232 - DNA, 1047 bp, Oryza sativa
  Clone ID: PAT_MRT4530_22905C.1
gatgtttgttgttgttcactatattgaacttcttggtattgagcttgtgcttgttcttgttgttgtgtcaaagtcggtttcaacaattgaaggccatttttcacatgtaccaaatgttacatcgcgcctcgcgtctttacccctcatgtactcgcttcgtttagctagcagcggcagcacgggactcggcttcgcgctcggccggctcggcgggaggagtggcggcggcggcggcggtggtggtttagcgcccgcgtcggcgtcgtcgtcgtcggtggtatccgctcgcacgaggaggaccgtctccgtgacgcccaacgccgcggcgccgactccgggcgagcagggcgtcgcgatggagcagggcaagcagcagcaccagccaccacctccgtcgcagccgcagccgcagcaggagaagcgcggctcccgcgacgacgacatgcacaagaccacaggggacgtgatgacccactctttcggggagggatactcgacgcggtcggacgaggaagggttcggtggcgtgtacggacagaacgacccggtgttcaaccctgggaccgaggtgcaccccagccaccctgagtacgacacgtcgcaggggtcggaggtgaaggagaaggagaaggcgcgccaccataaggacgacaagcacgcgacctaagcctagcagttgggggctggattaggtcctaatcgtagtttagtcgggcatgacggggatcacccccatcatcacctgtgcatccacgttgccctatctttgatgggcactagttgtatcttttgcttctgaactgttttgatgcatttgttttattccttagatgtgatgtaaaatctctacagtacttaattagctatgtactggtactgtgagttctccagcgcttgtgtctcctggtgtgtgtgatcatgtaatgatgagtcgattcatatatatactccctcctcctccgtcatcccttctataggattttcaaaaaacatcccttctataggatttgtataataaatctgtaataaaagagattttaggtggct

SEQ ID NO: 17233 - DNA, 260 bp, Oryza sativa
  Clone ID: PAT_MRT4530_22906C.1
aaaataagcaaaaaattccctcgatcgaacacacacacccccacaattaagggacatacatacatgcactggtgaaactgcaactgcaggggcggggcggggctaccacaagggtccacatggtaccttggttggcaccattctcgaacgggtcgttgggcttacttgccggggacaaatttgggggggtatgcccaggcgttgttggcaacgggggcgggaacagggtccaaaaaagttctcaaaggggcccttgccgg

SEQ ID NO: 17234 - DNA, 386 bp, Oryza sativa
  Clone ID: PAT_MRT4530_22907C.1
gtagccaaaggaccctcttatttaacccaagatatacatcttcgtgcaccaagaaaggttgaaagggatccagggtgctcctagcagggaagatattttaaacacatagtgccgtggagaaccaaaagcaactaacagctaaaaacaccagagtgtgagtgtctcgaggacacatacgggtatctccattggggattggtgcatgtggtcttaaatgccttgacctgcttctgtcccttgtagatcgagatggccaacgggaatgatactgcgatcctgtatgggacctgctcagactattactcctactacggattgtgctataatggcgccttctcggaggagatcggctaaggctcctgatgagatccctgttcctacctacc

SEQ ID NO: 17235 - DNA, 106 bp, Oryza sativa
  Clone ID: PAT_MRT4530_22908C.1
atggcggggtttcccaaaccgccggggccggggttaccgcgcctcggcggaggttaccgtgatttttctattaccgtaccccgtggtaaccgcgcggttatcgacg

SEQ ID NO: 17236 - DNA, 162 bp, Oryza sativa
  Clone ID: PAT_MRT4530_22909C.1
aggctatgcttagcattccttgcacttagttgtgttgggtatgctattcccttcgtcatgtgtgcagccatatgctgctgctttccatgcttaatttctcttctgcgccttcaaaaagatttgggtcatactagaggagcttctcaagaactaattggtgca

SEQ ID NO: 17237 - DNA, 1365 bp, Oryza sativa
  Clone ID: PAT_MRT4530_2290C.1
atggcccatggggcctcttgcctgatcaccctctccccacagctgaaggactacgaggacacattctcactgaccggcaagattcaaaacttcagagagttgttgtattattcagatggtctgaactctgaagaaaaacgtggttcacgatggttgggcaccgccgctaatgataaagattacctgatggcatcctcgctctcgaggcgcttcgcggaggacctcctaagaggagccatggacctccaggattcgctcacgatgctcgagaagttccaaactgcgtcgcggagcatgagagtgtcaaacaagaagagaaggccagagggttgtgagagatcaccggacacaagtggattccgtggagccctgtcggaagcgtcaaacgccaagaagatggtgggtagaagcgccagcagtggattggatggggaattaacgaattctactgatgagctgaaaagagtgatcaaggatagcttttacaggaagaacatcttgtcggtatatcccaatgatgaacaggcttccatgagccagtcattacattacatgccaaacaagaattcgttatccaagcctaatgagcagaagaaggcagcaccaagatcattgccatcttgtgcaccagggcagtctgagaagtccaaatccccaagcttggtagcaaagctcatgggccttgatggattgcctacacacaatagcaataccttcaaaaaagacgagtcaatgaagacagtaagttcaccaagggcactttttgatattgagatgcctaaggcatatgagctgcacagagagttcatacaagttgatggtccatccactgaacatagcgcaacacctagtgatgaaagctgccaaagtgttgttgattgggacacagagcctagcattgatgaactcattggcatcggcgaaccggggcatctgatcaaccgatataaaggtatccgcaaggcccagatgggtaaccatgagcttttcgtggacaccgcaacagagcagctggagcggaagcatcgtcagcgaaacagcttgtgttacacaggaatttggagccagaaatgcagaacagcaccatacttctcactggaggcattgctgacagatattcgcgatgcgactcgaaagctgagcatctataccgaagacgacgatggctgcactacaaaagacacactatacatgaaactggagaaggatctgagatgcacagatgcgtcgatcaacagcgtgtgggatatgggctgggaagattggattttcatggaggaaacacaatgcttcataagagatgttggggagagcattttatcagggcttatcgaagaagctgctctggacatgtgggtacattga

SEQ ID NO: 17238 - DNA, 1349 bp, Oryza sativa
  Clone ID: PAT_MRT4530_22910C.1
ggctgctggttgcttctgcaattctctctcctcccaaatcgcgagctcgtcggaagctagggcctcccgctccgatcagatcgccgcgccgccgctgctccagggtacctcaaaaatagaagatgcaaggggggagaggcaggagggatggtttcttcggttttggggacccctttccaggtttgggtagctttggacaaccagggagcctaatgtcaagtttctttggtggggcaaatccctttgatgatcctttcttcacaaaccctttcggtgctatgatgggacctagcttgttacagccaagcatgtttgggagctttgggtcaagcatgtttgggcctcatggaaatgtcaatggactgagcaatactggaggcttccttcagcaagctcctgaaccaagcaggccgagagggccaataatccaggagctatcttcagatgatgaggatggcgcagatgtgaataaagaagatgagaagaggaatgataaccctaggaagcatccaaggatggcccaaatgccatatgtggaggatcctgacgaagatactgaagataataaaagatctaggcacgagcagtttgaaagggggtatgccagagccagcacatcgcgtccacaacctcatacatttatgtttcagagctcaactgttacgtatggcggtccaaatggagcttgttacacgtcttcagccactaggaggactggtggagatggagttacatttgaagaaaggaaggaagcagacacgaccactggtaaagccactcacaggatttcacgtggaattggcaataagggccattcattgacaaggaaactgagttctgatgggaacgttgacacgatgcaaactttgcacaacttgaatgaagatgagcttgctcgatttgaggaatcgtggcagagaaatgcagtgcaaaatctgtctggttgggatcccagagtgaacatgcttggcactgcttgagctcgttctggcatccgagatgggaatcagatgcttacgcttccagcacctggccctggtcaatcccgtggcgccagttcttctaggacgaagaggcccacccagaacacatcttcccgccgcacttagttccccagtagtatatgcaacatactgtttccacccaaaacaaatgtaactcgtgctcaccttggcaaatgatctgttagtatagtacttttgtgtcgtttctatgctcagcttgcatgcagagctacacgggaaatgtaagaaaagaaaacctgcactttacccaggttggtctctttgtgaccaaaactgtcagtctgtcacttgctggactaagcaatggtacttgctcttaactct

SEQ ID NO: 17239 - DNA, 1469 bp, Oryza sativa
  Clone ID: PAT_MRT4530_22911C.1
atggggatggtgaccgaggatagactgatagaggaaggactgatgtgcagcggtggggaaaaggaaggcatgagtgctgcccctcgcagacagctgctcgtcccgcttgctgccccaatcactgcttgcatgccgcccggctcaccgcatcgcttgccgcctgcacaccgccctgctcgccgcctgcacaccgccctgctcaccactgcgccgcctcgtgccctagtccatagcagcctgcctgcgcaccttgccgccagctgtcgccggttcgccacgctgcccgatgcgtcaagggagaagggcgagaaacagaggctggaggcggagggagaggggcggtggtcggtggagcactggagccgtggtcgccggtcggatctgcagggccggattgtgcgggtgagttatgctcatgaccgtggtagccgtgctggtggctatggtggtggaggctacagtggacagggtacgtatggtggtggcggtggctatggaggtggaggctatggtggacaggatgcatatggtggtcgtggtgttggaggctatagtgagggtggccgtgggtatgttggtggtggatacggtgacggtaacaattacggtgggtataacacaagtggtggatataattctgaaggtgggcgtggtggctatagtgtttttgaaggtggacatggctacggtagtggcggtactggttacacaggaggcagcggcggatataattcggcccctggaaattacagcagtgacaacttcaatcaagggggtgcagcacctggtgcatatgaaggtgcaaactacggtggaggcaacaactacatgaacaatgcaaccagtgatgattccaccggtaagctggacgagttgttaaatgatcttaaagttgatggtgatggcaaagaggatggtgagggcaaagcggatggcgctggcctggttaatgaggatctgaaaggagatgatggtcaggatgaattgcttcagaatgatttcaaagatgaagatgtgtctgatgactatgccaacaaaagacgttaaagttcgctcgaccatgaagtccagtccggtaacttttcatgtgttgccgatggaggtgctctccacaatcgcgaaatccaaagttaagacaacgtcctgtatgcaaataagtttcgtgttgtagccatatatgctggaccatcgggactctttcgatatgcggtcattcaaaacctggattagtatggattcactgcactacaatcgcatcctctgtggataatccattgttgctcggctgctctctttggatacaatctactgatagacactccctccgaagtccgaccgtgttattcttttttgggttaattggatccatgccattataaatttttgagttttgaagtataccattacaattcatctatttgcaatgataccattgcaattttacagctatttgtgatatgccactggat

SEQ ID NO: 17240 - DNA, 1808 bp, Oryza sativa
  Clone ID: PAT_MRT4530_22912C.1
gttgtaaagccagcccacctgaactcgaagcgtcatgaatcaaacaataacgatttggctgaaatacggaatgacaatgttccagcttcaattccacaaaagcagaaaacttctaaagcagagaggcgtgctattcaggaagctcagcgtgctgctaaagctgctgccaaggaggcaggcactggttcaggggctaatcctgcaatgcccaagcaagccaaatcatcaaaagtttctcagaagaaagatgtgccccaagctgcatctactgctgcttctgagaagaaggttactgaacgtccttcagaaagagataggaagaaagatgcgcctcaccctcgtatgcagtttgatgatgtgcaccgggtggagaaagcgtggatccccgcgctgctggatcaatctgaagcacgaaacagagttgaattgtttaggcacttgcctcagtatgtgcatggcactcaacttcctggccttgaatcaaagttttttcaacttgaaccaatgcatccttctgtgtacaaggttgggctccaatatttgtctggtgaggtttctggtggaaatggtcgttgtatagcaatgcttcttgcattccaagtggcaataaaagattactctacacctcccaaaaaaactctgagtagagatcttacagcgaaaatcagcagttatgtgtcgtttcttattgagtgcaggcctctgtcaattagcatgggcaatgctattaggtttttaaagaacaggattgccaagctaccactcacattgtcagaatcagaagccaaagccagtcttcaatctgatattgatcgattcattaatgaaaaaatagttgtggcagataaggttattgtcagtcatgctatcacaaaagtcagagacaatgatgtcttgctgacatatgggtcatcgtcagttgttgaaatgattctggatcatgctcatgaacttgggaggaagttccgtgttatagtggtagattctcgtcccaagcttgagggacaaggattactacgtagattagtggaaaagggcatcaactgcacgtatacacatattaatgccatctcatacatcatgcatgaagttacaagagttttcttgggtgcctcctcaatactatcaaatggaacagtttattctagagtcgggacagcatctgtggcaatggttgcacatgcatttggaattcctgttcttgtgtgctgtgaggcatacaaatttcatgagagggtgcaacttgattctatatgtgctaatgagcttggtgatccagatgtcattttgaaagttcctgggaaggcagatttgggccatcttaagaacttggcagacaatgaaaatctccaactgttaaatcttacgtatgatgccaccccttctgactatgtgtcgatgatcataacagattatggaatgcttccacccacaagtgtacctgtcattgtgagagagtatcgcaaagaacagctgtggatatagatgtactgcattatgacaacaattttggtaactgttgttggcttgctgcccaaagtgcgggatgcgtgaaacatgtacttctgtttgagagctctcagccgccaaaccttttttcttttgagcttatcaatttgtttgccacaagatggtccaattttgatatcaccatggctccgtctatgaagattgcactctggcacctctagaggggttatgttggtggtagtcatcaaacgttgtgatgcaaccatgctcgtacctatgtcttcctctcccgcccgggccatgcgcgtgatagtactgggacctgagatgaattcgag

SEQ ID NO: 17241 - DNA, 147 bp, Oryza sativa
  Clone ID: PAT_MRT4530_22913C.1
atggcaaaggttggaggccccgttttgagaaattctgataacttgcactgttgctggactgtagggcggcttaggttctgcgacgggttttccaagatcttcactcctgcttcacagctggcttcactgcttcctttgctacgctag

SEQ ID NO: 17242 - DNA, 631 bp, Oryza sativa
  Clone ID: PAT_MRT4530_22914C.1
ccggccgggccccaatccttctcccggccgtacaccatttcgttccgacgcgagtaattcctccccacgggcggcgactagggcggctagggttcgtcgggcgccgccgtgccggagatcgcctctcgccgccgacacccggatctccgccgccgccggtcgccccaggttatcccgctcccgcagtcaccatcccgtcttctccgccagtcgcctcacgcccggcctggacgccccggaatccattgtcggtctcgccccgccgactgccgttgacgccactggctgaaggtgtgaatatgtcggacagtgcgttgaaagatctgaatctagctcagtgctgggacttcacctgtgactttgaaattgattatggatccgaggaacgcgcatccatagtttacaaaacgctagctgttgataaggaggcactttgaagctgtagaggctcggttcctgcgagcatcgttcagcgcgttcgtcgatcttacagtactggttaccaagcttgttgaagaatatggcatcagcaaggaaggagaaggcagtatctagctagttttactcccctgtatcttagaaaatgtttttacacacttttgagcattcataccttcttttatatcatatt

SEQ ID NO: 17243 - DNA, 922 bp, Oryza sativa
  Clone ID: PAT_MRT4530_22915C.1
tcaggtgacccggatgagcaaaaccaccataatgaacatgcatgtcatcatgaagatgagcagccactggaagcatgtcgtcttggaagccaacgagtacacctctgctgctcgcgtggctgcacgcccagtgctcgccaagctatgctcaacagctctctcggtggaatcaaggatcttctctgtttcttgaacagattggtgcatggtgagactgctctctttcagttggcgtgctaactcaaccatttcgtcagtcagatcttcttgtagcttcctatgcttctcaatgtgagcctgcgcttctgcatccaatttaataggtgctccaatgtctctatcctttctcgcatgactgctaggtccaacatcggtgtgagctattggtctcctacgtaatcctgatgataatgatattggacttcctggcttttctccttcataagagctttctacctctctattctcatcaactggcacttcattttctggctctggaacagcaagccgggcagccaatgcttcaatcttttctgaatactcacttatcttagcttttgatacacttgatatcccttctggagtagtttctgctcctagctgctccaacaattccctggctgtggttacataatggacaagtttagcctggttctgctgccgaggagctgcctcaagcaaccttaacaagttcacttcaaccttgctaagcgccatgattattgattaatatgaggaaaaccttgtggctcgatgccgcgcgcagcgcatcaacgcgaggcggagcaatcagaagcggcgccaagcgagtccatggatgggggcagatccccccgagcccccgccgcctgatcttgctcccggcggcgaaggggaagcggccggcggacggcggcggtggtctggacgagcggacgcccgc

SEQ ID NO: 17244 - DNA, 637 bp, Oryza sativa
  Clone ID: PAT_MRT4530_22916C.1
ccgggctcgtgcgcccacgagcctggtcccctctctgcctcattccaatcccccttcgtctccggcgacgacaggaggaggaggaggaggaaagaggaggatcgcggcgcggcggatgtcggatcgggagctccgcccgctgcgatcgatccgaattacaggcgatgggagatgcctctttaggtctgttgcgtacggtgcctgcttaaggagaggaaagcagtcgccaagcgatagcatccagaaggagcttgccgatgagcttcgatcgaaagtagcagatgagtttgtcaggagaagaggggacactgaatggtttcttgaaggagatttcgagagctatgtgagacagataagaaagcctcatgtttggggaggagaacctgaactgctcatgtgctcccatgttcttaggatgcctatcactgtttacatgtataccaagggctctgatagccccaggatcatcgccgaatacggtcaggagtatggcaaggacaatccaatctgcgtgctctacgatggttacggacactacgatgcgctgcagccatctcttgagaggaatacagataaccgaagattacgctacctaagattgttctcaaggacagtatcaagatcctctgctacatga

SEQ ID NO: 17245 - DNA, 930 bp, Oryza sativa
  Clone ID: PAT_MRT4530_22917C.1
atgttttgtgaaaaccagattatattgcaaggttggcctcgttttctcacctttgctggaacaggggtttttgtcatattaatcatggtgcttagcaaggttgaagtgaacttgataaggctgcttgaggcagctcctcgacagcagaaccagactaagcttgtccattatgtaaccacagccagggaactgttggagcagctaggatcagaaactactccagaagggatatcaagactactggatgctaattttgtttacatgatgctgctagtttgctttggtggatgtgtatcaaaagctaagacaagtgagtattcagaaaagattgaagcattggctgcccggcttgctgctccagagccagaaaatgaaatgccagttgatgagaatagagaggtagaaagctcttatgaaggagataagccaggaagtccaatatcattatcatcaggattacgtaggagaccaatagctcacaacgttgttggacctagcagtcatgagagaaaagacagagacattggagcacctattaaattggatgaagaagcacaggctcatattgagaagcataggaagctgcaagaagatctgactgacgaaatggttgagttagcgcgccaactgaaagagagcagtctcaccatgcaccaatctgttcaagaaacagagaagctatggtatgttgacattggcaactgtttgggtagatccttgattccaccgagagagctgtcgagcatagcttggcgagcactgggcgtgcaaccacgcgagcggcagagttgcaacctgacaaggcactttgaagctgtagaggctcggttcctgcgagcatcgttcagcgcgttcgtcgatcttacagtactggttaccaagcttgttgaagaatatggcatcagcaaggaaggagaaggcagtatctag

SEQ ID NO: 17246 - DNA, 354 bp, Oryza sativa
  Clone ID: PAT_MRT4530_22918C.1
cttggcgaggcgtacgtgcgctggtaggggggggatttcatccacgctgccggttaggcctacgagcgggcgctaggacagggactgtcagccaggcaccgtcgccagcaatggcgagctgccgacgtcttcacatggcgcgccgacatggccacccagaagcccacctgcggcacacgaagggggactaccgcgtacttcccggagaaggagccggtgccacaggaaacgactagacggaaggcttccccgccgccgagcacgctgctgacgaacgtgcagaagctgcggctgctgaccacggcggagaaggcggtgctcctgtcgggagcggaccgctcctggctgacgctg

SEQ ID NO: 17247 - DNA, 796 bp, Oryza sativa
  Clone ID: PAT_MRT4530_22919C.1
actatcccaaccaagtatgttcagagttactcttgagaggcaaatcccataccaagattcaagaaatctggaattacaacagctgcttctatcttgtagatttctggcctaagaaacgaagaacacacataatatgatataaaagaaggtatgaatgctcaaaggtgttgtaaaacatttttctaagatacaggggagtaaaactagctagatactgccttctccttccttgctgatgccatattcttcaacaagcttggtaaccagtactgtaagatcgacgaacgcgctgaacgatgctcgcaggaaccgagcctctacagcttcaaagtgcacgacgagcttgccaccagaaacagacatctccctctttaccttgtcaggttgcaactccttatcaacagctagcgttttgtaaactatggatgcgcgttcctcggatccataatcaatttcaaagtcacaggtgaagtcccagcactgagctagattcagatctttcaacgcactgtccgacatattcacaccttcagccagtggcgtcaacggcagtcggcggggcgagaccgacaatggattccggggcgtccaggccgggcgtgaggcgactggcggagaagacgggatggtgactgcgggagcgggataacctggggcgaccggcggcggcggagatccgggtgtcggcggcgagaggcgatctccggcacggcggcgcccgacgaaccctagccgccctagtcgccgcccgtcccggccggttactcgcgtcggaacgaaatggtgtcccggccgg

SEQ ID NO: 17248 - DNA, 1653 bp, Oryza sativa
  Clone ID: PAT_MRT4530_2291C.1
atggcgagcggcggcggcggcgtgaggctgaaggccgggacgcggccgccgtgggtggggctagcggcggcggtgtgggtgcagatggcggcggggaacgcgtacacgttcccgctctactcgccggcgatcaaggcggcgctggggtacacgcagcagcagctcgccgtgctgggcgtcgccaaggacgtcggcgagaacttcggcgtcgtcgccggcgtgctctgcaacagcttcccgccctgggtggtgctgctcgtcggcgcggccttctgcttcgtcggctacggcgcgctctggctcgccgtcagtggcgccgtcgtcgccatgccgtactgtttgctatggattgtgctagcaatggcaacaaacagcaacgcgtggttcctgacagccgtgctggtgaccaacatgcgcaacttcccgctccgccgcggcgtcgtcgccggcctcctcaagggctacatcggcgtcagcgccgccctcttcacccaggtcttctccggcgtgctccaccgctcgccgacgagcctcctcctcctcctcgccaccggcctccccaccatatgcctcgccaccatgtacttcgtcaggccctgcacgccggcgacgctcgacgccgccacaaccgacgccgacaccgaggaagacggccatttcgccttcacccaagccgtgagcgtcgtcctcgccgtctacctcgtgacaaccaccgtcctcggcaacgccatcaaactctccgatgcaaccagctacacgcttttcatcgtcaccgtgcttctgcttcttgcgccgctcgcgatcccggtgaagatgacattgttcaggagttcgccgcggcggcggagtacagaaacaacggaggagccattgctgatcccgccacatgtggtcgtcgacagcggcggcgatggcgacgaggaggaatctgacaaggtggatttgctgctagcggaagggaagggggcggtggtgaggaggacgaagaggcggcggccgaggagaggggaggacttcgagttcattggaacgggtgtcaccgtgctgaacaatctggcacagattggtgttgctgctggtattggtgacactacggttttgttgtccctgtttgcgcttggtaacttctttggccgccttggtggaggtgcaatttcagagaaatttgtcaggtcgacattgttggttcctaggccaatatggatggcgttgacgcaaaccgtcctcgtcgtcgcttacctctgtttggcctatactctcggcccagccgtcgcctacgcttgcacggccaccgttggcctttgctacggcgtgcaattctcagtgatgattccaacgacctcagagctgttcgggctcaagaacttcggcctcttctacaacctcatgtccctggcgaacccgctcggcgcagcgctcttctccggtgagctcactggtcgactatacgacgaggaggccgcgaggcaacaacattctggtggtgtgtgccttggcccaggatgcttcagggccgcgttcgtggtgctcgccggtgcctgctcggtggggacggcggtgagcttggtattggcggcaaggatacagccggtttacatggctctctactctggcgggtcgttcaggttgcctaacgcgtcacagcaacattga

SEQ ID NO: 17249 - DNA, 1420 bp, Oryza sativa
  Clone ID: PAT_MRT4530_22920C.1
ggccgcgggttttttttttttttttttgcggcgacaagaactgactactatcccaaccaagtatgttcagagttactcttgagaggcaaatcccataccaagattcaagaaatctggaattacaacagctgcttctatcttgtagatttctggcctaagaaacgaagaacacacataatatgatataaaagaaggtatgaatgctcaaaggtgttgtaaaacatttttctaagatacaggggagtaaaactagctagatactgccttctccttccttgctgatgccatattcttcaacaagcttggtaaccagtactgtaagatcgacgaacgcgctgaacgatgctcgcaggaaccgagcctctacagcttcaaagtgcacgacgagcttgccaccagaaacagacatctccctctttaccttgtcaggttgcaactccttatcaacagctagcgttttgtaaactatggatgcgcgttcctcggatccataatcaatttcaaagtcactctgccgctcgcgtggttgcacgcccagtgctcgccaagctatgctcgacagctctctcggtggaatcaaggatctacccaaacagttgccaatgtcaacataccatagcttctctgtttcttgaacagattggtgcatggtgagactgctctctttcagttggcgcgctaactcaaccatttcgtcagtcagatcttcttgcagcttcctatgcttctcaatatgagcctgtgcttcttcatccaatttaataggtgctccaatgtctctgtcttttctctcatgactgctaggtccaacaacgttgtgagctattggtctcctacgtaatcctgatgataatgatattggacttcctggcttatctccttcataagagctttctacctctctattctcatcaactggcatttcattttctggctctggagcagcaagccgggcagccaatgcttcaatcttttctgaatactcacttgtcttagcttttgatacacatccaccaaagcaaactagcagcatcatgtaaacaaaattagcatccagtagtcttgatatcccttctggagtagtttctgatcctagctgctccaacagttccctggctgtggttacataatggacaagcttagtctggttctgctgtcgaggagctgcctcaagcagccttatcaagttcacttcaaccttgctaagcaccatgattaatatgacaaaaacccctgttccagcaaaggtgagaaaacgaggccaaaggattaagacatgcactgatctaggtgttaaacccttgggcagatttaggatgtcgatgtgccgttctctgaatccttcagacagatctcgatgcaagctgacagaaatgaaaaggcagattccttgcaatataatctggttttcacaaaacat

SEQ ID NO: 17250 - DNA, 282 bp, Oryza sativa
  Clone ID: PAT_MRT4530_22921C.1
atgcagcacgacgaacaccaggaggcccccgaggtcgagcaggaacgccgtcgtggccgccacgcgcgcgttgtgcgcgaatgccggctgcgacacggaggacaacgcccccgcggcggctcctccgcgccgtcaccgccggacctggaggaagaaggggaagggaaggggtggagcggctgtggtgaggaggtggcgtcgccgccgccgctcgccacccagccgcgcccgccgccgccgctcgcgccaccgcccacctctccccctgcgcacccccaataa

SEQ ID NO: 17251 - DNA, 653 bp, Oryza sativa
  Clone ID: PAT_MRT4530_22922C.1
cgggctgcaggaattcggcacgagggagagagagagagagagagagagagaggatgttttgagagagcacagctagaagcttggcttctcgcaacaagtgctgcatctctagtgagcgagcgagtgagagagacagccttggccttggcgttggtggtgtagctccagcctccaagcatccatccatgcttacataagtcagacagggagggaggaccggaaggaggaggagagaaagcgaagctttggttctttctttgcaccaccggttgcctccgttgatctccttgtcgatcgccggaagcaaaccgttgttggtgatgggcagcggcggcggtggctgcggcaggaacggcgctgtgaggcagtacatcaggtccaaggtgccgaggctgaggtggaccggggagctccactgcagcttcgtccaagccatcgaattcctcggtggccaagacaaggctacacctaagctcattcttcagctcatgggggtgaaggggctgaccatatctcatgtcaagagccacctccagatgtacagatgctccaggctcgtctcccatggcacgggaaggagatcagagatgcaaccacagctgcaaaggaagcactcatgtggtgctgatgagcaagtccccagagaattcctg

SEQ ID NO: 17252 - DNA, 843 bp, Oryza sativa
  Clone ID: PAT_MRT4530_22923C.1
caacaaaggtcttaattaggagctctctccattaggatcctcgagcttcaggaagctatctccaacaaaacatacacattcagatcaacttcagtgatggctgcagaatcagagacgccgcgaataacagagcttcatgtgaggatggactgcaatggctgcgagcacaagatcaggaagactctgcgtgccattgatggtgtgagcgaggtgtacgtagatgcagcgagccagaaggtgacggttgtcgggatcgccgacccggagaggatcgtcaaggcgatcaggaagaccaagagggtccccaccatcttctcccacaccgacccggcggcgccgccgccgccgccggccgaaggcgaggccgcgccaccgccagccgacgcgccaccgccggaggaagcaccggccgcagagccggcaccatcagaagcggcgccgccgccgccggcggaagccgaccaggcggcggctcccccggccaccgacgccaccgtcatacacatggtgcacgactacccgtacacccacgaccaccaccacggccacggccaccacctgttcggccgggaccactggccggcgagccaccatcccgccggcggcatggtcaactacggcggcggcgcgccgtactacgccgcgcacagctacagccacagggcgagcccgtacgtctcggagtacggctacgtcggctctccggctcaccatgagggcagattctacagcagccatgattactactaccctgcagctgctggtggcagagggaagggagatggaagccagatcacctccatgttcagcgatgagaaccctaatgcatgcaccatatcctaa

SEQ ID NO: 17253 - DNA, 458 bp, Oryza sativa
  Clone ID: PAT_MRT4530_22924C.1
gcaacccacaaagttaactacattttaaaccgtcgggagaaacactacccaaccgggggacgaggagtcaatggaacggtagcccatcaatccacatggaacgaagaggagacaagacgactgctggtatagagccaaaggatgaccgcaaagcgcgggaaggactatggataccatgcacccactatgagagggcccgtcccaggcacaccgacgatggaacccactgaaagcgaaagcaaggacgaactagacaggtgctgggatgctctaagctcaatcagggaaaaaattgcagaaaacgaaaggggcaaagcagacgcgaacaacaatgtcctcaagagagctcctcacccgccaaaactactgatgaacgacccatggacgaaaccgaactccagggagtacgctgcggtccctgcagggcggctccagagcgcaaagaacgggccaacaac

SEQ ID NO: 17254 - DNA, 289 bp, Oryza sativa
  Clone ID: PAT_MRT4530_22925C.1
agaccgagcctcaatattacagcgtttttataccgaaggtaaagcatggtgggaaagtcgactgacataaccaagacgggccgattccaattacacttagccatctggggggaaactgaaagggacaaacgcccataactattacaatcacagcagataaactcttacgccagataacaagtgaatgatggtgacattaccctacaggacatataattgtagagagaggtaaaaacggaaacagtaccaggcccggaaggggccggacaagaaataagcactaggaaga

SEQ ID NO: 17255 - DNA, 408 bp, Oryza sativa
  Clone ID: PAT_MRT4530_22926C.1
ccggtgttctataccccaacggccaactgggtcccggttgcctactgacgggccgtgcaggttctcaccggcaaagggcagggcggccccgagcaccgtcaacggcatgctctggtcggaccaccacctgcgccgactacatacagtggaggctcctcagttgggtcgaccggggtgctgcagcccggacgacaacatggcccggtgacaactacactacgaacagggtgaccatagaagtgagaacttaactatggcacgaacggaccctgcacctgcaccaatgtcatcaaaggcgatgaatccggcccccaccggcagcggaaggggcgggccgggagtgacccatacgatggtgctggacacggagagctacgtgacatgggagcagtgctcgacaagccccaa

SEQ ID NO: 17256 - DNA, 368 bp, Oryza sativa
  unsure (1)..(368): unsure at all n locations
  Clone ID: PAT_MRT4530_22927C.1
aagaaaccctagacctccgtctccggcgaccctcccgggacctcctcgccgcggctccccccgcctgacctccgcgcgccccccgtcgactcccccccgcgaatccggatcccgcgcgcgcgaggaaggagggggggaggaggagcggtagatggnaaagaaaccgccggcatcatggcgcgcttacgtcatggattcgcttgccagcgacgatatagtagagaccttgccgacgacgacgacgcctcaggtcacggcgaccccagcgatcgactagaagtgcaccgccggcggtcccctccccgttatagcggtcaacaggcgtccggttccgacgaggaactccgtgcaaccgcctacgaggtcct

SEQ ID NO: 17257 - DNA, 1621 bp, Oryza sativa
  Clone ID: PAT_MRT4530_22928C.1
ggagagagagagagagaactagtctcgagtttttttttttttttttttcacacaggttgaactaatgcattaattatttgagaggataaaaatgaatatacaataaatagggaatgtctcatatgcatcttagacacactagttgagtacatttctcatgcatcatgtacaagctaccactaataagaaagaattgaattcaatagcactttacatgcaggtacacccccctctcatcatgtcccaactcaaattcatttagggcttattcggttgatctcttaagaaaatgatcggggtagataaggtatgaaattaaatccgctgaattttttcttagaggagggagggattaaccgcacaagccctgagaaaacacccacacctatcaatgtatgcacctccctggcaccctccatgagaagtagtccatgttcccggcagcaaccctttccttatacgtcttccaatcgtcgagcacattcctcagatcgaagagcttgttgtgcagcccaacgcagcagttggcgtgcatggtgacaaccctgccgaggtccttgccgtgctggcagaacccgccgaagtggcccgtgtcgaggaaccgcacggtggcgccgacgtgcggcggcacgccttccttgacgatccggtcgaacacgaactgctcgtgcttccccgggaaccgcgcccgcgacgactgccagtgctcgtagaacctgacggtgctggcgctggatctgacgtacaggaggccgccgttggggtagttccctggtgaggttgggtcgccgacgaagaagtcggaggacatcaccacctgtgcatccggggataggtgcgggaaggggctccgaaaccacaggatgtccacgtccgtgaagaggaagctgaagccgagctcgaggatggtctgctggaacctgttcctcctccacatcatctccaggtagtcgcccttcatgtacgactgctcggcggcgaagtccatcccgtcgaccctgaaccagtagcagaattggtggacggcgttgcaccgctcgaacgccctcccgtccatggccaccaccagcaggtgccgcacaaggtgctccgtgccctcgccgtgccggaagctctccaggaacaggtccaggaacgaccccggagccgcccacgcctcgttgatcgccgtcatcagcaccgtcttgtccggcgtcgccgctcgccggagcagctcgcccaggtcctgctgctgccgctggggcggcgacgatggcgtctccttcctatttatttcctgttggcttgtgggcatcacgatccttcgctggttttgctgctgctctaccgagccgccgccatggccgctgcgcgaagccgcttcgtccttggtctgcttctcctctcttggagcaaccacttcctcttcttgcctccccgggcggccggtcccctgctcggcgtcgacgaccctcgtggccggcgtgacggtggcggtcccctgctcctgcgcatgcgcccagcgcggcggcgaggattttggaggcccgtcgccgaggtcgcggcagacggaggtgtagagcaggaagaagaccgtggcgagggccgcgccgagcaggagcgaggtggccgacttcgtcat

SEQ ID NO: 17258 - DNA, 829 bp, Oryza sativa
  Clone ID: PAT_MRT4530_22929C.1
ccggccggggagagaggaaaataattaaaaggaaaatggcggcggcggcggcggcggcgggagcgagaaagctcgccggaacactccgcctgctcgccgccggccgcggatccggctgtatccctcgggcgcgggcatctccatgcgagacgagtttccttccccaccgctcctactctgcggcgaaaaccggagaaaatggaagtgccactggtggcgggaagaggtcacggatccggaggatcgtgtcgattggggttatcagcatcgctggcggcgtcgcgcttagcgccctcaacgaccttgctatattccatggatgcagcagacgatggtgtactctctttcctacggcatcatgactgggacatacttgtcatggaggctcatcttcatgtgccttcagatgatgacaagcagaaaacactcaagatagaccttatagactgtcctgatcatcctagtagagtatccgactgtgagagtattccttgggaacgtcaagaacaggagagttaactatataccaacttgatgtagagttgaagacacctacctttctgccaacactcagaaaaaatagagcagatcggtctcgcatagcgatggctgattcggtgcttggcttccctctctatagcgtgtgtttgggcggttggcacatggttcggggcgtgtgctctggtgcacatccttcctcgacaaccagctgttgatgtaaaacttttcttacagccagctgtcgatgtaaaatttttcttgtaacattttcttcctatcttaattacattgatgacctcctcggtcattccggcaaaaaaaaaaaaaa

SEQ ID NO: 17259 - DNA, 750 bp, Oryza sativa
  Clone ID: PAT_MRT4530_2292C.1
atgcttccgctccagctgctctgttgcggtgtccacgaaaagctcatggttacccatctgggccttgcggatacctttatatcggttgatcagatgccccggttcgccgatgccaatgagttctgctgcccgggcaatccatcaaggcccatgagctttgctaccaagcttggggatttggacttctcagactgccctggtgcacaagatggcaatgatcttggtgctgccttcttctgctcattaggcttggataacgaattcttgtttggcatggctccacggaatccacttgtgtccggtgatctctcacaaccctctggccttctcttcttgtttgacactctcatgctccgcgacgcagtttggaacttctcgagcatcgtgagcgaatcctggaggtccatggctcctcttaggaggtcctccgcgaagcgcctcgagagcgaggatgccatcagattttgggactactttgagatccaaggggccaccaatcccaacctaacaaggtttgctagggaccagagcatgatcagaggagagttctgcctacacatgctcctagcggtaggtagcttccgggcggtggccgcatgtcgtgcgtcggtgcagcagcaggcgacggaggaggacggaggccgcgccgcgcggacggacgcggtggacggacgcgcggcgtgcggcgcggcgcagacgtgcggttgcaggggggagcacatgcgcgcaggctgcgacacggtgcgctga

SEQ ID NO: 17260 - DNA, 851 bp, Oryza sativa
  Clone ID: PAT_MRT4530_22930C.1
ggaaaataattaaaaggaaaatggcggcggcggcggcggcggcgggagcgagaaagctcgccggaacactccgcctgctcgccgccggccgcggatccggctgtatccctcgggcgcgggcatctccatgcgagacgagtttccttccccaccgctcctactctgcggcgaaaaccggagaaaatggaggtgccactggtggcgggaagaggtcacggatccggaggatcgtgtcgattggggttatcagcatcgctggcggcgtcgcgcttagcgccctcaacgaccttgctatattccatggatgcagcagtaaggcaattaaaaaggctactgagaaccaagaagttgtagaagcaattggggtgcctatagtaagaggaccatggtatgatgcatctcttgctgtgggtcatcgacgaagatctgtatcatgtacattcccagtgtctgggccacagggctcaggaatttttcaattcaaagctattcggaatggagacgatggtgtactctctttcctacggcatcatgactgggacatacttgtcatggaggctcatcttcatgtgccttcagatgatgacaagcagaaaacactcaagataaaccttatagactgtcctgatcatcctagtagagtatccgactgtgagagtattccttgggaacgtcaagaacaggagagttaactatataccaacttgatgtagagttgaagacacctacctttctgccaacactcagaaaaaagagagcatatcggtctcgcatagcgatggctgattcggtgcttggcttccctctctatagcgtgtgtttgggcggttggcacatggttcggggcgtgt

SEQ ID NO: 17261 - DNA, 355 bp, Oryza sativa
  unsure (1)..(355): unsure at all n locations
  Clone ID: PAT_MRT4530_22931C.1
cggacgtggatatttagaagccgccgttgcgtgggagagcaaagtggaagcagccgaaaccgaaactagccgccgccgncgccttcgcctccgccgcgccgcgncgcaccactcgcccccaaggtccctaggggtttcccgcgcgcggagtgtggggaggaggaggaggagnaggaggaggagnagncggcgncgagagtgcgagggcgaggtcgagatggcgtcntagagggtgaagtggacgntgaagtggttcgacgncaccaatggggttcggcttcatcacccccgacgaccggcgncgnaggatntcttcgttcaaccaaatnctcggttaangnccacctngttaccg

SEQ ID NO: 17262 - DNA, 261 bp, Oryza sativa
  Clone ID: PAT_MRT4530_22932C.1
atgcatggtgtcaactcacttgaagtggataaagatagcaacagcggtggttataaaagaagaaaggaatgtgagagggcagatagagatgagaagaaggagaaatcagttgacaatgttcacatggacaaatatggagattgcatcatcgagctcttcctctcgtcgtcgacgaatcgggtcagcttcatagctatggctggcgacgagccaggcgatgctgtcaagcacgctgtggctgtaccattaccttgcaactga

SEQ ID NO: 17263 - DNA, 1215 bp, Oryza sativa
  Clone ID: PAT_MRT4530_22933C.1
tcagttccttcctctcgcgacatttgcctgcgcgcatccggccgccaccggcaaggtcctcctctcccacgccggcgaggtcatgttccccacataggcgacctcctccttcctgcgtcggcgaggtcctcctctcccactccggcgaggtcctccttcccacgtcggcgaggtcctcctctcccacaccggcgagctcatgtttccccaaccgacaagctcccccccccacgccggcgagctcctcttcgtgcttgtatcgtccccgagctcagccgccgccacatctggttgccgccaccgcgcctcgagccgtcgctggtccaacctccaccactgcggcctccagctcgtaccaagctcagccatcgacgccctgcgctctccacggctccaccaccggtctaccgcgctcctagggagagagaaggcgattcgctgcgcctcctagagagaatggaggatgggctcgccgggactcgtcggcagtggcgccggacgaacgagtggcgaacggaatcaatggcgccggcacggacagagacagaagtggcatgggatgaaaaaaaattcacatctcaatggcatattctgaaagtagtacgaattgagtggcaaatcctgaaatcaacgcgtattcgggggcatattctgaaaattctcaaggtggagggggaaatagggtggatggatcaatcgatccaaatcgagccaccccgtcactgtgttcgctgcgacctcacaagtggggccaagggcaaaaccatccgcttggctatatggagaaaagaaaatgtcaaagaacctaagaaaataggaaaatgggctgaaagtggcggatccaggcgctgtccccgttgtcgtcgtgcccggcagctgaccaaagagccatcagtggggaaagagagtaggtggagggagaggaaagaagatggacgaggacccggccaggacttcaccaaatttaataggtcctctaccatcggctctatttgcaagctgtacaacagcatcaaggagcttggtgcgatgtatgaacatggctttgcttatagtgagctggcccagtttctgcaccatcgcaaaatcctgcgcatgttcaccatctacaagactacaataccacgcttctcaacaaaaaaaaagttcttctatgttgattggaggaggaagaagatcttcttgaatccatatacatcgttttattcctacggt

SEQ ID NO: 17264 - DNA, 519 bp, Oryza sativa
  Clone ID: PAT_MRT4530_22934C.1
atgttgaatggttggcctgggttggcttgggacgagctgggacccaggtcgggttgccagttcggtctgaatcatcgtaggctttgggttaaggcaggcctgaagtgcctttataataaggagattttggatgttgtacctttgcaagcccagccatcaagtccagaagtcaccccagcagtgcttcagattcctatggctcctgtcaaaaaaagggatgggaagactgttctgtataatcctgctagaagacaaagctctaggcttcttaatgccaaccaagagctcaaatttgatcagcaaatgggaataggaaaaccaaggggaaagtcagctaaaaaactgaaggagttggcagaagatgatataaactcagattcttccccttctgattgttctttatctttgttgcaaaagatgggggtggatctatgtggcctgaatcctgaggatgtggctgaatcaagcttagggggagaaacaaggaagaagcttccccggccaaatatggatgattag

SEQ ID NO: 17265 - DNA, 108 bp, Oryza sativa
  Clone ID: PAT_MRT4530_22935C.1
atggggcgcaacttggggagccacagaaaacgggccgatattttctcggcgaggaacggaacgaacaatttacctctgccattgatgacggaccagctgctgcaggag

SEQ ID NO: 17266 - DNA, 263 bp, Oryza sativa
  unsure (1)..(263): unsure at all n locations
  Clone ID: PAT_MRT4530_22936C.1
cccaaaancctgggttttttttaacagcccttgtttgaaagggcccccnaaaaaaaaaaagggggcccgggttccctnttntagagaggttttnggttntaaggggagncccgnacgtacgtgttgaggtacgacnacgtgttggtggaatcggtttttggtctttttttactcttttccccctaactagcggtcttcttgcggaatgcaagatggaagaaaaaataatggatgaaaaattttctgccaaaaaaaaaaaaaaa

SEQ ID NO: 17267 - DNA, 677 bp, Oryza sativa
  Clone ID: PAT_MRT4530_22937C.1
ggcacgaggctctctctctctctctctctccatcgcttcgttttttggatttcggcggcgcgtcgtctcgctctcccgccgccgcagccgcttgcacgacgaaatcagccgcccgaggcgccggattcctctggatctgaggggcgcaggcgcttccggagctctactcgccgggcttgtagctaaagatgaccgaggggaaaaatactcagcttgaccttgagacagaaggttcaagtaagccctgcagcaccccaaaaaaattgaaaggttcaaatgggaaagaattcttgaaagcaaaatttgattcccccacacttggagaagtctgaatctagaaggaatggggtcgttatcagttcacttgcaagaaaatttgcttgcagagaggtacaaggacagaatttgctgctccagttgttgggggatgaggatgaagacgaaactgatgatagcagcagtacttcgccagatggtagtagtccatctgtttcagaaagtattgatatctctggcacatctccaaaggataaatcaaatgatcttctcgagaagcacaataatttgctaaatctattcaatcgaatggtgagttctataaggttgctgcacctacggaagaagatgactacatttaagaacattgccacccaggtggaaatactcacaaagaggga

SEQ ID NO: 17268 - DNA, 1154 bp, Oryza sativa
  Clone ID: PAT_MRT4530_22938C.1
atggcctccagtccactcagtgcgagcgatacatcatacatcccatcactttcagcaagactagctgagatttgcagtccagatcgatgcatgttcttccatagccttctgctcgtcctcgccaacccagccgctgtgggcctatggccttcaccgaaggcgcccgatgcccctggccaggagggaggcaccggcgaagagggagacgtacgctggacaagtactacaaccggaagacggaagctgatccctgaccaaggaggagcagcagcagcagcagcagctggaggaggagaagcgctacggcggcggaagcggcaggggatcgaggttcagggcgcggcggcagaggcggagggcgggcgggggcagccaccagcagctgctgctcatggactgcgtcggcagcgggaaggagggcggggcgtcgtcggagagacggtgccgctgccggagtacgagcggctgtcgcagtcggcgcggctccccgacgacgcggacccgctgatgaagagcgacgccccggcgccgcccgcggagaagctgccgcagccgcagacgccgacgccgacggggacgccgaagctgcaggcggcggagcggaaggcgcagaagccggccaaggagcccccgtccccgccgcggtcgcagcagccgaagccggcggcgtggaggctcatcgagtacgtgcggtccaggaacaagtccggcggcggaggaggcggcggcggcgtggccgccgggtgcagctcctccgacggcgactccaagagctccgacggcgagaaggaggccgaggtcgacggcgaggacggcggcggcagcaaggacaagaaggacaagaagaagaagcgctcgtcgtggctccccgatcccgaccgccggtggccggtgcagggcttctactagctcgccgttgcacgccatggctctcaccgtcccgtcggctcgtcgtcgccgcagctcgtcgcacatgtgtacaattcggtgctagaattcatggcgtgtcactcgtgtcttcctcttcttcgttccaatttttcttccatttttttctttctttctgttttttctcctcctcctttgtgtaatgtcgatgtgaaggaagacgacgagataaaatctctcaaaaaaaaaaaaaaaaaaaaaaaaaa

SEQ ID NO: 17269 - DNA, 228 bp, Oryza sativa
  Clone ID: PAT_MRT4530_22939C.1
atggccctccgagtggatggactccagaccactgagactgaagagagcgtagagtcgaaaatcctagagttccgttcattccacagctaccaagagaccaggagcaccagagagtcgaagccagcgcgaagatgctcagtggcacgaataatattcatctctcaacgagagatctctcgttattcttggaagatctacgcgcaaggctctcgtataagccctaataat

SEQ ID NO: 17270 - DNA, 2663 bp, Oryza sativa
  Clone ID: PAT_MRT4530_2293C.1
cccgggctgcaggaattcggcacgagggagagaactagtctcgagttttttttttttttttttttttttggaaacgaaacattgctctttgtctattcatcatgccttcataccttgtgcacaaattacaattgtttcttggtgaagacaactccatcacttctttaggcaactctctaaatcattgcacatttttcattttttacacaggtgaaatgtaacacaagatagatacaaactggaaactggaaatcatgagaagtgccagccaagtggagaacaaaggtagaaattctccaagaacgcaagaaccacctaggcttcattttcccagatcaatgtacccacatgtccagagcagcttcttcgataagccctgataaaatgctctccccaacatctcttatgaagcattgtgtttcctccatgaaaatccaatcttcccagcccatatcccacacgctgttgatcgacgcatctgtgcatctcagatccttctccagtttcatgtatagtgtgtcttttgtagtgcagccatcgtcgtcttcggtatagatgctcagctttcgagtcgcatcgcgaatatctgtcagcaatgcctccagtgagaagtatggtgctgttctgcatttctggctccaaattcctgtgtaacacaagctgtttcgctgacgatgcttccgctccagctgctctgttgcggtgtccacgaaaagctcatggttacccatctgggccttgcggatacctttatatcggttgatcagatgccccggttcgccgatgccaatgagttctgctgcccgggtaaggaatggttgatcacttaggagaagcagactcatctcgtcttttatttcaacttcattttttgatactaagtgtgtcgatgggtgaaaaggatctccgttagctgaatcggttctttccgcagagctggtagtcactgaagcttcataggattcactcaaatcttcccgaatgccatcaatgctaggctctgtgtcccaatcaacaacactttggcagctttcatcactaggtgttgcgctatgttcagtggatggaccatcaacttgtatgaactctctgtgcagctcatatgccacaatgtcatcaatagttgagttcttgcgacttctactggacactgccttctccctcgaattactaggtgctttacgtgcgaccggcttccttgtgcgacatgttgaagagctgctacttgatgcaatcattgatttcttatcaggccttttcactgtattagcactagaccgagatgctgatcctgttttagacttggtatccttcctcccttctctgttcctataagtcgaatgaggtctttgtttgtcactacttctcctgcccatttcagtggtctcttttatttgttgctttcgacttgtgtgagatacaaccttgatatccttggctgctcgggtttgaggttgctctatgcctttttccctcctaattgttttcattgagccaatctcattaaccacagtagaatcatacagagaaacattactttttcgggaataaggagaactcatatgagcatcattttgctggaccttaggcatctcaatatcaaaaagtgcccttggtgaacttactgtcttcattgactcgtcttttttgaaggtattgctattgtgtgtaggcaatccatcaaggcccatgagctttgctaccaagcttggggatttggacttctcagactgccctggtgcacaagatggcaatgatcttggtgctgccttcttctgctcattaggcttggataacgaattcttgtttggcatgtaatgtaatgactggctcatggaagcctgttcatcattgggatataccgacaagatgttcttcctgtaaaagctatccttgatcactcttttcagctcatcagtagaattcgttaattccccatccaatccactgctggcgcttctacccaccatcttcttggcgtttgacgcttccgacagggctccacggaatccacttgtgtccggtgatctctcacaaccctctggccttctcttcttgtttgacactctcatgctccgcgacgcagtttggaacttctcgagcatcgtgagcgaatcctggaggtccatggctcctcttaggaggtcctccgcgaagcgcctcgagagcgaggatgccatcaggtaatctttctgcaacatcatggacatatcctccctgttgctttgtgatgggctccaatcccggccttggcagcctcgacaaaccgtaggttgcaatgtgacaacacaagggacagcacattgagctatttcagggtagctgctctctttggttttggaggaaagactctttgaaagggatctgcaaaccaccgacctgaaactgtcttgatgcattttctctattctctctagctcctctttcgcaagaacgcaggcctctctctccgaggttcgtctgctgcaagcctgcaactggctgattgcgcccccaagatcatctgaataatacaacaactctctgaagttttgaatcttgccggtcagtgagaatgtgtcctcgtagtccttcagctgtggggagagggtgatcaggcaagaggccccatgggccatggcgcatgtgccggcaacaccgagtccggatcggagctctgtcat

SEQ ID NO: 17271 - DNA, 353 bp, Oryza sativa
  Clone ID: PAT_MRT4530_22940C.1
tggagggctgatgcttgaagaggcgaaagatacatgcgaaacatgcgatggtaataccatgctgggagctgagctttggttctggcaagctgactgcctgagaaagaaaatcccctggtgcacaaaatgcttgtgggatgttgatgtgtgcgtggggatgtttaagagttgggaaaagatggtgcaaaatgcacgggtggtgattatggctgaagtaacatatgccgtgggtgctgattaatttggtgcttgttgtaatgagtgatgtgttaatgtgatttgtttttgctgctgcttgctgtgtgtttgctgtgtgctgtttggtgagatgcctatggaatgaccttggtaac

SEQ ID NO: 17272 - DNA, 596 bp, Oryza sativa
  Clone ID: PAT_MRT4530_22941C.1
atgcgatataatcatacagagatcagctatagcgaggcatacattgtacatacaccagcagaggtcgagatcgagtaggttttagttgagatcgattgaggctgagcatcgtctatggcgccgccggcggcgagcacggactgggggccgatcatcgtggcggtgatcctgttcgtggtgctgtcgccggggctgctgttccagctgccggcgagggcgagggtggtggagttcggcaacatggcaaccagcgccatcgccatcctcgtccacgccgtcatcttcttctgcctcctcaccatcttcgtcgtcgccatcggcgtccacgtttacgccgcctaattacttaattacttgaacttcttcttcttcccgttctgcctgcttgtttggtcagttcttgcgagtagcattaagcaggaacaggatgtgcatgcgtatatttgtatagttcttggtgaagagaaattaaaattaccgtttgtttcagtctgtgtgtatttacagaacagcggcggacgcaactttaaaatatagatgggacgaagaacgatttgttcaaaaaaaaaaaaaaaaaaaaaaaaaaaaaaaaaaaa

SEQ ID NO: 17273 - DNA, 645 bp, Oryza sativa
  Clone ID: PAT_MRT4530_22942C.1
atggcgagaggaagggaggaagggatatggggaggggggagggagggaatgggggggcctcagcagctgtcggcgaagggtggccggaggaagagagatagcacacagaggaagagagaaaggaggaaggcaccaaggaagaagaaatgggtggttgcaggggcgacctccgcaggtgccggtgacgggggaggtggccagaggccagactcgccgacccccagtgagagccccagaagaccgcccaaagccgactggcgccgctacggcgccacgcggacgccggcaatccgccgcccacgcaccggcgcccgcatcgccgcgcccgccgccttgcacggcagagcgagccacctcgtcgcgatgaccccgccacctcacaagccaccagacgccgcagcggtcgcctccagccacgactcctccgctttgtgctgccccaagacaccgccgccggcgcaccgtccagatccggcgacggcggtgccgcatctgccgccgcttggccgggatccatcgccgtcgccactccccaccgccggcgagaactccacctcccccacgcctgagagggagcaccaccgtggagaaagccccgccgacgccttcctagctcgccggccggctttgccggcggcgaggtag

SEQ ID NO: 17274 - DNA, 147 bp, Oryza sativa
  Clone ID: PAT_MRT4530_22943C.1
gggggttaaaagatgattggctaagttaaaattaacattaattgaaatgattaaaaaacacagatggcagtaaagcacggcacaggaccagaagtggcaacattacaagggtagataatataacatggagtttgacacaagattggg

SEQ ID NO: 17275 - DNA, 281 bp, Oryza sativa
  Clone ID: PAT_MRT4530_22944C.1
atgacggttgtggcagttggaatggtcggaattgccttccaaccgtcattggggagtgatccacgccgtccagccagaacctggatccaacggcgccaggggaggttcggccgaaccagggccggcccatcctggcccaaaatcggcaggtggcctcctgaacttctccactccgcagacttgtgaattttggcccaattcatcgtgtcaattctgagttcttggcctattcatacataagtctggttctcgacatcatccaattgatttatcgtctgagt

SEQ ID NO: 17276 - DNA, 351 bp, Oryza sativa
  Clone ID: PAT_MRT4530_22945C.1
gcaacacctactagtcaagctaatatatatgcagagtacaagcacttgctagaacaaactcacgaacatatgcaggggagtcaaatgtgcccatctatacgaggctaacggaaattgagacacggcgacgctacttgtcatctcatgatgtcctactagcaattgttgtcattctgcggccattattcttgctgaaaatagctggttattatgctatttatttgcttagaagcgtgatcgatgacattaactgtatgctttttgaaagcttgtttgtacctcgctttgttattctaatttctttactttacgggtttgttagtttcttaatattttctttttcatcatttt

SEQ ID NO: 17277 - DNA, 506 bp, Oryza sativa
  Clone ID: PAT_MRT4530_22946C.1
cacgagggatttatgtaatactagtgctaaagcatgcatgcatgtatcacagctagctagctctgctttgcatgcgacatcgtccaattgaaaacaaagataccctttggccaaaagctcatggccacaaattaaaacaaaacaaaggaacatgttcatatctttgcatgatcttgaaagttcaaaccctctcagccttgctctgcttgcaccactgcgaaagaacagagcacacattacaaagcaaaccgaaaaaacgaaaaaaaaaacaacggcactatttgaaacatagaaatattattttatcaaagatagatttaaaaccgagcctctacatctaaactagatatacacagccaaataaataatgcaaaaatctgacactacatatttctgccattgtaaaactatttctagtgaaacatccgagacacgtatatatgacatcaatttctaagataagtgaaaaattgtttacatctccggtatccaccgatcaatatatt

SEQ ID NO: 17278 - DNA, 466 bp, Oryza sativa
  Clone ID: PAT_MRT4530_22947C.1
tgtgcatacaccgcgaaacgtcagaaattgtaaatatgaattcctgacaaaaaggagatgtctttgtatgcgagtttgtaagatataaaagagatcactgctgcctgttcattacagttcatgcaaattatatgaactatgtttggacttgtctttgcatcacctctcttctttacttccaatcatgcaagatgttaatttcaccaagatgattcatgactgtcggtgcaggatatggctgtgtcttgcctctttgatcttttatcaatctgtgattgttaagagattttgattcactcatcaagctatgggacttgccgacttggtgtttcttcatctctcttctttacttccaatcttgcaagatgttaatttcaccaatatgatggattcatgactgtcggtgcaaggagaagggttgtgtttagcatctttaatctttcatcaatctgtgattgttgagaga

SEQ ID NO: 17279 - DNA, 537 bp, Oryza sativa
  unsure (1)..(537): unsure at all n locations
  Clone ID: PAT_MRT4530_22948C.1
gacggaccaagagcgcgcggcgagtgcgagcgnccggcgaagcggaccggaggcgggcaagcgcgcggcggctggcggatggggacggtcgtcactcggctccgcgtcgtcgccaccgacgtccccgaccgcgtgcccagcctcgccggcctcgacgccgaccatctccctctcgacgtcggcgacgagcgtggagtccgggttgccgccccacggaggcgcagccgccgttgccgcggtgcgggcgccgagcacgctcgtcaggcgaagcacgaacgtggtcttcccgcacccggagtcggcagccagcccgatcaccaccgtcccgcctgacgccgccgccgccacggagcacgacacaaaagcgagaccaaggagtagggagagcttgcagtgtggtgtctgttcttgcttgatgagttgctttcctctcttagctcgttgtcagctcagcctcagctcagcgacaaagtatcgatcaaatgagttgagctaagatatgcaggatgcttagctaaaaaaaaaaaaaaaaaaaaa

SEQ ID NO: 17280 - DNA, 507 bp, Oryza sativa
  Clone ID: PAT_MRT4530_22949C.1
atgacgctcctgttggtggacggaggcgactgggtggcggccagggaagcgcgtgatgcggcgaggccagcgatgcgggcggcgcgtcgcagcggtggccgtggtgatggcaaacggcggctagaggcagtggaggcggcagtgtttcggagcgaaggtcggggtgcgaagaagccggcgaagaagctggctagagagctccggcaagcggcggcgcacggactcgccgtgaagagagcgggagggggcgcgaggagcttggggaggaggggaaacatacgaggggagcgcggggagagattttatagcttcggatgcggagatcgtggccgatcggggcggaatcaaccggcaacggccggcaaagtgggggtgctgacgtggaggaggtgggctcgattccgtcgccgaaaattggggaaaatagggaaggaggtggaggacgtggggcagaccgcgtccacgccgtttggactcgggaatgggggcgagtggtggcggatttag

SEQ ID NO: 17281 - DNA, 675 bp, Oryza sativa
  Clone ID: PAT_MRT4530_2294C.1
atggccaccacggaagatggttttcgtagttgtgcacgaaggagtggggacggtgggatggagtgcaacggtgactggtgtgcgcggctctcttctcctccatcggcgacgagccactcctgcgatgagatgagattgcccgcatcgtcgtcgtcggcggcggggctgcaggagcgcatctgggacctccacgacaatctcagccacgccatcctctccctctccgcctccgcccaccgctgctgccgccgccgcgcccccgaagggcgcgtggtcgtcaaggggtggcggcggcagggaggatgtggggactgcggcctggagcaggaggcggctgcggcggccaccatggcggacgcgcggagccttcacgccgtccgcgccgcgctcgaggacctcgagggccacctccatttcctccacaacattcaattatgtcaggtggcagaacgagatgccgcgattgctaggctgcagcaaagtcgtattctgcttgctacaagattggctgaacataggtggaagaagcatgaagttattgaggaggccttagcttttgttgatgatgcgcttgacaagagtcgatttgtctcaccagaagatgtccgtgggacgcatacacacagccaatcagtagagaaccagtgccccaagatacatgattcaaacttcttg

SEQ ID NO: 17282 - DNA, 471 bp, Oryza sativa
  Clone ID: PAT_MRT4530_22950C.1
ggaccttgtatcattggcttgctacaagtatctgtacggtgtaattggcaacccacataggatttggcatggatgtgcaattgcaaggtccttgaccggggttagattcgttttggggtggcggataatggtttggtatgtaagtactatagtttggtaggtttgaattgtgtggccaggggtattggttacgatttctgggtgcgttaggcgaggtgacaaaactacccctatgcgcaaaaaatggagctgatgtggttgccctgaatccaagagtggtgattccaatctgtaacttcaatttccaatacctgaaagccaagcctactattctttttaccggcgctttacgacttaccaacaaactagagccggggggataagatgaagccctagacattctgcctgtcttgttaagtggacaaacaaggcaatctaataatttaagaaaaagccgggatcaaggctttg

SEQ ID NO: 17283 - DNA, 435 bp, Oryza sativa
  Clone ID: PAT_MRT4530_22951C.1
cggacgcgtgggcaagcttcttaaagggtgatttaagacatcgcaacaggtcaagggagtcacttgttcgtgttgaacttgataggatatctgaggagtcaccaatgcataatcctaatagccacctaagcagcaacacaaaaactaaggaattgactatttgtaaattaaagatgagagcagttcaactatcgactgatcatagtacaagtgttgaggaggaagtctcgaggattagggcagaacatcctgacgaccctcaatctgtatttaatgacagggtgaaaggacagttgaaggttacaagagcgtttggtgcatgttttctaaagaagccaaaatttaatgacatactacttgagatgtttcgcatcgactatgttggaacatcatcatatatcagctgcaaccctgctgtccttcaccaccgtcttt

SEQ ID NO: 17284 - DNA, 403 bp, Oryza sativa
  Clone ID: PAT_MRT4530_22952C.1
tcaaaaaaccgcggaggggggggggccttacggggaggcgacggcggcggggtcaccggggaacggcggcgaatgtttcctcccccatattcaaccttctcacaccatgacaatgtttacataactgtacaattacctgatgcaaaagaagctaaagccaatctggaaccagaaggcgtattcactttctcagatacagctggaactgaagggaacttatacgaatcaaagctagagtagaacgacaaagtaattggcgaagagagcaaaaaaagtgtaggaagcaggaccatattctgtattgaagaaaaagctgaggccaaatggaggaagaagctagatagagacgaacaaaaggcaccacactccgtgaaagttgactgcgacaaatgggtagatgaag

SEQ ID NO: 17285 - DNA, 3368 bp, Oryza sativa
  Clone ID: PAT_MRT4530_22953C.1
atggtgctgggactgggtgtagccaaccagccagccatgggtaacagcacctccagggtcgttggctgcttcgcaccagcagacaaggccgccggtggcggcgtcggtttggagttcctgcagccgctggacgaaggactcggccattccttctgctatgtccgcccaggggccatcactgactcgccggccatcacgccatccaactccgagaggtacacgctcgactcctccgtgctggattcggagacccgcagcgggtcattccggcaggaggttgtcgttgtcgacgacctggcggcggcagccatggccgggttgcagaggccgagcaagagtttctcggagaccaccttccggacgatctcgggggcctccgtcagcgccaacccgtcctcggctcggacaggcaatctgtgtgtgtcccttgctgctgatgtgcaggagcctgccgccgcattcgagagcaccgcctctttcgccgccgttccgttgcagccggtgccacggggatcagggccgctcaataccttcttgtcagggccgcttgagagaggatttgcgtcggggccgctggacaaaggcgctgggttcatgtctgggccactggataaaggagtcttcatgtctggtcctattgacagtggcaacaaaagcaacttctcggcacctctttcgtatggtcggaggaaggctggtctcggacagcttgtacgtagcattagcagaccgatgagaagtgcgctgtcaagaacatttagtaggagctcacaaggtactggttgggtccaaagatttctgttgcatcctatggctcaactgagcttgtcgagggatgcaaagggcacttcggaagattcacataatgggttggaagctgggctccctgagcttgagtatagtgtaacaaggaacctgcagtgggctcatggcaaggcaggagaggatagggttcatgttgtcctctctgaagagcaagggtggttgtttattggaatttatgatggttttagcggtccggatgcaccggacttcttaatgagcaatctatacaaggccattgataaagagctggaaggactgctctgggtttatgaagacagtcctgaagggagtgctcaagtatctactcttggagagggtgaatccgttgcagttcctcaggacctgcctgatggaggtgacattctgttccaagctgatagtgttgaatcagaacaacttgttaattctgaggaacaagatgtatccaatgtgaagataagtgatgggggtgcttcgcaagttcagatggatttgaacaccagtggtcagagagatttagtgttgcaggcttcaagtaatcagaagttgaatgctggtgaaatagtcgaggaaaaggtgggggctgatatggggaataatctccagagtacagagtcttataactctggtagagatatttcaaatacagatgtaaacactagctttggttgtacatcagatgtaaacactagtacttgttgtaatgaagatgtcaaatcaccgaaagaaatcaggagcagacgactttttgagctacttgagatggaattgctcgaagaatataatagaaatgtttccaaattatcaccagagggaatgaaagggaggagcatatttaatatgcaggcaggaactacagaagaaagctctagggatatagccgagctctctaggtcttcaatggcagcaactggagaatgtcttgatgattttgagaatgataaacattcaagatcaggtgacggtgtgcttggggtagatccaaaagagtgtaatgaatgctcaatttcatcatcgtcatcagggcacaaacaaattctgagaagatatttgtttgggtcaaagctgaggaagatgtacaagaagcaaaaattgttgcagaagaagtttttcccttggaactatgattggcatagagaccaacctcatgttgatgaaagtgttatcaaaccttctgaagttactaggagatgcaaatcaggaccagtagaccacgatgctgtattgagggcaatgtcacgggcgcttgaaaacactgaggaagcatacatggacgtagtggaaagggagcttgataaaaatcctgagctcgcgttgatgggttcatgtgtgcttgtgatgttgatgaaagatcaggatgtatatgttatgaatcttggagatagccgagttgtcttggcacaagataatgagcaatacaataactcaagcttcttaaagggtgatttaagacatcgtaacaggtcaagggagtcacttgttcgtgttgaacttgataggatatctgaggagtcaccaatgcataatcctaatagccacctaagcagcaacacaaaaactaaggaattgactatttgtaaattaaagatgagagcagttcaactatcgactgatcatagtacaagtgttgaggagggaacagatggggctgttgtcccatcccctgagctgaagcttgtcagaggtcaagattttcctgtgtaccataagccaagccaaaaacctgcatttgttttcagtcttcgccttccaagttcccaatatcaaatcctgtttcagattgaccaaaaccaaacgcaggaagtctcgaggattagggcagaacatcctgacgaccctcaatctgtatttaatgacagggtgaaaggacagttgaaggttacaagagcgtttggtgcaggttttctaaagaagccaaaatttaatgacatactacttgagatgtttcgcatcgactatgttggaacatcatcatatatcagctgcaaccctgctgtccttcaccaccgtctttgctcaaatgaccggtttcttgtcctgtcctcagatggactgtatcaatatttcagcaatgatgaggttgtttcacatgttgcatggtttatggaaaatgtaccagagggtgatcctgctcaataccttgtagccgagctgttatgccgtgcagcaaaaaagaatggcatggactttcatgagttgctggatatccctcagggtgatcgccgaaaataccatgatgatgtttctgttatgatgttgcagaagggaatgtacaaaagagacacttccctatttctaagggagcttaaaagcttgatcatgaatgaatgacacttagcgtagtgcattatcaatcagaaaaggcatcattgtcttgttcattgtcttcagtttttgaagttctgatcaaatttcattaggcaatacatagtgccttttctgccttaacattttggatttgtggtgcatgcttggccagtccaactttgacttaaacatgtttcttgtttcttattagtaaaaaggttcatttttgtggggatttttaaaaaaaaaaaaaaaaa

SEQ ID NO: 17286 - DNA, 648 bp, Oryza sativa
  Clone ID: PAT_MRT4530_22954C.1
atggtgtgcatacggcaggcgacgatcgacgacctgctggcgatgcaggcgtgcaacctgatgtgcctgccggagaactaccagatgaagtactacctctaccacatgctgtcgtggccgcagctgctgttcgtggcggaggattacggcggccggatcgtcggctacgtgctcgcgaagatggaggaggacccctcggagccttgccacggccacatcacctccctcgccgtgctccgctcccaccgcaagctcggcctcgccaccaagctcatgtccgccgcgcaggctgccatggaccaggtgttcggcgccgagtacgtctccctccacgtccgccgctccaaccgcgcggccttcaacctctacacctccacgctcgggtaccagatccacgacgtcgaggccaagtactacgccgacggcgaggacgcctacgacatgcgcaagccgctgcggcagccgcagcccaagaagcaccaccatcaccaccaccatcatcacggccccgaaggaaatggagaggctgaaggagttggtgagcccgttggacttgcatctggtgcactcactcttttgataagaagtccagcgaaatcatttcctaaggaaacaaaagatatgtactgtgattatgtgtgtttgtag

SEQ ID NO: 17287 - DNA, 238 bp, Oryza sativa
  Clone ID: PAT_MRT4530_22955C.1
aaaaaaattaaccaaagaacaaaataatacacataaatatacttgatcttctttgccaaaaatatgccattgcaggatagtacctaactttctatgcactttgctttctgctgttcatgacatttctcttatcttatgcaccttgcattgtgtatatttgtcattaactcactagtactggaccattactagtgcatcatgtttatgttgcaccccttttcaatcctttaagctgcct

SEQ ID NO: 17288 - DNA, 1821 bp, Oryza sativa
  Clone ID: PAT_MRT4530_22956C.1
cataaggtcatatgacttcttttggcaaacaataacttcacgcaggtgttttgagtcaaggagatacaccaaaaatgactttatgcgtgctacagaatgtagccaagtacatatgcccagatgtgccaaaaaaaattccgcaagtatggggagatattacaggcacgacagcaaatgccaagtagctaacaaaagtatttgtacgtccatcaaacagaattacagtggaccctggcccatgggtgaatcatcggccaacaaagatgcctacaaacacacataatcacagtacatatcttttgtttccttaggaaatgatttcgctggacttcttatcaaaagagtgagtgcaccagatgcaagtccaacgggctcaccaactccttcagcctctccatttccttctgcaatcacaataatgcaacttatatctctatgctcactattcaggcataaaaaaaatcaaaacaggaaaacaccaaatgtctgagatgtatgagttcatgtcatattgcatgctgtttcaggcataaaagaatcaaaacaggaaaagagttgatgtcatattacatgctgtttcaccaagtaggttgtcttaaaagaagatacttggatctacaacatatccattttgcagacagaacaatcattgacagttcgtaagtgaagcaatcataacaaatgaaacaggggggagagtggatccccgcgaagcaggaaaaggtaatatgacatattttgtctaaagctaacttcacgcattttttttgttttttttttttttaccaaaaatgactttatgcgtgctacagaatgtagccaagtacatatgcccagatgtgccaaaaaaaattccgcaagtatggggagatattacaggcacgacagcaaatgccaagtagctaacaaaagtatttgtacgtccatcaaacagaattacagtggaccctggcccatgggtgaatcatcggccaacaaagatgcctacaaacacacataatcacagtacatatcttttgtttccttaggaaatgatttcgctggacttcttatcaaaagagtgagtgcaccagatgcaagtccaacgggctcaccaactccttcagcctctccatttccttccatcatgaatcggtcttctctggcgaattagaggacggcggagaagacccagatgccgcgggaggagcatcgtgtgagcaacaaccaccggggccgtgatgatggtggtggtgatggtggtgcttcttgggctgcggctgccgcagcggcttgcgcatgtcgtaggcgtcctcgccgtcggcgtagtacttggcctcgacgtcgtggatctggtacccgagcgtggaggtgtagaggttgaaggccgcgcggttggagcggcggacgtggagggagacgtactcggcgccgaacacctggtccatggcggcctgcgcggcggacatgagcttggtggcgaggccgagcttgcggtgggagcggagcacggcgagggaggtgatgtggccgtggcaaggctccgaggggtcctcctccatcttcgcgagcacgtagccgacgatccggccgccgtaatcctccgccacgaacagcagctgcggccacgacagcatgtggtagaggtagtacttcatctggtagttctccggcaggcacatcaggttgcacgcctgcatcgccagcaggtcgtcgatcgtcgcctgccgtatgcacaccatcttcgccttcgccgccgccgccgccgactacttctccggcgtgatgtggtggtgggtgatcgcgatgcggacggtcccggccggactagtttagagcgcc

SEQ ID NO: 17289 - DNA, 540 bp, Oryza sativa
  Clone ID: PAT_MRT4530_22957C.1
atgaaactcgacggggaaggggcggccggggtggagttcggcctcacgaacccgacggcggcgacggcgcggtgcggggaggggagggccggacatggccgggagaggcgggatcgcgccggccaacgtggggaagtgggggaggagagagaggcgggattcgaaaatcgaatcccggccatctggggcgcgggcgcgggcgggagagagaggggagtgggcgcgggagatgcggcgcacgcgcggacgtgggcgacgtggcccgggggaggcggaggcgtgggcgcggcggcggcggttgcgggcgcggcggcggcggttgcgggcgcggcggccggcgcggacggcgggaggttggggaaggacccgacaggaggagaacttccgggtgtgacaaggcggctgtggtccggcgggggcgggagatgccgcggcgtcgtctctctctctctgtgcatggtggcggtggagggggcggacgaaaaatccccgcatttggttgtgattttgggaattgattcccttgtatccgggatttga

SEQ ID NO: 17290 - DNA, 679 bp, Oryza sativa
  Clone ID: PAT_MRT4530_22958C.1
ccagcgcgttcagccacgcgtctacgcacgcgtgcaagccaagaaaaaacaagaagcaaaaaatcccaaagcaatctagctagctaaataacattagtttagtgcaagtgcaagaacagctagtagcttagcttagagagcaaattaagatgagctggtggcagagccagaagatcatccgcaagggaggagcaggaggaggaggcagtactgctgctccggccaccgccgccgccgccggcggcatcggcggcggcggtgccggcgaggtggcggtgcagaaggtgtaccacaacctggcacccaagccgaccttcaggaagatcgacagcatcaaagaggacatcaacaagaaggctgacaggttcatcaagatgaccagggcaaggttgttcaaccagaccaagtccttccggcagccggccggctcgccgccggcgacggcggccggccgtgatgggaaactcttctgatcgatcgatccactcgccgtatatgccgccactgcaaataaggagcttaattatttaatatctacttaattatgtgatatatagccatgttatcatgatccaggtagaactgatgatgaactttatagatggcggtgcatgtattaattatttgtcctacttaggacgacgtgatgatgattatttatggactaaataatttcatt

SEQ ID NO: 17291 - DNA, 1435 bp, Oryza sativa
  Clone ID: PAT_MRT4530_22959C.1
attgcagaatcgggaattaattagcttctcttttttttaattattaagcaccatttggcacacatggctagttacaacttacagttctctcaaaagacacacacagtcacaaagaattaatacagatcatcagccaaagaatagagagctctagctcttgatgcacaaccaaccaaccatacacacacacgcacacacaaaatgcacgttacatacatgatacgtcacgttgtcacggcgagctaagctatggcttaccgatttgcatcaggcgaccctgcagtttgccctgaccttgccgctgctgccggtgagcacgccgacggcgcccatcttgaccatggcggcggcgaagtcgctctggaaggtggaggcgtcgttggcgtaggcgaccacctggacggcggtgttcttgtcgccgagcagcgcctggtcggaggagagcaggccgcggttgttcatgacgcccttgaagaagccctcgtcgaaggcgttgggggtgacggcgtccatgggcacgagcgcgccgccgccggcggcgccgccgctctgcgggcactgctgtgccagctgcgccacgtacgccgggtccatggtcgggtcctgcccgccgccggcgccgccggccgtcgtgcccgcccggtacaggcggctgctgaacgagctgcagtgcgacgcgccgatggtgtgcgccccggacagcgccaccatctcccgctggctcagccccttcgccgcgaacatctgcgtcagctggctcacgctcgccgtcggcggcggcaggttgccgccggtgtccgacgaccgcgacacgctcccgtcccgccgccccgccggcacctggtacgcgttcccgccggtcagggcgacgctgtcgcgggcggcgaaggcgaggatgtcggcacaggagacgacgccgaagcaagcctgctcgacgcgggccttgatgcggtcgaccacctcgaacccacgcaggctggtgttcggcccggcgtccttctccgcctggttccccttcgtcgagtcgatcagcaccgacgcatcgcaccccctgacgaagcagtcgtggaagtggaggcggacgaggccggcggcgaggcccgggttggccgacaccgccttgctcacctcctgctgcacgatgatctccgccgccgggcacgagttgtcgtagaaccccacccgcagctgcgcctccagccccgtcgccatcgccagcaagctcaccgccgccacctgcaagtaccacgacagcatcgtcgcaccaccgcctctcatcgccattgccactaagctcacactagcacactcactttagtactaaactgctctctttatatacggcttagtgatagtgctcgctacaacgcctatcttttttatacaggaatggacggacacatcgatcactagctatggctatgctccatgcctg

SEQ ID NO: 17292 - DNA, 311 bp, Oryza sativa
  Clone ID: PAT_MRT4530_2295C.1
gggagtaccaagtcggtccctgccccggcatctctctcggcgaccagctctggatgtctcgtttcctgctgcaccgtgtggccgaggaattcggtgccaaggttacttttgccccgaaacccattcccggtgactggaacggcgccggtctgcacaccaacgtgtccaccaacgagactcgtgccgatggcggcatgaaggccattgaagccgccatggagaagctgtccacccgccaggctgagcacatggccgtttacggttccgacaaccagctccgtatgacgggtaagcacgagacggctttttac

SEQ ID NO: 17293 - DNA, 579 bp, Oryza sativa
  Clone ID: PAT_MRT4530_22960C.1
atggctgtgctttgggccgggctgtcgggcctcggggcatatggtcatctaaatgccaggaaaaaaatcacgcgggagatgtttagcaaaatcgatctccggatgcaatgcaatcatgcagaagtgcgcgacgcgagctctgccggtggtcactcttgtgagtcttgtccagttgtcctggagcttcacatgctgcgagagcctgcagcgttcggcctgccgacgcggtcggatattgattattgccaactaattcaagattatggcagcgctggcgccacgatcggcttgcgcatccgccgcgtggaggacctgagcctgcaggagacggaggcggcggagtcggggagctgcccaccgctgtacaagaggattctgcagggcagcaacaggaacgtcggccacaaactcctcgtcaaggacaatgcaggttgccttcgtggtcagtgcgccgctcgtgcgcggtgcgccctactcccaaccccaactccgcccgtgcagccccgtctacaggtgccaccactagtcttgatgatctcgatgatctttgtcacctggctggatatatggattcattga

SEQ ID NO: 17294 - DNA, 186 bp, Oryza sativa
  Clone ID: PAT_MRT4530_22961C.1
atggcctcttgctgcgcggcgctggttgatggtgtcgcaaagatcgatggggcgccttcgatgtggggagtgtggtcgttcaactcggcgctccctatatcgttcggaaggcaaacgaatagaccgttcatcgtgtcccctgctcctgcgactagattcggcgccggcaatgctgaggcttggctg

SEQ ID NO: 17295 - DNA, 214 bp, Oryza sativa
  Clone ID: PAT_MRT4530_22962C.1
atggcgaacggccgcctcgggccatccaggacgggacgccgtcgggaggaagcggaggagagggagttgcaagtcagcccgttccattgggtcacgacgcgcagcacaccggcagcgtttgatcgacgaggcggtggaacggctgcgccgctgcggctgcgacattcgccgctgcaggggcggcagggtcccaactcccaagccctgaacggtg

SEQ ID NO: 17296 - DNA, 206 bp, Oryza sativa
  unsure (1)..(206): unsure at all n locations
  Clone ID: PAT_MRT4530_22963C.1
tcattagtagcagctgctgtcgactagtcgatcagccggctgatcagctgataagacgtcttgtggagtactcctccttcatgtatgtatggggngcngcngcntctcntntnntntctgtttttttttttttgtggatgtattttgttctttatttncaaaacatgtgtgtctatatatatatatttctttttctttgtatatat

SEQ ID NO: 17297 - DNA, 2125 bp, Oryza sativa
  unsure (1)..(2125): unsure at all n locations
  Clone ID: PAT_MRT4530_22964C.1
cacgccattccgcccgtggccatttgcacccaagaaacgccattgatgatagggtaagctgctgagctaagagtaagagctctcacattagctagctgtaccacacactacactagcagctggagcagcacacacatcacactacaatgtgccactgctcgtccaaggtcgtagccgtagcacaatgccaccagcctctgctcccgccaccggaggcatgccccgcccggcatgaccgccccaggtcggcgcgcggcggcggcggcgcgatcgccgaggtggcatccatcgtgcggctcgccatgccgatggttggagctgggctgctgatgtacatgcgctcgctggtatccatgctctttcttggccggcttggccgtctcccgctcgccggcggctccctcgcgctcggcttcgccaacatcaccgggtactcggtgctgtccgggctcgccgccgggatggaccccgtgtgcggccaggcgttcggcgccggccgcacgtccgtgctcgccgccgcgctccggcgaacggtcgtgctgctcctcgccgcgtccgtgcccatcgccgcgctctggctcgccatgcaccgggtcctcgtcgccgccggccaggaccccgacattgccgcctgcgcctacgagttcatcctctgctcgctcccggacctcgccgtgcagtccttcctccacccgctccgcgtgtacctccgcgcgcagtccatcacgctcccgctcacgtacgccgccgccgccgcgctcgcgctccacgtcccccgcaacgtcctcctcgtgcacggcctcggcctcgggatccgcggcgtcgcgctcgccgccgtctggaccaacctcaacttcttgctgttcctcgtggcgtacgcctacttctcaggtctgattcgtggcgacgacgacgacgacggcggcaatggcaaagccggcgaggagggcgcgacgacgacgacgacgacgatggagtgggggtggttggtgaagctgtccgtgcacagctgcatgtcggtgtgcttggagtggtggtggtacgagatcatggtgctgctctgcggcgtgctcgccgacccgaaggcggcggtggcggcgatggggatactgatccagaccacgtcgctgctgtacatcttcccgcactccctcagctgcgccgtgtcgacgcgcgtcgggcacgagctcggcgcggggcggccggagcgcgcgcgcctcgccgcccgcgtcgggctcgcctgcggcgccgcgctcggcgtcgtggcgtgcgcgttcgcggcgtccctgagaggggtgtgggcgcggatgttcaccgccgacgccaccatcctgcggctggcgtcgtcggcgctgcccatcctcggcgccgccgagctggggaactgcccgcagacggtcggctgcggtgtgctgcgcggcagcgcgcggccggggagggcggcgaggatcaacgtctcggcgttctacggcgtcggcatgcccgccgccctggcgctggcgttctggccggcgcgcctcgacttccgcggcatgtgggccggcatgctcgccgcgcagctggtgtgcgcggcgctgatgctgctcgccgtgcggcgcaccgactgggacgagcaggccgcccgcgcgcgcgagatcaccggcgccgtcgccggcgtcgtcgttggcgatggcgacgtcgtcgtcaaaggcgatcatgcagacgccgccaaagtaaaggcagacagtggcttgctcgtggtcacagtgctaagttgattgccatataatggagtattcttgactccttaaaattcgtttttttttttacctttttgatctttttttgaagcatccattggaaatttttaggtattgaaacgatggatatttggatgatacatgcatcctactaattttttcctcttcgaaaaaattaactatgtacatgatcgaagagacgagaaatcttctggcaaggtaatcgtgtgtgtgcactattatgcagcngtgaagatcgagttgcaaatagcggnacggtgatgtgattgtacacgtggcgnnctcacagcgctttggcctaatctagtatatacttttgggcnctaattaactactgttaaaccnnatataaaaaaaaaaaaaaa

SEQ ID NO: 17298 - DNA, 1545 bp, Oryza sativa
  Clone ID: PAT_MRT4530_22965C.1
atgactaggtttggtattttctctagccggtatcgacagatagcatatcggcaagagggattggaggtttatacaggtttagtggggcggaagtgttactccgacaacctcgaacagagaggaggaggagaggggcgtcgaggctccggtagtggagaggcagcgacgccggcggccagtggtgttcccgggtacagaacacctagggaaggaagtggtcggcaaagggggttaagggaatggctggaacggcgagcacaagaccgtgaaccgacaggagagagagagcttcggtggggcttgatatgggacgaaagagaaggggaaaagtggaaaaatgggtttgccggagtaaggcaagggattagccttctcagcgaggtcacccacgtttcgacacgggtgataaccagaggagacgtggtgctgcgattgcggggctcaagtgtgtgcgcattcaagaagccggatcgatttgtgtcgcggctccgcccaaatcgttgtttatcagaacctttcggaagatcgggaaccctagtgcacatcactgtcattggctatcgtggccctaggacttcaactcttcttcaagggctcagcagagaaccagccgataccggtaaaaagagaaaaaccaggtcatcggctgcagatccatcggctcaagctccaaagatgaaagtcaagtcaaagaaaacgaagccaactgatgatctgcctgccctagatccatccattgaacaagctctggatgaagaagaaatcggcgaggatgttgaccaagccgcagatgaaagtgatcaaactccatcggctgtagaaagccaccatattgaagaagaagaacaaccagctgttcctgctatcccagccttagccgatctgttctctttcgatattaaagactatcttgatgaagaaacagaagaagacaccaccagcaagtctttagttcccttgtccgatgatgtgaagaaaacccttgaagacatctctcatcggctagaggcatcatcactagacaacttggtggtaaactgtgggccgattaggactcggttacacaagatccaacctctaatcccagatgagctagccgatgtcttcacttcagctgtctatcttgagcagcatcaattcaagctggaaaaagccaaattaagactagccgaacgtcgggagcgcaaggacattcaagtcaatcggctgcttgtgcacgaagagaagtccaagcttgatcagctatctgagggcccgatcaagtccaatattgatcggctcgaagcccgtaagattgagctcttggcacaacttgaagaatgcaacgccgagctggatatggaacataaaaagctagccgatctcccaaaatctatcgaagaacagaaggcaagactaaaattggccatcaagaatgttgctgatctcaccaagtctttaaaagtcatccctggaactgacactcaagatgcccaagtaattgaagaagtagaacaaatcaggcaaagggctatttcggctatccagcaatatttgtctcaatga

SEQ ID NO: 17299 - DNA, 1179 bp, Oryza sativa
  Clone ID: PAT_MRT4530_22966C.1
agctgatgagctgagctaatcagggcagaacaaaggcaggaggatatagttttccaagatcctagggccggcctgcatcaaaaagaaggatgcatccgagcggcggcgcgctgtcggtgccaccggggtttcggttccacccgacggacgaggagctcctctactactacctgaggaagaaggtggcctacgaggccatagatctcgacgtcataagggagatcgacctcaacaagctcgagccctgggatctcaaagatcggtgcaggatagggacggggcctcagaacgagtggtacttcttcagccacaaggacaagaagtacccgacggggacgaggacgaaccgggcgacgacggcggggttctggaaggcgacggggagggacaaggccatcttcctcgccaacgcctgccgcatcggcatgaggaagaccctcgtcttctacgtcggcagggcgccccacggcaagaagaccgactggatcatgcacgagtaccgcctcgaccaagacaacgtcgatgtccaggtaggcgggtgggtggtgtgtagggtattcatgaagaagagctaccagcgaggcctcaacccggcggacatggcggcggtcgacgacgacgacctcctccaccaccaccaccaccccttcccaccggcccagctccacggcggcgccgccgaccacaagcacgacggcgccggcggccaccaccaccaccacctcatgcagccgcaccaccactacgacgacttcccttccttcgacccctccatgcagctcccccagctcatgagcgccgaccagccgccgccgccaccgccgtccctcctccccggcggcaccgcctcgtcgttgcagaggcttccactgcagtatctggggtgcgaggcagccgacctgctcaggttctccaagtagagagattatccctccatgcatgcatggatcacttgaactaagctagcttaattagctgccaccgataaatgagcagttgatgatggtgatgatgatctgaatgatcagctcatgtttttttggttagactggttaatttgatcttccttttggtatggagcttaatgcttccaagtgtatatacactctatgctatgctatgctatgttttcccatgtgcatgcatgcaaatgtggctttgaaaaaaaaaaaaaaaaaa

SEQ ID NO: 17300 - DNA, 1129 bp, Oryza sativa
  Clone ID: PAT_MRT4530_22967C.1
gcatccgagcggcggcgcgctgtcggtgccaccggggtttcggttccacccgacggacgaggagctcctctactactacctgaggaagaaggtggcctacgaggccatagatctcgacgtcataagggagatcgacctcaacaagctcgagccctgggatctcaaagatcggtgcaggatagggacggggcctcagaacgagtggtacttcttcagccacaaggacaagaagtacccgacggggacgaggacgaaccgggcgacgacggcggggttctggaaggcgacggggagggacaaggccatcttcctcgccaacgcctgccgcatcggcatgaggaagaccctcgtcttctacgtcggcagggcgccccacggcaagaagaccgactggatcatgcacgagtaccgcctcgaccaagacaacgtcgatgtccaggaagatggttgggtggtgtgtagggtattcatgaagaagagctaccagcgaggcctcaacccggcggacatggcggcggtcgacgacgacgacctcctccaccaccaccaccaccccttcccaccggcccagctccacggcggcgccgccgaccacaagcacgacggcgccggcggccaccaccaccaccacctcatgcagccgcaccaccactacgacgacttcccttccttcgacccctccatgcagctcccccagctcatgagcgccgaccagccgccgccgccaccgccgtccctcctccccggcgtcccaccctccgccgccgctgccttgagctccctcgacgtcgagtgcccccagaacctcatgaagctaacgtcggccgccgccggaggcggtgccaccgggctgctccacgccggcggcgaccaccgcttcgccaccgccgccacggactggtccatcctggacaagctcctcgcctcgcaccagaacctggaccagctcttccagggcagggtcatcgccggagcgtcgtcgccggctgccatggctgctcctagccaccaccagcatctcatggatcagctcgccggcggcggcggcggcaccgcctcgtcgttgcagaggcttccactgcagtatctggggtgcgaggcagccgacctgctcaggttctccaagtag

SEQ ID NO: 17301 - DNA, 297 bp, Oryza sativa
  Clone ID: PAT_MRT4530_22968C.1
atggagattgttggtggcagtggtgcttgctcgatttcaagattggtgcaacaaagactgcaccgtctgatcaagttccttcgtgcgcgtggcggcgtgcggaggagagcagccaggagcgaggcgctaatgggcggctgggcgcgcgtccagccccacgcgcggcgcagcctatttgaatacgcgtacacaaaggacggcgcgagtggcggctgcctttgctggcccaacagcagccatgggccagcacggcccaaacagagggagaaggtggacgatgatgggctgggttgctag

SEQ ID NO: 17302 - DNA, 1050 bp, Oryza sativa
  Clone ID: PAT_MRT4530_22969C.1
atgatggccggcggcgacctgcgcagcctgttggccgtcgttgccgcggtggccgcggccatgtcgtacgttcgcttcgtggcgcgccgcctccgccctggcctgccccgcctcgccgcgttcgtgccgctgctcgccgtcctccccgtcatcccgctcgcgttccgcgcgctccatctccgcgtcacctccgggttcttcctcggatggctcgcggagttcaagctgctgctccttgcctcggggcatggcccgctcgacacgtccctcccgctgcccgccttcgtcgccatcgcctccttgcccgtcaggcgacgcgcgcagcgcgattccgagaacgccccgcgcccgggccttggcctcgtcacctccgccgtgatggccgcgctgctcgccaccatcgtgtcggtctacccccacaaggagcggatgaacgagtacgtcctgctgatgctgtactcgctgcacgtctacctcgcgctggagctcgtcctggcgttcgccgcggcggcggcgcgcgcggtgatggggatggacttagagccgcagttcgaccggccctacctgtcggcgagcctgcgggagttctggggcaggcggtggaacctgtcggtgcccgcgctgctccgccagtgcgtgagccgccccgtgcgcgcgcgcgtaggcggcggcgtcgccggcgtcgccgcgggggtgctcgcggcgttcctcgtctcggggatcatgcacgaggcggtgatctactacgccacgctgcggccgccgacgggggagccgaccgcgttcttcgcgctgcacggggcgtgcgcggtggcggaggggtggtttgctgcgcacaaggggtggccgcggccgccgcgcgccgttgcgaccgccctgacgctggcgttcatcctagcgacggggttctggctcatcgtcccgccgatcacgaggaccgggactgacagggtggtgatcgcggagagcgaggccatggtcgcgttcgttcgggacgccggaagctgggccgccgcatccgtccgatcggctttgaccggccactcctag

SEQ ID NO: 17303 - DNA, 273 bp, Oryza sativa
  unsure (1)..(273): unsure at all n locations
  Clone ID: PAT_MRT4530_2296C.1
tcgcccactccttctcccacgcgttcccttataacctcttccctttcataatcaactcgatctagtatggggccggttcatttgcttttctanatcacctcctctttctaacaacttttcgactatcggtgatctgatcatatcatatcatatcactgttacatctactatcaggcaatattttcctaattcttttattcatcaatcattatgttatgtctttccttctgcttttgccttgataatattgttattctagctaacctttctaac

SEQ ID NO: 17304 - DNA, 174 bp, Oryza sativa
  Clone ID: PAT_MRT4530_22970C.1
atggagtattccaagggtattgaatccaagggaacgcactggcaacctgctgtttccagatgtcgctctactacgtacccggacagggaggacgtaagtgctcttgagggctgtcaccacctctacacctacctcaaacgtactgtgggatatgcagcaaccactggcaattaa

SEQ ID NO: 17305 - DNA, 405 bp, Oryza sativa
  Clone ID: PAT_MRT4530_22971C.1
atgaggtgcatccgctcgttctcggcctcctccagcagcgcgcgtatccagtcgccgctgtgctcgaagctagtggcgctggctcagtcccgggccttcctctccgactgcctcatcaacgccaccaccggtcacccctttatcttcgagggcgccttcttcctctccctcgccacccgcatcaacttcggcacccccaccaccgaccccgtccgctaccccgacgactgcgtctgggagtccgacatggcgcgcagcccaacttcctcgttgaggtcgcgcccgctaccgctcagacctgaccgaggctcgagagcgaagctcggcggccgtggcccctcgcccgccgtcgccgccgtggccccccgcccgccgtcgccgccggcggcgccccccgcttgctga

SEQ ID NO: 17306 - DNA, 297 bp, Oryza sativa
  unsure (1)..(297): unsure at all n locations
  Clone ID: PAT_MRT4530_22972C.1
gcctcgcttgttcatcttcgtctcgggtctgcctgaaccttagcgccatggacggcagtggtgtgcgccggatttaagctttgtttaggctgatgggtcttcatgcttcggttcatcttcgtctcggctctggagttcttgtaagtggacgaaacgatgaaacttgaagtgaagaactgaaggggggggggagttgctgnntgcnncatnannnnnnatnatcncnnnatcggtgtagctaaccctggcnacngcgangcannanttgacgcacgcgcccaacgtgcgggtggtcgg

SEQ ID NO: 17307 - DNA, 586 bp, Oryza sativa
  Clone ID: PAT_MRT4530_22973C.1
ggagagaggagagaagctagggttttcggcggccggccgggagaggggggtttttgatcctccgatctcggcgcccggccgtccgatcgaaaccctagctgatcggacggccggcggcggccggaccgaaatcggcccaagtggggagcgcgcggcggcggctttcccggcccaggcccaggttgcggcctgggggaggggagggggcgcttgcccgcgcgcaaagtggccataggccgaccggcaaaggccggaaaagttcaatttaggtccctcggggccgaaaatgaataaaagagaacagtagcaatttttccattttattttgtcgatttttcatgcaaatttcaatagaattttgaatagatttttgcatgttttacctctgtttaaatttgaaccaacgggagaattttcacagagagagaattacagagattttgctactgttcatatgattttatatagtcttccgctgcaaatagatgaaattgatgaaaattagtgtttctaaaattaaatttcgaaccaacgggagaatttaattttaggaacattaattatgtgctatgatgttgtaattttc

SEQ ID NO: 17308 - DNA, 1974 bp, Oryza sativa
  Clone ID: PAT_MRT4530_22974C.1
atggatccgaactttccataccagtcgccgtcgttcaccttgggtgatttcgaccccaactacatgtcggggtttgacggtacctccggatcggctccaactccaccatctgtggaggaggtacctgttcatacggctgtcgttgaggaggtaccggttcaggcggcgacagcttcggaaggattttccggaaccgcgagcggaagtgtttcgacacacaccggctcgaagagatcgagaacctccgttgtgtggcaaaacttcgacgagataaaggaaacatgccccgacggaagggaggtatcgaaagcccgttgtagaatatgtaggcaaattttatctgctcgttcttctggtggtacaggtcacctcaagcgccatgcggagtcgtgtgccaagaagcaaggaatacaactccggcagcagcaacttatggtaaacccagacggtacggtacgcagttgggagtacgatcccatggttgctcgggaatctcttgtccggttaatcgccaggcaagatttacccctgaactttggggagtcccctgcttttgaacattacattcagcaatctcataaccctaggtttaaagctgtgagtaggcaaacatcaactagagatttagagaatgtttatcacaaggaagcaactgcacttaaggaactgtttagtacatgtactttctctgttagtgttacttcagatatatggagtagtggagctagagaggattatcttagcgtagttgttcattttgttgatgatgattggcaattacaaaagagagttttagggcttaggttaatagatgtctcacatacaggagaaaacatagctgaaagaattagggaagtaattaatgaatttaatcttgctgataaaatatttgctgtcaccctagataatgcatctgctaattctagggctattgaaatattgcaacctttattttgtgtgtatgctcaatcttttctactccatcagcgttgtgcatgtcatataattaatttgattgttaagactggcatgaagaggtcacgtggtggcccaagaaacagtgacgggtcttcagtactgaacgagcatgtttgggcaattgtccaaaaatttcaccaatttctagaaactttttatgattgtactctaactttgtcacaagtttattatccaactgctaatataattttgcacaaccttcttgaaattgctacattatttaaagaatacgaaaatgatgacgttctaactgaacctgtctttcacatgaaacaaaaatatttgaaatattggaaaaatatacctatgttgtatgcttttgcttttgttttagatcctaggtgtaaattaaggggattgtctgctattttatcacttgttggagatactataggtgtagattatagttctttttatactgaggttagacgtaaattatatgaggtttttagaagatatgaagtaaagtttcaggaagttcgccagcagagaccccctcctatccccactacaggtaagaagaagatacagtggggtaggatttggggtggatcgtcttcaagttcaatccaaggtggtggcagttcgtcggctacaagtggagacgcctcttcgcatgttgtggccgaagagttgtccggttatttggacagcgacgccatccaccacgaagcacaagatttcaacgtcctcgggtggtggaatgaccacaagataacatatcctgtgctttcaaaactagcacgggatgtgttgacggtgcccgtgtcgacggtgtcctccgaatcggccttcagtctatgcggccgaatcatcgaagaccggaggacgactctgcgcagcgaccacgtcgaaatgctactaagcgttaaagactgggagcttgctcgacaacatgcccaatacactgcggacaaccaagaattggccgcccagttcgagcaactctacctggatccagaccaaccccagtag

SEQ ID NO: 17309 - DNA, 1608 bp, Oryza sativa
  Clone ID: PAT_MRT4530_22975C.1
atggatccgaactttccataccagtcgccgtcgttcaccttgggtgatttcgaccccaactacatgtcggggtttgacggtacctccggatcggctccaactccaccatctgtggaggaggtaccggttcatacggctgtcgttgaggaggtaccggttcaggcggagacagcttcggaaggattttccggaaccgcgagcggaagtgtttcgacacacaccggctcgaagagatcgagaacctctggtgtgtggcaaagcttcgacgagataaaggaaacctgccccgacggaagggaggtatcgaaagcccgttgtagaatatgtaggcaaattttatctgctcgttcttctggtggtacaggtcacctcaagcgccatgcggagtcgtgtgccaagaagcaaggaatacaactccggcagcagcaacttatggtaaacccagacggtacggtacgcagttgggagtacgatcccatggttgctcgggaatctcttgtccggttaatcgccaggcaagatttacccctgaactttggggagtcccctgcttttgaacattacattcagcaatctcataaccctaggtttaaagctgtgagtaggcaaacatcaactagagatttagagaatgtttatcacaaggaagcaactgcacttaaggaactgtttagtacatgtactttctctgttagtgttacttcagatatatggagtagtagagctagagaggattatcttagcgtagttgttcattttgttgatgatgattggcaattacaaaagagagttttagggcttaggttaatagatgtctcacatacaggagaaaacatagctgaaagaattagggaagtaattaatgaatttaatcttgctgataaaatatttgctgtcaccctagataatgcatctgctaattctagggctattgaaatattgcaacctttattttgtgtgtatgctcaatcttttctactccatcagcgttgtgcatgtcatataattaatttgattgttaagactggcatgaagagggtaggtgaccacatcgatgctgttcgtcaagcaatcgcgtggttaactgcttctaacccgcggattgctgcatggaagaggttttgcaatgcggccggtgtgaaagctcgtaagaagaagatacagtggggtaggatttggggtggatcgtcttcaagttcaatccaaggtggtggcagttcgtcggctacaagtggagacgcctcttcgcatgttgtggccgaagagttgtccggttatttggacagcgacgccatccaccacgaagcacaagatttcaacgtcctcgggtggtggaatgaccacaagataacatatcctgtgctttcaaaactagcacgggatgtgttgacggtgcccgtgtcgacggtgtcctccgaatcggccttcagtctatgcggccgaatcatcgaagaccggaggacgactctgcgcagcgatcacgtcgaaatgctactaagcgttaaagactgggagcttgctcgacaacatgcccaatacactgcggacaaccaagaattggccgcccagttcgagcaactctacctggatccagaccaaccccagtag

SEQ ID NO: 17310 - DNA, 11398 bp, Oryza sativa
  Clone ID: PAT_MRT4530_22976C.1
atgaagctcaagcggcgacgcgcggtggaagtgcctccaaatataaaatctttcattgactgtgtcactgccactcctctcgagaatgtagaatccccgttgaaagattttgtgtgggagtttggcaagcagcatctttcttcactactagcatctacagatgcggatatagttgagggaagcttagagacattgagggcatttgtaaacaaatcagttggtaaaagctctatacggagcgcatcactcacatcgaagttatttgccttttctcaaggttggggtggtaaagaaggtggtcttggattaatagcttgttctctacccagtggatgtgatccaattgccactgagattggctccacactccactttgagttctatcgaggtgctgataaatctgacaagtcccaatctatagataattgtcacaggttggaaatcatacatttaccgagcatcataagctgcaaggagaatgatcttgaaatattggaaaagttggtcaaggattacagtgtgccaccatctttaaggttttctcttcttacaagattgagatttgcaagggcatttgactctctggcatatcgtcgccaatatacctgtattcgcctttctgcttttatcgttcttgtgcaggcaagccatgactcagaaagcctagcattgtttttgaacaacgaaccagaattcattgatgaattattatcgttactaagctatgaagatgagataccggagaaaattaggagattggggatcctttcgttggttgctttgtgccaagataggtcacatcaacctactgttttgtcctcagtaacttctggtggtcatcgtggtatccttcccagtctcatgcaaaaggcagtggattcaatcatcaatggttcgacaaaatggtccacagaatttgctgaagagcttctatctcttgtctccatgttggtatcatcaactccaggttctttagctcttcaagaagcaggctttatacccactattttacccctcctcaaagacacagacacacatcatctacatctagttagtactgcagtacatgtcattgagggcttcttggattaccacaacccttcttctgcattgttcagagatctaggtggtctagatgacactattgcacgcttaaaaatagaagtgtcgcaggttgatattggttcaaagaaatcagaagaacctcagtctatgagtaaaggtaaagaagttgaaagtagtttgcctccgccagatatgcagactgttcattctgaagcgttaatttcttataatcgaaggaacttaatgaaagccttattgcgtaccatatctctggcaacatatgtgcccggtagctctgctcgtgttgatggttcagaagagaatgtattgcctccttgtttatgcaccatatttaggagagccaaggagttcggtggtggggtgttctcacttgctgctaccgtcatgagtgatctcatacacaaagatccaacttgctttactgtccttgatgcagctggtttgccgcaagccttcattgatgccatcatgggtggcattctttataattctgatgctatcacatgtataccacagtgtttggacgcactttgcttaaacagcagtgggcttcagttagtaaaggaccacaacgctttaagatgctttgtgaaaatctttacttccagatcatatctgaaagctctgggtggggacactgcaggggctttatcacttggacttgatgaattattgcgtcatcaatcgtcactgcgatcttctggagtggacatgcttattgaaatcttgaacaccatctcaaaagttgggtgtggcggagagtctagttcttgtacagaatctggtaactcctctacgccacttcccatggaaactgatgtgcagggaggtacttcaaggagtgaggttggaacttctgaggtgggaagttctgagaagatggtagatgcttccctagatgcaacatcatcgtcaatcgagtcatatcttcctgaatgcatatgcaatgttggtcgtcttattgaaactattctgcaaaattctgacacgtgtaggttgttcagtgagaaaaagggcattgaagctgttcttcagctgttcaaattgccattaatgccggtatctgtttcagttggacagagtatttcagttgcttttaaaaacttctcatctcagcattcagtttctctcgccagagcagtttgctcattctgtagagatcatcttaagctgactaatggactgctgggttcagtttctggaactaagctggttattagtgatcatgtgaagcaatcacctctcctgaaagcactttccagtcttgaagggttattgtctctttgcaattttcttctgaagggaaacgccttcatggtctcagaactggcttttgctgatgctgagatattgagggaactaggtaaggtttatattgaggtcacatggcagatatctttacttagtgattccaaggtggagaagcaagacatggaacaagatgatgtgcctggagatgcctcagtctcaaatttatctgaaagggatagtgatgatgacacaaatgcagcatcagttacaagacatatgaatcctgtttcagtgagaacgtcctctgtatcaccatggaatatggaacaagatattatatcagcagtgcgttctgctgccagcatacatcgccatggtcggcacacgctatcaaggatacgtggtcgccttagtggagctatggatgcagcacatactgatatagacagtcctttttctccaggagaaagttcacaaagtcatgatactataaaaaagagtcctgatgttgttgtttctgaactcctgacgaagcttggacacacgatgcgttccttcctttctacccttgtcaaaggattaccagctcgccgtcgtgctgactcaagtctgactccagcctctcgaagtcttgtgattgctcttgcacaactttttcttactgctcttggttattctggacattctactgctggctttgagatgtcattatctgtgaaatgccgatatcttgggaaagttgtggaagacatggcagcacttacctttgacagcaggcgtcgatcttgcaattctgcaatagttaatagtttctatgtgaacggaacattcaaggagcttctaaccaccttcgaagctaccagtcagttactttggacactacctttctcagtcccaactactggctcagaccaagcttcctctatcagtgaaaaggtgtctcacaattcatggctgctggatacattacagagttactgtaaattgctggaatattgtgtgaactcttcatttttattgtctccttctcataatcagcttcttgttcagcctatggtcactgaactgtccattaatctgttccctgtgccctcagagcctgaatcatttgttcgtattctgcaatctcaagttttggaagcagtcctacctgtttggaatcatacaatgttccccgagtgtagcccgtctcttatcacttccttgatctccattgttagccatatatgctctggtgttggtgctctaaaacaaagccgtgcaggtgttggagctgcgaaccagcgtcttacgagtccccctcttgatgagtcctctattgctacaattgttgagatgggattttcgcgagctagggcagaagaagccctaagaagtgtcagaactaacagtgtcgaaatggcaacagattggttgttcagccatccagaagagtttgttcaagaagatgtccagcttgtacgggcattagctttgtcacttggaaacaccactgaagcatccaaggaagatggttgcaataagaatggtccaagtgtcgttgaagataaaggtgtcatcttgcttcctttggatgacattcttgctgtatcaacaaagctcttctcttctggtgatgacatggctttcccattgactgatcttttagttacactgtgcaaccagaataagggagatgaccgtcagccggttatcttatatctttttgagcaacttaaacgttttccatcagattcttcagttgatgcaggcgcattatattcttttgcccgtttgctggccttacttctgagtgaagacagtagcattcgtgaaattggtgcagaaaatggcgtggtccctcatgttcttaatttattggaaaaccttaaatcaaggacagagaaaacagatcaaacttggaattctatcagtgctttgttgcttatattggacaacatgatacaatatgctccagcacttgatatagaaatgccggaagggacttctaaagtttcttctgatgcatcaaatgctgattgcaaggtaaatccatctctgtttgctgagaagaaaactgaaactgattattcagcaacatatccaaatgttcatgtgtttgaaaaggttatgggaagatccattggctatttgactgaccaggagagccaaaagatactgttgttgtgctgtgaattcatcaagcaacacgtgccagcaattgttatgcaagctgttctgcaactttctgcccgtttgacaaaaacacataccctcgctgcccaattttctgaaaatggaagccttgcatctcttttgaatcttccgaagacttgcatctttcctggatatgagactttggcatctgctatcgtgcgtcacctcattgaggacccccagactctgcagagtgctatggaactggaaattcgacagtcactaagtacccgtggcagccatgcctcgcgctcttttctgacaaatatgtcaccactaatatctagagatcctgtgatcttcatgagggctgtaactttagtttgccaactagattgctcaggaggtagaacgaatgtagttctgttgaaggagaaggagaaatataaggagaaacagaaagtttctacaactgaaagtggtgcactgggtaatgagcctgttcggatgactgctgatactaagacgattgatacagtgaacagatgttcacgaaaccagaaaaaggttccaactagtctttcccaagttatcgaccaacttctggtgatcattatgagctactcatccccaaagaaagaacagaggtctgatggttactttatgctgtctcctatggatgttgatgaaccaaacacaaaagggaagtcaaaagttaatgatgaacaaaatcttgatggctcggagaaatctgccttgatgtcgaaattggcatttgttcttaagctgatgagtgaaatactactcatgtatgtacatgcagttgggataatacttaaacgtgatacggagttatcgcagttgcggggtggcgatcaagtagctggacacagtgggttactgtatcatgtatttaatttgttatcttctgacagatctgctgatgtgtctgataattggatggggaagttatctgaaagagcatcttggttcttggtagctttatgctgcagatccactgaaggccgtagaagggtaatttctgaaatcatgaaggcgtttaattatttcatagattcagcaagcagcacctccagagggtctttgatacctgacaaaaaagtattagctttctctgagctgataaattcaatattgtctcgaaatagtcagaacaacttgcctgtccttggttgctcacctgatattgcgaagtctatgatagatggtggcatggtgcagtctctttctggtttgctcaaagtgattgacctggaccacccagacgctccaaaggttgtcaaccttattttgaaggctttggatagcctcacaaggactgcaaatgcaagtgatcaaatccaaaagtcagatcgatatgctaagaacaaactaactgggtcacatgaacaaacaaatgtggctaatgaaaatgtaatccatgaacaaggtactagtaacggacatggtactattgatactgttcaatctacaaggcagcaagtccaggaattatctcatgatgatgggaacaataatgctggccaagatcagcctgtcgagcagatgagactagatttagttgagaatactgctggtaactcttcaacgggtggtgtggagttcatgcgagaggaagccactgtaggtaacttgatgactactacgactgatgctggtttggatttctcagctcagcaccaagctgatgacgaaatggttgaggaggaggatgatctaggggaggatggtgaggatgaagatgaggatgaggacgaggaggaaatagcagaagaaggagctggtttgatgtcaatagctgacacagatattgaggaccaggagaatactgccattggtgatgactacaatgatgatatgatggatgaagaagatgacgattttcttgagaaccgtgttatagaagtgagatggagggaaacattaactgggatgaatcgtcatctgagagtttccaggggtcgtggagatgctagtggttttatagaaatatctgctgaggcatttcgtggtgttgggacggacgatatgtttaatttgcatcgtccgtttggtcttgagcgacgtcgccaaagtggaagcaggtcttttactgatcgatcaaggtctgatggaaatgctttccagcatccattactctccaggccagtgcaatctagagatggaattggttcggtatggtcctctagtggaacaccctcaagagatttgcacacattttcttttgggacttcagatattcctttttacatgttagatgctgggttgccacctgaaacttctgctccggtttttggcgagcgtgttgtaagtactgctcccccacctttgattgatttctctcttggtatggaatctctccgaattaggcggggccttggagataatttatggactgatgatggtcaacctcaggcaggtaatcatgcagctgctgttgcccaggctttggagcatcattttattacagagttgaatgtgtctacttttctaaataatgcaattccatacactggcaatcgtgtgcttgatatgcaacctgaccaaactggcgatgatgtagatgacgatttaccatcacaggatgatgacatatcagaacatgtgacaactgattcccctgctttgcctactagtagccctcaacaatttggaactaccaaccaagcaaacggtaatgtctgtcctatgaatgatctaatttgtcaacagtcagctgatgttgcagatgttcgtactgaagaagagatgcatcaaatagctgatgacatgaatgttatacctcagagtaatgaggatactgctgacagacagcatgttgctcatcctgatagggactcactgtctggtaatctgcaaagttatgatcatgttatgcaggatgaggtagaaatacctcaacgtggccagattggtaatgatattagggacccatctgatctggagtcaagttgtcatgctcttctcacttccacaagtgcagctcctgagctgagcgatgctcatgttgattccaccactatgaatacagatgttgacatgaatagcattgatatttctgagaaccaagtagaaaactcagctcctggtttgtatggcaatgttgtttctgttaggctagacgaaggagctcctcaagagactatgcagcctgatcaattgaatgctaacaatgaggcatctagtacaaatgaaatcgatccaacatttcttgaagcattgcctgaggatctccgtgcggaagtccttgcttctcaacagaatcgcgctgcaccaactgcttcctatactccaccagctgcagtagaaatagatcctgaatttttggctgctctccccccagaaatacaagctgaggttttggctcagcagcgagcacagcggatcgctcattctcaacccattgggcagccagttgacatggataatgcttcgattatagcaactttcccccctgatctacgcgaagaggtgcttttgacctcgtcagaggcagttttgtctgccttaccttcagctttacttgctgaagctcaaatgcttcgcgacagagagttgagtcgttaccgtgctaggggaagcctttttggaggaagttacaggcttggagcgaggaggttaccaacagacaatcagactgctgttatggacaggggtgttggtgtgactgttggtaggcgggttatttctactgtgtcggcaggcgctaagggtaaagatgtggaagggaccccacttttggattctagcgctctaaaagcacttattcgtcttctgcagctagctccgccactcagcaaaggccttcttcaaaggcttatgttcaatctttgcgcgcacagtgttacgcgtgctacattgattggccatttactcaacattattaaacctgaagctgaggggcttaatggatgggactgcatgactacatataggttacatggatgtcagtggaacattgtttatgcacaaccacaatctgcaaatggtctacctccgctggtgacaagacgacttcttgaagtgcttacataccttgcttcaaaccatccatctgttgcaggtctcttggtctactttgacccttcaacaagttcaaactgtatgatcctaaagcatggtaaagaattatctcaagaagggctacaatcggatatgatgaaaacgtcatctgagggttatacccctatcctgctattccttaagctcttaaacaagccgttgtttctacgaagtcgagtatatcttgagcaggtgatgtgtttgcttgaagtagtggtcagcaatgctgcttccaaagtcgattatccacctcattcagggcaaatggttagcacttctgtggatgaaaacagggcaccgattgaaacacatggagaaccatctactatggagcaagttcctatccaagaaaatagtcaaaataaagatgtggtggtgccagcatcaggtccccaacagtctattaatgtgcatgacattcttactcaacttccagactctgaattacataatctgtgcaatattcttgcacttgagggtcttccggataaagtctatacgcttgctgcggaggtggtaaaaaaattggctagtgtggcggtatcccaccggaaattcttctctatggagctagccagtgctgctcagagcttaagttcttcagcagtagaggagcttgtaacattgaagaacacacaaatgcttgggctcaattcttgttctatggctggggctgccatcctgcgggtcttacaggtcctatctacattgacctcagatatgagtggtaatagccaggatcaggctgtgggacaggaagaacagtctattttgtgggatttgaatatatcacttgagcctttgtggcaagaactaagtgactgtataagcactacagaggcaaaacttgttcataattcaagtttcaatccccaggttcctttgatggatgcaatagaagttggtgcctcatcctctacttccccacctcttcctccaggcacacaacgccttttgccatttatagaatccttttttgttctgtgtgagaagcttcaaacaagccaagcagttgtgccatctgattccaatgtgactgctacagaagtgaaagaacttgctgggagttcatcgtccccatcactaaagactggtggagtatgcaatattacttttgtaagggtggcagaaaaacatcggcgcctcctcaatgtgttcattcgacagaatccaagtttgctagaaaagtcactttctatgatgttgaaagtaccaaggctgatagactttgacaacaagcgtgcttactttagatcacgcattaggcagcaacatgatcagcatctttctgctcctttgcggattagcgttcgtcgggcatatgttttggaggattcatacaatcagttgaggttacgtcgtagccaggatcttaagggccgcttgactgtgcaattccaaggagaggaggggattgatgctggtggactaactagggagtggtatcaacttctatctagagttatttttgacaaaggagctctgctcttcaccactgttgggaacaatgcaactttccagcctaaccccaactcagtttatcaaacagagcacctttcctatttcaagtttgttggtcgagtggttgccaaagccttatttgatggccaattattggatgttcactttacccgttcattttacaaacacatacttggtgttaaagtgacttatcatgatatagaggctgttgatcctgattactacaaaaatttgaagtggatgctagagaatgatgtaagtgatattcctgacctgacattcagcatggaccctgatgaagaaaaacatattctttatgagaaaaatgaggttactgattatgagctcaaacctggtgggagaaacatcagggtcactgaagaaacaaaacatgagtatgtcgatcttgtggctgaacatatattgaccacagcaattcgccctcaaattaatgctttccttgaaggattcacagaattagttccaagggagctcatttccctatttcatgataaagaacttgaactcttgatcagtggacttcctgaaatcgactttgatgacctgaaagcaaatgcggagtatattgggtattcgcctgcatctccggtcatcctgtggttctgggaagtagttaatggtttcagcaaggaggacatggcaagatttctacaatttgtgacaggaacatcaaaagtaccattagaaggtttcaaagcgctacaaggtatttctggtcctcagagattccagattcacaaggcttatggagctccagagaggcttccatctgcccatacttgctttaatcaactggatttaccagagtattcctcaaaggagcaactagaagagcgtttacttcttgccattcatgaggcaagcgaaggttttggttttggctgacgtattgaacaagtgcattgtgtatgcactgggtcattggttttctgtttgccatgtacagattttggcggcaaaattgagagcatggtcaccagatgctacacattgcataaaccaggcgaaaagaacgcttagagaatgtcctggatgtgcgtcagaatccaaaaaattttggagtagttgatcgggggatgccaggcgggtatagctggggggagctctgactacaacagtggtgatagatgttaacttgtttccatttgccctgtgtggtcaaagggcggagtgtaaattcattgaatgcttaatcccaaccattgctttcctactgcttcgatcctcagattatggggccaaaagcagtttgcaaataaataagattagtttctggttaaaaaaaaaaaaaaaaaaaaaaaaaaaaaaaaaaactcgagacgagttctccctcgtgccg

SEQ ID NO: 17311 - DNA, 1155 bp, Oryza sativa
  Clone ID: PAT_MRT4530_22977C.1
atggcgagtggcttctctgtatcgccagctcaagctctagatagccacctcgttgagctcgagctcgcgctgttgtcagtccgccaccgccgcgccggcgtccgtccgtcgccggcatcgtccatcctcatcggcggcggcatcgtccacggcatatggcgaggatgggcagcaggcggtggcggactcgcggcagtgctcgagcttgtgctcacgtccgcgcttgccttgctgttagcacttgcctccctccgcgcccacgccacgccgtggacgacgacgacgccgacgaggatggacgatgccggcgacggacaaacgtcggcgcgggcggtggcggactggcgtactgacgacggtctcggggtctgggacgtcaccgccactatgctgcgtccgtcggagaccagcaacacgacctcctccttgttgtggggccacagcgagctcggctacggcaagagcaggccatctcccatggtggccgaagagggcgccggggttggggccaacttcgcggcgcccaccagctacgcgcgaatccggctagagaggtttgaagagctcgcggttggaaagataatggatccgaactttccataccagtcgccgtcgttcaccttgggtgatttcgaccccaactacatgtcggggtttgacgatacctccggatcggctccaactccaccatctgtggaggaggtcacctcaagcgccatgcggagtcgtgtgccaagaagcaaggaatacaactccggcagcagcaacttatgttcgtcggctacaagtggagacgcctcttcgcatgttgtggccgaagagttgtccggttatttggacagcgacgccatccaccacgaagctcaagatttcaacgtcctcgggtggtggaatgaccacaagataacatatcctgtgctttcaaaactagcacgggatgtgttgacggtgcccgtgtcgacggtgtcctccgaatcggccttcagtctatgcggccgaatcatcgaagaccggaggacgactctgcgcagcgaccacgtcgaaatgctactaagcgttaaagactgggagcttgctcgacaacatgcccaatacactgcggacaaccaagaattggccgcccagttcgagcaactctacctggatccagactaa

SEQ ID NO: 17312 - DNA, 2370 bp, Oryza sativa
  Clone ID: PAT_MRT4530_22978C.1
atggagatagctcgcaaggctactgattttgagcctcctacattggaagacgaatctgtttcttctgaaactgccgagagtgcttttgaattggacatcctatatggttttctagatgcagaagtaggggagttagatgacatgatcagtactcttgagactgatattcaaaatgttgagcatatggtttgtcaagatgaatctggaggcaagattaaagctaggctagatgctgctatggtgtctttaaagcagatgaaggaattagtttctgatatcagaaaagagtcagccaagtttgagaaagccatagagtttccccatgacaaagaaggcattactggagacgctgggtatgaaaatggtattgtgtcatcccacactagcatgaggacagaggatcaacgaagaaatgttttgcagatgttagaacaatcgatagcaagtgagctggatcttgaaaagaagctctctgaatcaagatgtattatagaagaactcaaactaaagctccatcatcatgatcaggaaaaatatttcctggaggaatctatcgaatcattatgtgggaaaacatttgcagcagaaaacgcttctgaggtactcttgggaacttcaaaggaacttgtggacaaagttagtaccgtagagtgccatctaagtgcatcaagatgtagggagggtgatctggagtcgaagttaggagaaagcttgatgggattatcttcactgcaagtcaacgcagagaatattcaagaagggagtcaacatagtggaggcacagaaactcatccaagtcctgaattgccatccttgcaggataaggttaaggagctagaaaaacagttgagggaatctgattcacagttgcagttggcaaaggcatcagcagaaacttttcaggaggagcagaatgtgctgcatgccgagataagcacattagaaaacattattaagagtctcaaagaagatgtctcaagagcagaaagtagagcacaaaatgctgagttaaggtgcatgcagctaactgaagctaacatagaacttaatggggagctaaactctcttaaaagtcatggttcagaaaagactagccttttggagaggaaacttaaggagtcacatacccaattagagcatgcaaaggcatctcttgatgccactgttgaacagcagagtatgctgagatctacaatgtcggacatggaacatatgattgatgatctgaagggaaaggttttaaaagctgaaaccagagcagagaatgctgaatctaagtgtacattgttaacagacactaacttagaacttagtgaggagctatcgtttctgaggggtcgagcagaaagtctagagaactcattacatgaagccaaccatgttaagatgtctaccgtcaaggatattggaatcagaacaaaaataattactgatttggtcacaaaacttgcattggaaagagaacgacttcatcaacaggctgagaaacctgtagaccctagcaatgaggaagagaagacgaggtcttcagaggatgatgactctggcggggagggcactgctgaggcagtccggaccatacagccgtcagtgctgaactggaagtacatcaccgtggcattcctgatcttaatggatccgaactttccataccagtcgccgtcgttcaccttgggtgatttcgaccccaactacatgtcggggtttgacggaggcgacagcttcggaaggattttccggaaccgcgagcggaagtgtttcgacacacaccggctcgaagagatcgagaacctcctgcaaattttatctgctcgttcttctggtggtacaggtcacctcaagcgccatgcggagtcgtgtgccaagaagcaaggaatacaactccggcagcagcaacttatgctaaacccagacggtgaccacatcgatgctgttcgtcaagcaatcgcgtggttaactgcttctaacccgcggattgctgcatggaagaggttttgcaatgcggccggaagttcgccagcggagaccccctcctatccccactacagcgacgccatccaccacgaagcacaagatttcaacgtcctcgggtggtggaatgaccacaagataacatatcctgtgctttcaaaactagcacgggatgtgttgacggtgcccgtgtcgacggtgtcctccgaatcggccttcagtctatgcggccgaatcatcgaagaccggaggacgactctgcgcagcgaccacgtcgaaatgctactaagcgttaaagactgggagcttgctcgacaacatgcccaatacactgcggacaaccaagaattggccgcccacttcgagcaactctacctggatccagaccaaccccagtag

SEQ ID NO: 17313 - DNA, 873 bp, Oryza sativa
  Clone ID: PAT_MRT4530_22979C.1
atggcgctcgccgtgctgcagctcctcgggggcaaatccatgggcatgaaccccagccatttctcctcatcccacactcctcatcttgtgccctcaagtgttttaagtgctctctttgttctcaaaatggatccgaactttccataccagtcgccgtcgttcaccttgggtgatttcgaccccaactacatgtcggggtttgacgatacctccggatcggctccaactccaccatctgtggaggaggtcacctcaagcgccatgcagagtcgtgtgccaagaagcaaggaatacaactccggcagcagcaacttatggcaagatttacccctgaactttggggagttccctgcttttgaacattacattcagcaatctcataaccctaggtttaaagctactggcatgaagagggtaggtgaccacatcgatgctgttcgtcaagcaatcgcgtggttaactgcttctaacccgcggattgctgcatggaagaggttttgcaatgcggccggaagttcgccagcagagaccccctcctatccccactacagcgacgctatccaccacgaagcacaagatttcaacgtcctcgggtggtggaatgaccacaagataacatatcctgtgctttcaaaactagcacgggatgtgttgacggtgcccgtgtcgacggtgtcctccgaatcggccttcagtctatgcggccgaatcatcgaagaccggaggacgactctgcgcagcgaccacgtcgaaatgctactaagcgttaaagactgggagcttgctcgacaacatgcccaatacactgcggacaaccaagaattggccgcccagttcgagcaactctacctggatccagaccaaccccagtag

SEQ ID NO: 17314 - DNA, 351 bp, Oryza sativa
  Clone ID: PAT_MRT4530_2297C.1
atggaccgggaccacgtgggtggtccaccgccggtccacgggactgacggtccagattggcccgaggccgatcggacgtcgcaggcgctggctaggcacggctcggcttggcagaaagccagctggccagccatggcgagtggcggcggcgcacgcagtcaccggtggcggcgctcatgggagagagggaaggaaggaggagaggggattcctcaccgaggcgatgacggcgaccggcgcgggaagagacaagcggcggcggcgcttccgacaacggcggacggggtcaggcacaacctaggaaaggcgatgaccgggttaggggaaggggaggatgaccacggcgactag

SEQ ID NO: 17315 - DNA, 186 bp, Oryza sativa
  Clone ID: PAT_MRT4530_22980C.1
gaggcgctgcagtggcggaggagaaggaacaacgaccccgcgggcccttgtgatcaagtggtagacatgatgaggagggagatggtggtgtggtggcgaggacgacatgttggaggggaagctgtggtggctggagtcgctaaggtcggagccagaggggctgccaagggcattggtggcagataa

SEQ ID NO: 17316 - DNA, 1701 bp, Oryza sativa
  Clone ID: PAT_MRT4530_22981C.1
atgaagaacctggttgcactgaatgccagcaacaacagatttactgggcagatatcggatcatttctgctcgagctcgccatccttaatggtgcttgacctttgttacaacctgttcagtggaggcatacccccggggattggagcttgttccaggctaaatgtgctcaaggttggtcaaaacaatctcagtgggactctccctgatgaactcttcaatgccacctccttggagcacctgtctgttcccaacaatggtttaaatggaacactcgatagtgcgcatatcatgaaactaagtaatctggttacacttgatcttggagggaacaatttcaatggcaggattccagaatctataggtgaactcaagaaattagaggaactccttttgggccacaacaacatgtatggagaggtgccatcgactctgagcaactgcacaaatctcaaaaccatagatatcaagagcaacagcttcagtggagagctctccaagatcaatttctccaccctacccaatttacaaactttagatcttctgcttaacaacttcaatggaacaattccgcaaaacatctattcatgcagcaatctaattgcattgcggatgtcttccaataaattccatggccagctgccaaagggaataggcaatctgaagtccctctccttcctttcaatttccaacaattctcttacgaatatcactgatacacttcagatactcaagaactccaggagcctcagcactttgcttatgggagtgaacttcaatgacatcatgaagactacaaataacttcgataaggagaacatcataggttgtggaggttatggattagtctacaaggctgagctacctgatggctccaagttagctatcaagaagctcaatagtgaaatgtgcctgatggaaagggaattcactgcagagattgaagcactcaccatggcgcagcatgacaatcttgtgccactctggggttactgtatacatggaaactcgaggctgcttatatattcttacatggagaatggcagcttagacgattggcttcacaacagggatgatgatgctagctcatttcttgattggccaaccaggctcaagattgctcaaggagcaagcctaggtatttcttacatccatgatgtatgcaagcctcatattgtccatcgtgacatcaaatccagcaacatcctgctcgacaaagaattcaaagcttatattgcagattttggactatcaaggttgatccttcctagcaaaactcatgtcacaactgagctagttggcaccctgggttacatcccccctgagtatgggcaatcatggattgctacattgagaggcgacatatacagtttcggagtggtcctgcttgagcttctcacgggaagacggcctgttcctttactgtctacatcaaaggaacttgtcccgtgggtacaggagatgagatcagtgggaaaacagatcgaggtcctggatccaacagttcgaggcatggggtatgatgagcaaatgctaaaggtgcttgaaactgcctgcaaggcattgagtgctgaaagaattcgtcttgctttgatccttcacttgtttgttgaaacactatttatgctcaagttgtacaggcatgacaaaaaggtagaaacaacgtcaaaaaggttagaaagataccaagatattctgctataa

SEQ ID NO: 17317 - DNA, 1338 bp, Oryza sativa
  Clone ID: PAT_MRT4530_22982C.1
atggatggcggagtcgagacggacgcggcggcggagggaggcggggtggtggcggaggaggagcatctccggcggattacgtcgggagtagagaggtttgaagagctcgcggttggaaagataatggatccgaactttccataccagtcgccgtcgttcaccttgggtgatttcgaccccaactacatgtcggggtttgacggaggcgacagcttcggaaggattttccggaaccgcgagcggaagtgtttcgacacacaccggctcggagagatcgagaacctccggcaaattttatctgctcgttcttctggtggtacaggtcaccttaagcgccatgcggagtcgtgtgccaagaagcaaggaatacaactccggcagcagcaacttatgctaaacccagacggtgaccacatcgatgctgttcgtcaagcaatcgcgtggttaactgcttctaacccgcggattgctgcatggaagaggttttgcaatgcggccggaagttcgccagcggagaccccctcctatccccactacagcgacgccatccaccacgaagcacaagatttcaacgtcctcgggtggtggaatgaccacaagataacatatcctgtgctttcaaaactagcacgggatgtgttgacggtgcccgtgtcgacggtgtcctccgaatcggccttcagtctatgcggccgaatcatcgaagaccggaggacgactctgcgcagcgaccacgtcgaaatgctactaagcgttaaagactgggagcttgctcgacaacatgcccaatacactgcggacaaccaagaattggccgcccacttcgagcaactctacctggatccagaccaaccccatgagcggaagcatgaggtagtagagctcactgaggtggcactccggtgggattacgaccactgctcgtgctcgcgtcaccgccaaaaccttgagccgccattgaagcccgcagtgctctttgtcacggtgcggagtgataccaccattgacggcatgggccatctcgtcccgtcggatgatctccggtggatgcttgtcccggcaaccgatgtcacccgcatcttggccatgttccagccggcgcgcgccaatcttgatgagaacattgtaggtgagcacgacaggcggcgcgttccaattaggcatctggtcgcagaggggggctcggcggaggtggcggaggacaacattgaagaggcggagggcatgggtagagggaaggcgctcgagggtggcgcgggcacgaaggcggtgaaggaggacggcggtggcgcaagaaagctcgaggctcgcgagctacttgagctcggctcgctgtag

SEQ ID NO: 17318 - DNA, 369 bp, Oryza sativa
  Clone ID: PAT_MRT4530_22983C.1
atgattgagaaatcaattgaacatatgatggtcatgcctgtgcggtcaaagcgtgggctcatgttctactcccaccatctcctcaactacattgcttccccatctttgtcgaacctcttccactgttgggcctcaccaatgcccagcgacaccgaccactttgcctcccattgcgagtacctccgcactctacaccgccgtcttaaatgtcacgtaggcctacccgacaccacccgcatggcctccgtcggcgtatgggtcaccgtcaacggccacttcaagcttccaggcaccaagcacttcctcgagaacgggaaagagatgcaatttacacccttgatgaatcattcaaatgctaaaaacaattga

SEQ ID NO: 17319 - DNA, 3425 bp, Oryza sativa
  Clone ID: PAT_MRT4530_22984C.1
ttagtttccattaaccagcagcctcggacaaatcgccggagaggcggagaccaaactagttacaaactccggggcttggctccagtaacaagttgagccaggggccacggtaacagctccataggaggccattcgatcggccaccttgttacagattctttttgacgttgtttctacctttttgtcatgcctgtacaacttgagcataaatagtgtttcaacaaacaagtgaaggatcaaagcaagacgaattctttcagcactcaatgccctgaaatgatagtagtctgtcacaagccgcggagaacgaatgtccagactagcaactacttccatgatagttggcctcatcaaaggattatagttgacacacttgcaggcagtttcaagcacctttagcatttgctcatcataccccatgcctcgaactgttggatccaggacctcgatctgttttcccactgatctcatctcctgtacccacgggacaagttcctttgatgtagacagtaaaggaacaggccgtcttcccgtgagaagctcaagcaggaccactccgaaactgtatatgtcgcctctcaatgtagcaatccatgattgcccatactcaggggggatgtaacccagggtgccaactagctcagttgtgacatgagttttgctaggaaggatcaaccttgatagtccaaaatctgcaatataagctttgaattctttgtcgagcaggatgttgctggatttgatgtcacgatggacaatatgaggcttgcatacatcatggatgtaagaaatacctaggcttgctccttgagcaatcttgagcctggttggccaatcaagaaatgagctagcatcatcatccctgttgtgaagccaatcgtctaagctgccattctccatgtaagaatatataagcagcctcgagtttccatgtatacagtaaccccagagtggcacaagattgtcatgctgcgccatggtgagtgcttcaatctctgcagtgaattccctttccatcaggcacatttcactattgagcttcttgatagctaacttggagccatcaggtagctcagccttgtagactaatccataacctccacaacctatgatgttctccttatcgaagttatttgtagtcttcatgatgtctgcaaacgtaagcttgttattgtctcccttgccttgtggcatcaccatcaatgaatggtctgaatttggattgaatgaggctgtttcttcatttctgttgttagctaattccccttttctcatcaactttgtagccctgagtgacacgaggagactactcagggataaaagaatgataatgcctccaacagacacgctgagtgtgattgctaaaataactttctttttgtgttgttttctggacactgaaggtgctcttgatgaatcacagctgcggaagatatttgagccacacagctttgagtttccaacaaagctagaattttgaaatgtactaaactgacctccagttggaatagacccttccagatcattgttagaaacattgagcttagaaaggaaatgcagattgttcagtgcagatgggattgtacctatgagatggttattggataagtcgagcacctgcagatccgtaaggttgcaaagcggttgtgggatctctcctgaaatactattgaagctgatattgagtgtccggagcatttttagttggccaatctcttgtgggattgcacccatgagatggttcctggctagatttaatgttgctgggaaagcacgaaatccacggtattcaagtgatggtcctgtataaataggaagctgcaggatccctgggtcaaaatatggtgtagaatttgctgatatgagccttggtatctccatcaaagctgttgggatcccccctgtcaagctattgtttgatatatcaagatagaagaggaagtttagtctgttaatccaggcaggtatttgtccagtgagttgattgttagataaatctaacatctgcaaattagtgagttttgataaccaaaatggtatgttcccaatcaatgaacagtcatcaattgatacaaattgcagattctcaaagccatcaattgtttcatcctctggcataagctcaccattgaagttcactcccataagcaaagtgctgaggctcctggagttcttgagtatctgaagtgtatcagtgatattcgtaagagaattgttggaaattgaaaggaaggagagggacttcagattgcctattccctttggcagctggccatggaatttattggaagacatccgcaatgcaattagattgctgcatgaatagatgttttgcggaattgttccattgaagttgttaagcagaagatctaaagtttgtaaattgggtagggtggagaaattgatcttggagagctctccactgaagctgttgctcttgatatctatggttttgagatttgtgcagttgctcagagtcgatggcacctctccatacatgttgttgtggcccaaaaggagttcctctaatttcttgagttcacctatagattctggaatcctgccattgaaattgttccctccaagatcaagtgtaaccagattacttagtttcatgatatgcgcactatcgagtgttccatttaaaccattgttgggaacagacaggtgctccaaggaggtggcattgaagagttcatcagggagagtcccactgagattgttttgaccaaccttgagcacatttagcctggaacaagctccaatccccgggggtatgcctccactgaacaggttgtaacaaaggtcaagcaccattaaggatggcgagctcgagcagaaatgatccgatatctgcccagtaaatctgttgttgctggcattcagtgcaaccaggttcttcatggccttccatgtggtggatggaaactgtcctgtaaacgagttgctcgagatgttcagtacctgcagaggccgaacagcggtcatcggagatagcgggtcttgcagctcccctctgagtcggttaaaactgacgtcgaggacactgatactgctggaagaaaccaattcccatggtaggtaaccggacagcgagttgtgcgataggttgaggcgtagcaggctagtaaggtttccaagagatggtgagatgtgcccttcaaggccctttgattgcaaggagatatcagtgaccgctccatttctgttgcaggtgataccttcccagacacagcagtttctatcattccgccatgacatggaaaggttgccgtcttgcgagagctcggcgaggaactggtgaagagagcccttctcctgctctgtgcaggagctggtgagagaagccaaggagatcagcagcaggagaccaaggctcagggaagatatggtaggtaatttgctgctataccggtcgcagtcca

SEQ ID NO: 17320 - DNA, 1758 bp, Oryza sativa
  Clone ID: PAT_MRT4530_22985C.1
atggtggaggtgggccagaaagcacaccgccagcacgtctcggagcttgaggcccgtaaagcggtgttggcggaaattgccaatgaagtggaggaggagcggcaggctgctctcatcgccaccaccgcgatgaacgagacgcaggacgccctccgacttcaacacgggaactgggaggcggagcttaggaagaagctcgacgccgcccagggggtgcttgacgctgctgctgtccgagaacaacgggtggcagagaccgaagcggcgtcccgacggcgtgaggaaacccttgaggcgcgcgccatggtgctggaggagcgcgcctccgtggtggagagggatctggcggaacgcgaggccgccgccattattcgggaggcaacgctggcggcgcacgagtctgcctgcgccgaagaggagtccgcactccgcctccgtgaggacgcgctcaccgagcgggagcgagctctcgaggaggcagaggccgcggcgcaccggctggcggacagcctgtccctccgcgaggcggcgcaggaggagcaggcgcgccgcaatttggaatgtgtccgcgccgagagggccgcactggaccagcgggccgccgacctcgaggcgcgggagaaggagctggacgcgagggcgcgcggcggcggggcggctgcgggtgaaagtgacttagccacccgcctcgcagctacctcaatggatccgaactttccataccagtcgccgtcgttcaccttgggtgatttcgaccccaactacatgtcggggtttgacggtaactccggatcggctccaactccaccatctgtggaggagtcacgtggtggcccaagaaacagtgacgggtcttcagtactgaacgagcatgtttgggcaattgtccaaaaattttaccaatttctagaaactttttatgattgtactctaactttgtcacaagtttattatccaactgctaatataattttgcacaaccttcttgaaattgctactttatttaaagaatacgaaaatgatgacgttctaactgaacctgtctttcacatgaaacaaaaatatttgaaatattggaaaaatatacctatgttgtatgcttttgcttttgttttagatcctaggtgtaaattaaggggattgtctgctattttatcacttgttggagatactataggtgtagattatagttctttttatactgaggttagacgtaaattatatgaggtttttggaagatatgaagtaaagtttcaggaagttcgccagcagagaccccctcctatccccactacaggtaagaagaagatacagtggggtaggatttggggtggatcgtcttcaagttcaatccaaggtggtggcagttcgtcggctacaagtggagacgcctcttcgcatgttgtggccgaagagttgtccggttatttggacagcgacgccatccaccacgaagcacaagatttcaacgtcctcgggtggtggaatgaccacaagataacatatcctgtgctttcaaaactagcacgggatgtgttgacggtgcccgtgtcgacggtgtcctccgaatcggccttcagtctatgcggccgaatcatcgaagaccggaggacgactctgcgcagcgaccacgtcgaaatgctactaagcgttaaagactgggagcttgctcgacaacatgcccaatacactgcggacaaccaagaattggccgcccagttcgagcaactctacctggatccagaccaaccccagtag

SEQ ID NO: 17321 - DNA, 960 bp, Oryza sativa
  Clone ID: PAT_MRT4530_22986C.1
atggggagggaccaacaggcagtatcaggcctgcaaactggaaaagacataaaattttcagacttgcttgctctgatcaagaaaaaggagcaagcgttggccgcgtctccgcgacgccgccaagcttttggttggttcgacctcgagctggattcccttttagggctcaggaggaggaagaacgcggcggcggcggcggcctctccgccgaggtttgaagagctcgcggttggaaagataatggatccgaactttccataccagtcgccgtcgttcaccttgggtgatttcgaccccaactacatgtcgggcttcggaaggattttccggaaccgcgagcggaagtgtttcgacacacaccggctcgaagagatcgagaacctccggcaaattttatctgctcgttcttctggtggtacaggtcacctcaagcgccatgcggagtcgtgtgccaagaagcaaggaatacaactccggcagcagcaacttatggtaaacccagacggtgaccacatcgatgctgttcgtcaagcaatcgcgtggttaactgcttctaacccgcagattgctgcatggaagaggttttgcaatgcggccggaagttcgccagcagagaccccctcctatccccactacagcgacgccatccaccacgaagcacaagatttcaacgtcctcgggtggtggaatgaccacaagataacatatcctgtgctttcaaaactagcacgggatgtgttgacggtgcccgtgtcgacggtgtcctccgaatcggccttcagtctatgcgcccgaatcatcgaagaccggaggacgactctgcgcagcgaccacatcgaaatgctactaagcgttaaagactgggagcttgctcgacaacatgcccaatacactgcggacaaccaagaattggccgcccagttcgagcaactctacctggatccagaccaaccccagtag

SEQ ID NO: 17322 - DNA, 645 bp, Oryza sativa
  Clone ID: PAT_MRT4530_22987C.1
atggatccgaactttccataccagtcgccgtcgttcaccttgggtgatttcgaccccaactacatgtcgaggtttgacgatacctccggatcggctccaactccaccatctgtggaggaggtttttggaagatatgaagtaaagtttcaggaagttcgccagcagagaccccctcctatccccactacaggtaagaagaagatacagtggggtaggatttggggtggatcgtcttcaatccaaggtggtggcagttcgtcggctacaagtggagacgcctcttcgcaagttgtggccgaagagttgtccggttatttggacagcgacgccatccaccacgaagcacaagatttcaacgtcctcgggtggtggaatgaccacaagataacatatcctgtgctttcaaaactagcacgggatgtgttgacggtgcccgtgtcgacggtgtcctccgaatcggccttcagtctatgcggccgaatcatcgaagaccggaggacgactctgcgcagcgaccacgtcgaaatgctactaagcgttaaagactgggagcttgctcgacaacatgcccaatacactgcagacaaccaagaattggccgcccagttcgagcaactctacctggatccagaccaaccccagtaa

SEQ ID NO: 17323 - DNA, 506 bp, Oryza sativa
  Clone ID: PAT_MRT4530_22988C.1
gccaccacaactgcacaacgcaggccggcagcttcccgacctcctcccaaccggcggctcagagggcggcgcgagagctcgccggggtacctcctctcccggccagcgacgagggcgacggcggaggcacgagagttcaccggcctctcctcagagggcgacggcggcggcgcgagagctcaacgacgagttcggcggcgcgcaagcggtggaggggggacgacgacagatccatggtgcccctcctctcccggctagcggcggtgggcaaggaggctggggacgcggcgccgcggcggcggattgagaatgccgaggcgcgacggatcgaggaggccaaggtggtgtctcgacgacgattccggcgacggtgccgtggaggctggggacgcggcgactgtgtcctcggtcttgtctccacggcgcgggagcggaggacggcgacgaactcggcggcacggaagcatgggatggcgacgagctcggcgaaccggagcgggagatga

SEQ ID NO: 17324 - DNA, 293 bp, Oryza sativa
  unsure (1)..(293): unsure at all n locations
  Clone ID: PAT_MRT4530_22989C.1
gctacacaggcacaggagggggtgtgtgacaattcgcaaggcacagtgacaatggcaacacatgtgcagtgcagtgnttcaacacgcttttggtgatgcattggtggtgtaatccatgtggtgtgtgattgctggaataaaaatggaggagctaggctagctaggtcagatcgatcgatcgccatgcatgacgagactagctagcnattgctgctagatcagatgcatgcatatggttgatcgcnccaggtcactacgctatctgtttcccttaaaaaaaaaaaaaaaaaaaa

SEQ ID NO: 17325 - DNA, 2082 bp, Oryza sativa
  unsure (1)..(2082): unsure at all n locations
  Clone ID: PAT_MRT4530_2298C.1
atgggcgatgacacgcatcctggcgaggacagggccggcaaaggcgagggcgcacagattgcagcagtcggcggagacaggggcgcacataccgcagcggctaccactggcctcgacaaggagagggctagtggcatcggctacggaggagagcgaggcggcggcggcggcaagaccacgtcaagcgccaccaccgacctcggtgatgggagagatcgtggcggcggcggcgacaccgcagcggcctccatctccggcctagacgaggctggaggcgttggagagcacaacggtagtggtgatgcgcggggtagcacaggaggtggcccactgcggagcttggccggcggcgaagtctcgggtggcaacaaggggcctaatgacggccgaggtggcaaagacaacggcggtgcgccgctgacagcctgggccctggataagcttgtctgtgagccagtagcggggaccgctgggccagctgctgccacgaaccacccggtggggaatcgtacagtggtgggctacgagcccgcggtgagggaaggcatcggctccccaagccgccttattggaccggagtcagtatgggacctacagaggggggcaaagcatgggagaaaggggaaggccacgggggagaggccctcgaaccgaagcatccagaaggaagggctccacgtaaccatagtaaaaaaccggactgaatgggcggttgaaccggaaaaaaccagaaccggccaccttgacggttcggttcaactaaaagaccgcccctgcaatcgatccgccgccctggttgggttgacgtacaggagcacgaacgagatttgcgtggagggtggcttcaggctgcagattgacacgagtgtaacccccggatcggacagcaaagcttatactactccctccgacacggcggtgttgactcctcccggcttagaggcggcggatccggcgccgcccccgccagatctggccggagagcgtagatggaggggtggccggcggctgtggacgctggcgctcgcggaggtgcggccgcggcggtggaggccggctctcgcggaggcgcggccacggcggtggaggccggcgctcgcggaggcacggccggcagcgggggaggccgtgtttcgcggaggcgcggctgcggttgtggacgccggcgctcgcggaggaaaatgcaatgatattttagtacttttatatgtcgaaaacgtatattacacgtgcacgattactagtagaagaaaaagaaaaggaaaggccggtagcggccagctaagaccaagaggaggaggagtggaggccgccgaggaagagggtggcctcggagcggacgggcatccggcggctgcgagcttgcggccggcatatccagcgagggaggcgattgcgacgaatcgggaggcgcctgatatgatggtcggccgagctcgggacgactcgaccgctatgccgagagacatggtcgacagccatgcatgccgagatatgcatgcagctcatgcaagcaagcagatcgctcacgctcaggcagggcctcttatctctggctcggttgagctgagcaagcggctaccaattcaaacagaaaccaaaccaaaacaatccaaaaagacaggcatacaaacatgtagtaatgataatagtagtactcctgcagcacaacaagttactagtactactaaattaagagcgaatgcagtgatgttcatacggtacaacaactatggttgtttttctttgtattccagcatgccgccatcccgccatgctgcaacacatacaacaccggtccaaagaaacaaagaagatacatgcctccatgaggcgagcaagatacgactcattcgcagcacctccagattgctgcttcctacatatcaacataacaatgcaatgatggtcctccaacctagtttcctgacgatttatctgcgtttttgttcgaaagcancgtaactagatactgccggccttgggggttatgttgagcaaggcgcgctatcgcttttatacatggggtagatattcctccaggcaatttgaaaatgcagcctcaacttcatgtaacatgaa

SEQ ID NO: 17326 - DNA, 536 bp, Oryza sativa
  Clone ID: PAT_MRT4530_22990C.1
tcgttttgttgttacatggaatatcttatgctggcatggggaagacccagacgattaatcatttcttggttaacaaaagttggtaccttgtggatttgcctggttacgggtatgttgaccttttctaccctcaattcatatgtaacttgatttgcatgtgctactttctaggatgtatcacaatgacaaaatcatagatggcattgcaaatggagagaaacagagcgagaagtacaattttgcccttgtgttcatcggcttgtaagacaactcggtctggttagaaccagacccagtccattttcactgccctcgatacagtccattctcactctgatggtgtaggtctgattcaaactagacctggtcgagttaaaaagaaatatgtcgtatgggtacaacttgtttttttttttgaaaatttctctctccatttggatcagatataataaaataatacggccagtgtcaccatattcccacggtgttctgcagcaaatacacgttctttgggtgtccagtagcaaagagcgcaa

SEQ ID NO: 17327 - DNA, 321 bp, Oryza sativa
  Clone ID: PAT_MRT4530_22991C.1
atggggaggaagaagagattggcggcgatggtagaggtaggtagctatggcattagtggtgcctctccctccgatgacaacaggagggaaaaatctgtcgaggagggccccgaccacagcgatctgtctcctgctagcccagaggtggcggatctagtgcggcctctcccccttccttgtcgttctggcgatggcggttatagggaaggtgaatccgtcgtggtggtggcaaaaggggaggtgcgatgactccacacctcccattgccatgcgtgtcgtcgcctcacgggggaggtggaggtggcggactggcggctccat

SEQ ID NO: 17328 - DNA, 129 bp, Oryza sativa
  Clone ID: PAT_MRT4530_22992C.1
atgggcatatcccacatcctcttcgggatcatcgtcaaggttgatgtgagggtcttttatgtagaaaaatctgctcgaccggattcgcaagataacattgtgatcttctcatccttcgacaggatctag

SEQ ID NO: 17329 - DNA, 246 bp, Oryza sativa
  Clone ID: PAT_MRT4530_22993C.1
cccagcccccggaagatatagttgcaacaagcttaatagtggcacctgtggaggatacctattaatcaaacaaactgaaaatccaacacaagtaaaatttaacatgggtgcctcaagaaaaaagaggtttggtttgggtccacttattactatcttccttggaaaacacagatgcaagcaccacacattcaaaattttggaagcctcacggaaaatcattccattgctcgggtctgaaaactggat

SEQ ID NO: 17330 - DNA, 543 bp, Oryza sativa
  Clone ID: PAT_MRT4530_22994C.1
acggggaattgggctcatggaacaagctcatatttcataaaaaattcatacccaacctagggccaatataacatttgaaccttaaagtacaacatcagtaacttggggggaaaactatcacagaattttccaacacaaaagaccaattacattcactcgcagtatcaatcgtagcttggagtcaaaaaaggattcttctcgtcataaaaagggtttgggaaatgttgactgctgctaaaactgtcatggacgttacccttcactggagcctgatgctgaaaaaatgctctcgggttgaaattttcgtcatgggtgtctccgaatgcaacccagccataaccggcggcggggatgtccctttgcttttccatcttttcgacgggctccttgaacttttttttcgccacgttgatcacgttgtctccgggttcatcgcaccatgccctggaaaaacagatactatcatttcaaaatttctgaaccatgtctgttaaatctgaatgatgacggaattgggaaattttcatttcttttgggaaaaag

SEQ ID NO: 17331 - DNA, 1512 bp, Oryza sativa
  Clone ID: PAT_MRT4530_22995C.1
ctcgctgctccttgtcccccacctcctttacttgagcttgctcaccactgcctccatatacagagagtcttctctgtatttctctctctcagtgggaggctcacaagaatctttcagctcacatctcactgtccttgcctttctctagctagggaggtccaagaacagagcagcaggatggtgcagtggcgtttctagagagcagcatgagtactcgcaccaccgagctgggatggtcggcgatggcgaacaccgatgcagccgccgccgatgagggagaggcagcggtggcggcctgaggaagacgccatcctcctcgcctacgtccgccagtatgggccccgggagtggagcctcgtgtcccagcggatgaaccgccccctccaccgcgacgccaagtcctgcctcgagcgctggaagaactacctccgcccggggatcaagaaaggttcgctcaccgacgacgagcagcgcctcgtcatccgcctccaggccaagcacggcaacaagtggaagaagatcgccgccgaggtccccggccggacggcgaagcggctgggcaagtggtgggaggtgttcaaggagaagcagcagcgggagctccgggatcgggatcgccggcgactcccgccgccgctggacggcgacgagcgcggctgcgccggcgggcgatacgactggctcctcgaggacttcgccgacaagctcgtcaacgaccaccaccgccgaatgatggctgccccgatcctcccgccgtggatgtcgtcgtcgccgtcgtcttcttcctcgccgtcggtgacgcttagcctcgcgtcggcggcggtggcgccggcgcctgcggcgccgccgccgacgtggggtggtggtggaggaggggaggtggtggtggcggagttgatggagtgttgcagggagatggaggaagggcagagggcgtgggcggcgcacaggaaggaggcggcgtggaggatgaagagggtggagatgcagctggagacggagagggcgtgccggcggcgggaggcgacggaggagttcgaggcgaagatgagggcgctgagggaggagcaggcagctgcggtggagcgggtggaggcggagtaccgggagaagatggccggcctccgccgcgacgcggaggccaaggagcagaagatggcggagcagtgggcggccaagcacgcccgcctcgccaagttcctcgaccaggtcgccgcctgccgccgctggccgcccgtagagatcaacggcggcggcggcggcggccccggcggcggccggtgagccgccggacggtggcgctgcatgcatgcgtagttggacacctcgctttcttgcttcttcttctcgtgtcctttttacaactgttggaattcacttctctctagaaatatgtaatcttttgagtctcttttgatcattccaagtttcctactagtagctctattgaataataaatggaccaccaaattgcaaaccaaaatggttacaaaaaaaaaaaaaaaaaaaaaa

SEQ ID NO: 17332 - DNA, 1659 bp, Oryza sativa
  Clone ID: PAT_MRT4530_22996C.1
ctcctcctcccgtcttttccaccaccaccaccctcgcgtgccctaatttctcgctgctccttgtcccccacctcctttacttgagcttgctcaccactgcctccatatacagagagtcttctctgtatttctctctctcagtgggaggctcacaagaatctttcagctcacatctcactgtccttgcctttctctagctaggtactactactgctagtactaaccactgctcgtgttcttgggacttcttcttcttcttgttcttgttcttaaaatcatttggggttttgagctccagggaggtccaagaacagagcagcaggatggtgcagtggcgtttctgagagcagcatgagtactcgcaccaccgagctgggatggtcggcgatggcgaacaccgatgcagccgccgccgatgagggagaggcagcggtggcggcctgaggaagacgccatcctcctcgcctacgtccgccagtatgggccccgggagtggagcctcgtgtcccagcggatgaaccgccccctccaccgcgacgccaagtcctgcctcgagcgctggaagaactacctccgcccggggatcaagaaaggttcgctcaccgacgacgagcagcgcctcgtcatccgcctccaggccaagcacggcaacaagtggaagaagatcgccgccgaggtccccggccggacggcgaagcggctgggcaagtggtgggaggtgttcaaggagaagcagcagcgggagctccgggatcgggatcgccggcgactcccgccgccgctggacggcgacgagcgcggctgcgccggcgggcgatacgactggctcctcgaggacttcgccgacaagctcgtcaacgaccaccaccgccgaatgatggctgccccgatcctcccgccgtggatgtcgtcgtcgccgtcgtcttcttcctcgccgtcggtgacgcttagcctcgcgtcggcggcggtggcgccggcgcctgcggcgccgccgccgacgtggggtggtggtggaggaggggaggtggtggtggcggagttgatggagtgttgcagggagatggaggaagggcagagggcgtgggcggcgcacaggaaggaggcggcgtggaggatgaagagggtggagatgcagctggagacggagagggcgtgccggcggcgggaggcgacggaggagttcgaggcgaagatgagggcgctgagggaggagcaggcagctgcggtggagcgggtggaggcggagtaccgggagaagatggccggcctccgccgcgacgcggaggccaaggagcagaagatggcggagcagtgggcggccaagcacgcccgcctcgccaagttcctcgaccaggtcgccgcctgccgccgctggccgcccgtagagatcaacggcggcggcggcggcggccccggcggcggccggtgagccgccggacggtggcgctgcatgcatgcgtagttggacacctcgctttcttgcttcttcttctcgtgtcctttttacaactgttggaattcacttctctctagaaatatgtaatcttttgagtctcttttgatcattccaagtttcctactagtagctctattgaataataaatggaccaccaaattgcaaaccaaaatggttacaaaagaaaaaaaaaaaaaaaaaaa

SEQ ID NO: 17333 - DNA, 2339 bp, Oryza sativa
  unsure (1)..(2339): unsure at all n locations
  Clone ID: PAT_MRT4530_22997C.1
agaactgtattagccacacatctcacagtgcaaactccacaaggccacatacatgtactagcttgtagtgggtcccaccactactacttttacagtttcaccttttactttcccctctctctcccccaactctttctttccccaccacagagccgggcggagacaggtcgccggaacttgggcggagcggcggctcaagcgcaggtcacaaagggggtcaggtggcgtcggctcgtcggggcgcggcggcggcggcgccgtggccttccacggcggggcgggggcggggcgggccggccgggcggcggatcgagggatcgacctcgaacggcggcggtatgtcggcggcggacgcccgacttggagcacgggacagcgaccaagcggactgagnccggggcgggttttcccccagcctccacgcctccgccttcctcctctggcccgagcggcgacggcgttgggcggctgcgtcggttggcgccctccttcgcgaatccatctccatccccgccgacggacggtgcggcgggagcttggcggcgcgcctacgggggacgatgcggcgggagctctggcggcacgacccaagcggcgccggcgccgggggctccacctctcctctcctcgccgggccgcgctgggcggcggacggcggggtgtcacgagcggcatcggcaccggctacgggtcgacgatgaggtcctccatgcggctggctgcggatcgacgacgagctcctccgtgcggccggccgcttctcttctcctccattgccgtcccctctcttctcctctgatctgcacccaatcgccgccgccgctctcggttctcctttgctgccgccgccgctctccgttctcacggcgaagccaggcctcccgcacggcaccgcgacctcgtttcccacgccaccagtctcgattgcgccgaagaacgggtgaccaactttggtcacccgcgcttgagttttgtgggcccatgctgtaacgtggcggtgaatctgggctactcgccaacgtggaagctcaggccgaatgccagctcgttgcactgtaaatggcctaagagttccccgtaagtgcatccagaatgccacggggtacttaagcattgcctcagtaacttgtagaggcatgctgtagtaccaaacccggcggctgttaccagttgtcagggctccattcctatcatactgcagcgaaaaggtcgtcaatcgcagaaagcacttcggatctagctgatcctcctcacccacctcatcagcagaatcctcgtcattcgcctcattagaatcatcaaaatcgatctcattcacctcatcaacagaagaaacctcattcgtctcatcggaatcagtcaactgatcagctactatatcatcttcgatgtggatactctccaggaggcagaagttgctttcaccaccacccatgtagacaagagtggcaccaatgtgcctctcagctgggaccatgctgaagagcttctccttgctgatcttcagggctggggggcggctagcaacagtgtcgtcggtagacaccacatcacaagagcagatgtggccaacggtgttgaggtcacctgaaagcccaacccaggcatccagccttgggtcgaagtagccgcgtccagtgaagggtagctgccattggccatgtcgcctccacatcatcggctctgccgttctgaagctgaaggtggcagggacgacgacgccaggtgactgctcaacgctgctgacgaagatggtttgtttgtcagggtgcacagcgtaggaggtgacaaggtcacactgaaaggctggcttggggagattgaggcacgagaagttcttcttccagttggcatcatcatcagcatcatcatcatcatatgtcggtggtggcatgtagagcatgtcaaaggaggcgctaccgagagtaaacaacctgtattcatcaatgggaatgtagatgatggggtcgagcagcacatcctgcagcattggccaagagccgacaacgaaggcccgcgcatgaacgtcaacgatgttcacaataagtctcttcttcttctttttcccgtgagcaggaggaggagtagccagaatcttgtggtcgaaagcacccacgatggacttaggctcgccgcgccgtgcctcgaagcggagcaaggcggatggcagggtgtgcctgccggtgaagacatgatcatctcctcctcgcgcgacgtcggcgggtatcagcggcggattgatgtcttcgtgcgagagcttcatcttgcggatgctacaaccttgtttccttttgttcgtcatccccttggcaatccaacgcttgcaccagtcaatccac

SEQ ID NO: 17334 - DNA, 528 bp, Oryza sativa
  Clone ID: PAT_MRT4530_22998C.1
atgggggagggtggcggcgtacttggagaagcggcgtacttggagaaggcggcgcaggccgtagtcgtcctagatcccggtggcggcgaacacgagggcggggaggcagcggcgaagaggtcgaggtggtcggcggtgcaggccggtgtcatcaatccaggcgttggcgaggtcgggaaagccgatggcggcggagagggtggcggtgtagaggtcgaggtggcagtggtggtggcgatggcgacagaaagggcggcggtggtcggggatcccagcgtcgtggatcccggtgtcggggaggtcggggtcggggaggtcggggaagtcgatggacggacggcggagaggacgagcgtccgtgagggcggcggtggagaggtcgaggcggcggtggagagggcggcggagagggcggagatggcggcggagagggtggcggagatggcggcggagagggcgacagggagtcgaggcggcgacggtggagatgtcggcggagaggacggtggcggtcgagagagtgagtga

SEQ ID NO: 17335 - DNA, 2116 bp, Oryza sativa
  Clone ID: PAT_MRT4530_22999C.1
atggcccgcaagcgccgcgcgccgacgcccccgcccccgccgccgccgcctcccgaggccgagtcctccgcggattcaagcggcgaggaggaggaggaggaggaggaggaggaggaggagagggagtctcccgtcgccccaccgccccagaagcccagcggccgcggcgccgcctcgtcggatgaggaggaggaggaggaggaggactccgacactgacacctacgcccaaggtttccagcttcggaaggttggcggcggcgacgaggaaggggaggaggtggaaggcgactcgtcggagtcggagccggagccggagcccgtcaagaaggagtcggcgaagaaggccaaagccgaggccaagaagaagagggccgcgcctgagcccgcgccgtcgggcaaggccaagaaggccaagccggagaagtcgtcgtcggcggcggcgcctgagcccgctccctcctcgggcaagtccaagaaggcagccaaggctgaggctgcgaaagcggctgccgctgagccggctccttctaccggcaaggtgagcaagtacaatttggcgccggagccctcgccgtcaagcaagtctgggaaggccctatcgcgatggacgacggatgacgaggtcaagattcttgaggtcctcgtggcccatttcaagagccacggcactcagcttaaagttgaggggatcatcgctgctgtcggcgatagcctcgagaggaagagcatcaagtattcggacatgtatgagaaggtgcggaggctcaagcagcggtacgaggccactgccaagaaagttgaacacggcggcgacctaccagctaaagaggatgacctgcggatgtatcagctatcgtcggaaatctggggaaagaacgcaaaggatgctggcaattcgtcaaagaacaagaaggggcaagctaagaaagataaggtgagtggagattcaaaggaagccgccaaggaagataaggtggatgaagccgccattgctgtgaatgaaaagggtggtactctggcagagaataagaaggggaaaaccaacaagcagaaaacaggtatggaaacaaaggttggatcatctaaggaggctgctcttgctgctagtccaaccaagggtaagaagaagggaagccacaaagacaaattggatgaagaagcaaagagtggcacggcaaaggtgacctccacaattgccactgatgatgatgatggaactttgggtgggagtaagagggagaaggctggcaaagaggaattggatggggacacacatatcgtcatgccaaaggaggccaccacaactgccgctagcgatgatggtactttggttgggagtaagaaggggaaggctgacaatgggaaattggatggcgacacacacagtgttatgccaaaggaggccaccgctggcacccaaaatggtggcatcctaacaggaggggaaaatcacaaagaaaaagtagataaagatgctaatgtaccaagcatacggagggagtatgctgaattgcagagtttgtatcccaaccttgcttcctttgtgaacggaattgaggcccagcatccatgtggatcaaccttcaagagagcttttgagttcattagtgatgataaggcttgcaccctggaatccaagatcaagaagcagaagatagcggaagtgagaatgcagctccgtctagcagacacgaagaaggaagtagccaatgctttgttaggattgctggactaaaacattgcggtgctgacatcctttttgtgcgatggttgtattgaagattcaagttgcagaagatttttggcttgtggagctaagggatatgacgtgacgagttgagctactgggttttctgtctctggttctcgagagctattctgtgaacggttgtttatgtgattagatggtagtatccctttaatctatgagttagcaatggagctgatgacagtttaattaactcctgtatctatgatggcatttggctttaattaggaggtgtgcctaattaagggggttctaaaaaaaaaaaaaaaaaaaaacgcgggtcttgtcccctctccccctcgtcccgcttcctgcggcccccggtttaaaaaaaaaaaaaaaaaaa

SEQ ID NO: 17336 - DNA, 117 bp, Oryza sativa
  Clone ID: PAT_MRT4530_2299C.1
aaagaaggggaattttaaattatgggaaatcacccgcaggagctagtcttgcgtgccttattaacaaggacatatgtaccaattcacaatcattaacatataaagctttttattact

SEQ ID NO: 17337 - DNA, 434 bp, Oryza sativa
  unsure (1)..(434): unsure at all n locations
  Clone ID: PAT_MRT4530_229C.1
cttacagactaaaaatccattattttntgttcaccaaaagaccatactcaggaaaccttacttcagagtgccatatagtgcatcctttacatttttttagataatggattaaaccggcctctacacccaaaaaaggatgtacacagccccaacgaaacttacaagagtacataaactcacacccttacacaaggtttaacaccatcacaagcaactagacccgagtacttaggctctagcaacagaaattcttaaaaagttttaataccaaagttttcaacccattacccactactaaggaataacccacgagagcatttannatctcccaaatcttttccctttaagtttccattccctttcattgggcgaannnaagccagaaaacttctctttctctagnaattccaagcaaaccttcttctcaccttttt

SEQ ID NO: 17338 - DNA, 246 bp, Oryza sativa
  Clone ID: PAT_MRT4530_22C.1
atggcgacgggcgggcggcacggcgcggggctcggcgcgacggcgacggcgatgcgacgacgacgtggcgcggcagtagcgcgaggcgcgaggcggcgacgcgacgggcggcagcggagggctttaccaaaatttggtaaggttgaaaataatatcaaagtgaacaggccctgtatgaggcaaaaagcccaagtcccagagtttattaacgttaattacttcgaggcgcagtcagttgaaagataa

SEQ ID NO: 17339 - DNA, 231 bp, Oryza sativa
  Clone ID: PAT_MRT4530_23000C.1
atgaagaacgctggcagcagggaggggaaaagggaagatgaaaatttgcccgtttcagaaggcaagggtggaagcagaatcatgggccaggtgctgcacaggctcacaggcacacacactgcttgctttggcttccaccagtggagacctggaggcaccgatgtgagcatagcaggctgtcgttgttggcgaaagccgcggcaagagaggatggcagaggaagaaaggtga

SEQ ID NO: 17340 - DNA, 2985 bp, Oryza sativa
  Clone ID: PAT_MRT4530_23001C.1
atggtggtgagcgcatacaagggggtgattgactctgttcttgcaaagctcagagagctgatgggaggggacatgtgtgccaacctcataggcgtgtccagcagggacattttgttcctcagggatgagctgcctgccatgagtgctctcctggagaagctggatgatgccgaagaactcgattcggaggcgaaaaattggaggaaccaagtgagggagatgacctacgacatcgaggactgcatcgatgatttcagtaacaacatcacaagcgtagacgctaagacggggttcctctacaaggcttcccaatttctcaagacttgcagggctcatcttgaggctgcctggcaaatcaaagagctcaagactcgtctacaggagataaacgagcggcgtaagaggtacaaggttggacattacatctctaatactacctcagtgacagttgaccctcgcatctcggcattctataaggagacagccggccttgtaggcattgacagcccaaagagagagctcactaaattggtgatggacgaagagacgcaattgaaggttatgtcaatagttggatttggaggcctaggcaagaccaccctagctagtcaggtgtatcgtgaagttggagtgcagttcaactgtaaggcatttgtatctgtttctcaaaaaccagacatggtaaggctactcacaagtttgctgttacaactcaagcaacatccctctcatgcttgtggggtgcaagaactcatcgacaatctcagggaatatctaatggataaaaggtacttcattgtagttgatgatttgtgggatgttccttcatggaatattattacatgtgcttttccacaaaataatcaacatagcagagttataataactacaagacacggggatgtggctaggacatgttccagtgaccatggaagcattaacaatatgaagcccctaagtgcccaaaactcaagagaactattcttcaacagaatatttgggtctaaagattattgtccctcttacttggaagaagtctcatgtaaaatactgaagaagtgtggtggcctaccgcttgcaattgttactgtagctagtattttagcttgccaacccacaagactgaaggaggaatgggagtacattcaaagttctctagccactaacaaatttgcaaggaagtccaccttggaagacatgatgcaaatcttggagctcagctacaagagtctgccacatcatctcaaagcatgctttctttatcttggtgcttacccagaggattgtgtgattagcaaggttgatcttattaaaaggtgggtagcagaaggttttgtgagtcactctcctgggcaagatgcatgggttgttgcagagagctatttcaatgagctggtgaatagaagcatgattcaacttccatatcagggctactacaatgaagtatctcattgcaaggttcatgatatgatgctagacatgattctaatgaggtgcaaggaagataatttcatcagtgtgatacaagatccacgagcggcgatagaagttcaagacaagattcgtcggctcaccattgacttgaatggtgccatgggtgacacaatggatatgaacattactaggaaagtgtcacaagttcgttctcttggtgtatttggaggatcaaagtggatacctcctttgttggagtttaagtttctgcgggtgttattccttgaattctttctacgagagatgataattgacctcactggtatcaaccaactgtcccagctgagatatttaaaggttgaatgcaaggaatgcctaatggatggtgacataccatcacaagtttccatagtgttaccaagtcaaatccgaaggctacaacatttggaaaccttggagttaccctgggtatcaaaatgcagcatcccatcaatatcaggcatcattgatttgccgcgcttgacccatctagtgttgcgacagcataaggggggattaccggatgggattagaaaattgaagtcattgcgcactttgcatggctttaatctaccagtaagctcattggaaaatattgatgccctgggtgagctcactagtctagcagatatgtcactccattgtggcaaacaagacacaaaatctactactccaggatggatgactgctctgagttgttccatcgagaaactcggtaatctcaaaggtctttatgtgaggtctaatagtcctagctgttgcgccgatgcgatgagcagctggttttcacctccatttctcaaccttgagaagcttgatctgctagattggacattctccaaagttcctagatggattggccaactccatagcctccgtgagttggcacttgggggcaagaagatactccaggaagatgttagtatgatcggcacaatgctacccttcctcacccatctaagcctacgtattgttacatgcaatatcgcggtgaaggaaagcaggatcatgatagaaggctccataggattcgctgctctccggtttttctgttttgactctaataggatgtcacacctagagtttggggtaggtgctatgccccagctcaagaggctgctattagcacttgatccatgggaatgggatgaggccacacctgttggacttaaacacctcttgtacctcgaggaaatacgagtattgacagcatcaacagctgttgcttctgcaggatctgaatcaatgaatggcaagtctgcactagtcaagggtgtgttccatgatgccgctaatgctctccagagtcgcccagcatttaccgtgctcccaaggatccgttctctctctgatcacttgcatatcaatgatgccgaaggcattctagtgatcggtgttcctcccaatgtcactacctacatgggacaagagtctgatcaccatggaatcttcttccacggtttcgtaggattgaatgtttcagggtttatgggagagaacgtgcaagagtga

SEQ ID NO: 17341 - DNA, 340 bp, Oryza sativa
  Clone ID: PAT_MRT4530_23002C.1
catctacgcctatttgtactcttcacctgacatccatccgcgcccgctaggatgagggagctgtactccgcccatttgagagctgggtagagaatgatatgcggagatcaggattaccgtctccgacatcacagggtttcattatcactagcgttgattgctctaatattcacgaaactaatcatactactcttgtactataatgatatgaggatccttatgctcgtgatttatgcggccggtaaaaccaccatcctctagaatctcaagctcactgagatcgatacaactatctccaccatcagtcataatgtcgtagctggcgagcacaagaacatta

SEQ ID NO: 17342 - DNA, 1362 bp, Oryza sativa
  Clone ID: PAT_MRT4530_23003C.1
atgtccccgcgcctccgtctccaccacctcctcctctccatcctctccgctctcccaacctgccctctcgatcactccacccccacctccgccgccgccgccgccgccgccacggcgagccatcaccacgtcgtcaccacgctcccgggctacgacggcgagctcccgttccgcctcgagacgggctacgtcgccgtcgacgaggaggagcacggcgcggagctcttctactacttcgtcgagtccgagtccggcgacccgcgccgcgacccgctcctcctctggctcaccggcggcgcccgctgcagcgtgctcagcggcgtcttcttcgaggtcggcccggtgaggctggccttggagcaccaccgcccctacgacgccggcgagctcccgcggctgaggtaccacccccacggctggaccaaggcggcgagcgtcctcttcgtcgactcgccggtcggcgccggctggagcttctcccgccaccccgacggctacctcgtcggcgacgtctccgcctcgctgcagctcaagcacttcctcgcgaagtggattagtgatcatccggagtatctcgcaaatcctttctacattggaggtgactcctacgcagggaagatcgtcccatttctcgcgcagaagatctctgaagatatcgaagctggggtgaggccaattgttgatctcaagggctatctagtaggtaatccggttacaggtgaaagcattgacttcgattcgagagtgccgtatgctcatggagttgggatcatttcagatcagttgtacgagacgataatggagcactgccaaggagaggattatagcaaccccaagaatgctatttgccgtcaagctttggataggtttaacgaactgcttggcgaaagttctggcggacatatcttgtacaactattgtatttacgatagtgatatagatggatcgatccaggaaaaacgaaagattccaccatttcctccaagagaatgtattggaagtgtcgatgagtggttaaggtgccacaatggagatctgccttactcgatggacatcaaaagcaacataaagtttcatcacaatgttacaacaaaaggttaccgtgccttggtatacagtggtgaccatgatgcaatgataccatttttgggcacacaagcctgggtgagatcactcaacttctctgttgtagatgactggagggcttggcacgtcgatggccagtcagcagggttcaccataacgtatatgaacaacatgactttcgctactgtaaagggtggtagccacacagtaccagagtttgaaccagagagaagtctcgccatgttcaagcgttggatttctaatgaaccgctttga

SEQ ID NO: 17343 - DNA, 195 bp, Oryza sativa
  Clone ID: PAT_MRT4530_23004C.1
gatccccgggctgcaggaattcggcacgagggttggaaaaaaaaacgacagtgtagagtcgagatcatcgactgggaatgagtgacggtggggttctcaatttcttgcacaaggaattgccaacatttccacaatcatataaatgttgacaattatacaacatttctacatgtatagcttgaaatacatttctac

SEQ ID NO: 17344 - DNA, 2253 bp, Oryza sativa
  Clone ID: PAT_MRT4530_23005C.1
atgtgtgacaaggatccgggcataaagctcttcgggcgggtgatcccgctggctccagaggctgaggctgctgcggcggcggacggctccgaccagccggaggcggcggcggcggcggcggcggaggttgagccggcggcgcaggatgaggatcatcacaaggaaacagaagaaagaaaatatgatgaaatgaaggttgatgtgccacaagaggaggaagataacgaaatgaaggtcgatgcaccacaagagaaaaaggataatgaagtgacggctgatgtgccagaagagaagggaaatgatgaaatgagggttgatgcatcagagtcaatagaaagcatagagccagtcagcagatctaccttggacaataaaaaagaagatcagggtcagatgaacaacgttgaagagaaagcagcatcagactcaaaagatgaaaatgaaaagacagcaaatgatgaatcaggccaggacaaagagcagaatggaaccaatgctgcagcagtaccaacgggtgaaaatcaggaagataactcttgcatctcttcaatcacatcacacaacgtgttacctgaaaatgcagcccaagttgacaagaacagcacgccggtgtattgcaacggagtcggcccagtgccgcagtactaccttggagctccttacatgtacccatggaacataggatggaacaacgttcctatgatggtgccaggtacaagcatgccagagtctgcttcccaatctgagagctgcagcaccagttcagctccatggatgaacatgaactcccccatgatgccggttgcctcgaggctttctgcaccaccatttccataccctctagtgccacctgcactatggggttgcttatccagctggccggccacggcatggaacataccgtggatcagaacgaatggcggctgcatgtctccatcgtcgtcgagcaacagcagctgttcaggcaatggctcccctctggggaagcattccagggactcctctctcccactgaaggaggacaaggaggagaaatcactgtgggttcccaagacgctccgcatcgacgatcccgacgaggcggcgaagagctccatctgggccaccctggggatcaagcctggagaccctggcatcttcaagccgttccagtccaaagagcggtacaggtcaattgatgaggggctctttgcctctcatttgaacccagaccaaatcttcttataccggtccgttcgagaaatcccgcccaacggtgtgaacaggccgccggtgcgcaacaccatcccctgcatacccgcccatgcggtcatctatacattcgcgcaggggggggggaggggcgtgcggcacaaccgcatgctcaagaaaatagcctccaaggagccccagaataccgcagagctctttgagctcgcggaccgtgtggcttgcaaggagaaggcctggacctggaactcctccggctccggcgcagccgcagccacgcccgagcttgccgctcgcaacgagcggcggaagaagcggagaaagaagaggtcggcccgctccaacgacgagggccatgtccttgccgccaaaggtgtttcgcggccccagcgcaaggggaaggctgcaggtggcaagcaaaaggacaccggcacctccagcggggggcgttcggcggacaaatggtgctccgtgcacaacacctcccaccacaacctcgccgattgccgctcggtcaagaatttggccaaacgcgtcaaaaaatacgagcaggagcggaaagagggacgccgggaggagaaagccccagcggccccgtccaacacccggcaaagtgaggccaaggaaaaggcccctatcgaggaacccgatgacgcagacctcggcttccaggagccgcaacacgtcatcaccaccatcgacggaggggcatgtgcccacgcctcccgtcgaagcttcaaggccatgaagcacgagcttctggccactgtccccacccacgaggctgcacggtggtcgcgctggtcggaggtgaagctcaccttcgaccaaatcgaccaccccgcaagcgccgccagggggggtcaactagctctgttgaagatgctgggcctgggctgccccatcaccgtccacggcgatgtcaagatcgcgctggcttgcgtggagttgcacgcgagcagccttcgaagtcgaggacggcggcggaaggcacgaggcctcaacctcacgcgtcccgaagaaacagaggacttcgagcgatga

SEQ ID NO: 17345 - DNA, 1344 bp, Oryza sativa
  Clone ID: PAT_MRT4530_23006C.1
gatcgaaagagaagaaaattgtattattggtttattttctcttgtataatttcattgtcagaatggacggtagaaactagaaatggacgcatcaatctgagccgtccgtttctcatagatgggcaggtagatagatggacactaacaaagccggccgggcacgcacgcatgctcgcgaacgcggcggcgttgtcagagtcaggccgtcgggtagaagggcgaggtggcgaggccgcaggtgccctgcggccaccacacgtccttggccaggtacacgtagccctgctcgccccagtcgctgctccacgagttcttggcgatccagtacttgtcgccgccgatgttctcgcagtagccgacgatggtgacggcgtggttcatcctcccggggtcgcaggggccccggtacacgccgcccttgtagaactggaactccggggcgctcgcgtcgatgtacaccgtcaccggctgccttgccacggcgagggccagctgccgctcgtcgttgggcggcacggcggcgaagccggacacggacgccgagtggtcggacagcagcttgcccacgtcgcagccgcccctggcgcccgcgtacgggtacctctcctccgacgtgacgccgccgcgggaggccaccaggccgagcgccgtgtcggagcgcccgccgccgcacccgttgctcccggtgtcgcagtccaccatcacctgctccgacagcgacaccagctcgccggtcttgatcctgtgcaggccctcgatggccgccaccgccgcgaacgcccagcacgacgcgcaggagccctggagcttgacgccggtgacggcgccgctggagcgccagtcgacgcagcacggcagccacgagcgcggcgggatcgggctcgggctgggcgggggagccacgaacccggtggcgttgaacccggtgaactggcgcacgaactcaccggaggcgaggtcgccgaagaggttcatgccgacgaaggagtcggtgacggtctgcggcgcgaaggcgccgacgccggaggagatctccgtctggctgcggaaggcgccgatgaagtcggtgttggccttccacacctggtaccgcttctcctgctcctccgggcacgagtagcgcttcgagtacttggacatccactgcgagaacatgaacctcatctccctgtcggacttgtcgcacgacggccgctgcagcggcggcggcggcggcggcgggttcgccgccaccagtaggagttgcaagaggaggcaagtgatggacaagacaagcccgaggtgaggcttggaagaagccattttggttagattatgttgtgatcttgtgtacgtagtgcgtgc

SEQ ID NO: 17346 - DNA, 825 bp, Oryza sativa
  Clone ID: PAT_MRT4530_23007C.1
cctcctcagatctcccacctcgaaccctagcccagatctcccccctcgaaccctagcgcatggcgatcgcggcgcgcgccctgcgccgcactccccctccacctcgccccctccctctcgcgggccttctgcgcgctctcgccggccggtcgcgccccggcccgtgcgtccgcccaggacgccgcccgcatcgtgcggctgctcggtgttgggcctggacggcgagagcgtccagggggcccgccctgtcccgcccgacagtgagccgggcgctcaccaactcgggggtgatcgggccggtgttccagccgcgtgcaggagtatcgacggctgatacgcggtagtgcgaggtccacatcgcgcaggagtggctcgacaagctcccccctccttcctacgaggagcgctacgtcctcacccgcgcgtcccggaaccgggagctcaacaagcacgcgcggctcgggtgccaggtcgtgctcacaccggagctccaggggatggtcgtcgccgttccggagcccaagccatgggacatcccgtaattgcgagccgccgctgcgatggtgatgtgagacttcctttcccccaccgtctccctcggcgggtgcgttcgtgccgcgccaacgctttttttatgttatggattcgatgaaagaataatgatttgatgggcaaaactttagtgctgatgtttaaacttttgtttactttgaatgtggtaacatgtggatgatgtaatgtggaatcccttgaaattgcctcggttcagttcaattaaaaaaaaaaaaaaaagccagagttaagattcaaaaaaaaaaaaaaaaa

SEQ ID NO: 17347 - DNA, 1174 bp, Oryza sativa
  unsure (1)..(1174): unsure at all n locations
  Clone ID: PAT_MRT4530_23008C.1
taacaccgtaattccgttccgttccgttccgttccgtcgccccccccggccggcgagggcgagggcgatgtccttcttcttccgcatggcgtcgcggctgcggccgtcgacgccggaggaggtggtccgctccatcaaggactccttccaggccctccacaccaagaacggcgccagggctctagaagaggttgagaaaaacctctcgtcattgaggcaaatgctgtctggtgatggagaagcagaaccaaatcaagaacaagtcttgcaaataacccttgagatttgcaaggaggatgtcctttccctctttgttcagaatctgccttcgcttggttggggagtacgaaaaggaatctaatcatgctggtgcattcagaagctggactgctctgtcgagcgatagtacactggaatttatagaatagctggtttagagaaactggctttactgaatgtacatgacaagagtgtgcctataagaattgcgtctttttggagttggaaatgaactagtagcaaatagaacttcaaaaggtccgcatagaggatgtcgctgtcgagcggtcactggtggcggcggcctccggcgcaaggaggcaaatgacagcgttctttgaactctacacaaggctcttaacatcacctaattatgtaacaagaagacaatcagtgaagttcctttcggaatttctgttggaggctccaaacgctcgaataatgaagcgttatattacggaagttcgtttcttaaatattatgattactctactgaaggtttttgttgccaatccgaacaagcctcgcagtatcatcgaggctttgatcgaaaatcgcagagaactgctgaagctactccaaaatcttcctacaagtaaaggcgaagatgaacttgatgaggagaggaatctaatcattcaggggattcagaagctggcctgctcatcagcatagacacttgaattaatggaatagctggtttagggaaactgcctttactgaaaatacatngacagggtgtgcctataagaattgcgtctttttggagtttgaaatgaaatagttgcaaatagatgcacaatacaaaatgagtgcaacgaattttgttctttagggacagtactaatgttgatatgtcttttttctctgctatgtgtttgcgtactgcatattc
